United States Patent Application Publication US 2011/0183924 A1 - sequence listing, part 126

SEQ ID NO: 353218 - DNA, 1583 bp, Homo sapiens
cccctctggtgacagaaagtcggcccagcagatgaggaagtggcaggcaggcaggctggccccggggacttctctctggccctgctccctccgagcgctccgccgttgcccgcctggcccctacggagtccttagccaggatggaggctgttgtgaacttgtaccaagaggtgatgaagcacgcagatccccggatccagggctaccctctgatggggtcccccttgctaatgacctccattctcctgacctacgtgtacttcgttctctcacttgggcctcgcatcatggctaatcggaagcccttccagctccgtggcttcatgattgtctacaacttctcactggtggcactctccctctacattgtctatgagttcctgatgtcgggctggctgagcacctatacctggcgctgtgaccctgtggactattccaacagccctgaggcacttaggatggttcgggtggcctggctcttcctcttctccaagttcattgagctgatggacacagtgatctttattctccgaaagaaagacgggcaggtgaccttcctacatgtcttccatcactctgtgcttccctggagctggtggtggggggtaaagattgccccgggaggaatgggctctttccatgccatgataaactcttccgtgcatgtcataatgtacctgtactacggattatctgcctttggccctgtggcacaaccctacctttggtggaaaaagcacatgacagccattcagctgatccagtttgtcctggtctcactgcacatctcccagtactactttatgtccagctgtaactaccagtacccagtcattattcacctcatctggatgtatggcaccatcttcttcatgctgttctccaacttctggtatcactcttataccaagggcaagcggctgccccgtgcacttcagcaaaatggagctccaggtattgccaaggtcaaggccaactgagaagcatggcctagataggcgcccacctaagtgcctcaggactgcaccttagggcagtgtccgtcagtgccctctccacctacacctgtgaccaaggcttatgtggtcaggactgagcaggggactggccctcccctccccacagctgctctacagggaccacggctttggttcctcacccacttcccccgggcagctccagggatgtggcctcattgctgtctgccactccagagctgggggctaaaagggctgtacagttatttccccctccctgccttaaaacttgggagaggagcactcagggctggccccacaaagggtctcgtggcctttttcctcacacagaagaggtcagcaataatgtcactgtggacccagtctcactcctccaccccacacactgaagcagtagcttctgggccaaaggtcagggtgggcgggggcctgggaatacagcctgtggaggctgcttactcaacttgtgtcttaattaaaagtgacagaggaaaccacggaggctgtgtgtatacgtatgtgaacagaggaggtgggggaacacaacacgcttagccctgtccacaaacaagagggatggatggt

SEQ ID NO: 353219 - DNA, 1423 bp, Homo sapiens
ccgcaggcttggggcctgaccacggtgggcctaaagaagccgggcctcctggagagtccttagccaggatggaggctgttgtgaacttgtaccaagaggtgatgaagcacgcagatccccggatccagggctaccctctgatggggtcccccttgctaatgacctccattctcctgacctacgtgtacttcgttctctcacttgggcctcgcatcatggctaatcggaagcccttccagctccgtggcttcatgattgtctacaacttctcactggtggcactctccctctacattgtctatgagttcctgatgtcgggctggctgagcacctatacctggcgctgtgaccctgtggactattccaacagccctgaggcacttaggatggttcgggtggcctggctcttcctcttctccaagttcattgagctgatggacacagtgatctttattctccgaaagaaagacgggcaggtgaccttcctacatgtcttccatcactctgtgcttccctggagctggtggtggggggtaaagattgccccgggaggaatgggctctttccatgccatgataaactcttccgtgcatgtcataatgtacctgtactacggattatctgcctttggccctgtggcacaaccctacctttggtggaaaaagcacatgacagccattcagctgatccagtttgtcctggtctcactgcacatctcccagtactactttatgtccagctgtaactaccagtacccagtcattattcacctcatctggatgtatggcaccatcttcttcatgctgttctccaacttctggtatcactcttataccaagggcaagcggctgccccgtgcacttcagcaaaatggagctccaggtattgccaaggtcaaggccaactgagaagcatggcctagataggcgcccacctaagtgcctcaggactgcaccttagggcagtgtccgtcagtgccctctccacctacacctgtgaccaaggcttatgtggtcaggactgagcaggggactggccctcccctccccacagctgctctacagggaccacggctttggttcctcacccacttcccccgggcagctccagggatgtggcctcattgctgtctgccactccagagctgggggctaaaagggctgtacagttatttccccctccctgccttaaaacttgggagaggagcactcagggctggccccacaaagggtctcgtggcctttttcctcacacagaagaggtcagcaataatgtcactgtggacccagtctcactcctccaccccacacactgaagcagtagcttctgggccaaaggtcagggtgggcgggggcctgggaatacagcctgtggaggctgcttactcaacttgtgtcttaattaaaagtgacagaggaaacca

SEQ ID NO: 353220 - DNA, 1672 bp, Homo sapiens
cccctctggtgacagaaagtcggcccagcagatgaggaagtggcaggcaggcaggctggccccggggacttctctctggccctgctccctccgagcgctccgccgttgcccgcctggcccctacggagtccttagccaggatggaggctgttgtgaacttgtaccaagaggtgatgaagcacgcagatccccggatccagggctaccctctgatggggtcccccttgctaatgacctccattctcctgacctacgtgtacttcgttctctcacttgggcctcgcatcatggctaatcggaagcccttccagctccgtggcttcatgattgtctacaacttctcactggtggcactctccctctacattgtctatgaggtgggcccctgggatgccgggctttaatttctgtcagcaggataaggagcaggccatagagccagagcatggcatttctcctttccagagaggttcagatccatgtcctcagctagcgaaggggagggatggctgggaagggagaactctggtggtctaatccacatcccttcccagttcctgatgtcgggctggctgagcacctatacctggcgctgtgaccctgtggactattccaacagccctgaggcacttaggatggttcgggtggcctggctcttcctcttctccaagttcattgagctgatggacacagtgatctttattctccgaaagaaagacgggcaggtgaccttcctacatgtcttccatcactctgtgcttccctggagctggtggtggggggtaaagattgccccgggaggaatgggctctttccatgccatgataaactcttccgtgcatgtcataatgtacctgtactacggattatctgcctttggccctgtggcacaaccctacctttggtggaaaaagcacatgacagccattcagctgatccagtttgtcctggtctcactgcacatctcccagtactactttatgtccagctgtaactaccagtacccagtcattattcacctcatctggatgtatggcaccatcttcttcatgctgttctccaacttctggtatcactcttataccaagggcaagcggctgccccgtgcacttcagcaaaatggagctccaggtattgccaaggtcaaggccaactgagaagcatggcctagataggcgcccacctaagtgcctcaggactgcaccttagggcagtgtccgtcagtgccctctccacctacacctgtgaccaaggcttatgtggtcaggactgagcaggggactggccctcccctccccacagctgctctacagggaccacggctttggttcctcacccacttcccccgggcagctccagggatgtggcctcattgctgtctgccactccagagctgggggctaaaagggctgtacagttatttccccctccctgccttaaaacttgggagaggagcactcagggctggccccacaaagggtctcgtggcctttttcctcacacagaagaggtcagcaataatgtcactgtggacccagtctcactcctccaccccacacactgaagcagtagcttctgggccaaaggtcagggtgggcgggggcctgggaatacagcctgtggaggctgcttactcaacttgtgtcttaattaaaagtgacagaggaaacca

SEQ ID NO: 353221 - DNA, 1778 bp, Homo sapiens
ggtcagaggaggtttctggctcagaatctaggaccttagctcatcaggctggtcccacgtgggtgggtgggtggcgagtctggggctttacttggctttcccaatcctggtgggtcctgctcccccaggcactgacctgtggcccggacccaccctccaccccctgcacagtacagcaggggcgggcagagggcggggctgctgccagatctagtcagacaggtggagccgccggggcaggagtctcaaagagccaggctccaggagaggaagggctctgcgagaggagagaggagagcgctggagaggagaggctggagagtccttagccaggatggaggctgttgtgaacttgtaccaagaggtgatgaagcacgcagatccccggatccagggctaccctctgatggggtcccccttgctaatgacctccattctcctgacctacgtgtacttcgttctctcacttgggcctcgcatcatggctaatcggaagcccttccagctccgtggcttcatgattgtctacaacttctcactggtggcactctccctctacattgtctatgagagaggttcagatccatgtcctcagctagcgaaggggagggatggctgggaagggagaactctggtggtctaatccacatcccttcccagttcctgatgtcgggctggctgagcacctatacctggcgctgtgaccctgtggactattccaacagccctgaggcacttaggatggttcgggtggcctggctcttcctcttctccaagttcattgagctgatggacacagtgatctttattctccgaaagaaagacgggcaggtgaccttcctacatgtcttccatcactctgtgcttccctggagctggtggtggggggtaaagattgccccgggaggaatgggctctttccatgccatgataaactcttccgtgcatgtcataatgtacctgtactacggattatctgcctttggccctgtggcacaaccctacctttggtggaaaaagcacatgacagccattcagctgatccagtttgtcctggtctcactgcacatctcccagtactactttatgtccagctgtaactaccagtacccagtcattattcacctcatctggatgtatggcaccatcttcttcatgctgttctccaacttctggtatcactcttataccaagggcaagcggctgccccgtgcacttcagcaaaatggagctccaggtattgccaaggtcaaggccaactgagaagcatggcctagataggcgcccacctaagtgcctcaggactgcaccttagggcagtgtccgtcagtgccctctccacctacacctgtgaccaaggcttatgtggtcaggactgagcaggggactggccctcccctccccacagctgctctacagggaccacggctttggttcctcacccacttcccccgggcagctccagggatgtggcctcattgctgtctgccactccagagctgggggctaaaagggctgtacagttatttccccctccctgccttaaaacttgggagaggagcactcagggctggccccacaaagggtctcgtggcctttttcctcacacagaagaggtcagcaataatgtcactgtggacccagtctcactcctccaccccacacactgaagcagtagcttctgggccaaaggtcagggtgggcgggggcctgggaatacagcctgtggaggctgcttactcaacttgtgtcttaattaaaagtgacagaggaaacca

SEQ ID NO: 353222 - DNA, 1334 bp, Homo sapiens
cccctctggtgacagaaagtcggcccagcagatgaggaagtggcaggcaggcaggctggccccggggacttctctctggccctgctccctccgagcgctccgccgttgcccgcctggcccctacggagtccttagccaggatggaggctgttgtgaacttgtaccaagaggtgatgaagcacgcagatccccggatccagggctaccctctgatggggtcccccttgctaatgacctccattctcctgacctacgtgtacttcgttctctcacttgggcctcgcatcatggctaatcggaagcccttccagctccgtggcttcatgattgtctacaacttctcactggtggcactctccctctacattgtctatgagttcctgatgtcgggctggctgagcacctatacctggcgctgtgaccctgtggactattccaacagccctgaggcacttaggatggttcgggtggcctggctcttcctcttctccaagttcattgagctgatggacacagtgatctttattctccgaaagaaagacgggcaggtgaccttcctacatgtcttccatcactctgtgcttccctggagctggtggtggggggtaaagattgccccgggaggaatgggctctttccatgccatgataaactcttccgtgcatgtcataatgtacctgtactacggattatctgcctttggccctgtggcacaaccctacctttggtggaaaaagcacatgacagccattcagctgatccagtttgtcctggtctcactgcacatctcccagtactactttatgtccagctgtaactaccagtacccagtcattattcacctcatctggatgtatggcaccatcttcttcatgctgttctccaacttctggtatcactcttataccaagggcaagcggctgccccgtgcacttcagcaaaatggagctccaggtattgccaaggtcaaggccaactgagaagcatggcctagataggcgcccacctaagtgcctcaggactgcaccttagggcagtgtccgtcagtgccctctccacctacacctgtgaccaaggcttatgtggtcaggactgagcaggggactggccctcccctccccacagctgctctacagggaccacggctttggttcctcactcacacagaagaggtcagcaataatgtcactgtggacccagtctcactcctccaccccacacactgaagcagtagcttctgggccaaaggtcagggtgggcgggggcctgggaatacagcctgtggaggctgcttactcaacttgtgtcttaattaaaagtgacagaggaaacca

SEQ ID NO: 353223 - DNA, 1762 bp, Homo sapiens
cccctctggtgacagaaagtcggcccagcagatgaggaagtggcaggcaggcaggctggccccggggacttctctctggccctgctccctccgagcgctccgccgttgcccgcctggcccctacggagtccttagccaggatggaggctgttgtgaacttgtaccaagaggtgatgaagcacgcagatccccggatccagggctaccctctgatggggtcccccttgctaatgacctccattctcctgacctacgtgtacttcgttctctcacttgggcctcgcatcatggctaatcggaagcccttccagctccgtggcttcatgattgtctacaacttctcactggtggcactctccctctacattgtctatgaggtgggcccctgggatgccgggctttaatttctgtcagcaggataaggagcaggccatagagccagagcatggcatttctcctttccagagaggttcagatccatgtcctcagctagcgaaggggagggatggctgggaagggagaactctggtggtctaatccacatcccttcccagttcctgatgtcgggctggctgagcacctatacctggcgctgtgaccctgtggactattccaacagccctgaggcacttaggatggttcgggtggcctggctcttcctcttctccaagttcattgagctgatggacacagtgagtagttatatgagatgtgagaacttgaggggagaatgaggtggagaagcccaggttctgaatccccttccctcactcttctctcaggtgatctttattctccgaaagaaagacgggcaggtgaccttcctacatgtcttccatcactctgtgcttccctggagctggtggtggggggtaaagattgccccgggaggaatgggctctttccatgccatgataaactcttccgtgcatgtcataatgtacctgtactacggattatctgcctttggccctgtggcacaaccctacctttggtggaaaaagcacatgacagccattcagctgatccagtttgtcctggtctcactgcacatctcccagtactactttatgtccagctgtaactaccagtacccagtcattattcacctcatctggatgtatggcaccatcttcttcatgctgttctccaacttctggtatcactcttataccaagggcaagcggctgccccgtgcacttcagcaaaatggagctccaggtattgccaaggtcaaggccaactgagaagcatggcctagataggcgcccacctaagtgcctcaggactgcaccttagggcagtgtccgtcagtgccctctccacctacacctgtgaccaaggcttatgtggtcaggactgagcaggggactggccctcccctccccacagctgctctacagggaccacggctttggttcctcacccacttcccccgggcagctccagggatgtggcctcattgctgtctgccactccagagctgggggctaaaagggctgtacagttatttccccctccctgccttaaaacttgggagaggagcactcagggctggccccacaaagggtctcgtggcctttttcctcacacagaagaggtcagcaataatgtcactgtggacccagtctcactcctccaccccacacactgaagcagtagcttctgggccaaaggtcagggtgggcgggggcctgggaatacagcctgtggaggctgcttactcaacttgtgtcttaattaaaagtgacagaggaaacca

SEQ ID NO: 353224 - DNA, 1291 bp, Homo sapiens
  misc_feature (1017)..(1017): n is a, c, g, or t
  misc_feature (1019)..(1020): n is a, c, g, or t
  misc_feature (1023)..(1023): n is a, c, g, or t
  misc_feature (1029)..(1029): n is a, c, g, or t
  misc_feature (1104)..(1104): n is a, c, g, or t
cccctctggtgacagaaagtcggcccagcagatgaggaagtggcaggcaggcaggctggccccggggacttctctctggccctgctccctccgagcgctccgccgttgcccgcctggcccctacggagtccttagccaggatggaggctgttgtgaacttgtaccaagaggtgatgaagcacgcagatccccggatccagggctaccctctgatggggtcccccttgctaatgacctccattctcctgacctacgtgtacttcgttctctcacttgggcctcgcatcatggctaatcggaagcccttccagctccgtggcttcatgattgtctacaacttctcactggtggcactctccctctacattgtctatgagttcctgatgtcgggctggctgagcacctatacctggcgctgtgaccctgtggactattccaacagccctgaggcacttaggatggttcgggtggcctggctcttcctcttctccaagttcattgagctgatggacacagtgatctttattctccgaaagaaagacgggcaggtgaccttcctacatgtcttccatcactctgtgcttccctggagctggtggtggggggtaaagattgccccgggaggaatgggctctttccatgccatgataaactcttccgtgcatgtcataatgtacctgtactacggattatctgcctttggccctgtggcacaaccctacctttggtggaaaaagcacatgacagccattcagctgatccagtttgtcctggtctcactgcacatctcccagtactactttatgtccagctgtaactaccagtacccagtcattattcacctcatctggatgtatggcaccatcttcttcatgctgttctccaacttctggtaattgagctgatggacacagtgatctttattctccgaaagaaagacgggcaggtgaccttcctacatgtcttccatcactctgtgcttccctggagctggtggtggggggtaaagattggccncnngangaatgngctctttccatgccatgataaactcttccgtgcatgtcataatgtacctgtactacggattatctgcctttggcnctgttggcccagccttacctttggtggcacaaacgccatgacagcgattcaggtgatccagtttggtcctggtcctccactgcccctttacggcagtggtcccgtccgttgccttctctcactaaaacctggtgaaccaggcttatggggtccggacctgagccgggagcttggccttcccttacca

SEQ ID NO: 353225 - DNA, 685 bp, Homo sapiens
cccctctggtgacagaaagtcggcccagcagatgaggaagtggcaggcaggcaggctggccccggggacttctctctggccctgctccctccgagcgctccgccgttgcccgcctggcccctacggagtccttagccaggatggaggctgttgtgaacttgtaccaagaggtgatgaagcacgcagatccccggatccagggctaccctctgatggggtcccccttgctaatgacctccattctcctgacctacgtgtacttcgttctctcacttgggcctcgcatcatggctaatcggaagcccttccagctccgtggcttcatgattgtctacaacttctcactggtggcactctccctctacattgtctatgagtggcctcattgctgtctgccactccagagctgggggctaaaagggctgtacagttatttccccctccctgccttaaaacttgggagaggagcactcagggctggccccacaaagggtctcgtggcctttttcctcacacagaagaggtcagcaataatgtcactgtggacccagtctcactcctccaccccacacactgaagcagtagcttctgggccaaaggtcagggtgggcgggggcctgggaatacagcctgtggaggctgcttactcaacttgtgtcttaattaaaagtgacagaggaaacca

SEQ ID NO: 353226 - DNA, 634 bp, Homo sapiens
cccctctggtgacagaaagtcggcccagcagatgaggaagtggcaggcaggcaggctggccccggggacttctctctggccctgctccctccgagcgctccgccgttgcccgcctggcccctacggagtccttagccaggatggaggctgttgtgaacttgtaccaagaggtgatgaagcacgcagatccccggatccagggctaccctctgatggggtcccccttgctaatgacctccattctcctgacctacgtgtacttcgttctctcacttgggcctcgcatcatggctaatcggaagcccttccagctccgtggcttcatgattgtctacaacttctcactggtggcactctgggggctaaaagggctgtacagttatttccccctccctgccttaaaacttgggagaggagcactcagggctggccccacaaagggtctcgtggcctttttcctcacacagaagaggtcagcaataatgtcactgtggacccagtctcactcctccaccccacacactgaagcagtagcttctgggccaaaggtcagggtgggcgggggcctgggaatacagcctgtggaggctgcttactcaacttgtgtcttaattaaaagtgacagaggaaacca

SEQ ID NO: 353227 - DNA, 1186 bp, Homo sapiens
ttgctatctttatttctttatttgcactgggaaataacatctttgtctactatttctagcatctgagatccaggtcagttgtgattaatttttctctgtattatgcaatgtattttcctgcttttcatgcctctctactggatgctagacattgtacattttaccttcttgggcactgaatatttttgtagtcccagaggtacttttgagctttgtcctaggatgcagtgtgatcctttcaggtcctgctgtatagctgtgtcaggtggcagtgcccatctagggtttctcacttgtgttttctacccagtgccccataaatcatgaggttttccagctagggtggtgggaacaggccctaccctaggtcctgtgtcagcaccactgttccttctaatcttctcacatggctctttctctggcctgaggtggttccttacacacatgcgctgatcagtagggctgtgctgcctagttgagggagctccctctggcccccgacttagatctgtgtgtctctctccagtactgtgaccgcgagttccggccaccttagtctccctggatccctggcattgttttcctactgcagggaggctggcaggctccacctgggttccccccgcatgcacactgcagctgggaccctcctcggagcatgagctggacaatcacagggctcccctcctgagtttgccctctcaagaatcactatccttcactccctggtatttggtggcttgcaaaccgttgtttcacatattttgtccattgtttgcttgtttcatgcaggagggaaaagtccagtacctgtttctccatcttagccatatgagactcttaaattattatttttttcctttcctagcaccagaaagtttgatgcaggcattggaagacttagattatctggcagcactggataatgatggaaatctttctgaatttggaatcatcatgtcagagtttcctcttgatccacaactctcgaagtctatcttagcgtcctgtgaatttgactgtgtagatgaagtgctaacaatcgcggccatggtaacaggtatccttaatgactattccttttctttttttgcaaatctgcactaggtatagatttagatcggatccatttgaaattatattttgaggagcacagagcagagatagtgatcaactcatttaacct

SEQ ID NO: 353228 - DNA, 3074 bp, Homo sapiens
caggcagagagcacgaggcccagtgcagaatcattttctgaaccagccaggaaataccggaacccaccaaactttaaacaccagcctaaattattcctgttcttttaagcaggcagcagaaatgacagaaacccgttaacagaaaaaaaaaaaataatgcttttcatttgaactcctgtgcattttctttttaacttatatgtgttcctaattttccttactctttttgtttgtttgtttcttagtgtggtttattgacaatcatttacaatgccgaagagtgctgtagtgagccagcacagtgggtaacacagcaacggagaacagatgcaggtttgaggaatttaacttgctaaaaccttgaactgaagtcttagagattggaacatacgggtttgtataaataggcttttaagccctgtttgcaatgggttactgataggagaaacttgcttgtggaatgtcagctgcgtgagctcactgtcagacaagatggaagaagaagggctggagtgtccaaactcttcctctgaaaaacgctattttcctgaatccctggattccagcgatggggatgaggaagaggttttggcctgtgaggatttggaacttaacccctttgatggattgccatattcatcacgttattataaacttctgaaagaaagagaagatcttcctatatggaaagaaaaatactcctttatggagaacctgcttcaaaatcaaatcgtgattgtttcaggagatgctaaatgtggtaagagcgctcaggttcctcagtggtgtgctgaatattgtctttccatccactaccagcacgggggcgtgatatgcacacaggtccacaagcagactgtggtccagctcgccctgcgggtggcggatgaaatggatgttaacattggtcatgaggttggctacgtgatccctttcgagaactgctgtaccaacgaaacaatcctgaggtattgtactgatgatatgctgcaaagagaaatgatgtccaatccttttttgggtagctatggggtcatcatcttagatgatattcatgaaagaagcattgcaactgatgtgttacttggacttcttaaagatgttttactagcaagaccagaactgaagctcataattaactcctcacctcacctgatcagcaaactcaattcttattatggaaacgtgcctgtcatagaagtgaaaaataaacaccctgtggaggttgtgtaccttagtgaggctcaaaaggattcttttgagtctattttacgccttatctttgaaattcaccactcgggtgagaaaggtgacattgtagtctttctggcctgtgaacaagatattgagaaagtctgtgaaactgtctatcaaggatctaacctaaacccagatcttggagaactggtggttgttcctttgtatccaaaagagaaatgttcattgttcaagccactcgatgaaacagaaaaaagatgccaagtttatcaaagaagagtggtgttaactactagctctggagagtttttgatctggagcaactcagtcagatttgttatcgatgtgggtgtggaaagaagaaaggtgtacaacccgagaataagagcaaactcgctcgtcatgcagcccatcagccagagccaggcagagatacgcaagcagattcttggctcatcttcttcaggaaaatttttctgcctgtacactgaagaatttgcctccaaagacatgacgccactgaagccagcagaaatgcaggaagccaacctaacaagcatggtgctttttatgaagaggatagacattgcgggcctaggccactgtgacttcatgaacagaccagcaccagaaagtttgatgcaggcattggaagacttagattatctggcagcactggataatgatggaaatctttctgaatttggaatcatcatgtcagagtttcctcttgatccacaactctcgaagtctatcttagcgtcctgtgaatttgactgtgtagatgaagtgctaacaatcgcggccatggtaacagctccaaattgcttttcacatgtgccacatggagctgaagaggctgccttgacttgttggaagacatttttacatcccgaaggagatcactttaccctcatcagcatttacaaggcttaccaagacacaactctgaattctagcagtgagtactgtgtggaaaagtggtgtcgtgattacttcctcaactgttcagcactcagaatggcagatgttattcgagctgaactcttagaaattatcaagcgaatcgagcttccctatgcagaacctgcttttggctccaaggaaaacactctaaacataaagaaagctcttctgtccggttactttatgcagattgctcgggatgttgatggatcaggtaactacttaatgctgacacataagcaggttgctcagctgcatcccctgtctggttactcaatcaccaagaagatgccagagtgggtcctcttccataaattcagcatttctgagaacaactacatcaggattacctcagaaatctctcctgaactatttatgcagctggtaccacaatactatttcagtaatctgcctcctagtgaaagtaaggacattctacagcaagtagtggatcacctatcccctgtgtcaacaatgaataaggaacagcaaatgtgtgagacgtgccctgaaactgaacagagatgcactctccagtgactccccagcaaacacaaggtgcagcagggtcccaaaggtagctggatggctgaactgctggatatgggagatacatgacgcgaagacggatttcacatccacaggacggtcttgaagaaaataacactgtgtatattattttaaaataaaaaatagaagtttttattgagttctttaaattacgactccatgcttttcttcttcttggaaaagtttttaaatcaaccactcataatttgaccaaaattttaaaaaactggtattttgtaaatgtgtcagagacacatgggacagaaccctactttttgtagaggaacttaatctgaataaagtctgagtttttcagtaaa

SEQ ID NO: 353229 - DNA, 3375 bp, Homo sapiens
actgagcgagggtagcggccaggtcaccggctgaggacactgctcctgaagcccggtcaggcggtcgcgccctccctggcggcccccgcggcccgcaggacctgtgccccgacgtcgccgacccgcggtccccgctgtcgccgacccgcggcgtccgtcgggcgagtgggcctgcccgcgggtaaggcgccggccctgggccgccctcccgggaatcgggagccgccgctgcagcttcgtagatcagaagtcggttgtcggtctcactggactacaatcaaggtgccagcaggactgtgttcgtttctggaaattctagaagatgatctgtttccttgcctcttctagctcctagaggtcactcacatcattcttcggccgtggccccttcctccaccttcaaagcccacaacattgcatctctccgaccttcttccatagtcatattttcctctgactgtggctaggagggtcctctgattgttaagactcatgtaattagattgggctcaccaggatcgtccaggataatcttccaatctcaagtgtggtttattgacaatcatttacaatgccgaagagtgctgtagtgagccagcacagtgggtaacacagcaacggagaacagatgcaggtttgaggaatttaacttgctaaaaccttgaactgaagtcttagagattggaacatacgggtttgtataaataggcttttaagccctgtttgcaatgggttactgataggagaaacttgcttgtggaatgtcagctgcgtgagctcactgtcagacaagatggaagaagaagggctggagtgtccaaactcttcctctgaaaaacgctattttcctgaatccctggattccagcgatggggatgaggaagaggttttggcctgtgaggatttggaacttaacccctttgatggattgccatattcatcacgttattataaacttctgaaagaaagagaagatcttcctatatggaaagaaaaatactcctttatggagaacctgcttcaaaatcaaatcgtgattgtttcaggagatgctaaatgtggtaagagcgctcaggttcctcagtggtgtgctgaatattgtctttccatccactaccagcacgggggcgtgatatgcacacaggtccacaagcagactgtggtccagctcgccctgcgggtggcggatgaaatggatgttaacattggtcatgaggttggctacgtgatccctttcgagaactgctgtaccaacgaaacaatcctgaggtattgtactgatgatatgctgcaaagagaaatgatgtccaatccttttttgggtagctatggggtcatcatcttagatgatattcatgaaagaagcattgcaactgatgtgttacttggacttcttaaagatgttttactagcaagaccagaactgaagctcataattaactcctcacctcacctgatcagcaaactcaattcttattatggaaacgtgcctgtcatagaagtgaaaaataaacaccctgtggaggttgtgtaccttagtgaggctcaaaaggattcttttgagtctattttacgccttatctttgaaattcaccactcgggtgagaaaggtgacattgtagtctttctggcctgtgaacaagatattgagaaagtctgtgaaactgtctatcaaggatctaacctaaacccagatcttggagaactggtggttgttcctttgtatccaaaagagaaatgttcattgttcaagccactcgatgaaacagaaaaaagatgccaagtttatcaaagaagagtggtgttaactactagctctggagagtttttgatctggagcaactcagtcagatttgttatcgatgtgggtgtggaaagaagaaaggtgtacaacccgagaataagagcaaactcgctcgtcatgcagcccatcagccagagccaggcagagatacgcaagcagattcttggctcatcttcttcaggaaaatttttctgcctgtacactgaagaatttgcctccaaagacatgacgccactgaagccagcagaaatgcaggaagccaacctaacaagcatggtgctttttatgaagaggatagacattgcgggcctaggccactgtgacttcatgaacagaccagcaccagaaagtttgatgcaggcattggaagacttagattatctggcagcactggataatgatggaaatctttctgaatttggaatcatcatgtcagagtttcctcttgatccacaactctcgaagtctatcttagcgtcctgtgaatttgactgtgtagatgaagtgctaacaatcgcggccatggtaacagctccaaattgcttttcacatgtgccacatggagctgaagaggctgccttgacttgttggaagacatttttacatcccgaaggagatcactttaccctcatcagcatttacaaggcttaccaagacacaactctgaattctagcagtgagtactgtgtggaaaagtggtgtcgtgattacttcctcaactgttcagcactcagaatggcagatgttattcgagctgaactcttagaaattatcaagcgaatcgagcttccctatgcagaacctgcttttggctccaaggaaaacactctaaacataaagaaagctcttctgtccggttactttatgcagattgctcgggatgttgatggatcaggtaactacttaatgctgacacataagcaggttgctcagctgcatcccctgtctggttactcaatcaccaagaagatgccagagtgggtcctcttccataaattcagcatttctgagaacaactacatcaggattacctcagaaatctctcctgaactatttatgcagctggtaccacaatactatttcagtaatctgcctcctagtgaaagtaaggacattctacagcaagtagtggatcacctatcccctgtgtcaacaatgaataaggaacagcaaatgtgtgagacgtgccctgaaactgaacagagatgcactctccagtgactccccagcaaacacaaggtgcagcagggtcccaaaggtagctggatggctgaactgctggatatgggagatacatgacgcgaagacggatttcacatccacaggacggtcttgaagaaaataacactgtgtatattattttaaaataaaaaatagaagtttttattgagttctttaaattacgactccatgcttttcttcttcttggaaaagtttttaaatcaaccactcataatttgaccaaaattttaaaaaactggtattttgtaaatgtgtcagagacacatgggacagaaccctactttttgtagaggaacttaatctgaataaagtctgagtttttcagtaaa

SEQ ID NO: 353230 - DNA, 2099 bp, Homo sapiens
ttgctatctttatttctttatttgcactgggaaataacatctttgtctactatttctagcatctgagatccaggtcagttgtgattaatttttctctgtattatgcaatgtattttcctgcttttcatgcctctctactggatgctagacattgtacattttaccttcttgggcactgaatatttttgtagtcccagaggtacttttgagctttgtcctaggatgcagtgtgatcctttcaggtcctgctgtatagctgtgtcaggtggcagtgcccatctagggtttctcacttgtgttttctacccagtgccccataaatcatgaggttttccagctagggtggtgggaacaggccctaccctaggtcctgtgtcagcaccactgttccttctaatcttctcacatggctctttctctggcctgaggtggttccttacacacatgcgctgatcagtagggctgtgctgcctagttgagggagctccctctggcccccgacttagatctgtgtgtctctctccagtactgtgaccgcgagttccggccaccttagtctccctggatccctggcattgttttcctactgcagggaggctggcaggctccacctgggttccccccgcatgcacactgcagctgggaccctcctcggagcatgagctggacaatcacagggctcccctcctgagtttgccctctcaagaatcactatccttcactccctggtatttggtggcttgcaaaccgttgtttcacatattttgtccattgtttgcttgtttcatgcaggagggaaaagtccagtacctgtttctccatcttagccatatgagactcttaaattattatttttttcctttcctagcaccagaaagtttgatgcaggcattggaagacttagattatctggcagcactggataatgatggaaatctttctgaatttggaatcatcatgtcagagtttcctcttgatccacaactctcgaagtctatcttagcgtcctgtgaatttgactgtgtagatgaagtgctaacaatcgcggccatggtaacagctccaaattgcttttcacatgtgccacatggagctgaagaggctgccttgacttgttggaagacatttttacatcccgaaggagatcactttaccctcatcagcatttacaaggcttaccaagacacaactctgaattctagcagtgagtactgtgtggaaaagtggtgtcgtgattacttcctcaactgttcagcactcagaatggcagatgttattcgagctgaactcttagaaattatcaagcgaatcgagcttccctatgcagaacctgcttttggctccaaggaaaacactctaaacataaagaaagctcttctgtccggttactttatgcagattgctcgggatgttgatggatcaggtaactacttaatgctgacacataagcaggttgctcagctgcatcccctgtctggttactcaatcaccaagaagatgccagagtgggtcctcttccataaattcagcatttctgagaacaactacatcaggattacctcagaaatctctcctgaactatttatgcagctggtaccacaatactatttcagtaatctgcctcctagtgaaagtaaggacattctacagcaagtagtggatcacctatcccctgtgtcaacaatgaataaggaacagcaaatgtgtgagacgtgccctgaaactgaacagagatgcactctccagtgactccccagcaaacacaaggtgcagcagggtcccaaaggtagctggatggctgaactgctggatatgggagatacatgacgcgaagacggatttcacatccacaggacggtcttgaagaaaataacactgtgtatattattttaaaataaaaaatagaagtttttattgagttctttaaattacgactccatgcttttcttcttcttggaaaagtttttaaatcaaccactcataatttgaccaaaattttaaaaaactggtattttgtaaatgtgtcagagacacatgggacagaaccctactttttgtagaggaacttaatctgaataaagtctgagtttttcagtaaa

SEQ ID NO: 353231 - DNA, 2820 bp, Homo sapiens
actgagcgagggtagcggccaggtcaccggctgaggacactgctcctgaagcccggtcaggcggtcgcgccctccctggcggcccccgcggcccgcaggacctgtgccccgacgtcgccgacccgcggtccccgctgtcgccgacccgcggcgtccgtcgggcgagtgggcctgcccgcgggtaaggcgccggccctgggccgccctcccgggaatcgggagccgccgctgcagtgtggtttattgacaatcatttacaatgccgaagagtgctgtagtgagccagcacagtgggtaacacagcaacggagaacagatgcaggtttgaggaatttaacttgctaaaaccttgaactgaagtcttagagattggaacatacgggtttgtataaataggcttttaagccctgtttgcaatgggttactgataggagaaacttgcttgtggaatgtcagctgcgtgagctcactgtcagacaagatggaagaagaagggctggagtgtccaaactcttcctctgaaaaacgctattttcctgaatccctggattccagcgatggggatgaggaagaggttttggcctgtgaggatttggaacttaacccctttgatggattgccatattcatcacgttattataaacttctgaaagaaagagaagatcttcctatatggaaagaaaaatactcctttatggagaacctgcttcaaaatcaaatcgtgattgtttcaggagatgctaaatgtggtaagagcgctcaggttcctcagtggtgtgctgaatattgtctttccatccactaccagcacgggggcgtgatatgcacacaggtccacaagcagactgtggtccagctcgccctgcgggtggcggatgaaatggatgttaacattggtcatgaggttggctacgtgatccctttcgagaactgctgtaccaacgaaacaatcctgaggtattgtactgatgatatgctgcaaagagaaatgatgtccaatccttttttgggtagctatggggtcatcatcttagatgatattcatgaaagaagcattgcaactgatgtgttacttggacttcttaaagatgttttactagcaagaccagaactgaagctcataattaactcctcacctcacctgatcagcaaactcaattcttattatggaaacgtgcctgtcatagaagtgaaaaataaacaccctgtggaggttgtgtaccttagtgaggctcaaaaggattcttttgagtctattttacgccttatctttgaaattcaccactcgggtgagaaaggtgacattgtagtctttctggcctgtgaacaagtgtacaacccgagaataagagcaaactcgctcgtcatgcagcccatcagccagagccaggcagagatacgcaagcagattcttggctcatcttcttcaggaaaatttttctgcctgtacactgaagaatttgcctccaaagacatgacgccactgaagccagcagaaatgcaggaagccaacctaacaagcatggtgctttttatgaagaggatagacattgcgggcctaggccactgtgacttcatgaacagaccagcaccagaaagtttgatgcaggcattggaagacttagattatctggcagcactggataatgatggaaatctttctgaatttggaatcatcatgtcagagtttcctcttgatccacaactctcgaagtctatcttagcgtcctgtgaatttgactgtgtagatgaagtgctaacaatcgcggccatggtaacagctccaaattgcttttcacatgtgccacatggagctgaagaggctgccttgacttgttggaagacatttttacatcccgaaggagatcactttaccctcatcagcatttacaaggcttaccaagacacaactctgaattctagcagtgagtactgtgtggaaaagtggtgtcgtgattacttcctcaactgttcagcactcagaatggcagatgttattcgagctgaactcttagaaattatcaagcgaatcgagcttccctatgcagaacctgcttttggctccaaggaaaacactctaaacataaagaaagctcttctgtccggttactttatgcagattgctcgggatgttgatggatcaggtaactacttaatgctgacacataagcaggttgctcagctgcatcccctgtctggttactcaatcaccaagaagatgccagagtgggtcctcttccataaattcagcatttctgagaacaactacatcaggattacctcagaaatctctcctgaactatttatgcagctggtaccacaatactatttcagtaatctgcctcctagtgaaagtaaggacattctacagcaagtagtggatcacctatcccctgtgtcaacaatgaataaggaacagcaaatgtgtgagacgtgccctgaaactgaacagagatgcactctccagtgactccccagcaaacacaaggtgcagcagggtcccaaaggtagctggatggctgaactgctggatatgggagatacatgacgcgaagacggatttcacatccacaggacggtcttgaagaaaataacactgtgtatattattttaaaataaaaaatagaagtttttattgagttctttaaattacgactccatgcttttcttcttcttggaaaagtttttaaatcaaccactcataatttgaccaaaattttaaaaaactggtattttgtaaatgtgtcagagacacatgggacagaaccctactttttgtagaggaacttaatctgaataaagtctgagtttttcagtaaa

SEQ ID NO: 353232 - DNA, 2393 bp, Homo sapiens
ttttgttctcattattccaattggcaagttttcactcattaggatcaacagccatgctgtttgcttggtaaaaaatctgccccaagtaattcaattatatgtggaaaaaggaagtgcaagcaagggaccgtacctgtgtaccagctgatgtgggaccccctggagcggcctctgcccagcttcctgggagccacttagcagaccaggaaacgagcacagctcacctagttctcagtgacctgtgataccttgctatttttctagatggatctgtcttcctacaaaacccttgagttaattcaatcccattctacaaatggtatggaaaggaaagagacataagctagagacctagagaatggaattgagctgtaaaaactatggcagttgtgggaagtcatcttttttacttagatttttagtgaaatctaacaaaattaaatgggaaaacaatataaattatatttaacttccccaaagacgttttctcatttaggtgcatctttacttatttaaagatacatgtaggcagcaacacagggatttctttccctgtatctgttacgtagtattgcctaaaattttttgtaattcagacatttttttaatagtgatgttgtttgcattgtattttattttcatgggtttttttttctttaggatattgagaaagtctgtgaaactgtctatcaaggatctaacctaaacccagatcttggagaactggtggttgttcctttgtatccaaaagagaaatgttcattgttcaagccactcgatgaaacagaaaaaagatgccaagtttatcaaagaagagtggtgttaactactagctctggagagtttttgatctggagcaactcagtcagatttgttatcgatgtgggtgtggaaagaagaaaggtgtacaacccgagaataagagcaaactcgctcgtcatgcagcccatcagccagagccaggcagagatacgcaagcagattcttggctcatcttcttcaggaaaatttttctgcctgtacactgaagaatttgcctccaaagacatgacgccactgaagccagcagaaatgcaggaagccaacctaacaagcatggtgctttttatgaagaggatagacattgcgggcctaggccactgtgacttcatgaacagaccagcaccagaaagtttgatgcaggcattggaagacttagattatctggcagcactggataatgatggaaatctttctgaatttggaatcatcatgtcagagtttcctcttgatccacaactctcgaagtctatcttagcgtcctgtgaatttgactgtgtagatgaagtgctaacaatcgcggccatggtaacagctccaaattgcttttcacatgtgccacatggagctgaagaggctgccttgacttgttggaagacatttttacatcccgaaggagatcactttaccctcatcagcatttacaaggcttaccaagacacaactctgaattctagcagtgagtactgtgtggaaaagtggtgtcgtgattacttcctcaactgttcagcactcagaatggcagatgttattcgagctgaactcttagaaattatcaagcgaatcgagcttccctatgcagaacctgcttttggctccaaggaaaacactctaaacataaagaaagctcttctgtccggttactttatgcagattgctcgggatgttgatggatcaggtaactacttaatgctgacacataagcaggttgctcagctgcatcccctgtctggttactcaatcaccaagaagatgccagagtgggtcctcttccataaattcagcatttctgagaacaactacatcaggattacctcagaaatctctcctgaactatttatgcagctggtaccacaatactatttcagtaatctgcctcctagtgaaagtaaggacattctacagcaagtagtggatcacctatcccctgtgtcaacaatgaataaggaacagcaaatgtgtgagacgtgccctgaaactgaacagagatgcactctccagtgactccccagcaaacacaaggtgcagcagggtcccaaaggtagctggatggctgaactgctggatatgggagatacatgacgcgaagacggatttcacatccacaggacggtcttgaagaaaataacactgtgtatattattttaaaataaaaaatagaagtttttattgagttctttaaattacgactccatgcttttcttcttcttggaaaagtttttaaatcaaccactcataatttgaccaaaattttaaaaaactggtattttgtaaatgtgtcagagacacatgggacagaaccctactttttgtagaggaacttaatctgaataaagtctgagtttttcagtaaa

SEQ ID NO: 353233 - DNA, 1979 bp, Homo sapiens
actgagcgagggtagcggccaggtcaccggctgaggacactgctcctgaagcccggtcaggcggtcgcgccctccctggcggcccccgcggcccgcaggacctgtgccccgacgtcgccgacccgcggtccccgctgtcgccgacccgcggcgtccgtcgggcgagtgggcctgcccgcgggtaaggcgccggccctgggccgccctcccgggaatcgggagccgccgctgcagtgtggtttattgacaatcatttacaatgccgaagagtgctgtagtgagccagcacagtgggtaacacagcaacggagaacagatgcaggtttgaggaatttaacttgctaaaaccttgaactgaagtcttagagattggaacatacgggtttgtataaataggcttttaagccctgtttgcaatgggttactgataggagaaacttgcttgtggaatgtcagctgcgtgagctcactgtcagacaagatggaagaagaagggctggagtgtccaaactcttcctctgaaaaacgctattttcctgaatccctggattccagcgatggggatgaggaagaggttttggcctgtgaggatttggaacttaacccctttgatggattgccatattcatcacgttattataaacttctgaaagaaagagaagatcttcctatatggaaagaaaaatactcctttatggagaacctgcttcaaaatcaaatcgtgattgtttcaggagatgctaaatgtggtaagagcgctcaggttcctcagtggtgtgctgaatattgtctttccatccactaccagcacgggggcgtgatatgcacacaggtccacaagcagactgtggtccagctcgccctgcgggtggcggatgaaatggatgttaacattggtcatgaggttggctacgtgatccctttcgagaactgctgtaccaacgaaacaatcctgaggtattgtactgatgatatgctgcaaagagaaatgatgtccaatccttttttgggtagctatggggtcatcatcttagatgatattcatgaaagaagcattgcaactgatgtgttacttggacttcttaaagatgttttactagcaagaccagaactgaagctcataattaactcctcacctcacctgatcagcaaactcaattcttattatggaaacgtgcctgtcatagaagtgaaaaataaacaccctgtggaggttgtgtaccttagtgaggctcaaaaggattcttttgagtctattttacgccttatctttgaaattcaccactcgggtgagaaaggtgacattgtagtctttctggcctgtgaacaagatattgagaaagtctgtgaaactgtctatcaaggatctaacctaaacccagatcttggagaactggtggttgttcctttgtatccaaaagagaaatgttcattgttcaagccactcgatgaaacagaaaaaagatgccaagtttatcaaagaagagtggtgttaactactagctctggagagtttttgatctggagcaactcagtcagatttgttatcgatgtgggtgtggaaagaagaaaggtgtacaacccgagaataagagcaaactcgctcgtcatgcagcccatcagccagagccaggcagagatacgcaagcagattcttggctcatcttcttcaggaaaatttttctgcctgtacactgaagaatttgcctccaaagacatgacgccactgaagccagcagaaatgcaggaagccaacctaacaagcatggtgctttttatgaagaggatagacattgcgggcctaggccactgtgacttcatgaacagaccaggtagccttatgctcccatgtcagccaggcattaggctgagattcaccttctcctgcccattctctgtcctgagttcacatgatgcgcagcaatgcacacaagcatggagggggcgttggtttggactgaagcattttcctgctagag

SEQ ID NO: 353234 - DNA, 1179 bp, Homo sapiens
actgagcgagggtagcggccaggtcaccggctgaggacactgctcctgaagcccggtcaggcggtcgcgccctccctggcggcccccgcggcccgcaggacctgtgccccgacgtcgccgacccgcggtccccgctgtcgccgacccgcggcgtccgtcgggcgagtgggcctgcccgcgggtaaggcgccggccctgggccgccctcccgggaatcgggagccgccgctgcagtgtggtttattgacaatcatttacaatgccgaagagtgctgtagtgagccagcacagtgggtaacacagcaacggagaacagatgcaggtttgaggaatttaacttgctaaaaccttgaactgaagtcttagagattggaacatacgggtttgtataaataggcttttaagccctgtttgcaatgggttactgataggagaaacttgcttgtggaatgtcagctgcgtgagctcactgtcagacaagatggaagaagaagggctggagtgtccaaactcttcctctgaaaaacgctattttcctgaatccctggattccagcgatggggatgaggaagaggttttggcctgtgaggatttggaacttaacccctttgatggattgccatattcatcacgttattataaacttctgaaagaaagagaagatcttcctatatggaaagaaaaatactcctttatggagaacctgcttcaaaatcaaatcgtgattgtttcaggagatgctaaatgtggtaagagcgctcaggttcctcagtggtgtgctgaatattgtctttccatccactaccagcacgggggcgtgatatgcacacaggtccacaagcagactgtggtccagctcgccctgcgggtggcggatgaaatggatgttaacattggtcatgaggttggctacgtgatccctttcgagaactgctgtaccaacgaaacaatcctgaggtattgtactgatgatatgctgcaaagagaaatgatgtccaatccttttttgggtagctatggggtcatcatcttagatgatattcatgaaagaagcattgcaactgatgtgttacttggacttcttaaagatgttttactagcaagaccagaactgaagctcataattaactcctcacctcacctgatcagcaaacgcccgtaagtgaccacgcaaacgcc

SEQ ID NO: 353235 - DNA, 330 bp, Homo sapiens
ttggctgcataaaaaacagaaagtatttattttacaaagtcggactgagatactatctgagttcaaattaaataccggttctacaggtagattctccagggatgggaagtgcccagacataatgtttggtgtctctcaccaccttccccactcataatctcatctttttgtcttaaataaacagatttatgcagctggtaccacaatactatttcagtaatctgcctcctagtgaaagtaaggacattctacagcaagtagtggatcacctatcccctgtgtcaacaatgaataaggaacagcaaatgtgtgagacgtgccctgaaactg

SEQ ID NO: 353236 - DNA, 3063 bp, Homo sapiens
actgagcgagggtagcggccaggtcaccggctgaggacactgctcctgaagcccggtcaggcggtcgcgccctccctggcggcccccgcggcccgcaggacctgtgccccgacgtcgccgacccgcggtccccgctgtcgccgacccgcggcgtccgtcgggcgagtgggcctgcccgcgggtaaggcgccggccctgggccgccctcccgggaatcgggagccgccgctgcagtgtggtttattgacaatcatttacaatgccgaagagtgctgtagtgagccagcacagtgggtaacacagcaacggagaacagatgcaggtttgaggaatttaacttgctaaaaccttgaactgaagtcttagagattggaacatacgggtttgtataaataggcttttaagccctgtttgcaatgggttactgataggagaaacttgcttgtggaatgtcagctgcgtgagctcactgtcagacaagatggaagaagaagggctggagtgtccaaactcttcctctgaaaaacgctattttcctgaatccctggattccagcgatggggatgaggaagaggttttggcctgtgaggatttggaacttaacccctttgatggattgccatattcatcacgttattataaacttctgaaagaaagagaagatcttcctatatggaaagaaaaatactcctttatggagaacctgcttcaaaatcaaatcgtgattgtttcaggagatgctaaatgtggtaagagcgctcaggttcctcagtggtgtgctgaatattgtctttccatccactaccagcacgggggcgtgatatgcacacaggtccacaagcagactgtggtccagctcgccctgcgggtggcggatgaaatggatgttaacattggtcatgaggttggctacgtgatccctttcgagaactgctgtaccaacgaaacaatcctgaggtattgtactgatgatatgctgcaaagagaaatgatgtccaatccttttttgggtagctatggggtcatcatcttagatgatattcatgaaagaagcattgcaactgatgtgttacttggacttcttaaagatgttttactagcaagaccagaactgaagctcataattaactcctcacctcacctgatcagcaaactcaattcttattatggaaacgtgcctgtcatagaagtgaaaaataaacaccctgtggaggttgtgtaccttagtgaggctcaaaaggattcttttgagtctattttacgccttatctttgaaattcaccactcgggtgagaaaggtgacattgtagtctttctggcctgtgaacaagatattgagaaagtctgtgaaactgtctatcaaggatctaacctaaacccagatcttggagaactggtggttgttcctttgtatccaaaagagaaatgttcattgttcaagccactcgatgaaacagaaaaaagatgccaagtttatcaaagaagagtggtgttaactactagctctggagagtttttgatctggagcaactcagtcagatttgttatcgatgtgggtgtggaaagaagaaaggtgtacaacccgagaataagagcaaactcgctcgtcatgcagcccatcagccagagccaggcagagatacgcaagcagattcttggctcatcttcttcaggaaaatttttctgcctgtacactgaagaatttgcctccaaagacatgacgccactgaagccagcagaaatgcaggaagccaacctaacaagcatggtgctttttatgaagaggatagacattgcgggcctaggccactgtgacttcatgaacagaccagcaccagaaagtttgatgcaggcattggaagacttagattatctggcagcactggataatgatggaaatctttctgaatttggaatcatcatgtcagagtttcctcttgatccacaactctcgaagtctatcttagcgtcctgtgaatttgactgtgtagatgaagtgctaacaatcgcggccatggtaacagctccaaattgcttttcacatgtgccacatggagctgaagaggctgccttgacttgttggaagacatttttacatcccgaaggagatcactttaccctcatcagcatttacaaggcttaccaagacacaactctgaattctagcagtgagtactgtgtggaaaagtggtgtcgtgattacttcctcaactgttcagcactcagaatggcagatgttattcgagctgaactcttagaaattatcaagcgaatcgagcttccctatgcagaacctgcttttggctccaaggaaaacactctaaacataaagaaagctcttctgtccggttactttatgcagattgctcgggatgttgatggatcaggtaactacttaatgctgacacataagcaggttgctcagctgcatcccctgtctggttactcaatcaccaagaagatgccagagtgggtcctcttccataaattcagcatttctgagaacaactacatcaggattacctcagaaatctctcctgaactatttatgcagctggtaccacaatactatttcagtaatctgcctcctagtgaaagtaaggacattctacagcaagtagtggatcacctatcccctgtgtcaacaatgaataaggaacagcaaatgtgtgagacgtgccctgaaactgaacagagatgcactctccagtgactccccagcaaacacaaggtgcagcagggtcccaaaggtagctggatggctgaactgctggatatgggagatacatgacgcgaagacggatttcacatccacaggacggtcttgaagaaaataacactgtgtatattattttaaaataaaaaatagaagtttttattgagttctttaaattacgactccatgcttttcttcttcttggaaaagtttttaaatcaaccactcataatttgaccaaaattttaaaaaactggtattttgtaaatgtgtcagagacacatgggacagaaccctactttttgtagaggaacttaatctgaataaagtctgagtttttcagtaaa

SEQ ID NO: 353237 - DNA, 2890 bp, Homo sapiens
actgagcgagggtagcggccaggtcaccggctgaggacactgctcctgaagcccggtcaggcggtcgcgccctccctggcggcccccgcggcccgcaggacctgtgccccgacgtcgccgacccgcggtccccgctgtcgccgacccgcggcgtccgtcgggcgagtgggcctgcccgcgggtaaggcgccggccctgggccgccctcccgggaatcgggagccgccgctgcagtgtggtttattgacaatcatttacaatgccgaagagtgctgtagtgagccagcacagtgggtaacacagcaacggagaacagatgcaggtttgaggaatttaacttgctaaaaccttgaactgaagtcttagagattggaacatacgggtttgtataaataggcttttaagccctgtttgcaatgggttactgataggagaaacttgcttgtggaatgtcagctgcgtgagctcactgtcagacaagatggaagaagaagggctggagtgtccaaactcttcctctgaaaaacgctattttcctgaatccctggattccagcgatggggatgaggaagaggttttggcctgtgaggatttggaacttaacccctttgatggattgccatattcatcacgttattataaacttctgaaagaaagagaagatcttcctatatggaaagaaaaatactcctttatggagaacctgcttcaaaatcaaatcgtgattgtttcaggagatgctaaatgtggtaagagcgctcaggttcctcagtggtgtgctgaatattgtctttccatccactaccagcacgggggcgtgatatgcacacaggtccacaagcagactgtggtccagctcgccctgcgggtggcggatgaaatggatgttaacattggtcatgaggttggctacgtgatccctttcgagaactgctgtaccaacgaaacaatcctgaggtattgtactgatgatatgctgcaaagagaaatgatgtccaatccttttttgggtagctatggggtcatcatcttagatgatattcatgaaagaagcattgcaactgatgtgttacttggacttcttaaagatgttttactagcaagaccagaactgaagctcataattaactcctcacctcacctgatcagcaaactcaattcttattatggaaacgtgcctgtcatagaagtgaaaaataaacaccctgtggaggttgtgtaccttagtgaggctcaaaaggattcttttgagtctattttacgccttatctttgaaattcaccactcgggtgagaaaggtgacattgtagtctttctggcctgtgaacaagatattgagaaagtctgtgaaactgtctatcaaggatctaacctaaacccagatcttggagaactggtggttgttcctttgtatccaaaagagaaatgttcattgttcaagccactcgatgaaacagaaaaaagatgccaagtttatcaaagaagagtggtgttaactactagctctggagagtttttgatctggagcaactcagtcagatttgttatcgatgtgggtgtggaaagaagaaaggtgtacaacccgagaataagagcaaactcgctcgtcatgcagcccatcagccagagccaggcagagatacgcaagcagattcttggctcatcttcttcaggaaaatttttctgcctgtacactgaagaatttgcctccaaagacatgacgccactgaagccagcagaaatgcaggaagccaacctaacaagcatggtgctttttatgaagaggatagacattgcgggcctaggccactgtgacttcatgaacagaccagcaccagaaagtttgatgcaggcattggaagacttagattatctggcagcactggataatgatggaaatctttctgaatttggaatcatcatgtcagagtttcctcttgatccacaactctcgaagtctatcttagcgtcctgtgaatttgactgtgtagatgaagtgctaacaatcgcggccatggtaacagctccaaattgcttttcacatgtgccacatggagctgaagaggctgccttgacttgttggaagacatttttacatcccgaaggagatcactttaccctcatcagcatttacaaggcttaccaagacacaactctgaattctagcagtgagtactgtgtggaaaagtggtgtcgtgattacttcctcaactgttcagcactcagaatggcagatgttattcgagctgaactcttagaaattatcaagcgaatcgagcttccctatgcagaacctgcttttggctccaaggaaaacactctaaacataaagaaagctcttctgtccggttactttatgcagattgctcgggatgttgatggatcaggtaactacttaatgctgacacataagcaggttgctcagctgcatcccctgtctggttactcaatcaccaagaagatgccagagtgggtcctcttccataaattcagcatttctgagaacaactacatcaggattacctcagaaatctctcctgaactatttatgcagctggtaccacaatactatttcagtaatctgcctcctagtgaaagtaaggacattctacagcaagtagtggatcacctatcccctgtgtcaacaatgaataaggaacagcaaatgtgtgagacgtgccctgaaactgaacagagatgcactctccagtgactccccagcaaacacaaggtgcagcagggtcccaaaggtagctggatggctgaactgctggatatgggagatacatgacgcgaagacggatttcacatccacaggacggtcttgaagaaaataacactgtgtatattattttaaaataaaaaatagaagtttttattgagttcttta

SEQ ID NO: 353238 - DNA, 2361 bp, Homo sapiens
  misc_feature (2361)..(2361): n is a, c, g, or t
ttgctatctttatttctttatttgcactgggaaataacatctttgtctactatttctagcatctgagatccaggtcagttgtgattaatttttctctgtattatgcaatgtattttcctgcttttcatgcctctctactggatgctagacattgtacattttaccttcttgggcactgaatatttttgtagtcccagaggtacttttgagctttgtcctaggatgcagtgtgatcctttcaggtcctgctgtatagctgtgtcaggtggcagtgcccatctagggtttctcacttgtgttttctacccagtgccccataaatcatgaggttttccagctagggtggtgggaacaggccctaccctaggtcctgtgtcagcaccactgttccttctaatcttctcacatggctctttctctggcctgaggtggttccttacacacatgcgctgatcagtagggctgtgctgcctagttgagggagctccctctggcccccgacttagatctgtgtgtctctctccagtactgtgaccgcgagttccggccaccttagtctccctggatccctggcattgttttcctactgcagggaggctggcaggctccacctgggttccccccgcatgcacactgcagctgggaccctcctcggagcatgagctggacaatcacagggctcccctcctgagtttgccctctcaagaatcactatccttcactccctggtatttggtggcttgcaaaccgttgtttcacatattttgtccattgtttgcttgtttcatgcaggagggaaaagtccagtacctgtttctccatcttagccatatgagactcttaaattattatttttttcctttcctagcaccagaaagtttgatgcaggcattggaagacttagattatctggcagcactggataatgatggaaatctttctgaatttggaatcatcatgtcagagtttcctcttgatccacaactctcgaagtctatcttagcgtcctgtgaatttgactgtgtagatgaagtgctaacaatcgcggccatggtaacagctccaaattgcttttcacatgtgccacatggagctgaagaggctgccttgacttgttggaagacatttttacatcccgaaggagatcactttaccctcatcagcatttacaaggcttaccaagacacaactctgaattctagcagtgagtactgtgtggaaaagtggtgtcgtgattacttcctcaactgttcagcactcagaatggcagatgttattcgagctgaactcttagaaattatcaagcgaatcgagcttccctatgcagaacctgcttttggctccaaggaaaacactctaaacataaagaaagctcttctgtccggttactttatgcagattgctcgggatgttgatggatcaggtaactacttaatgctgacacataagcaggttgctcagctgcatcccctgtctggttactcaatcaccaagaagatgccagagtgggtcctcttccataaattcagcatttctgagaacaactacatcaggattacctcagaaatctctcctgaactatttatgcagctggtaccacaatactatttcagtaatctgcctcctagtgaaagtaaggacattctacagcaagtagtggatcacctatcccctgtgtcaacaatgaataaggaacagcaaatgtgtgagacgtgccctgaaactgaacagagatgcactctccagtgactccccagcaaacacaaggtgcagcagggtcccaaaggtagctggatggctgaactgctggatatgggagatacatgacgcgaagacggatttcacatccacaggacggtcttgaagaaaataacactgtgtatattattttaaaataaaaaatagaagtttttattgagttctttaaattacgactccatgcttttcttcttcttggaaaagtttttaaatcaaccactcataatttgaccaaaattttaaaaaactggtattttgtaaatgtgtcagagacacatgggacagaaccctactttttgtagaggaacttaatctgaataaagtctgagtttttcagtaaaaaaaaaaaaaaaaaaaaaaaaaaaaaaaagggggggggcgtaaaagattaattccccgcgaagagggggcgccccaacgagctattaacgcggtgtacaccacagaggtatttcctcgggcgaccacagaggggggggcgcccctaaaatagaggggagggcgcaggtaaatatcaatagagggcaagagggagccgatgcggggggcccggcgggggtttcaaccaacagcggtctgcagagagcgctggggggagaatcn

SEQ ID NO: 353239 - DNA, 1854 bp, Homo sapiens
ttgctatctttatttctttatttgcactgggaaataacatctttgtctactatttctagcatctgagatccaggtcagttgtgattaatttttctctgtattatgcaatgtattttcctgcttttcatgcctctctactggatgctagacattgtacattttaccttcttgggcactgaatatttttgtagtcccagaggtacttttgagctttgtcctaggatgcagtgtgatcctttcaggtcctgctgtatagctgtgtcaggtggcagtgcccatctagggtttctcacttgtgttttctacccagtgccccataaatcatgaggttttccagctagggtggtgggaacaggccctaccctaggtcctgtgtcagcaccactgttccttctaatcttctcacatggctctttctctggcctgaggtggttccttacacacatgcgctgatcagtagggctgtgctgcctagttgagggagctccctctggcccccgacttagatctgtgtgtctctctccagtactgtgaccgcgagttccggccaccttagtctccctggatccctggcattgttttcctactgcagggaggctggcaggctccacctgggttccccccgcatgcacactgcagctgggaccctcctcggagcatgagctggacaatcacagggctcccctcctgagtttgccctctcaagaatcactatccttcactccctggtatttggtggcttgcaaaccgttgtttcacatattttgtccattgtttgcttgtttcatgcaggagggaaaagtccagtacctgtttctccatcttagccatatgagactcttaaattattatttttttcctttcctagcaccagaaagtttgatgcaggcattggaagacttagattatctggcagcactggataatgatggaaatctttctgaatttggaatcatcatgtcagagtttcctcttgatccacaactctcgaagtctatcttagcgtcctgtgaatttgactgtgtagatgaagtgctaacaatcgcggccatggtaacagctccaaattgcttttcacatgtgccacatggagctgaagaggctgccttgacttgttggaagacatttttacatcccgaaggagatcactttaccctcatcagcatttacaaggcttaccaagacacaactctgaattctagcagtgagtactgtgtggaaaagtggtgtcgtgattacttcctcaactgttcagcactcagaatggcagatgttattcgagctgaactcttagaaattatcaagcgaatcgagcttccctatgcagaacctgcttttggctccaaggaaaacactctaaacataaagaaagctcttctgtccggttactttatgcagattgctcgggatgttgatggatcaggtaactacttaatgctgacacataagcaggttgctcagctgcatcccctgtctggttactcaatcaccaagaagatgccagagtgggtcctcttccataaattcagcatttctgagaacaactacatcaggattacctcagaaatctctcctgaactatttatgcagctggtaccacaatactatttcagtaatctgcctcctagtgaaagtaaggacattctacagcaagtagtggatcacctatcccctgtgtcaacaatgaataaggaacagcaaatgtgtgagacgtgccctgaaactgaacagagatgcactctccagtgactccccagcaaacacaaggtgcagcagggtcccaaaggtagctggatggctgaactgctggatatgggagagtctccgtcgaactagcggagagtctccgtcgaa

SEQ ID NO: 353240 - DNA, 539 bp, Homo sapiens
taggaaatgtgcaacgtctatatgaatgaaaaaacccatagaactttgcttaaggatataaatgaagagctgagtgaatgtagaattaccatgttcctagacagaagatgcaaaaagtaaatgtcaattctcaatctatattatttcatgcaattttaatcaaaagcccaataattttgtgaattgtaatcccaaaggattaaacctaaaaaatccacagctaagctaaaaaactaaagaatataaaaatattttctaagcaagacaagatacccaaaagccataaatgtaaaagatcaacagatatgattgcctaaaactaaaaatcttcaagcaatacaagactcaaacacaaacctaaaatctagggagaaagggtcaatatgcttccattaaaaaaatccatacgtggccaggcgcggtggctcacgcctgtaatcccagcactttgggaggcggaggcaggcagatcacaaggtcaggagatcgagaccatcctggctaacatggtgaaaccccgtctctactaaaaaaaaaaa

SEQ ID NO: 353241 - DNA, 439 bp, Homo sapiens
ggctcatgcagaagctggagctgggccggtacaatgagacacacgccatagccaagtggctactagagaagcaggagctgggaggaggcttcaggtccacccagaccacggtggtggcccttgaagctctgacccgcttccgcgaagctgtccccttcaagggcatccaggatctccacgtccagatcagagcccccaagacagccctgaatgtgaattggtacattgatcacagcaatgcctaccaacagcggtcagcaaagttccttgcccaggacgacctagagatcgccagtggcaacgggagaggcaccatctcgatcctgacaatgtatcacaagtccccagagtcccgggaggacaactgcaacctgtaccacctgaatgcgactctccacagtgccctagaaggtaagcctggtgtggctacaggaggagt

SEQ ID NO: 353242 - DNA, 1302 bp, Homo sapiens
ggctcatgcagaagctggagctgggccggtacaatgagacacacgccatagccaagtggctactagagaagcaggagctgggaggaggcttcaggtccacccagaccacggtggtggcccttgaagctctgacccgcttccgcgaagctgtccccttcaagggcatccaggatctccacgtccagatcagagcccccaagacagccctgaatgtgaattggtacattgatcacagcaatgcctaccaacagcggtcagcaaagttccttgcccaggacgacctagagatcgccagtggcaacgggagaggcaccatctcgatcctgacaatgtatcacaagtccccagagtcccgggaggacaactgcaacctgtaccacctgaatgcgactctccacagtgccctagaagaaaataaaaagggaggtgagacttttcggctccggatggaaacaaggttccagaacaattgagaggccacaatgactatcatggaggtctccctgctcacgggcttctaccccaaccaggatgaccccagctcacgagtgatgtggagaggtacgcctttcagtacaaaaccaagacaagtaccagcgacagcactgttgtcctctacctggtgcaggcggagttcctgcaggccgccctggtcaccatctacgactactacgagccttcccggaggtgcagcactttctacaacctgcccacagagcaatcttccctgagaaagatctgccacaaagacatctgcagatgtgcagagggacagtgcccatccctgcagaagcccagtggccaattgaggcaggaggagctccagacaacagcatgtgaggcaggcgtggattttgtgtacaagacaaagctggaatctgtggaggtctctgcctccaacccttacgtctattacaacacgcagctcgaagacatcattaagagtggtacggaccctgccacacccctggccatgaagaaattcgtctcccatgccacttgccatgactccctggggttgcaagaacaggaatcgtacctcatcatgggccagacgtcagacctgtggagaatcaaatctgattacagctatgttctgggcaaggagacgttcctcatcctttggccagcagatggagatgccagcaagaaagaattgcgggaccaactggaggaatttttggaatatatgcgcacccacggctgccagtcctgagcctcttctgctttcagggaggtgtcatcaggcagctctgggccactgggtttaaccccaaataaagagcacaggatatgacaccc

SEQ ID NO: 353243 - DNA, 739 bp, Homo sapiens
gttctctccagctctcccatgagaagaacacggtgctgggctttcgggttcacaggatgctgcaggcggagttcctgcaggccgccctggtcaccatctacgactactacgagccttcccggaggtgcagcactttctacaacctgcccacagagcaatcttccctgagaaagatctgccacaaagacatctgcagatgtgcagagggacagtgcccatccctgcagaagcccagtggccaattgaggcaggaggagctccagacaacagcatgtgaggcaggcgtggattttgtgtacaagacaaagctggaatctgtggaggtctctgcctccaacccttacgtctattacaacacgcagctcgaagacatcattaagagtggtacggaccctgccacacccctggccatgaagaaattcgtctcccatgccacttgccatgactccctggggttgcaagaacaggaatcgtacctcatcatgggccagacgtcagacctgtggagaatcaaatctgattacagctatgttctgggcaaggagacgttcctcatcctttggccagcagatggagatgccagcaagaaagaattgcgggaccaactggaggaatttttggaatatatgcgcacccacggctgccagtcctgagcctcttctgctttcagggaggtgtcatcaggcagctctgggccactgggtttaaccccaaataaagagcacaggatatgacaccc

SEQ ID NO: 353244 - DNA, 714 bp, Homo sapiens
  misc_feature (22)..(22): n is a, c, g, or t
  misc_feature (51)..(51): n is a, c, g, or t
  misc_feature (92)..(92): n is a, c, g, or t
  misc_feature (110)..(110): n is a, c, g, or t
ctgtctcagcatgagtactagnaagtgcccctgaggtgacagctatgactntgtcccagtcatcctcagacatgtgcagcagaaactcatcntggatgatggcccacagnacacaacgacagatggtgtcctcgtgccgaacggcacccggaggtgcagcactttctacaacctgcccacagagcaatcttccctgagaaagatctgccacaaagacatctgcagatgtgcagagggacagtgcccatccctgcagaagcccagtggcctgtacaagacaaagctggaatctgtggaggtctctgcctccaacccttacgtctattacaacacgcagctcgaagacatcattaagagtggtacggaccctgccacacccctggccatgaagaaattcgtctcccatgccacttgccatgactccctggggttgcaagaacaggaatcgtacctcatcatgggccagacgtcagacctgtggagaatcaaatctgattacagctatgttctgggcaaggagacgttcctcatcctttggccagcagatggagatgccagcaagaaagaattgcgggaccaactggaggaatttttggaatatatgcgcacccacggctgccagtcctgagcctcttctgctttcagggaggtgtcatcaggcagctctgggccactgggtttaaccccaaataaagagcacaggatatgacaccc

SEQ ID NO: 353245 - DNA, 2531 bp, Homo sapiens
acccgcgctcgtacgtgcgcctccgccggcagctcctgactcatcgggggctccgggtcacatgcgcccgcgcggccctataggcgcctcctccgcccgccgcccgggagccgcagccgccgccgccactgccactcccgctctctcagcgccgccgtcgccaccgccaccgccaccgccactaccaccgtctgagtctgcagtcccgagatcccagccatcatgtccatagagaagatctgggcccgggagatcctggactcccgcgggaaccccacagtggaggtggatctctatactgccaaaggtcttttccgggctgcagtgcccagtggagcctctacgggcatctatgaggccctggagctgagggatggagacaaacagcgttacttaggcaaaggtgtcctgaaggcagtggaccacatcaactccaccatcgcgccagccctcatcagctcaggtctctctgtggtggagcaagagaaactggacaacctgatgctggagttggatgggactgagaacaaatccaagtttggggccaatgccatcctgggtgtgtctctggccgtgtgtaaggcaggggcagctgagcgggaactgcccctgtatcgccacattgctcagctggccgggaactcagacctcatcctgcctgtgccggccttcaacgtgatcaatggtggctctcatgctggcaacaagctggccatgcaggagttcatgatcctcccagtgggagctgagagctttcgggatgccatgcgactaggtgcagaggtctaccatacactcaagggagtcatcaaggacaaatacggcaaggatgccaccaatgtgggggatgaaggtggctttgcccccaatatcctggagaacagtgaagccttggagctggtgaaggaagccatcgacaaggctggctacacggaaaagatcgttattggcatggatgttgctgcctcagagttttatcgtgatggcaaatatgacttggacttcaagtctcccactgatccttcccgatacatcactggggaccagctgggggcactctaccaggactttgtcagggactatcctgtggtctccattgaggacccatttgaccaggatgattgggctgcctggtccaagttcacagccaatgtagggatccagattgtgggtgatgacctgacagtgaccaacccaaaacgtattgagcgggcagtggaagaaaaggcctgcaactgtctgctgctcaaggtcaaccagatcggctcggtcactgaagccatccaagcgtgcaagctggcccaggagaatggctggggggtcatggtgagtcatcgctcaggagagactgaggacacattcattgctgacctggtggtggggctgtgcacaggccagatcaagactggtgccccgtgccgttctgaacgtctggctaaatacaaccagctcatgagaattgaggaagagctgggggatgaagctcgctttgccggacataacttccgtaatcccagtgtgctgtgattcctctgcttgcctggagacgtggaacctctgtctcatcctcctggaaccttgctgtcctgatctgtgatagttcaccccctgagatcccctgagccccagggtgcccagaacttccctgattgacctgctccgctgctccttggcttacctgacctcttgctgtctctgctcgccctcctttctgtgccctactcattggggttccgcactttccacttcttcctttctctttctctcttccctcagaaactagaaatgtgaatgaggattattataaaagggggtccgtggaagaatgatcagcatctgtgatgggagcgtcagggttggtgtgctgaggtgttagagagggaccatgtgtcacttgtgctttgctcttgtcccacgtgtcttccactttgcatatgagccgtgaactgtgcatagtgctgggatggaggggagtgttgggcatgtgatcacgcctggctaataaggctttagtgtatttatttatttatttattttatttgtttttcattcatcccattaatcatttccccataactcaatggcctaaaactggcctgacttgggggaacgatgtgtctgtatttcatgtggctgtagatcccaagatgactggggtgggaggtcttgctagaatgggaagggtcatagaaagggccttgacatcagttcctttgtgtgtactcactgaagcctgcgttggtccagagcggaggctgtgtgcctgggggagttttcctctatacatctctccccaaccctaggttccctgttcttcctccagctgcaccagagcaacctctcactccccatgccacgttccacagttgccaccacctctgtggcattgaaatgagcacctccattaaagtctgaatcagtgcaaaaaaaaaaaaaataacaacaaaaaggggggggcggcaaaaaattccccgggggggcgccagttacgggccccagtttttgttgaaaagggggcccaaaggggggcg

SEQ ID NO: 353246 - DNA, 2603 bp, Homo sapiens
acccgcgctcgtacgtgcgcctccgccggcagctcctgactcatcgggggctccgggtcacatgcgcccgcgcggccctataggcgcctcctccgcccgccgcccgggagccgcagccgccgccgccactgccactcccgctctctcagcgccgccgtcgccaccgccaccgccaccgccactaccaccgtctgagtctgcagtcccgagatcccagccatcatgtccatagagaagatctgggcccgggagatcctggactcccgcgggaaccccacagtggaggtggatctctatactgccaaaggtcttttccgggctgcagtgcccagtggagcctctacgggcatctatgaggccctggagctgagggatggagacaaacagcgttacttaggcaaaggtgtcctgaaggcagtggaccacatcaactccaccatcgcgccagccctcatcagctcaggtctctctgtggtggagcaagagaaactggacaacctgatgctggagttggatgggactgagaacaaatccaagtttggggccaatgccatcctgggtgtgtctctggccgtgtgtaaggcaggggcagctgagcgggaactgcccctgtatcgccacattgctcagctggccgggaactcagacctcatcctgcctgtgccggccttcaacgtgatcaatggtggctctcatgctggcaacaagctggccatgcaggagttcatgatcctcccagtgggagctgagagctttcgggatgccatgcgactaggtgcagaggtctaccatacactcaagggagtcatcaaggacaaatacggcaaggatgccaccaatgtgggggatgaaggtggctttgcccccaatatcctggagaacagtgaagccttggagctggtgaaggaagccatcgacaaggctggctacacggaaaagatcgttattggcatggatgttgctgcctcagagttttatcgtgatggcaaatatgacttggacttcaagtctcccactgatccttcccgatacatcactggggaccagctgggggcactctaccaggactttgtcagggactatcctgtggtctccattgaggacccatttgaccaggatgattgggctgcctggtccaagttcacagccaatgtagggatccagattgtgggtgatgacctgacagtgaccaacccaaaacgtattgagcgggcagtggaagaaaaggcctgcaactgtctgctgctcaaggtcaaccagatcggctcggtcactgaagccatccaagcgtgcaagctggcccaggagaatggctggggggtcatggtgagtcatcgctcaggagagactgaggacacattcattgctgacctggtggtggggctgtgcacaggccaggtgagtgaggcagcctggtgagtgaagagaactctctgtgggattggtatttctagctcacccacctggtctctccttccaggtgtttgagggtgtcaggggagtttcaggagagcagaagtttcctttcaggggtgagagggcagtcactgagctgcaaatcctttgaaatgtttcagatcaagactggtgccccgtgccgttctgaacgtctggctaaatacaaccagctcatgagaattgaggaagagctgggggatgaagctcgctttgccggacataacttccgtaatcccagtgtgctgtgattcctctgcttgcctggagacgtggaacctctgtctcatcctcctggaaccttgctgtcctgatctgtgatagttcaccccctgagatcccctgagccccagggtgcccagaacttccctgattgacctgctccgctgctccttggcttacctgacctcttgctgtctctgctcgccctcctttctgtgccctactcattggggttccgcactttccacttcttcctttctctttctctcttccctcagaaactagaaatgtgaatgaggattattataaaagggggtccgtggaagaatgatcagcatctgtgatgggagcgtcagggttggtgtgctgaggtgttagagagggaccatgtgtcacttgtgctttgctcttgtcccacgtgtcttccactttgcatatgagccgtgaactgtgcatagtgctgggatggaggggagtgttgggcatgtgatcacgcctggctaataaggctttagtgtatttatttatttatttattttatttgtttttcattcatcccattaatcatttccccataactcaatggcctaaaactggcctgacttgggggaacgatgtgtctgtatttcatgtggctgtagatcccaagatgactggggtgggaggtcttgctagaatgggaagggtcatagaaagggccttgacatcagttcctttgtgtgtactcactgaagcctgcgttggtccagagcggaggctgtgtgcctgggggagttttcctctatacatctctccccaaccctaggttccctgttcttcctccagctgcaccagagcaacctctcactccccatgccacgttccacagttgccaccacctctgtggcattgaaatgagcacctccattaaagtctgaatcagtgca

SEQ ID NO: 353247 - DNA, 2561 bp, Homo sapiens
  misc_feature (2427)..(2427): n is a, c, g, or t
acccgcgctcgtacgtgcgcctccgccggcagctcctgactcatcgggggctccgggtcacatgcgcccgcgcggccctataggcgcctcctccgcccgccgcccgggagccgcagccgccgccgccactgccactcccgctctctcagcgccgccgtcgccaccgccaccgccaccgccactaccaccgtctgagtctgcagtcccgagatcccagccatcatgtccatagagaagatctgggcccgggagatcctggactcccgcgggaaccccacagtggaggtggatctctatactgccaaaggtcttttccgggctgcagtgcccagtggagcctctacgggcatctatgaggccctggagctgagggatggagacaaacagcgttacttaggcaaaggtgtcctgaaggcagtggaccacatcaactccaccatcgcgccagccctcatcagctcaggtctctctgtggtggagcaagagaaactggacaacctgatgctggagttggatgggactgagaacaaatccaagtttggggccaatgccatcctgggtgtgtctctggccgtgtgtaaggcaggggcagctgagcgggaactgcccctgtatcgccacattgctcagctggccgggaactcagacctcatcctgcctgtgccggccttcaacgtgatcaatggtggctctcatgctggcaacaagctggccatgcaggagttcatgatcctcccagtgggagctgagagctttcgggatgccatgcgactaggtgcagaggtctaccatacactcaagggagtcatcaaggacaaatacggcaaggatgccaccaatgtgggggatgaaggtggctttgcccccaatatcctggagaacagtgaagccttggagctggtgaaggaagccatcgacaaggctggctacacggaaaagatcgttattggcatggatgttgctgcctcagagttttatcgtgatggcaaatatgacttggacttcaagtctcccactgatccttcccgatacatcactggggaccagctgggggcactctaccaggactttgtcagggactatcctgtggtctccattgaggacccatttgaccaggatgattgggctgcctggtccaagttcacagccaatgtagggatccagattgtgggtgatgacctgacagtgaccaacccaaaacgtattgagcgggcagtggaagaaaaggcctgcaactgtctgctgctcaaggtcaaccagatcggctcggtcactgaagccatccaagcgtgcaagctggcccaggagaatggctggggggtcatggtgagtcatcgctcaggagagactgaggacacattcattgctgacctggtggtggggctgtgcacaggccagatcaagactggtgccccgtgccgttctgaacgtctggctaaatacaaccagctcatgagaattgaggaagagctgggggatgaagctcgctttgccggacataacttccgtaatcccagtgtgctgtgattcctctgcttgcctggagacgtggaacctctgtctcatcctcctggaaccttgctgtcctgatctgtgatagttcaccccctgagatcccctgagccccagggtgcccagaacttccctgattgacctgctccgctgctccttggcttacctgacctcttgctgtctctgctcgccctcctttctgtgccctactcattggggttccgcactttccacttcttcctttctctttctctcttccctcagaaactagaaatgtgaatgaggattattataaaagggggtccgtggaagaatgatcagcatctgtgatgggagcgtcagggttggtgtgctgaggtgttagagagggaccatgtgtcacttgtgctttgctcttgtcccacgtgtcttccactttgcatatgagccgtgaactgtgcatagtgctgggatggaggggagtgttgggcatgtgatcacgcctggctaataaggctttagtgtatttatttatttatttattttatttgtttttcattcatcccattaatcatttccccataactcaatggcctaaaactggcctgacttgggggaacgatgtgtctgtatttcatgtggctgtagatcccaagatgactggggtgggaggtcttgctagaatgggaagggtcatagaaagggccttgacatcagttcctttgtgtgtactcactgaagcctgcgttggtccagagcggaggctgtgtgcctgggggagttttcctctatacatctctccccaaccctaggttccctgttcttcctccagctgcaccagagcaacctctcactccccatgccacgttccacagttgccaccacctctgtggcattgaaatgagcacctccattaaagtctgaatcagtgcaaanaaaaaaaaaaaaaaaaaaaaaaaaaaaaaaaaaaaaaaaataacaacaaaaaggggggggcggcaaaaaattccccgggggggcgccagttacgggccccagtttttgttgaaaagggggcccaaaggggggcg

SEQ ID NO: 353248 - DNA, 2504 bp, Homo sapiens
acccgcgctcgtacgtgcgcctccgccggcagctcctgactcatcgggggctccgggtcacatgcgcccgcgcggccctataggcgcctcctccgcccgccgcccgggagccgcagccgccgccgccactgccactcccgctctctcagcgccgccgtcgccaccgccaccgccaccgccactaccaccgtctgagtctgcagtcccgagcctcccgccccgcccattgatctcaggctccacccctctaagcctcttatctttctccttccttcccttccacccgaggaatcccagccatcatgtccatagagaagatctgggcccgggagatcctggactcccgcgggaaccccacagtggaggtggatctctatactgccaaaggtcttttccgggctgcagtgcccagtggagcctctacgggcatctatgaggccctggagctgagggatggagacaaacagcgttacttaggcaaaggtgtcctgaaggcagtggaccacatcaactccaccatcgcgccagccctcatcagctcaggtctctctgtggtggagcaagagaaactggacaacctgatgctggagttggatgggactgagaacaaatccaagtttggggccaatgccatcctgggtgtgtctctggccgtgtgtaaggcaggggcagctgagcgggaactgcccctgtatcgccacattgctcagctggccgggaactcagacctcatcctgcctgtgccggccttcaacgtgatcaatggtggctctcatgctggcaacaagctggccatgcaggagttcatgatcctcccagtgggagctgagagctttcgggatgccatgcgactaggtgcagaggtctaccatacactcaagggagtcatcaaggacaaatacggcaaggatgccaccaatgtgggggatgaaggtggctttgcccccaatatcctggagaacagtgaagccttggagctggtgaaggaagccatcgacaaggctggctacacggaaaagatcgttattggcatggatgttgctgcctcagagttttatcgtgatggcaaatatgacttggacttcaagtctcccactgatccttcccgatacatcactggggaccagctgggggcactctaccaggactttgtcagggactatcctgtggtctccattgaggacccatttgaccaggatgattgggctgcctggtccaagttcacagccaatgtagggatccagattgtgggtgatgacctgacagtgaccaacccaaaacgtattgagcgggcagtggaagaaaaggcctgcaactgtctgctgctcaaggtcaaccagatcggctcggtcactgaagccatccaagcgtgcaagctggcccaggagaatggctggggggtcatggtgagtcatcgctcaggagagactgaggacacattcattgctgacctggtggtggggctgtgcacaggccagatcaagactggtgccccgtgccgttctgaacgtctggctaaatacaaccagctcatgagaattgaggaagagctgggggatgaagctcgctttgccggacataacttccgtaatcccagtgtgctgtgattcctctgcttgcctggagacgtggaacctctgtctcatcctcctggaaccttgctgtcctgatctgtgatagttcaccccctgagatcccctgagccccagggtgcccagaacttccctgattgacctgctccgctgctccttggcttacctgacctcttgctgtctctgctcgccctcctttctgtgccctactcattggggttccgcactttccacttcttcctttctctttctctcttccctcagaaactagaaatgtgaatgaggattattataaaagggggtccgtggaagaatgatcagcatctgtgatgggagcgtcagggttggtgtgctgaggtgttagagagggaccatgtgtcacttgtgctttgctcttgtcccacgtgtcttccactttgcatatgagccgtgaactgtgcatagtgctgggatggaggggagtgttgggcatgtgatcacgcctggctaataaggctttagtgtatttatttatttatttattttatttgtttttcattcatcccattaatcatttccccataactcaatggcctaaaactggcctgacttgggggaacgatgtgtctgtatttcatgtggctgtagatcccaagatgactggggtgggaggtcttgctagaatgggaagggtcatagaaagggccttgacatcagttcctttgtgtgtactcactgaagcctgcgttggtccagagcggaggctgtgtgcctgggggagttttcctctatacatctctccccaaccctaggttccctgttcttcctccagctgcaccagagcaacctctcactccccatgccacgttccacagttgccaccacctctgtggcattgaaatgagcacctccattaaagtctgaatcagtgca

SEQ ID NO: 353249 - DNA, 2535 bp, Homo sapiens
caagctgcaaagaggcgcgggaaccactgtcgtgcccctcccctcctcactgcagtgttctcccatctcatcatttgatcttaccccgccccccactgcagtgacctccccttcctcactgcattgaccttctcctcttcccaggggggagggggaatcccttctacagccctagactgcagccagcgcctccctacccaccccccacccactgcagtaacctctttcccatccctcccagcctcccgccccgcccattgatctcaggctccacccctctaagcctcttatctttctccttccttcccttccacccgaggaatcccagccatcatgtccatagagaagatctgggcccgggagatcctggactcccgcgggaaccccacagtggaggtggatctctatactgccaaaggtcttttccgggctgcagtgcccagtggagcctctacgggcatctatgaggccctggagctgagggatggagacaaacagcgttacttaggcaaaggtgtcctgaaggcagtggaccacatcaactccaccatcgcgccagccctcatcagctcaggtctctctgtggtggagcaagagaaactggacaacctgatgctggagttggatgggactgagaacaaatccaagtttggggccaatgccatcctgggtgtgtctctggccgtgtgtaaggcaggggcagctgagcgggaactgcccctgtatcgccacattgctcagctggccgggaactcagacctcatcctgcctgtgccggccttcaacgtgatcaatggtggctctcatgctggcaacaagctggccatgcaggagttcatgatcctcccagtgggagctgagagctttcgggatgccatgcgactaggtgcagaggtctaccatacactcaagggagtcatcaaggacaaatacggcaaggatgccaccaatgtgggggatgaaggtggctttgcccccaatatcctggagaacagtgaagccttggagctggtgaaggaagccatcgacaaggctggctacacggaaaagatcgttattggcatggatgttgctgcctcagagttttatcgtgatggcaaatatgacttggacttcaagtctcccactgatccttcccgatacatcactggggaccagctgggggcactctaccaggactttgtcagggactatcctgtggtctccattgaggacccatttgaccaggatgattgggctgcctggtccaagttcacagccaatgtagggatccagattgtgggtgatgacctgacagtgaccaacccaaaacgtattgagcgggcagtggaagaaaaggcctgcaactgtctgctgctcaaggtcaaccagatcggctcggtcactgaagccatccaagcgtgcaagctggcccaggagaatggctggggggtcatggtgagtcatcgctcaggagagactgaggacacattcattgctgacctggtggtggggctgtgcacaggccagatcaagactggtgccccgtgccgttctgaacgtctggctaaatacaaccagctcatgagaattgaggaagagctgggggatgaagctcgctttgccggacataacttccgtaatcccagtgtgctgtgattcctctgcttgcctggagacgtggaacctctgtctcatcctcctggaaccttgctgtcctgatctgtgatagttcaccccctgagatcccctgagccccagggtgcccagaacttccctgattgacctgctccgctgctccttggcttacctgacctcttgctgtctctgctcgccctcctttctgtgccctactcattggggttccgcactttccacttcttcctttctctttctctcttccctcagaaactagaaatgtgaatgaggattattataaaagggggtccgtggaagaatgatcagcatctgtgatgggagcgtcagggttggtgtgctgaggtgttagagagggaccatgtgtcacttgtgctttgctcttgtcccacgtgtcttccactttgcatatgagccgtgaactgtgcatagtgctgggatggaggggagtgttgggcatgtgatcacgcctggctaataaggctttagtgtatttatttatttatttattttatttgtttttcattcatcccattaatcatttccccataactcaatggcctaaaactggcctgacttgggggaacgatgtgtctgtatttcatgtggctgtagatcccaagatgactggggtgggaggtcttgctagaatgggaagggtcatagaaagggccttgacatcagttcctttgtgtgtactcactgaagcctgcgttggtccagagcggaggctgtgtgcctgggggagttttcctctatacatctctccccaaccctaggttccctgttcttcctccagctgcaccagagcaacctctcactccccatgccacgttccacagttgccaccacctctgtggcattgaaatgagcacctccattaaagtctgaatcagtgca

SEQ ID NO: 353250 - DNA, 2373 bp, Homo sapiens
acccgcgctcgtacgtgcgcctccgccggcagctcctgactcatcgggggctccgggtcacatgcgcccgcgcggccctataggcgcctcctccgcccgccgcccgggagccgcagccgccgccgccactgccactcccgctctctcagcgccgccgtcgccaccgccaccgccaccgccactaccaccgtctgagtctgcagtcccgagatcccagccatcatgtccatagagaagatctgggcccgggagatcctggactcccgcgggaaccccacagtggaggtggatctctatactgccaaaggtcttttccgggctgcagtgcccagtggagcctctacgggcatctatgaggccctggagctgagggatggagacaaacagcgttacttaggcaaaggtgtcctgaaggcagtggaccacatcaactccaccatcgcgccagccctcatcagctcaggtctctctgtggtggagcaagagaaactggacaacctgatgctggagttggatgggactgagaacaaatccaagtttggggccaatgccatcctgggtgtgtctctggccgtgtgtaaggcaggggcagctgagcgggaactgcccctgtatcgccacattgctcagctggccgggaactcagacctcatcctgcctgtgccggccttcaacgtgatcaatggtggctctcatgctggcaacaagctggccatgcaggagttcatgatcctcccagtgggagctgagagctttcgggatgccatgcgactaggtgcagaggtctaccatacactcaagggagtcatcaaggacaaatacggcaaggatgccaccaatgtgggggatgaaggtggctttgcccccaatatcctggagaacagtgaagccttggagctggtgaaggaagccatcgacaaggctggctacacggaaaagatcgttattggcatggatgttgctgcctcagagttttatcgtgatggcaaatatgacttggacttcaagtctcccactgatccttcccgatacatcactggggaccagctgggggcactctaccaggactttgtcagggactatcctgtggtctccattgaggacccatttgaccaggatgattgggctgcctggtccaagttcacagccaatgtagggatccagattgtgggtgatgacctgacagtgaccaacccaaaacgtattgagcgggcagtggaagaaaaggcctgcaactgtctgctgctcaaggtcaaccagatcggctcggtcactgaagccatccaagcgtgcaagctggcccaggagaatggctggggggtcatggtgagtcatcgctcaggagagactgaggacacattcattgctgacctggtggtggggctgtgcacaggccagatcaagactggtgccccgtgccgttctgaacgtctggctaaatacaaccagctcatgagaattgaggaagagctgggggatgaagctcgctttgccggacataacttccgtaatcccagtgtgctgtgattcctctgcttgcctggagacgtggaacctctgtctcatcctcctggaaccttgctgtcctgatctgtgatagttcaccccctgagatcccctgagccccagggtgcccagaacttccctgattgacctgctccgctgctccttggcttacctgacctcttgctgtctctgctcgccctcctttctgtgccctactcattggggttccgcactttccacttcttcctttctctttctctcttccctcagaaactagaaatgtgaatgaggattattatttggtgtgctgaggtgttagagagggaccatgtgtcacttgtgctttgctcttgtcccacgtgtcttccactttgcatatgagccgtgaactgtgcatagtgctgggatggaggggagtgttgggcatgtgatcacgcctggctaataaggctttagtgtatttatttatttatttattttatttgtttttcattcatcccattaatcatttccccataactcaatggcctaaaactggcctgacttgggggaacgatgtgtctgtatttcatgtggctgtagatcccaagatgactggggtgggaggtcttgctagaatgggaagggtcatagaaagggccttgacatcagttcctttgtgtgtactcactgaagcctgcgttggtccagagcggaggctgtgtgcctgggggagttttcctctatacatctctccccaaccctaggttccctgttcttcctccagctgcaccagagcaacctctcactccccatgccacgttccacagttgccaccacctctgtggcattgaaatgagcacctccattaaagtctgaatcagtgca

SEQ ID NO: 353251 - DNA, 2334 bp, Homo sapiens
acccgcgctcgtacgtgcgcctccgccggcagctcctgactcatcgggggctccgggtcacatgcgcccgcgcggccctataggcgcctcctccgcccgccgcccgggagccgcagccgccgccgccactgccactcccgctctctcagcgccgccgtcgccaccgccaccgccaccgccactaccaccgtctgagtctgcagtcccgagatcccagccatcatgtccatagagaagatctgggcccgggagatcctggactcccgcgggaaccccacagtggaggtggatctctatactgccaaaggtcttttccgggctgcagtgcccagtggagcctctacgggcatctatgaggccctggagctgagggatggagacaaacagcgttacttaggcaaaggtgtcctgaaggcagtggaccacatcaactccaccatcgcgccagccctcatcagctcaggtctctctgtggtggagcaagagaaactggacaacctgatgctggagttggatgggactgagaacaaatccaagtttggggccaatgccatcctgggtgtgtctctggccgtgtgtaaggcaggggcagctgagcgggaactgcccctgtatcgccacattgctcagctggccgggaactcagacctcatcctgcctgtgccggccttcaacgtgatcaatggtggctctcatgctggcaacaagctggccatgcaggagttcatgatcctcccagtgggagctgagagctttcgggatgccatgcgactaggtgcagaggtctaccatacactcaagggagtcatcaaggacaaatacggcaaggatgccaccaatgtgggggatgaaggtggctttgcccccaatatcctggagaacagtgaagccttggagctggtgaaggaagccatcgacaaggctggctacacggaaaagatcgttattggcatggatgttgctgcctcagagttttatcgtgatggcaaatatgacttggacttcaagtctcccactgatccttcccgatacatcactggggaccagctgggggcactctaccaggactttgtcagggactatcctgtggtctccattgaggacccatttgaccaggatgattgggctgcctggtccaagttcacagccaatgtagggatccagattgtgggtgatgacctgacagtgaccaacccaaaacgtattgagcgggcagtggaagaaaaggcctgcaactgtctgctgctcaaggtcaaccagatcggctcggtcactgaagccatccaagcgtgcaagctggcccaggagaatggctggggggtcatggtgagtcatcgctcaggagagactgaggacacattcattgctgacctggtggtggggctgtgcacaggccagatcaagactggtgccccgtgccgttctgaacgtctggctaaatacaaccagctcatgagaattgaggaagagctgggggatgaagctcgctttgccggacataacttccgtaatcccagtgtgctgtgattcctctgcttgcctggagacgtggaacctctgtctcatcctcctggaaccttgctgtcctgatctgtgatagttcaccccctgagatcccctgagccccagggtgcccagaacttccctgattgacctgctccgctgctccttggcttacctgacctcttgctgtctctgctcgccctcctttctgtgccctactcattggggttccgcactttccacttcttcctttctctttctctcttccctcagaaactagaaatgtgaatgaggattattataaaagggggtccgtggaagaatgatcagcatctgtgatgggagcgtcagggttggtgtgctgaggtgttagagagggaccatatgagccgtgaactgtgcatagtgctgggatggaggggagtgttgggcatgtgatcacgcctggctaataaggctttagtgtatttatttatttatttattttatttgtttttcattcatcccattaatcatttccccataactcaatggcctaaactgtagatcccaagatgactggggtgggaggtcttgctagaatgggaagggtcatagaaagggccttgacatcagttcctttgtgtgtactcactgaagcctgcgttggtccagagcggaggctgtgtgcctgggggagttttcctctatacatctctccccaaccctaggttccctgttcttcctccagctgcaccagagcaacctctcactccccatgccacgttccacagttgccaccacctctgtggcattgaaatgagcacctccattaaagtctgaatcagtgca

SEQ ID NO: 353252 - DNA, 1563 bp, Homo sapiens
ggacgcgtgggtcgacccacgcgtccggccttggagctggtgaaggaagccatcgacaaggctggctacacggaaaagatcgttattggcatggatgttgctgcctcagagttttatcgtgatggcaaatatgacttggacttcaagtctcccactgatccttcccgatacatcactggggaccagctgggggcactctaccaggactttgtcagggactatcctgtggtctccattgaggacccatttgaccaggatgattgggctgcctggtccaagttcacagccaatgtagggatccagattgtgggtgatgacctgacagtgaccaacccaaaacgtattgagcgggcagtggaagaaaaggcctgcaactgtctgctgctcaaggtcaaccagatcggctcggtcactgaagccatccaagcgtgcaagctggcccaggagaatggctggggggtcatggtgagtcatcgctcaggagagactgaggacacattcattgctgacctggtggtggggctgtgcacaggccagatcaagactggtgccccgtgccgttctgaacgtctggctaaatacaaccagctcatgagaattgaggaagagctgggggatgaagctcgctttgccggacataacttccgtaatcccagtgtgctgtgattcctctgcttgcctggagacgtggaacctctgtctcatcctcctggaaccttgctgtcctgatctgtgatagttcaccccctgagatcccctgagccccagggtgcccagaacttccctgattgacctgctccgctgctccttggcttacctgacctcttgctgtctctgctcgccctcctttctgtgccctactcattggggttccgcactttccacttcttcctttctctttctctcttccctcagaaactagaaatgtgaatgaggattattataaaagggggtccgtggaagaatgatcagcatctgtgatgggagcgtcagggttggtgtgctgaggtgttagagagggaccatgtgtcacttgtgctttgctcttgtcccacgtgtcttccactttgcatatgagccgtgaactgtgcatagtgctgggatggaggggagtgttgggcatgtgatcacgcctggctaataaggctttagtgtatttatttatttatttattttatttgtttttcattcatcccattaatcatttccccataactcaatggcctaaaactggcctgacttgggggaacgatgtgtctgtatttcatgtggctgtagatcccaagatgactggggtgggaggtcttgctagaatgggaagggtcatagaaagggccttgacatcagttcctttgtgtgtactcactgaagcctgcgttggtccagagcggaggctgtgtgcctgggggagttttcctctatacatctctccccaaccctaggttccctgttcttcctccagctgcaccagagcaacctctcactccccatgccacgttccacagttgccaccacctctgtggcattgaaatgagcacctccattaaagtctgaatcagtgca

SEQ ID NO: 353253 - DNA, 1559 bp, Homo sapiens
ggtcctcgtttctataagactccttttgcaagtgctccagcctaattctacccaggggtgccaaagagagcggggaacctggaatcatcctcacagttctctcacctctgcccctccacccctgattctctgctcccctcccagatagctttcccctagatgtttcctgacatagaccaaggttggggctgggaagagagtgcccagtgtgagagctggagaatcagtgctgtgtgtggatacaggtgcaagctggcccaggagaatggctggggggtcatggtgagtcatcgctcaggagagactgaggacacattcattgctgacctggtggtggggctgtgcacaggccaggtgagtgaggcagcctggtgagtgaagagaactctctgtgggattggtatttctagctcacccacctggtctctccttccaggtgtttgagggtgtcaggggagtttcaggagagcagaagtttcctttcaggggtgagagggcagtcactgagctgcaaatcctttgaaatgtttcagatcaagactggtgccccgtgccgttctgaacgtctggctaaatacaaccagctcatgagaattgaggaagagctgggggatgaagctcgctttgccggacataacttccgtaatcccagtgtgctgtgattcctctgcttgcctggagacgtggaacctctgtctcatcctcctggaaccttgctgtcctgatctgtgatagttcaccccctgagatcccctgagccccagggtgcccagaacttccctgattgacctgctccgctgctccttggcttacctgacctcttgctgtctctgctcgccctcctttctgtgccctactcattggggttccgcactttccacttcttcctttctctttctctcttccctcagaaactagaaatgtgaatgaggattattataaaagggggtccgtggaagaatgatcagcatctgtgatgggagcgtcagggttggtgtgctgaggtgttagagagggaccatgtgtcacttgtgctttgctcttgtcccacgtgtcttccactttgcatatgagccgtgaactgtgcatagtgctgggatggaggggagtgttgggcatgtgatcacgcctggctaataaggctttagtgtatttatttatttatttattttatttgtttttcattcatcccattaatcatttccccataactcaatggcctaaaactggcctgacttgggggaacgatgtgtctgtatttcatgtggctgtagatcccaagatgactggggtgggaggtcttgctagaatgggaagggtcatagaaagggccttgacatcagttcctttgtgtgtactcactgaagcctgcgttggtccagagcggaggctgtgtgcctgggggagttttcctctatacatctctccccaaccctaggttccctgttcttcctccagctgcaccagagcaacctctcactccccatgccacgttccacagttgccaccacctctgtggcattgaaatgagcacctccattaaagtctgaatcagtgca

SEQ ID NO: 353254 - DNA, 1513 bp, Homo sapiens
acccgcgctcgtacgtgcgcctccgccggcagctcctgactcatcgggggctccgggtcacatgcgcccgcgcggccctataggcgcctcctccgcccgccgcccgggagccgcagccgccgccgccactgccactcccgctctctcagcgccgccgtcgccaccgccaccgccaccgccactaccaccgtctgagtctgcagtcccgagatcccagccatcatgtccatagagaagatctgggcccgggagatcctggactcccgcgggaaccccacagtggaggtggatctctatactgccaaaggtcttttccgggctgcagtgcccagtggagcctctacgggcatctatgaggccctggagctgagggatggagacaaacagcgttacttaggcaaaggtgtcctgaaggcagtggaccacatcaactccaccatcgcgccagccctcatcagctcaggtctctctgtggtggagcaagagaaactggacaacctgatgctggagttggatgggactgagaacaaatccaagtttggggccaatgccatcctgggtgtgtctctggccgtgtgtaaggcaggggcagctgagcgggaactgcccctgtatcgccacattgctcagctggccgggaactcagacctcatcctgcctgtgccggccttcaacgtgatcaatggtggctctcatgctggcaacaagctggccatgcaggagttcatgatcctcccagtgggagctgagagctttcgggatgccatgcgactaggtgcagaggtctaccatacactcaagggagtcatcaaggacaaatacggcaaggatgccaccaatgtgggggatgaaggtggctttgcccccaatatcctggagaacagtgaagccttggagctggtgaaggaagccatcgacaaggctggctacacggaaaagatcgttattggcatggatgttgctgcctcagagttttatcgtgatggcaaatatgacttggacttcaagtctcccactgatccttcccgatacatcactggggaccagctgggggcactctaccaggactttgtcagggactatcctgtggtctccattgaggacccatttgaccaggatgattgggctgcctggtccaagttcacagccaatgtagggatccagattgtgggtgatgacactggcctgacttgggggaacgatgtgtctgtatttcatgtggctgtagatcccaagatgactggggtgggaggtcttgctagaatgggaagggtcatagaaagggccttgacatcagttcctttgtgtgtactcactgaagcctgcgttggtccagagcggaggctgtgtgcctgggggagttttcctctatacatctctccccaaccctaggttccctgttcttcctccagctgcaccagagcaacctctcactccccatgccacgttccacagttgccaccacctctgtggcattgaaatgagcacctccattaaagtctgaatcagtgca

SEQ ID NO: 353255 - DNA, 940 bp, Homo sapiens
tgaggattcgtacataaggggctctatggacagaatgatcagcatctctgatgggagcgtcaacgtggatcttctgagttattagagaggaaccttgctgtcctgatctgtgatagttcaccccctgagatcccctgagccccagggtgcccagaacttccctgattgacctgctccgctgctccttggcttacctgacctcttgctgtctctgctcgccctcctttctgtgccctactcattggggttccgcactttccacttcttcctttctctttctctcttccctcagaaactagaaatgtgaatgaggattattataaaagggggtccgtggaagaatgatcagcatctgtgatgggagcgtcagggttggtgtgctgaggtgttagagagggaccatgtgtcacttgtgctttgctcttgtcccacgtgtcttccactttgcatatgagccgtgaactgtgcatagtgctgggatggaggggagtgttgggcatgtgatcacgcctggctaataaggctttagtgtatttatttatttatttattttatttgtttttcattcatcccattaatcatttccccataactcaatggcctaaaactggcctgacttgggggaacgatgtgtctgtatttcatgtggctgtagatcccaagatgactggggtgggaggtcttgctagaatgggaagggtcatagaaagggccttgacatcagttcctttgtgtgtactcactgaagcctgcgttggtccagagcggaggctgtgtgcctgggggagttttcctctatacatctctccccaaccctaggttccctgttcttcctccagctgcaccagagcaacctctcactccccatgccacgttccacagttgccaccacctctgtggcattgaaatgagcacctccattaaagtctgaatcagtgca

SEQ ID NO: 353256 - DNA, 777 bp, Homo sapiens
ctctctccacactggctggatggttcaggataatcctctctccacactggcacaccaaccctgacgctcccatcacagatgctgttccgcactttccacttcttcctttctctttctctcttccctcagaaactagaaatgtgaatgaggattattataaaagggggtccgtggaagaatgatcagcatctgtgatgggagcgtcagggttggtgtgctgaggtgttagagagggaccatgtgtcacttgtgctttgctcttgtcccacgtgtcttccactttgcatatgagccgtgaactgtgcatagtgctgggatggaggggagtgttgggcatgtgatcacgcctggctaataaggctttagtgtatttatttatttatttattttatttgtttttcattcatcccattaatcatttccccataactcaatggcctaaaactggcctgacttgggggaacgatgtgtctgtatttcatgtggctgtagatcccaagatgactggggtgggaggtcttgctagaatgggaagggtcatagaaagggccttgacatcagttcctttgtgtgtactcactgaagcctgcgttggtccagagcggaggctgtgtgcctgggggagttttcctctatacatctctccccaaccctaggttccctgttcttcctccagctgcaccagagcaacctctcactccccatgccacgttccacagttgccaccacctctgtggcattgaaatgagcacctccattaaagtctgaatcagtgca

SEQ ID NO: 353257 - DNA, 342 bp, Homo sapiens
gtgagtgaggcagcctggtgagtgaagagaactctctgtgggattggtatttctagctcacccacctggtctctccttccaggtgtttgagggtgtcaggggagtttcaggagagcagaagtttcctttcaggggtgagagggcagtcactgagctgcaaatcctttgaaatgtttcagatcaagactggtgccccgtgccgttctgaacgtctggctaaatacaaccagctcatgaggtgagggtccctggggtgggagcccctggcccagatggctaaaggccccatttgcctgccagaccatctgtagcaccaagggcctggataacagtccatttcct

SEQ ID NO: 353258 - DNA, 2424 bp, Homo sapiens
acccgcgctcgtacgtgcgcctccgccggcagctcctgactcatcgggggctccgggtcacatgcgcccgcgcggccctataggcgcctcctccgcccgccgcccgggagccgcagccgccgccgccactgccactcccgctctctcagcgccgccgtcgccaccgccaccgccaccgccactaccaccgtctgagtctgcagtcccgagatcccagccatcatgtccatagagaagatctgggcccgggagatcctggactcccgcgggaaccccacagtggaggtggatctctatactgccaaaggtcttttccgggctgcagtgcccagtggagcctctacgggcatctatgaggccctggagctgagggatggagacaaacagcgttacttaggcaaaggtgtcctgaaggcagtggaccacatcaactccaccatcgcgccagccctcatcagctcaggtctctctgtggtggagcaagagaaactggacaacctgatgctggagttggatgggactgagaacaaatccaagtttggggccaatgccatcctgggtgtgtctctggccgtgtgtaaggcaggggcagctgagcgggaactgcccctgtatcgccacattgctcagctggccgggaactcagacctcatcctgcctgtgccggccttcaacgtgatcaatggtggctctcatgctggcaacaagctggccatgcaggagttcatgatcctcccagtgggagctgagagctttcgggatgccatgcgactaggtgcagaggtctaccatacactcaagggagtcatcaaggacaaatacggcaaggatgccaccaatgtgggggatgaaggtggctttgcccccaatatcctggagaacagtgaagccttggagctggtgaaggaagccatcgacaaggctggctacacggaaaagatcgttattggcatggatgttgctgcctcagagttttatcgtgatggcaaatatgacttggacttcaagtctcccactgatccttcccgatacatcactggggaccagctgggggcactctaccaggactttgtcagggactatcctgtggtctccattgaggacccatttgaccaggatgattgggctgcctggtccaagttcacagccaatgtagggatccagattgtgggtgatgacctgacagtgaccaacccaaaacgtattgagcgggcagtggaagaaaaggcctgcaactgtctgctgctcaaggtcaaccagatcggctcggtcactgaagccatccaagcgtgcaagctggcccaggagaatggctggggggtcatggtgagtcatcgctcaggagagactgaggacacattcattgctgacctggtggtggggctgtgcacaggccagatcaagactggtgccccgtgccgttctgaacgtctggctaaatacaaccagctcatgagaattgaggaagagctgggggatgaagctcgctttgccggacataacttccgtaatcccagtgtgctgtgattcctctgcttgcctggagacgtggaacctctgtctcatcctcctggaaccttgctgtcctgatctgtgatagttcaccccctgagatcccctgagccccagggtgcccagaacttccctgattgacctgctccgctgctccttggcttacctgacctcttgctgtctctgctcgccctcctttctgtgccctactcattggggttccgcactttccacttcttcctttctctttctctcttccctcagaaactagaaatgtgaatgaggattattataaaagggggtccgtggaagaatgatcagcatctgtgatgggagcgtcagggttggtgtgctgaggtgttagagagggaccatgtgtcacttgtgctttgctcttgtcccacgtgtcttccactttgcatatgagccgtgaactgtgcatagtgctgggatggaggggagtgttgggcatgtgatcacgcctggctaataaggctttagtgtatttatttatttatttattttatttgtttttcattcatcccattaatcatttccccataactcaatggcctaaaactggcctgacttgggggaacgatgtgtctgtatttcatgtggctgtagatcccaagatgactggggtgggaggtcttgctagaatgggaagggtcatagaaagggccttgacatcagttcctttgtgtgtactcactgaagcctgcgttggtccagagcggaggctgtgtgcctgggggagttttcctctatacatctctccccaaccctaggttccctgttcttcctccagctgcaccagagcaacctctcactccccatgccacgttccacagttgccaccacctctgtggcattgaaatgagcacctccattaaagtctgaatcagtgca

SEQ ID NO: 353259 - DNA, 920 bp, Homo sapiens
  misc_feature (822)..(822): n is a, c, g, or t
  misc_feature (848)..(848): n is a, c, g, or t
  misc_feature (851)..(851): n is a, c, g, or t
  misc_feature (899)..(899): n is a, c, g, or t
  misc_feature (902)..(902): n is a, c, g, or t
acccgcgctcgtacgtgcgcctccgccggcagctcctgactcatcgggggctccgggtcacatgcgcccgcgcggccctataggcgcctcctccgcccgccgcccgggagccgcagccgccgccgccactgccactcccgctctctcagcgccgccgtcgccaccgccaccgccaccgccactaccaccgtctgagtctgcagtcccgagatcccagccatcatgtccatagagaagatctgggcccgggagatcctggactcccgcgggaaccccacagtggaggtggatctctatactgccaaaggtcttttccgggctgcagtgcccagtggagcctctacgggcatctatgaggccctggagctgagggatggagacaaacagcgttacttaggcaaaggtgtcctgaaggcagtggaccacatcaactccaccatcgcgccagccctcatcagctcaggtctctctgtggtggagcaagagaaactggacaacctgatgctggagttggatgggactgagaacaaatccaagtttggggccaatgccatcctgggtgtgtctctggccgtgtgtaaggcaggggcagctgagcgggaactgcccctgtatcgccacattgctcagctggccgggaactcagacctcatcctgcctgtgccggccttcaacgtgatcaatggtggctctcatgctggcaacaagctggccatgcaggagttcatgatcctcccagtgggagctgagagctttcgggatgccatgcgactaggtgcagaggtctaccccccaaggggaattcctccaagggaacaaatncccgggaaaggaatgccccccaattnttngggggaataaaaggtgggctttgcccccccattttcctggaaaaaacnatnaaaacccttgggaaactt

SEQ ID NO: 353260 - DNA, 2340 bp, Homo sapiens
acccgcgctcgtacgtgcgcctccgccggcagctcctgactcatcgggggctccgggtcacatgcgcccgcgcggccctataggcgcctcctccgcccgccgcccgggagccgcagccgccgccgccactgccactcccgctctctcagcgccgccgtcgccaccgccaccgccaccgccactaccaccgtctgagtctgcagtcccgagatcccagccatcatgtccatagagaagatctgggcccgggagatcctggactcccgcgggaaccccacagtggaggtggatctctatactgccaaaggtcttttccgggctgcagtgcccagtggagcctctacgggcatctatgaggccctggagctgagggatggagacaaacagcgttacttaggcaaaggtgtcctgaaggcagtggaccacatcaactccaccatcgcgccagccctcatcagctcaggtctctctgtggtggagcaagagaaactggacaacctgatgctggagttggatgggactgagaacaaatccaagtttggggccaatgccatcctgggtgtgtctctggccgtgtgtaaggcaggggcagctgagcgggaactgcccctgtatcgccacattgctcagctggccgggaactcagacctcatcctgcctgtgccggccttcaacgtgatcaatggtggctctcatgctggcaacaagctggccatgcaggagttcatgatcctcccagtgggagctgagagctttcgggatgccatgcgactaggtgcagaggtctaccatacactcaagggagtcatcaaggacaaatacggcaaggatgccaccaatgtgggggatgaaggtggctttgcccccaatatcctggagaacagtgaagccttggagctggtgaaggaagccatcgacaaggctggctacacggaaaagatcgttattggcatggatgttgctgcctcagagttttatcgtgatggcaaatatgacttggacttcaagtctcccactgatccttcccgatacatcactggggaccagctgggggcactctaccaggactttgtcagggactatcctgtggtctccattgaggacccatttgaccaggatgattgggctgcctggtccaagttcacagccaatgtagggatccagattgtgggtgatgacctgacagtgaccaacccaaaacgtattgagcgggcagtggaagaaaaggcctgcaactgtctgctgctcaaggtcaaccagatcggctcggtcactgaagccatccaagcgtgcaagctggcccaggagaatggctggggggtcatggtgagtcatcgctcaggagagactgaggacacattcattgctgacctggtggtggggctgtgcacaggccagatcaagactggtgccccgtgccgttctgaacgtctggctaaatacaaccagctcatgagaattgaggaagagctgggggatgaagctcgctttgccggacataacttccgtaatcccagtgtgctgtgattcctctgcttgcctggagacgtggaacctctgtctcatcctcctggaaccttgctgtcctgatctgtgatagttcaccccctgagatcccctgagccccagggtgcccagaacttccctgattgacctgctccgctgctcctttctctttctctcttccctcagaaactagaaatgtgaatgaggattattataaaagggggtccgtggaagaatgatcagcatctgtgatgggagcgtcagggttggtgtgctgaggtgttagagagggaccatgtgtcacttgtgctttgctcttgtcccacgtgtcttccactttgcatatgagccgtgaactgtgcatagtgctgggatggaggggagtgttgggcatgtgatcacgcctggctaataaggctttagtgtatttatttatttatttattttatttgtttttcattcatcccattaatcatttccccataactcaatggcctaaaactggcctgacttgggggaacgatgtgtctgtatttcatgtggctgtagatcccaagatgactggggtgggaggtcttgctagaatgggaagggtcatagaaagggccttgacatcagttcctttgtgtgtactcactgaagcctgcgttggtccagagcggaggctgtgtgcctgggggagttttcctctatacatctctccccaaccctaggttccctgttcttcctccagctgcaccagagcaacctctcactccccatgccacgttccacagttgccaccacctctgtggcattgaaatgagcacctccattaaagtctgaatcagtgca

SEQ ID NO: 353261 - DNA, 2294 bp, Homo sapiens
gggcggtacggtccggaatttagggatgcgccgcgtcgccaccgcacgacacggcactaccaccggctgagtctgcagtcatcccagccatcatgtccatagagaagatctgggcccgggagatcctggactcccgcgggaaccccacagtggaggtggatctctatactgccaaaggtcttttccgggctgcagtgcccagtggagcctctacgggcatctatgaggccctggagctgagggatggagacaaacagcgttacttaggcaaaggtgtcctgaaggcagtggaccacatcaactccaccatcgcgccagccctcatcagctcaggtctctctgtggtggagcaagagaaactggacaacctgatgctggagttggatgggactgagaacaaatccaagtttggggccaatgccatcctgggtgtgtctctggccgtgtgtaaggcaggggcagctgagcgggaactgcccctgtatcgccacattgctcagctggccgggaactcagacctcatcctgcctgtgccggccttcaacgtgatcaatggtggctctcatgctggcaacaagctggccatgcaggagttcatgatcctcccagtgggagctgagagctttcgggatgccatgcgactaggtgcagaggtctaccatacactcaagggagtcatcaaggacaaatacggcaaggatgccaccaatgtgggggatgaaggtggctttgcccccaatatcctggagaacagtgaagccttggagctggtgaaggaagccatcgacaaggctggctacacggaaaagatcgttattggcatggatgttgctgcctcagagttttatcgtgatggcaaatatgacttggacttcaagtctcccactgatccttcccgatacatcactggggaccagctgggggcactctaccaggactttgtcagggactatcctgtggtctccattgaggacccatttgaccaggatgattgggctgcctggtccaagttcacagccaatgtagggatccagattgtgggtgatgacctgacagtgaccaacccaaaacgtattgagcgggcagtggaagaaaaggcctgcaactgtctgctgctcaaggtcaaccagatcggctcggtcactgaagccatccaagcgtgcaagctggcccaggagaatggctggggggtcatggtgagtcatcgctcaggagagactgaggacacattcattgctgacctggtggtggggctgtgcacaggccagatcaagactggtgccccgtgccgttctgaacgtctggctaaatacaaccagctcatgagaattgaggaagagctgggggatgaagctcgctttgccggacataacttccgtaatcccagtgtgctgtgattcctctgcttgcctggagacgtggaacctctgtctcatcctcctggaaccttgctgtcctgatctgtgatagttcaccccctgagatcccctgagccccagggtgcccagaacttccctgattgacctgctccgctgctccttggcttacctgacctcttgctgtctctgctcgccctcctttctgtgccctactcattggggttccgcactttccacttcttcctttctctttctctcttccctcagaaactagaaatgtgaatgaggattattataaaagggggtccgtggaagaatgatcagcatctgtgatgggagcgtcagggttggtgtgctgaggtgttagagagggaccatgtgtcacttgtgctttgctcttgtcccacgtgtcttccactttgcatatgagccgtgaactgtgcatagtgctgggatggaggggagtgttgggcatgtgatcacgcctggctaataaggctttagtgtatttatttatttatttattttatttgtttttcattcatcccattaatcatttccccataactcaatggcctaaaactggcctgacttgggggaacgatgtgtctgtatttcatgtggctgtagatcccaagatgactggggtgggaggtcttgctagaatgggaagggtcatagaaagggccttgacatcagttcctttgtgtgtactcactgaagcctgcgttggtccagagcggaggctgtgtgcctgggggagttttcctctatacatctctccccaaccctaggttccctgttcttcctccagctgcaccagagcaacctctcactccccatgccacgttccacagttgccaccacctctgtggcattgaaatgagcacctccattaaagtctgaatcagtgca

SEQ ID NO: 353262 - DNA, 1964 bp, Homo sapiens
gtagctaggtacgaggcctggtgttaatcggccgaggactgatgctggagttggatgggactgagaacaaatccaagtttggggccaatgccatcctgggtgtgtctctggccgtgtgtaaggcaggggcagctgagcgggaactgcccctgtatcgccacattgctcagctggccgggaactcagacctcatcctgcctgtgccggccttcaacgtgatcaatggtggctctcatgctggcaacaagctggccatgcaggagttcatgatcctcccagtgggagctgagagctttcgggatgccatgcgactaggtgcagaggtctaccatacactcaagggagtcatcaaggacaaatacggcaaggatgccaccaatgtgggggatgaaggtggctttgcccccaatatcctggagaacagtgaagccttggagctggtgaaggaagccatcgacaaggctggctacacggaaaagatcgttattggcatggatgttgctgcctcagagttttatcgtgatggcaaatatgacttggacttcaagtctcccactgatccttcccgatacatcactggggaccagctgggggcactctaccaggactttgtcagggactatcctgtggtctccattgaggacccatttgaccaggatgattgggctgcctggtccaagttcacagccaatgtagggatccagattgtgggtgatgacctgacagtgaccaacccaaaacgtattgagcgggcagtggaagaaaaggcctgcaactgtctgctgctcaaggtcaaccagatcggctcggtcactgaagccatccaagcgtgcaagctggcccaggagaatggctggggggtcatggtgagtcatcgctcaggagagactgaggacacattcattgctgacctggtggtggggctgtgcacaggccagatcaagactggtgccccgtgccgttctgaacgtctggctaaatacaaccagctcatgagaattgaggaagagctgggggatgaagctcgctttgccggacataacttccgtaatcccagtgtgctgtgattcctctgcttgcctggagacgtggaacctctgtctcatcctcctggaaccttgctgtcctgatctgtgatagttcaccccctgagatcccctgagccccagggtgcccagaacttccctgattgacctgctccgctgctccttggcttacctgacctcttgctgtctctgctcgccctcctttctgtgccctactcattggggttccgcactttccacttcttcctttctctttctctcttccctcagaaactagaaatgtgaatgaggattattataaaagggggtccgtggaagaatgatcagcatctgtgatgggagcgtcagggttggtgtgctgaggtgttagagagggaccatgtgtcacttgtgctttgctcttgtcccacgtgtcttccactttgcatatgagccgtgaactgtgcatagtgctgggatggaggggagtgttgggcatgtgatcacgcctggctaataaggctttagtgtatttatttatttatttattttatttgtttttcattcatcccattaatcatttccccataactcaatggcctaaaactggcctgacttgggggaacgatgtgtctgtatttcatgtggctgtagatcccaagatgactggggtgggaggtcttgctagaatgggaagggtcatagaaagggccttgacatcagttcctttgtgtgtactcactgaagcctgcgttggtccagagcggaggctgtgtgcctgggggagttttcctctatacatctctccccaaccctaggttccctgttcttcctccagctgcaccagagcaacctctcactccccatgccacgttccacagttgccaccacctctgtggcattgaaatgagcacctccattaaagtctgaatcagtgca

SEQ ID NO: 353263 - DNA, 2133 bp, Homo sapiens
acccgcgctcgtacgtgcgcctccgccggcagctcctgactcatcgggggctccgggtcacatgcgcccgcgcggccctataggcgcctcctccgcccgccgcccgggagccgcagccgccgccgccactgccactcccgctctctcagcgccgccgtcgccaccgccaccgccaccgccactaccaccgtctgagtctgcagtcccgagatcccagccatcatgtccatagagaagatctgggcccgggagatcctggactcccgcgggaaccccacagtggaggtggatctctatactgccaaaggtcttttccgggctgcagtgcccagtggagcctctacgggcatctatgaggccctggagctgagggatggagacaaacagcgttacttaggcaaaggtgtcctgaaggcagtggaccacatcaactccaccatcgcgccagccctcatcagctcaggtctctctgtggtggagcaagagaaactggacaacctgatgctggagttggatgggactgagaacaaatgcaaggatgccaccaatgtgggggatgaaggtggctttgcccccaatatcctggagaacagtgaagccttggagctggtgaaggaagccatcgacaaggctggctacacggaaaagatcgttattggcatggatgttgctgcctcagagttttatcgtgatggcaaatatgacttggacttcaagtctcccactgatccttcccgatacatcactggggaccagctgggggcactctaccaggactttgtcagggactatcctgtggtctccattgaggacccatttgaccaggatgattgggctgcctggtccaagttcacagccaatgtagggatccagattgtgggtgatgacctgacagtgaccaacccaaaacgtattgagcgggcagtggaagaaaaggcctgcaactgtctgctgctcaaggtcaaccagatcggctcggtcactgaagccatccaagcgtgcaagctggcccaggagaatggctggggggtcatggtgagtcatcgctcaggagagactgaggacacattcattgctgacctggtggtggggctgtgcacaggccagatcaagactggtgccccgtgccgttctgaacgtctggctaaatacaaccagctcatgagaattgaggaagagctgggggatgaagctcgctttgccggacataacttccgtaatcccagtgtgctgtgattcctctgcttgcctggagacgtggaacctctgtctcatcctcctggaaccttgctgtcctgatctgtgatagttcaccccctgagatcccctgagccccagggtgcccagaacttccctgattgacctgctccgctgctccttggcttacctgacctcttgctgtctctgctcgccctcctttctgtgccctactcattggggttccgcactttccacttcttcctttctctttctctcttccctcagaaactagaaatgtgaatgaggattattataaaagggggtccgtggaagaatgatcagcatctgtgatgggagcgtcagggttggtgtgctgaggtgttagagagggaccatgtgtcacttgtgctttgctcttgtcccacgtgtcttccactttgcatatgagccgtgaactgtgcatagtgctgggatggaggggagtgttgggcatgtgatcacgcctggctaataaggctttagtgtatttatttatttatttattttatttgtttttcattcatcccattaatcatttccccataactcaatggcctaaaactggcctgacttgggggaacgatgtgtctgtatttcatgtggctgtagatcccaagatgactggggtgggaggtcttgctagaatgggaagggtcatagaaagggccttgacatcagttcctttgtgtgtactcactgaagcctgcgttggtccagagcggaggctgtgtgcctgggggagttttcctctatacatctctccccaaccctaggttccctgttcttcctccagctgcaccagagcaacctctcactccccatgccacgttccacagttgccaccacctctgtggcattgaaatgagcacctccattaaagtctgaatcagtgca

SEQ ID NO: 353264 - DNA, 1598 bp, Homo sapiens
ggacgcgtgggtcgacccacgcgtccggtggctttgcccccaatatcctggacaacagtgaagccttggagctggtgaaggaagccatcgacaaggctggctacacggaaaagatcgttattggcatggatgttgctgcctcagagttttatcgtgatggcaaatatgacttggacttcaagtctcccactgatccttcccgatacatcactggggaccagctgggggcactctaccaggactttgtcagggactatcctgtggtctccattgaggacccatttgaccaggatgattgggctgcctggtccaagttcacagccaatgtagggatccagattgtgggtgatgacctgacagtgaccaacccaaaacgtattgagcgggcagtggaagaaaaggcctgcaactgtctgctgctcaaggtcaaccagatcggctcggtcactgaagccatccaagcgtgcaagctggcccaggagaatggctggggggtcatggtgagtcatcgctcaggagagactgaggacacattcattgctgacctggtggtggggctgtgcacaggccagatcaagactggtgccccgtgccgttctgaacgtctggctaaatacaaccagctcatgagaattgaggaagagctgggggatgaagctcgctttgccggacataacttccgtaatcccagtgtgctgtgattcctctgcttgcctggagacgtggaacctctgtctcatcctcctggaaccttgctgtcctgatctgtgatagttcaccccctgagatcccctgagccccagggtgcccagaacttccctgattgacctgctccgctgctccttggcttacctgacctcttgctgtctctgctcgccctcctttctgtgccctactcattggggttccgcactttccacttcttcctttctctttctctcttccctcagaaactagaaatgtgaatgaggattattataaaagggggtccgtggaagaatgatcagcatctgtgatgggagcgtcagggttggtgtgctgaggtgttagagagggaccatgtgtcacttgtgctttgctcttgtcccacgtgtcttccactttgcatatgagccgtgaactgtgcatagtgctgggatggaggggagtgttgggcatgtgatcacgcctggctaataaggctttagtgtatttatttatttatttattttatttgtttttcattcatcccattaatcatttccccataactcaatggcctaaaactggcctgacttgggggaacgatgtgtctgtatttcatgtggctgtagatcccaagatgactggggtgggaggtcttgctagaatgggaagggtcatagaaagggccttgacatcagttcctttgtgtgtactcactgaagcctgcgttggtccagagcggaggctgtgtgcctgggggagttttcctctatacatctctccccaaccctaggttccctgttcttcctccagctgcaccagagcaacctctcactccccatgccacgttccacagttgccaccacctctgtggcattgaaatgagcacctccattaaagtctgaatcagtgca

SEQ ID NO: 353265 - DNA, 1620 bp, Homo sapiens
tgcattggaggaaaaacatgttggcttttctcttgacgtgggagaaattgaaaagaaggggaaggggaagaaaagaaggggagagagcgccgggatccggacggggagcaaccggggcaggccgtgccggctgaggaggtcctgaggctacagagctgccgcggctggcacacgagcgcctcggcactaaccgagtgttcgcgggggctgtgaggggagggccccgggcgccattgctggcggtgggagcgccgcccggtctcagcccgccctcggctgctctcctcctccggctgggaggggccgtagctcggggccgtcgccagccccggcccgggctcgagaatcaagggcctcggccgccgtcccgcagctcagtccatcgcccttgccgggcagcccgggcagagaccatgtttgacaagacgcggctgccgtacgtggccctcgatgtgctctgcgtgttgctggctggattgccttttgcaattcttacttcaaggcatacccccttccaacgaggagtattctgtaatgatgagtccatcaagtacccttacaaagaagacaccataccttatgcgttattaggtggaataatcattccattcagtattatcgttattattcttggagaaaccctgtctgtttactgtaaccttttgcactcaaattcctttatcaggaataactacatagccactatttacaaagccattggaacctttttatttggtgcagctgctagtcagtccctgactgacattgccaagtattcaataggcagactgcggcctcacttcttggatgtttgtgatccagattggtcaaaaatcaactgcagcgatggttacattgaatactacatatgtcgagggaatgcagaaagagttaaggaaggcaggttgtccttctattcaggccactcttcgttttccatgtactgcatgctgtttgtggcactttatcttcaagccaggatgaagggagactgggcaagactcttacgccccacactgcaatttggtcttgttgccgtatccatttatgtgggcctttctcgagtttctgattataaacaccactggagcgatgtgttgactggactcattcagggagctctggttgcaatattagttgctgtatatgtatcggatttcttcaaagaaagaacttcttttaaagaaagaaaagaggaggactctcatacaactctgcatgaaacaccaacaactgggaatcactatccgagcaatcaccagccttgaaaggcagcagggtgcccaggtgaagctggcctgttttctaaaggaaaatgattgccacaaggcaagaggatgcatctttcttcctggtgtacaagcctttaaagacttctgctgctgctatgcctcttggatgcacactttgtgtgtacatagttacctttaactcagtggttatctaatagctctaaactcattaaaaaaactccaagccttccaccaaaacagtgccccacctgtatacatttttattaaaaaaatgtaatgcttatgtataaacatgtatgtaatatgctttctatgaatgatgtttgatttaaatataatacatattaaaatgtatgggagaaccaaa

SEQ ID NO: 353266 - DNA, 1654 bp, Homo sapiens
acccgcgcgctgcccggtcctgcgctgcccagcgggaggggctggaccccgcgttcctcctccctgccggtccccatccttaaagcgagagtctggacgccccgcctgtgggagagagcgccgggatccggacggggagcaaccggggcaggccgtgccggctgaggaggtcctgaggctacagagctgccgcggctggcacacgagcgcctcggcactaaccgagtgttcgcgggggctgtgaggggagggccccgggcgccattgctggcggtgggagcgccgcccggtctcagcccgccctcggctgctctcctcctccggctgggaggggccgtagctcggggccgtcgccagccccggcccgggctcgagaatcaagggcctcggccgccgtcccgcagctcagtccatcgcccttgccgggcagcccgggcagagaccatgtttgacaagacgcggctgccgtacgtggccctcgatgtgctctgcgtgttgctggcttccatgcctatggctgttctaaaattgggccaaatatatccatttcagagaggctttttctgtaaagacaacagcatcaactatccgtaccatgacagtaccgtcacatccactgtcctcatcctagtgggggttggcttgcccatttcctctattattcttggagaaaccctgtctgtttactgtaaccttttgcactcaaattcctttatcaggaataactacatagccactatttacaaagccattggaacctttttatttggtgcagctgctagtcagtccctgactgacattgccaagtattcaataggcagactgcggcctcacttcttggatgtttgtgatccagattggtcaaaaatcaactgcagcgatggttacattgaatactacatatgtcgagggaatgcagaaagagttaaggaaggcaggttgtccttctattcaggccactcttcgttttccatgtactgcatgctgtttgtggcactttatcttcaagccaggatgaagggagactgggcaagactcttacgccccacactgcaatttggtcttgttgccgtatccatttatgtgggcctttctcgagtttctgattataaacaccactggagcgatgtgttgactggactcattcagggagctctggttgcaatattagttgctgtatatgtatcggatttcttcaaagaaagaacttcttttaaagaaagaaaagaggaggactctcatacaactctgcatgaaacaccaacaactgggaatcactatccgagcaatcaccagccttgaaaggcagcagggtgcccaggtgaagctggcctgttttctaaaggaaaatgattgccacaaggcaagaggatgcatctttcttcctggtgtacaagcctttaaagacttctgctgctgctatgcctcttggatgcacactttgtgtgtacatagttacctttaactcagtggttatctaatagctctaaactcattaaaaaaactccaagccttccaccaaaacagtgccccacctgtatacatttttattaaaaaaatgtaatgcttatgtataaacatgtatgtaatatgctttctatgaatgatgtttgatttaaatataatacatattaaaatgtatgggagaaccaaa

SEQ ID NO: 353267 - DNA, 1648 bp, Homo sapiens
acccgcgcgctgcccggtcctgcgctgcccagcgggaggggctggaccccgcgttcctcctccctgccggtccccatccttaaagcgagagtctggacgccccgcctgtgggagagagcgccgggatccggacggggagcaaccggggcaggccgtgccggctgaggaggtcctgaggctacagagctgccgcggctggcacacgagcgcctcggcactaaccgagtgttcgcgggggctgtgaggggagggccccgggcgccattgctggcggtgggagcgccgcccggtctcagcccgccctcggctgctctcctcctccggctgggaggggccgtagctcggggccgtcgccagccccggcccgggctcgagaatcaagggcctcggccgccgtcccgcagctcagtccatcgcccttgccgggcagcccgggcagagaccatgtttgacaagacgcggctgccgtacgtggccctcgatgtgctctgcgtgttgctggctggattgccttttgcaattcttacttcaaggcatacccccttccaacgaggagtattctgtaatgatgagtccatcaagtacccttacaaagaagacaccataccttatgcgttattaggtggaataatcattccattcagtattatcgttattattcttggagaaaccctgtctgtttactgtaaccttttgcactcaaattcctttatcaggaataactacatagccactatttacaaagccattggaacctttttatttggtgcagctgctagtcagtccctgactgacattgccaagtattcaataggcagactgcggcctcacttcttggatgtttgtgatccagattggtcaaaaatcaactgcagcgatggttacattgaatactacatatgtcgagggaatgcagaaagagttaaggaaggcaggttgtccttctattcaggccactcttcgttttccatgtactgcatgctgtttgtggcactttatcttcaagccaggatgaagggagactgggcaagactcttacgccccacactgcaatttggtcttgttgccgtatccatttatgtgggcctttctcgagtttctgattataaacaccactggagcgatgtgttgactggactcattcagggagctctggttgcaatattagttgctgtatatgtatcggatttcttcaaagaaagaacttcttttaaagaaagaaaagaggaggactctcatacaactctgcatgaaacaccaacaactgggaatcactatccgagcaatcaccagccttgaaaggcagcagggtgcccaggtgaagctggcctgttttctaaaggaaaatgattgccacaaggcaagaggatgcatctttcttcctggtgtacaagcctttaaagacttctgctgctgctatgcctcttggatgcacactttgtgtgtacatagttacctttaactcagtggttatctaatagctctaaactcattaaaaaaactccaagccttccaccaaaacagtgccccacctgtatacatttttattaaaaaaatgtaatgcttatgtataaacatgtatgtaatatgctttctatgaatgcgtcgtcgcttcgacgacgcattcatgaatggtgtgagttggcca

SEQ ID NO: 353268 - DNA, 1465 bp, Homo sapiens
acccgcgcgctgcccggtcctgcgctgcccagcgggaggggctggaccccgcgttcctcctccctgccggtccccatccttaaagcgagagtctggacgccccgcctgtgggagagagcgccgggatccggacggggagcaaccggggcaggccgtgccggctgaggaggtccccggcccgggctcgagaatcaagggcctcggccgccgtcccgcagctcagtccatcgcccttgccgggcagcccgggcagagaccatgtttgacaagacgcggctgccgtacgtggccctcgatgtgctctgcgtgttgctggctggattgccttttgcaattcttacttcaaggcatacccccttccaacgaggagtattctgtaatgatgagtccatcaagtacccttacaaagaagacaccataccttatgcgttattaggtggaataatcattccattcagtattatcgttattattcttggagaaaccctgtctgtttactgtaaccttttgcactcaaattcctttatcaggaataactacatagccactatttacaaagccattggaacctttttatttggtgcagctgctagtcagtccctgactgacattgccaagtattcaataggcagactgcggcctcacttcttggatgtttgtgatccagattggtcaaaaatcaactgcagcgatggttacattgaatactacatatgtcgagggaatgcagaaagagttaaggaaggcaggttgtccttctattcaggccactcttcgttttccatgtactgcatgctgtttgtggcactttatcttcaagccaggatgaagggagactgggcaagactcttacgccccacactgcaatttggtcttgttgccgtatccatttatgtgggcctttctcgagtttctgattataaacaccactggagcgatgtgttgactggactcattcagggagctctggttgcaatattagttgctgtatatgtatcggatttcttcaaagaaagaacttcttttaaagaaagaaaagaggaggactctcatacaactctgcatgaaacaccaacaactgggaatcactatccgagcaatcaccagccttgaaaggcagcagggtgcccaggtgaagctggcctgttttctaaaggaaaatgattgccacaaggcaagaggatgcatctttcttcctggtgtacaagcctttaaagacttctgctgctgctatgcctcttggatgcacactttgtgtgtacatagttacctttaactcagtggttatctaatagctctaaactcattaaaaaaactccaagccttccaccaaaacagtgccccacctgtatacatttttattaaaaaaatgtaatgcttatgtataaacatgtatgtaatatgctttctatgaatgatgtttgatttaaatataatacatattaaaatgtatgggagaaccaaa

SEQ ID NO: 353269 - DNA, 1806 bp, Homo sapiens
acccgcgcgctgcccggtcctgcgctgcccagcgggaggggctggaccccgcgttcctcctccctgccggtccccatccttaaagcgagagtctggacgccccgcctgtgggagagagcgccgggatccggacggggagcaaccggggcaggccgtgccggctgaggaggtcctgaggctacagagctgccgcggctggcacacgagcgcctcggcactaaccgagtgttcgcgggggctgtgaggggagggccccgggcgccattgctggcggtgggagcgccgcccggtctcagcccgccctcggctgctctcctcctccggctgggaggggccgtagctcggggccgtcgccagccccggcccgggctcgagaatcaagggcctcggccgccgtcccgcagctcagtccatcgcccttgccgggcagcccgggcagagaccatgtttgacaagacgcggctgccgtacgtggccctcgatgtgctctgcgtgttgctggcttccatgcctatggctgttctaaaattgggccaaatatatccatttcagagaggctttttctgtaaagacaacagcatcaactatccgtaccatgacagtaccgtcacatccactgtcctcatcctagtgggggttggcttgcccatttcctctctggattgccttttgcaattcttacttcaaggcatacccccttccaacgaggagtattctgtaatgatgagtccatcaagtacccttacaaagaagacaccataccttatgcgttattaggtggaataatcattccattcagtattatcgttattattcttggagaaaccctgtctgtttactgtaaccttttgcactcaaattcctttatcaggaataactacatagccactatttacaaagccattggaacctttttatttggtgcagctgctagtcagtccctgactgacattgccaagtattcaataggcagactgcggcctcacttcttggatgtttgtgatccagattggtcaaaaatcaactgcagcgatggttacattgaatactacatatgtcgagggaatgcagaaagagttaaggaaggcaggttgtccttctattcaggccactcttcgttttccatgtactgcatgctgtttgtggcactttatcttcaagccaggatgaagggagactgggcaagactcttacgccccacactgcaatttggtcttgttgccgtatccatttatgtgggcctttctcgagtttctgattataaacaccactggagcgatgtgttgactggactcattcagggagctctggttgcaatattagttgctgtatatgtatcggatttcttcaaagaaagaacttcttttaaagaaagaaaagaggaggactctcatacaactctgcatgaaacaccaacaactgggaatcactatccgagcaatcaccagccttgaaaggcagcagggtgcccaggtgaagctggcctgttttctaaaggaaaatgattgccacaaggcaagaggatgcatctttcttcctggtgtacaagcctttaaagacttctgctgctgctatgcctcttggatgcacactttgtgtgtacatagttacctttaactcagtggttatctaatagctctaaactcattaaaaaaactccaagccttccaccaaaacagtgccccacctgtatacatttttattaaaaaaatgtaatgcttatgtataaacatgtatgtaatatgctttctatgaatgatgtttgatttaaatataatacatattaaaatgtatgggagaaccaaa

SEQ ID NO: 353270 - DNA, 1039 bp, Homo sapiens
  misc_feature (15)..(15): n is a, c, g, or t
acttagagctactgngactctcttatttaaccaccgctacagattattcttggagaaaccctgtctgtttactgtaaccttttgcactcaaattcctttatcaggaataactacatagccactatttacaaagccattggaacctttttatttggtgcagctgctagtcagtccctgactgacattgccaagtattcaataggcagactgcggcctcacttcttggatgtttgtgatccagattggtcaaaaatcaactgcagcgatggttacattgaatactacatatgtcgagggaatgcagaaagagttaaggaaggcaggttgtccttctattcaggccactcttcgttttccatgtactgcatgctgtttgtggcactttatcttcaagccaggatgaagggagactgggcaagactcttacgccccacactgcaatttggtcttgttgccgtatccatttatgtgggcctttctcgagtttctgattataaacaccactggagcgatgtgttgactggactcattcagggagctctggttgcaatattagttgctgtatatgtatcggatttcttcaaagaaagaacttcttttaaagaaagaaaagaggaggactctcatacaactctgcatgaaacaccaacaactgggaatcactatccgagcaatcaccagccttgaaaggcagcagggtgcccaggtgaagctggcctgttttctaaaggaaaatgattgccacaaggcaagaggatgcatctttcttcctggtgtacaagcctttaaagacttctgctgctgctatgcctcttggatgcacactttgtgtgtacatagttacctttaactcagtggttatctaatagctctaaactcattaaaaaaactccaagccttccaccaaaacagtgccccacctgtatacatttttattaaaaaaatgtaatgcttatgtataaacatgtatgtaatatgctttctatgaatgatgtttgatttaaatataatacatattaaaatgtatgggagaaccaaa

SEQ ID NO: 353271 - DNA, 1776 bp, Homo sapiens
  misc_feature (1774)..(1774): n is a, c, g, or t
acccgcgcgctgcccggtcctgcgctgcccagcgggaggggctggaccccgcgttcctcctccctgccggtccccatccttaaagcgagagtctggacgccccgcctgtgggagagagcgccgggatccggacggggagcaaccggggcaggccgtgccggctgaggaggtcctgaggctacagagctgccgcggctggcacacgagcgcctcggcactaaccgagtgttcgcgggggctgtgaggggagggccccgggcgccattgctggcggtgggagcgccgcccggtctcagcccgccctcggctgctctcctcctccggctgggaggggccgtagctcggggccgtcgccagccccggcccgggctcgagaatcaagggcctcggccgccgtcccgcagctcagtccatcgcccttgccgggcagcccgggcagagaccatgtttgacaagacgcggctgccgtacgtggccctcgatgtgctctgcgtgttgctggctggattgccttttgcaattcttacttcaaggcatacccccttccaacgaggagtattctgtaatgatgagtccatcaagtacccttacaaagaagacaccataccttatgcgttattaggtggaataatcattccattcagtattatcgttattattcttggagaaaccctgtctgtttactgtaaccttttgcactcaaattcctttatcaggaataactacatagccactatttacaaagccattggaacctttttatttggtgcagctgctagtcagtccctgactgacattgccaagtattcaataggcagactgcggcctcacttcttggatgtttgtgatccagattggtcaaaaatcaactgcagcgatggttacattgaatactacatatgtcgagggaatgcagaaagagttaaggaaggcaggttgtccttctattcaggccactcttcgttttccatgtactgcatgctgtttgtggcactttatcttcaagccaggatgaagggagactgggcaagactcttacgccccacactgcaatttggtcttgttgccgtatccatttatgtgggcctttctcgagtttctgattataaacaccactggagcgatgtgttgactggactcattcagggagctctggttgcaatattagttgctgtatatgtatcggatttcttcaaagaaagaacttcttttaaagaaagaaaagaggaggactctcatacaactctgcatgaaacaccaacaactgggaatcactatccgagcaatcaccagccttgaaaggcagcagggtgcccaggtgaagctggcctgttttctaaaggttaaagacttctgctgctgctatgcctcttggatgcacactttgtgtgtacatagttacctttaactcagtggttatctaatagctctaaactcattaaaaaaactccaagccttccaccaaaacagtgccccacctgtatacatttttattaaaaaaatgtaatgcttatgtataaacatgtatgtaatatgctttctatgaatgatgtttgatttaaatataatacatattaaaatgtatgggagaaccaaatccacacttgcaggcatttgtagtcaactgtaatcaaacaggtggtcaataatttaaaatctcacattcctttagctgactctacaagtagaggctggcagcaaacacaatatctctcttgattttggtgattcctaagagaaaagaaagtaaggtttaaactttcaagaccacaanac

SEQ ID NO: 353272 - DNA, 907 bp, Homo sapiens
  misc_feature (905)..(905): n is a, c, g, or t
tgtagaaataactcttttattcagtattggcaaaatgaagctatttgctgaaggcataacaaagcaactcttaatttggaataatctttaaaaaatcccagttagtctctaattttttatatgcttaatctgtacacctcaaagtatatccttttgtttatatttatcttaggatgctgttgatcacaactttgtatgtagtttttaacttgatctaaattataccattaaatattttgcactgtaggctgtatatgtatcggatttcttcaaagaaagaacttcttttaaagaaagaaaagaggaggactctcatacaactctgcatgaaacaccaacaactgggaatcactatccgagcaatcaccagccttgaaaggcagcagggtgcccaggtgaagctggcctgttttctaaaggaaaatgattgccacaaggcaagaggatgcatctttcttcctggtgtacaagcctttaaagacttctgctgctgctatgcctcttggatgcacactttgtgtgtacatagttacctttaactcagtggttatctaatagctctaaactcattaaaaaaactccaagccttccaccaaaacagtgccccacctgtatacatttttattaaaaaaatgtaatgcttatgtataaacatgtatgtaatatgctttctatgaatgatgtttgatttaaatataatacatattaaaatgtatgggagaaccaaatccacacttgcaggcatttgtagtcaactgtaatcaaacaggtggtcaataatttaaaatctcacattcctttagctgactctacaagtagaggctggcagcaaacacaatatctctcttgattttggtgattcctaagagaaaagaaagtaaggtttaaactttcaagaccacaanac

SEQ ID NO: 353273 - DNA, 317 bp, Homo sapiens
gggccaattttgctctcctccttgtggaagtctcttttattgtttatttctaaaatcggaggtcaatgcaagtaatagtatttatacttggaaaaaggtggggctgatatggacaagcaaatgatgctgcatgatttccttaatctttgcccttgggtataatggagatccatctccagagagggcaaaatatggctaggatttgcatcccattcagtagactttacttcctaatgaagtgaattgaatttaatcatgtgtgtctttttttcccttccccaacagcttccatgcctatggctgttctaaaattgggc

SEQ ID NO: 353274 - DNA, 1799 bp, Homo sapiens
  misc_feature (1797)..(1797): n is a, c, g, or t
tgcattggaggaaaaacatgttggcttttctcttgacgtgggagaaattgaaaagaaggggaaggggaagaaaagaaggggagagagcgccgggatccggacggggagcaaccggggcaggccgtgccggctgaggaggtcctgaggctacagagctgccgcggctggcacacgagcgcctcggcactaaccgagtgttcgcgggggctgtgaggggagggccccgggcgccattgctggcggtgggagcgccgcccggtctcagcccgccctcggctgctctcctcctccggctgggaggggccgtagctcggggccgtcgccagccccggcccgggctcgagaatcaagggcctcggccgccgtcccgcagctcagtccatcgcccttgccgggcagcccgggcagagaccatgtttgacaagacgcggctgccgtacgtggccctcgatgtgctctgcgtgttgctggctggattgccttttgcaattcttacttcaaggcatacccccttccaacgaggagtattctgtaatgatgagtccatcaagtacccttacaaagaagacaccataccttatgcgttattaggtggaataatcattccattcagtattatcgttattattcttggagaaaccctgtctgtttactgtaaccttttgcactcaaattcctttatcaggaataactacatagccactatttacaaagccattggaacctttttatttggtgcagctgctagtcagtccctgactgacattgccaagtattcaataggcagactgcggcctcacttcttggatgtttgtgatccagattggtcaaaaatcaactgcagcgatggttacattgaatactacatatgtcgagggaatgcagaaagagttaaggaaggcaggttgtccttctattcaggccactcttcgttttccatgtactgcatgctgtttgtggcactttatcttcaagccaggatgaagggagactgggcaagactcttacgccccacactgcaatttggtcttgttgccgtatccatttatgtgggcctttctcgagtttctgattataaacaccactggagcgatgtgttgactggactcattcagggagctctggttgcaatattagttgctgtatatgtatcggatttcttcaaagaaagaacttcttttaaagaaagaaaagaggaggactctcatacaactctgcatgaaacaccaacaactgggaatcactatccgagcaatcaccagccttgaaaggcagcagggtgcccaggtgaagctggcctgttttctaaaggaaaatgattgccacaaggcaagaggatgcatctttcttcctggtgtacaagcctttaaagacttctgctgctgctatgcctcttggatgcacactttgtgtgtacatagttacctttaactcagtggttatctaatagctctaaactcattaaaaaaactccaagccttccaccaaaacagtgccccacctgtatacatttttattaaaaaaatgtaatgcttatgtataaacatgtatgtaatatgctttctatgaatgatgtttgatttaaatataatacatattaaaatgtatgggagaaccaaatccacacttgcaggcatttgtagtcaactgtaatcaaacaggtggtcaataatttaaaatctcacattcctttagctgactctacaagtagaggctggcagcaaacacaatatctctcttgattttggtgattcctaagagaaaagaaagtaaggtttaaactttcaagaccacaanac

SEQ ID NO: 353275 - DNA, 1651 bp, Homo sapiens
acccgcgcgctgcccggtcctgcgctgcccagcgggaggggctggaccccgcgttcctcctccctgccggtccccatccttaaagcgagagtctggacgccccgcctgtgggagagagcgccgggatccggacggggagcaaccggggcaggccgtgccggctgaggaggtcctgaggctacagagctgccgcggctggcacacgagcgcctcggcactaaccgagtgttcgcgggggctgtgaggggagggccccgggcgccattgctggcggtgggagcgccgcccggtctcagcccgccctcggctgctctcctcctccggctgggaggggccgtagctcggggccgtcgccagccccggcccgggctcgagaatcaagggcctcggccgccgtcccgcagctcagtccatcgcccttgccgggcagcccgggcagagaccatgtttgacaagacgcggctgccgtacgtggccctcgatgtgctctgcgtgttgctggctggattgccttttgcaattcttacttcaaggcatacccccttccaacgaggagtattctgtaatgatgagtccatcaagtacccttacaaagaagacaccataccttatgcgttattaggtggaataatcattccattcagtattatcgttattattcttggagaaaccctgtctgtttactgtaaccttttgcactcaaattcctttatcaggaataactacatagccactatttacaaagccattggaacctttttatttggtgcagctgctagtcagtccctgactgacattgccaagtattcaataggcagactgcggcctcacttcttggatgtttgtgatccagattggtcaaaaatcaactgcagcgatggttacattgaatactacatatgtcgagggaatgcagaaagagttaaggaaggcaggttgtccttctattcaggccactcttcgttttccatgtactgcatgctgtttgtggcactttatcttcaagccaggatgaagggagactgggcaagactcttacgccccacactgcaatttggtcttgttgccgtatccatttatgtgggcctttctcgagtttctgattataaacaccactggagcgatgtgttgactggactcattcagggagctctggttgcaatattagttgctgtatatgtatcggatttcttcaaagaaagaacttcttttaaagaaagaaaagaggaggactctcatacaactctgcatgaaacaccaacaactgggaatcactatccgagcaatcaccagccttgaaaggcagcagggtgcccaggtgaagctggcctgttttctaaaggaaaatgattgccacaaggcaagaggatgcatctttcttcctggtgtacaagcctttaaagacttctgctgctgctatgcctcttggatgcacactttgtgtgtacatagttacctttaactcagtggttatctaatagctctaaactcattaaaaaaactccaagccttccaccaaaacagtgccccacctgtatacatttttattaaaaaaatgtaatgcttatgtataaacatgtatgtaatatgctttctatgaatgatgtttgatttaaatataatacatattaaaatgtatgggagaaccaaa

SEQ ID NO: 353276 - DNA, 1622 bp, Homo sapiens
  misc_feature (1485)..(1485): n is a, c, g, or t
acccgcgcgctgcccggtcctgcgctgcccagcgggaggggctggaccccgcgttcctcctccctgccggtccccatccttaaagcgagagtctggacgccccgcctgtgggagagagcgccgggatccggacggggagcaaccggggcaggccgtgccggctgaggaggtcctgaggctacagagctgccgcggctggcacacgagcgcctcggcactaaccgagtgttcgcgggggctgtgaggggagggccccgggcgccattgctggcggtgggagcgccgcccggtctcagcccgccctcggctgctctcctcctccggctgggaggggccgtagctcggggccgtcgccagccccggcccgggctcgagaatcaagggcctcggccgccgtcccgcagctcagtccatcgcccttgccgggcagcccgggcagagaccatgtttgacaagacgcggctgccgtacgtggccctcgatgtgctctgcgtgttgctggctggattgccttttgcaattcttacttcaaggcatacccccttccaacgaggagtattctgtaatgatgagtccatcaagtacccttacaaagaagacaccataccttatgcgttattaggtggaataatcattccattcagtattatcgttattattcttggagaaaccctgtctgtttactgtaaccttttgcactcaaattcctttatcaggaataactacatagccactatttacaaagccattggaacctttttatttggtgcagctgctagtcagtccctgactgacattgccaagtattcaataggcagactgcggcctcacttcttggatgtttgtgatccagattggtcaaaaatcaactgcagcgatggttacattgaatactacatatgtcgagggaatgcagaaagagttaaggaaggcaggttgtccttctattcaggccactcttcgttttccatgtactgcatgctgtttgtggcactttatcttcaagccaggatgaagggagactgggcaagactcttacgccccacactgcaatttggtcttgttgccgtatccatttatgtgggcctttctcgagtttctgattataaacaccactggagcgatgtgttgactggactcattcagggagctctggttgcaatattagttgctgtatatgtatcggatttcttcaaagaaagaacttcttttaaagaaagaaaagaggaggactctcatacaactctgcatgaaacaccaacaactgggaatcactatccgagcaatcaccagccttgaaaggcagcagggtgcccaggtgaagctggcctgttttctaaaggaaaatgattgccacaaggcaagaggatgcatctttcttcctggtgtacaagcctttaaagacttctgctgctgctatgcctcttggatgcacactttgtgtgtacatagttacctttaactcagtggttatctaatagctantcttaaaaatcaagcctcccaaaaaggccctgttctttttacacgtccgcttgtacactgtgtacgcctgagatggccatacattatttggacacacaaaaaaaaaaggggtacacgcaaacacagtacagcagaat

SEQ ID NO: 353277 - DNA, 1499 bp, Homo sapiens
acccgcgcgctgcccggtcctgcgctgcccagcgggaggggctggaccccgcgttcctcctccctgccggtccccatccttaaagcgagagtctggacgccccgcctgtgggagagagcgccgggatccggacggggagcaaccggggcaggccgtgccggctgaggaggtcctgaggctacagagctgccgcggctggcacacgagcgcctcggcactaaccgagtgttcgcgggggctgtgaggggagggccccgggcgccattgctggcggtgggagcgccgcccggtctcagcccgccctcggctgctctcctcctccggctgggaggggccgtagctcggggccgtcgccagccccggcccgggctcgagaatcaagggcctcggccgccgtcccgcagctcagtccatcgcccttgccgggcagcccgggcagagaccatgtttgacaagacgcggctgccgtacgtggccctcgatgtgctctgcgtgttgctggattattcttggagaaaccctgtctgtttactgtaaccttttgcactcaaattcctttatcaggaataactacatagccactatttacaaagccattggaacctttttatttggtgcagctgctagtcagtccctgactgacattgccaagtattcaataggcagactgcggcctcacttcttggatgtttgtgatccagattggtcaaaaatcaactgcagcgatggttacattgaatactacatatgtcgagggaatgcagaaagagttaaggaaggcaggttgtccttctattcaggccactcttcgttttccatgtactgcatgctgtttgtggcactttatcttcaagccaggatgaagggagactgggcaagactcttacgccccacactgcaatttggtcttgttgccgtatccatttatgtgggcctttctcgagtttctgattataaacaccactggagcgatgtgttgactggactcattcagggagctctggttgcaatattagttgctgtatatgtatcggatttcttcaaagaaagaacttcttttaaagaaagaaaagaggaggactctcatacaactctgcatgaaacaccaacaactgggaatcactatccgagcaatcaccagccttgaaaggcagcagggtgcccaggtgaagctggcctgttttctaaaggaaaatgattgccacaaggcaagaggatgcatctttcttcctggtgtacaagcctttaaagacttctgctgctgctatgcctcttggatgcacactttgtgtgtacatagttacctttaactcagtggttatctaatagctctaaactcattaaaaaaactccaagccttccaccaaaacagtgccccacctgtatacatttttattaaaaaaatgtaatgcttatgtataaacatgtatgtaatatgctttctatgaatgatgtttgatttaaatataatacatattaaaatgtatgggagaaccaaa

SEQ ID NO: 353278 - DNA, 1412 bp, Homo sapiens
tgcattggaggaaaaacatgttggcttttctcttgacgtgggagaaattgaaaagaaggggaaggggaagaaaagaaggggagagagcgccgggatccggacggggagcaaccggggcaggccgtgccggctgaggaggtcctgaggctacagagctgccgcggctggcacacgagcgcctcggcactaaccgagtgttcgcgggggctgtgaggggagggccccgggcgccattgctggcggtgggagcgccgcccggtctcagcccgccctcggctgctctcctcctccggctgggaggggccgtagctcggggccgtcgccagccccggcccgggctcgagaatcaagggcctcggccgccgtcccgcagctcagtccatcgcccttgccgggcagcccgggcagagaccatgtttgacaagacgcggctgccgtacgtggccctcgatgtgctctgcgtgttgctggctggattgccttttgcaattcttacttcaaggcatacccccttccaacgaggagtattctgtaatgatgagtccatcaagtacccttacaaagaagacaccataccttatgcgttattaggtggaataatcattccattcagtattatcgttattattcttggagaaaccctgtctgtttactgtaaccttttgcactcaaattcctttatcaggaataactacatagccactatttacaaagccattggaacctttttatttggtgcagctgctagtcagtccctgactgacattgccaagtattcaataggcagactgcggcctcacttcttggatgtttgtgatccagattggtcaaaaatcaactgcagcgatggttacattgaatactacatatgtcgagggaatgcagaaagagttaaggaaggcaggttgtccttctattcaggccactcttcgttttccatgtactgcatgctgtttgtggcactttatcttcaagccaggatgaagggagactgggcaagactcttacgccccacactgcaatttggtcttgttgccgtatccatttatgtgggcctttctcgagtttctgattataaacaccactggagcgatgtgttgactggactcattcagggagctctggttgcaatattagttgtaagtatacaggtcaacagcctacatcttgatattgctaaacatttagataagtaaatagaaaaaaaaaatccaaaaaatccccagctgaggagaagactatgcagtgggcaagaatctcaatgttattaaaagtcacttcaggatacacaccaggttaaaaactaggttgctctttctaaaacttagtagttttgtaaaatcttagtatttttattgtgaaaggctctggctagaaatagtttttttaggggattatgacttgaaaaaact

SEQ ID NO: 353279 - DNA, 4519 bp, Homo sapiens
ctggaaggtgtctactgtttaggaatgtgagaccaagaggaaggggccagccctgcccatgtgactcactccgggatccctcatccacctacatcaggcaactggagagcaaagtgaggctgctggagggtgacaagctcctcgcacagcaggcaggctccggagagttccgcacgctgcggaaaggcttctcgccctaccactcggagtcccagcttgcgtccctgccgccctcctaccaggactccctgcagaacggcccggcctgccccgcacctgagctgccctcgcccccctctgctggctacagccctgcaggacagaagcccgaggctgtcgtgcatgccatgaaggtcctggaggtacacgagaatctggaccggcagctccaggacagctgtgaggaggacctgagtgagaaggagaaggccatcgttcgcgagatgtgcaacgtggtctggagaaagctgggagatgcagccagctccaagccctccatacggcagcacctgtctgggaaccagttcaaggggcctttgtagggccactcttctgtggacgtggactggccctgctgggggtccccagggggagtttcaggccccagacacgggcaggacctccagcccagcccctgtcttcttcctctgtggtgaactgtacataggacgctgcccgccctggcccagctgccatgggtccgatgcactggcccaagccgccatctcccgcctcatacaccagcaacctgggaagacgagacgctgcgactgttcctgcagcagagcggcccggacgcctcattccccctctgggccctgggctccatgagcaagaggctgcaggctgcttctgagatccagcctgggaactgtccaggctcctctgtcctgcctgggatggaggggccactcatcaaaccctctactccccggctgccacccacactggacagagaccaccactacctgggtcttgacgcaggtggcaccacttcttgcccaaatgccgtggcctggccccaggccccccaagcactgggtccccggcatgtggacaaggccactcaccacatctgtggctggctggaggctgccctgggcccttcctgtgaccctcagccttggaggtcagggtgccctcacacctggggatctgtgctcagccacccgatgcccgctgctccttgcttttggaggtcatccccctcccccccagtctctgcaatgtccccctgccaccctgtccaggctatgcccttcttgggctcctcctgccccatgcctgaggcacgtcccttttcgtggtttacatgacaggccagtaacaggaagggcctggggagagtttctgggctgagccacatgtgattttcctgatgggcagcactgggccacagctggggctctggttggctgtgacctcccccagggcctggctgcatcttgggtccctgtggacagagctgtgtaggctgcagatgagagttctgttctttttgggaaggagcgtgtctggccaggttctgcctttagtttgtggtgtgacctttagcagttcactcagcctgtctgggctcttggtggaaacaggtctctgaggttccttttcggccatgcttatggctccaggtcatccagcgccacagggcaggggtcctcactgagggggcgtgagccaacagccgacggctgagggcgggccgggtggagctgagttctgctgccttgcagtcgctgcgggtggagagttgcctccccactctgagcccgtgtcctcagtagtaaaatgggcagcataaggccctcctcacaggattctggcatcaagtgagatcttcagtgtaaatgaccatgtataaactgtaaagtgcaatagaaaactgtgtgtgtgaggaaagtaaggcctagagggggtgatgtgtggcacatgacaggggagatcccacagctgcagcacggggacaggccgcttccccacatccgctcatgccactgtaagcagccctagctcttgggtccaggacctcaccaggtcctcgtcagactcctgtgctcttccaggggctgctcagccccacctgaagagcccagagaggctgtcttcctacccagcaggtctcatgcaggcccagggctggggatgcaggcaagaggagggagatggccgccctgtccctctccctagctggcggctctattctgagcagttcttgctgcccgtttgctctcaggggaaaggctcacgccccccatcttagccccaggggggtaagtgggtgctggtgatgggatggtgtggcgctcctgccgtgggtgttgccaggaggctctttgggaaggagtgtcgcccggtcaggtggtgcgctcccggtcactaggggtgtacacgtgaagttgggtgaacacctgctgctcatggtacccagtgattcttgcccgagtgggcagctgagcagaggcccctctgggtcttgcagtccaaagaaccgcagagtagcccaagggctgtgggtccattttgagtggcagccaagtctgggagcccgtgtgcatcatgtttgggtcaggttggcgtggccaccactgaaataagcaataagtacgggctcctggtacctgcggatctcctgcaaacaggcccagagaacagccttgaagccacctttcccctcaaggggactgaccctgtctttaatgctgcagtggcatccagggatcagtggaacattgctttgagaaccctcctgctgttacggaggcagcacaaagctggtgacccctgagccaacacggcactgggatggctttctaggacagaaccctgtcggcgactgtcacatctcaaactaatagctgattttaaaagccagcagcagcgacgccatgtacctgagtacaggtggcagttgcagagccgtgggctgtagaaggtcagatggggcttcccacaggggaaatctgggcgtgctgtagctcagggtgactcccagctccgtcactagcagggcgacccccttccttctggagccttagctctgaaagcccccagtgggggtgccctttcagatgccccctttccatttcaaaggctctgactcttgatcttgaagccggacgcggcactggcactcggcttcagtttccactgtgacagatggaggtctcctttcgccccagcccaggtggccaagcccatcctggcctcagaacatgctgagcacattttgtagggtggcacctttttatccaagttactagctacacatcagtgtttaaagagaaaaaagtgacctttcattttttttttcttgaaacttgaggaaacaagatacatactactgattttttttttttcttaaaactaaatgcatgactgcagagcggtagaggtgtatatttttcatactgtggggcaaagtatttgtgctgctttttggagatggactggaacgtctggtttctgtccccgggcccggcagctacgtctattttctgtagaaggtgccacagtgagacctggagccaccccttcctgccctggcgccgtttagagctgggagcccgtggactcccggcctgtttctaccttctattcaaccactctgacgtggggagacaagaagaaatagaactttttgatagtgtggtaaaaacattgatttgaactattttagtaaaaggagtaacaaacaagattgtgatagtgtctactttgagctagataaataaaggcctctttgtgagcctcctggctgggtgctcagtgcttgtttctgtcgtgggtggcagggtcagcaggcagagacagggccaaggcccctcaagcaccgcagatgggggctcagtcggggccccttccacagacagagccgtggcccctcaaggtggacagtgaggccgctgctcctccagctgcctctgtctcatcacaggccagaagtggaaagggtttcaaatccaagcccccgggttcctgtgtgcgttctacgcagcaaggcttcaaagtttcaaactggtttggaactcaaccaggtcctccaaaggaaaccaaggcaggcacaggatgggggcaggctggcttggcaggcagctgtgcggatccacccagagtgccttgggaggcagtggggttggctgtggctgctgtgagctgcagccaggcctctcccgcgtccccagggtctggaaggagggcctctgcacattttataagccacagactgcgaaggcctggagccccaccttccacccataacaaagaaagggatagtttcagaactgcttttatttggataactgactgaaggagtctcatttgtaaccaagatggaattcacagtatgttgttacattcacacttaaaaaatatatctctatgtacaggaatttgcaaagagatgtaaacatacattaatttccaagtacatttctccccttctccctggaggaaaaaaaaaaagccatccaatgaggcaaccccttcaaaataattttaatacaaaggatgcaaacatcta

SEQ ID NO: 353280 - DNA, 3763 bp, Homo sapiens
  misc_feature (3655)..(3655): n is a, c, g, or t
ctggaaggtgtctactgtttaggaatgtgagaccaagaggaaggggccagccctgcccatgtgactcactccgggatccctcatccacctacatcaggcaactggagagcaaagtgaggctgctggagggtgacaagctcctcgcacagcaggcaggctccggagagttccgcacgctgcggaaaggcttctcgccctaccactcggagtcccagcttgcgtccctgccgccctcctaccaggactccctgcagaacgtcctggaggtacacgagaatctggaccggcagctccaggacagctgtgaggaggacctgagtgagaaggagaaggccatcgttcgcgagatgtgcaacgtggtctggagaaagctgggagatgcagccagctccaagccctccatacggcagcacctgtctgggaaccagttcaaggggcctttgtagggccactcttctgtggacgtggactggccctgctgggggtccccagggggagtttcaggccccagacacgggcaggacctccagcccagcccctgtcttcttcctctgtggtgaactgtacataggacgctgcccgccctggcccagctgccatgggtccgatgcactggcccaagccgccatctcccgcctcatacaccagcaacctgggaagacgagacgctgcgactgttcctgcagcagagcggcccggacgcctcattccccctctgggccctgggctccatgagcaagaggctgcaggctgcttctgagatccagcctgggaactgtccaggctcctctgtcctgcctgggatggaggggccactcatcaaaccctctactccccggctgccacccacactggacagagaccaccactacctgggtcttgacgcaggtggcaccacttcttgcccaaatgccgtggcctggccccaggccccccaagcactgggtccccggcatgtggacaaggccactcaccacatctgtggctggctggaggctgccctgggcccttcctgtgaccctcagccttggaggtcagggtgccctcacacctggggatctgtgctcagccacccgatgcccgctgctccttgcttttggaggtcatccccctcccccccagtctctgcaatgtccccctgccaccctgtccaggctatgcccttcttgggctcctcctgccccatgcctgaggcacgtcccttttcgtggtttacatgacaggccagtaacaggaagggcctggggagagtttctgggctgagccacatgtgattttcctgatgggcagcactgggccacagctggggctctggttggctgtgacctcccccagggcctggctgcatcttgggtccctgtggacagagctgtgtaggctgcagatgagagttctgttctttttgggaaggagcgtgtctggccaggttctgcctttagtttgtggtgtgacctttagcagttcactcagcctgtctgggctcttggtggaaacaggtctctgaggttccttttcggccatgcttatggctccaggtcatccagcgccacagggcaggggtcctcactgagggggcgtgagccaacagccgacggctgagggcgggccgggtggagctgagttctgctgccttgcagtcgctgcgggtggagagttgcctccccactctgagcccgtgtcctcagtagtaaaatgggcagcataaggccctcctcacaggattctggcatcaagtgagatcttcagtgtaaatgaccatgtataaactgtaaagtgcaatagaaaactgtgtgtgtgaggaaagtaaggcctagagggggtgatgtgtggcacatgacaggggagatcccacagctgcagcacggggacaggccgcttccccacatccgctcatgccactgtaagcagccctagctcttgggtccaggacctcaccaggtcctcgtcagactcctgtgctcttccaggggctgctcagccccacctgaagagcccagagaggctgtcttcctacccagcaggtctcatgcaggcccagggctggggatgcaggcaagaggagggagatggccgccctgtccctctccctagctggcggctctattctgagcagttcttgctgcccgtttgctctcaggggaaaggctcacgccccccatcttagccccaggggggtaagtgggtgctggtgatgggatggtgtggcgctcctgccgtgggtgttgccaggaggctctttgggaaggagtgtcgcccggtcaggtggtgcgctcccggtcactaggggtgtacacgtgaagttgggtgaacacctgctgctcatggtacccagtgattcttgcccgagtgggcagctgagcagaggcccctctgggtcttgcagtccaaagaaccgcagagtagcccaagggctgtgggtccattttgagtggcagccaagtctgggagcccgtgtgcatcatgtttgggtcaggttggcgtggccaccactgaaataagcaataagtacgggctcctggtacctgcggatctcctgcaaacaggcccagagaacagccttgaagccacctttcccctcaaggggactgaccctgtctttaatgctgcagtggcatccagggatcagtggaacattgctttgagaaccctcctgctgttacggaggcagcacaaagctggtgacccctgagccaacacggcactgggatggctttctaggacagaaccctgtcggcgactgtcacatctcaaactaatagctgattttaaaagccagcagcagcgacgccatgtacctgagtacaggtggcagttgcagagccgtgggctgtagaaggtcagatggggcttcccacaggggaaatctgggcgtgctgtagctcagggtgactcccagctccgtcactagcagggcgacccccttccttctggagccttagctctgaaagcccccagtgggggtgccctttcagatgccccctttccatttcaaaggctctgactcttgatcttgaagccggacgcggcactggcactcggcttcagtttccactgtgacagatggaggtctcctttcgccccagcccaggtggccaagcccatcctggcctcagaacatgctgagcacattttgtagggtggcacctttttatccaagttactagctacacatcagtgtttaaagagaaaaaagtgacctttcattttttttttcttgaaacttgaggaaacaagatacatactactgattttttttttttcttaaaactaaatgcatgactgcagagcggtagaggtgtatatttttcatactgtggggcaaagtatttgtgctgctttttggagatggactggaacgtctggtttctgtccccgggcccggcagctacgtctattttctgtagaaggtgccacagtgagacctggagccaccccttcctgccctggcgccgtttagagctgggagcccgtggactcccggcctgtttctaccttctattcaaccactctgacgtggggagacaagaagaaatagaactttttgatagtgtggtaaaaacattgatttgaactattttagtaaaaggagtaacaaacaagattgtgatagtgtctactttgagctagataaataaaggcctctttggtggcaaanaaaggggggccccggtgccccaaattggcctatatgggaggcgtattaccaaatcaattgcccggggttttacaacggcggggactgtggcaccctggggttcccctt

SEQ ID NO: 353281 - DNA, 4423 bp, Homo sapiens
ctggaaggtgtctactgtttaggaatgtgagaccaagaggaaggggccagccctgcccatgtgactcactccgggatccctcatccacctacatcaggcaactggagagcaaagtgaggctgctggagggtgacaagctcctcgcacagcaggcaggctccggagagttccgcacgctgcggaaaggcttctcgccctaccactcggagtcccagcttgcgtccctgccgccctcctaccaggactccctgcagaacgtcctggaggtacacgagaatctggaccggcagctccaggacagctgtgaggaggacctgagtgagaaggagaaggccatcgttcgcgagatgtgcaacgtggtctggagaaagctgggagatgcagccagctccaagccctccatacggcagcacctgtctgggaaccagttcaaggggcctttgtagggccactcttctgtggacgtggactggccctgctgggggtccccagggggagtttcaggccccagacacgggcaggacctccagcccagcccctgtcttcttcctctgtggtgaactgtacataggacgctgcccgccctggcccagctgccatgggtccgatgcactggcccaagccgccatctcccgcctcatacaccagcaacctgggaagacgagacgctgcgactgttcctgcagcagagcggcccggacgcctcattccccctctgggccctgggctccatgagcaagaggctgcaggctgcttctgagatccagcctgggaactgtccaggctcctctgtcctgcctgggatggaggggccactcatcaaaccctctactccccggctgccacccacactggacagagaccaccactacctgggtcttgacgcaggtggcaccacttcttgcccaaatgccgtggcctggccccaggccccccaagcactgggtccccggcatgtggacaaggccactcaccacatctgtggctggctggaggctgccctgggcccttcctgtgaccctcagccttggaggtcagggtgccctcacacctggggatctgtgctcagccacccgatgcccgctgctccttgcttttggaggtcatccccctcccccccagtctctgcaatgtccccctgccaccctgtccaggctatgcccttcttgggctcctcctgccccatgcctgaggcacgtcccttttcgtggtttacatgacaggccagtaacaggaagggcctggggagagtttctgggctgagccacatgtgattttcctgatgggcagcactgggccacagctggggctctggttggctgtgacctcccccagggcctggctgcatcttgggtccctgtggacagagctgtgtaggctgcagatgagagttctgttctttttgggaaggagcgtgtctggccaggttctgcctttagtttgtggtgtgacctttagcagttcactcagcctgtctgggctcttggtggaaacaggtctctgaggttccttttcggccatgcttatggctccaggtcatccagcgccacagggcaggggtcctcactgagggggcgtgagccaacagccgacggctgagggcgggccgggtggagctgagttctgctgccttgcagtcgctgcgggtggagagttgcctccccactctgagcccgtgtcctcagtagtaaaatgggcagcataaggccctcctcacaggattctggcatcaagtgagatcttcagtgtaaatgaccatgtataaactgtaaagtgcaatagaaaactgtgtgtgtgaggaaagtaaggcctagagggggtgatgtgtggcacatgacaggggagatcccacagctgcagcacggggacaggccgcttccccacatccgctcatgccactgtaagcagccctagctcttgggtccaggacctcaccaggtcctcgtcagactcctgtgctcttccaggggctgctcagccccacctgaagagcccagagaggctgtcttcctacccagcaggtctcatgcaggcccagggctggggatgcaggcaagaggagggagatggccgccctgtccctctccctagctggcggctctattctgagcagttcttgctgcccgtttgctctcaggggaaaggctcacgccccccatcttagccccaggggggtaagtgggtgctggtgatgggatggtgtggcgctcctgccgtgggtgttgccaggaggctctttgggaaggagtgtcgcccggtcaggtggtgcgctcccggtcactaggggtgtacacgtgaagttgggtgaacacctgctgctcatggtacccagtgattcttgcccgagtgggcagctgagcagaggcccctctgggtcttgcagtccaaagaaccgcagagtagcccaagggctgtgggtccattttgagtggcagccaagtctgggagcccgtgtgcatcatgtttgggtcaggttggcgtggccaccactgaaataagcaataagtacgggctcctggtacctgcggatctcctgcaaacaggcccagagaacagccttgaagccacctttcccctcaaggggactgaccctgtctttaatgctgcagtggcatccagggatcagtggaacattgctttgagaaccctcctgctgttacggaggcagcacaaagctggtgacccctgagccaacacggcactgggatggctttctaggacagaaccctgtcggcgactgtcacatctcaaactaatagctgattttaaaagccagcagcagcgacgccatgtacctgagtacaggtggcagttgcagagccgtgggctgtagaaggtcagatggggcttcccacaggggaaatctgggcgtgctgtagctcagggtgactcccagctccgtcactagcagggcgacccccttccttctggagccttagctctgaaagcccccagtgggggtgccctttcagatgccccctttccatttcaaaggctctgactcttgatcttgaagccggacgcggcactggcactcggcttcagtttccactgtgacagatggaggtctcctttcgccccagcccaggtggccaagcccatcctggcctcagaacatgctgagcacattttgtagggtggcacctttttatccaagttactagctacacatcagtgtttaaagagaaaaaagtgacctttcattttttttttcttgaaacttgaggaaacaagatacatactactgattttttttttttcttaaaactaaatgcatgactgcagagcggtagaggtgtatatttttcatactgtggggcaaagtatttgtgctgctttttggagatggactggaacgtctggtttctgtccccgggcccggcagctacgtctattttctgtagaaggtgccacagtgagacctggagccaccccttcctgccctggcgccgtttagagctgggagcccgtggactcccggcctgtttctaccttctattcaaccactctgacgtggggagacaagaagaaatagaactttttgatagtgtggtaaaaacattgatttgaactattttagtaaaaggagtaacaaacaagattgtgatagtgtctactttgagctagataaataaaggcctctttgtgagcctcctggctgggtgctcagtgcttgtttctgtcgtgggtggcagggtcagcaggcagagacagggccaaggcccctcaagcaccgcagatgggggctcagtcggggccccttccacagacagagccgtggcccctcaaggtggacagtgaggccgctgctcctccagctgcctctgtctcatcacaggccagaagtggaaagggtttcaaatccaagcccccgggttcctgtgtgcgttctacgcagcaaggcttcaaagtttcaaactggtttggaactcaaccaggtcctccaaaggaaaccaaggcaggcacaggatgggggcaggctggcttggcaggcagctgtgcggatccacccagagtgccttgggaggcagtggggttggctgtggctgctgtgagctgcagccaggcctctcccgcgtccccagggtctggaaggagggcctctgcacattttataagccacagactgcgaaggcctggagccccaccttccacccataacaaagaaagggatagtttcagaactgcttttatttggataactgactgaaggagtctcatttgtaaccaagatggaattcacagtatgttgttacattcacacttaaaaaatatatctctatgtacaggaatttgcaaagagatgtaaacatacattaatttccaagtacatttctccccttctccctggaggaaaaaaaaaaagccatccaatgaggcaaccccttcaaaataattttaatacaaaggatgcaaacatcta

SEQ ID NO: 353282 - DNA, 4308 bp, Homo sapiens
ctggaaggtgtctactgtttaggaatgtgagaccaagaggaaggggccagccctgcccatgtgactcactccgggatccctcatccacctacatcaggcaactggagagcaaagtgaggctgctggagggtgacaagctcctcgcacagcaggcaggctccggagagttccgcacgctgcggaaaggcttctcgccctaccactcggagtcccagcttgcgtccctgccgccctcctaccaggactccctgcagaacgtcctggaggtacacgagaatctggaccggcagctccaggacagctgtgaggaggacctgagtgagaaggagaaggccatcgttcgcgagatgtgcaacgtggtctggagaaagctgggagatgcagccagctccaagccctccatacggcagcacctgtctgggaaccagttcaaggggcctttgtagggccactcttctgtggacgtggactggccctgctgggggtccccagggggagtttcaggccccagacacgggcaggacctccagcccagcccctgtcttcttcctctgtggtgaactgtacataggacgctgcccgccctggcccagctgccatgggtccgatgcactggcccaagccgccatctcccgcctcatacaccagcaacctgggaagacgagacgctgcgactgttcctgcagcagagcggcccggacgcctcattccccctctgggccctgggctccatgagcaagaggctgcaggctgcttctgagatccagcctgggaactgtccaggctcctctgtcctgcctgggatggaggggccactcatcaaaccctctactccccggctgccacccacactggacagagaccaccactacctgggtcttgacgcaggtggcaccacttcttgcccaaatgccgtggcctggccccaggccccccaagcactgggtccccggcatgtggacaaggccactcaccacatctgtggctggctggaggctgccctgggcccttcctgtgaccctcagccttggaggtcagggtgccctcacacctggggatctgtgctcagccacccgatgcccgctgctccttgcttttggaggtcatccccctcccccccagtctctgcaatgtccccctgccaccctgtccaggctatgcccttcttgggctcctcctgccccatgcctgaggcacgtcccttttcgtggtttacatgacaggccagtaacaggaagggcctggggagagtttctgggctgagccacatgtgattttcctgatgggcagcactgggccacagctggggctctggttggctgtgacctcccccagggcctggctgcatcttgggtccctgtggacagagctgtgtaggctgcagatgagagttctgttctttttgggaaggagcgtgtctggccaggttctgcctttagtttgtggtgtgacctttagcagttcactcagcctgtctgggctcttggtggaaacaggtctctgaggttccttttcggccatgcttatggctccaggtcatccagcgccacagggcaggggtcctcactgagggggcgtgagccaacagccgacggctgagggcgggccgggtggagctgagttctgctgccttgcagtcgctgcgggtggagagttgcctccccactctgagcccgtgtcctcagtagtaaaatgggcagcataaggccctcctcacaggattctggcatcaagtgagatcttcagtgtaaatgaccatgtataaactgtaaagtgcaatagaaaactgtgtgtgtgaggaaagtaaggcctagagggggtgatgtgtggcacatgacaggggagatcccacagctgcagcacggggacaggccgcttccccacatccgctcatgccactgtaagcagccctagctcttgggtccaggacctcaccaggtcctcgtcagactcctgtgctcttccaggggctgctcagccccacctgaagagcccagagaggctgtcttcctacccagcaggtctcatgcaggcccagggctggggatgcaggcaagaggagggagatggccgccctgtccctctccctagctggcggctctattctgagcagttcttgctgcccgtttgctctcaggggaaaggctcacgccccccatcttagccccaggggggtaagtgggtgctggtgatgggatggtgtggcgctcctgccgtgggtgttgccaggaggctctttgggaaggagtgtcgcccggtcaggtggtgcgctcccggtcactaggggtgtacacgtgaagttgggtgaacacctgctgctcatggtacccagtgattcttgcccgagtgggcagctgagcagaggcccctctgggtcttgcagtccaaagaaccgcagagtagcccaagggctgtgggtccattttgagtggcagccaagtctgggagcccgtgtgcatcatgtttgggtcaggttggcgtggccaccactgaaataagcaataagtacgggctcctggtacctgcggatctcctgcaaacaggcccagagaacagccttgaagccacctttcccctcaaggggactgaccctgtctttaatgctgcagtggcatccagggatcagtggaacattgctttgagaaccctcctgctgttacggaggcagcacaaagctggtgacccctgagccaacacggcactgggatggctttctaggacagaaccctgtcggcgactgtcacatctcaaactaatagctgattttaaaagccagcagcagcgacgccatgtacctgagtacaggtggcagttgcagagccgtgggctgtagaaggtcagatggggcttcccacaggggaaatctgggcgtgctgtagctcagggtgactcccagctccgtcactagcagggcgacccccttccttctggagccttagctctgaaagcccccagtgggggtgccctttcagatgccccctttccatttcaaaggctctgactcttgatcttgaagccggacgcggcactggcactcggcttcagtttccactgtgacagatggaggtctcctttcgccccagcccaggtggccaagcccatcctggcctcagaacatgctgagcacattttgtagggtggcacctttttatccaagttactagctacacatcagtgtttaaagagaaaaaagtgacctttcattttttttttcttgaaacttgaggaaacaagatacatactactgattttttttttttcttaaaactaaatgcatgactgcagagcggtagaggtgtatatttttcatactccaccccttcctgccctggcgccgtttagagctgggagcccgtggactcccggcctgtttctaccttctattcaaccactctgacgtggggagacaagaagaaatagaactttttgatagtgtggtaaaaacattgatttgaactattttagtaaaaggagtaacaaacaagattgtgatagtgtctactttgagctagataaataaaggcctctttgtgagcctcctggctgggtgctcagtgcttgtttctgtcgtgggtggcagggtcagcaggcagagacagggccaaggcccctcaagcaccgcagatgggggctcagtcggggccccttccacagacagagccgtggcccctcaaggtggacagtgaggccgctgctcctccagctgcctctgtctcatcacaggccagaagtggaaagggtttcaaatccaagcccccgggttcctgtgtgcgttctacgcagcaaggcttcaaagtttcaaactggtttggaactcaaccaggtcctccaaaggaaaccaaggcaggcacaggatgggggcaggctggcttggcaggcagctgtgcggatccacccagagtgccttgggaggcagtggggttggctgtggctgctgtgagctgcagccaggcctctcccgcgtccccagggtctggaaggagggcctctgcacattttataagccacagactgcgaaggcctggagccccaccttccacccataacaaagaaagggatagtttcagaactgcttttatttggataactgactgaaggagtctcatttgtaaccaagatggaattcacagtatgttgttacattcacacttaaaaaatatatctctatgtacaggaatttgcaaagagatgtaaacatacattaatttccaagtacatttctccccttctccctggaggaaaaaaaaaaagccatccaatgaggcaaccccttcaaaataattttaatacaaaggatgcaaacatcta

SEQ ID NO: 353283 - DNA, 2805 bp, Homo sapiens
ctggaaggtgtctactgtttaggaatgtgagaccaagaggaaggggccagccctgcccatgtgactcactccgggatccctcatccacctacatcaggcaactggagagcaaagtgaggctgctggagggtgacaagctcctcgcacagcaggcaggctccggagagttccgcacgctgcggaaaggcttctcgccctaccactcggagtcccagcttgcgtccctgccgccctcctaccaggactccctgcagaacgtcctggaggtacacgagaatctggaccggcagctccaggacagctgtgaggaggacctgagtgagaaggagaaggccatcgttcgcgagatgtgcaacgtggtctggagaaagctgggagatgcagccagctccaagccctccatacggcagcacctgtctgggaaccagttcaaggggcctttgtagggccactcttctgtggacgtggactggccctgctgggggtccccagggggagtttcaggccccagacacgggcaggacctccagcccagcccctgtcttcttcctctgtggtgaactgtacataggacgctgcccgccctggcccagctgccatgggtccgatgcactggcccaagccgccatctcccgcctcatacaccagcaacctgggaagacgagacgctgcgactgttcctgcagcagagcggcccggacgcctcattccccctctgggccctgggctccatgagcaagaggctgcaggctgcttctgagatccagcctgggaactgtccaggctcctctgtcctgcctgggatggaggggccactcatcaaaccctctactccccggctgccacccacactggacagagaccaccactacctgggtcttgacgcaggtggcaccacttcttgcccaaatgccgtggcctggccccaggccccccaagcactgggtccccggcatgtggacaaggccactcaccacatctgtggctggctggaggctgccctgggcccttcctgtgaccctcagccttggaggtcagggtgccctcacacctggggatctgtgctcagccacccgatgcccgctgctccttgcttttggaggtcatccccctcccccccagtctctgcaatgtccccctgccaccctgtccaggctatgcccttcttgggctcctcctgccccatgcctgaggcacgtcccttttcgtggtttacatgacaggccagtaacaggaagggcctggggagagtttctgggctgagccacatgtgattttcctgatgggcagcactgggccacagctggggctctggttggctgtgacctcccccagggcctggctgcatcttgggtccctgtggacagagctgtgtaggctgcagatgagagttctgttctttttgggaaggagcgtgtctggccaggttctgcctttagtttgtggtgtgacctttagcagttcactcagcctgtctgggctcttggtggaaacaggtctctgaggttccttttcggccatgcttatggctccaggtcatccagcgccacagggcaggggtcctcactgagggggcgtgagccaacagccgacggctgagggcgggccgggtggagctgagttctgctgccttgcagtcgctgcgggtggagagttgcctccccactctgagcccgtgtcctcagtagtaaaatgggcagcataaggccctcctcacaggattctggcatcaagtgagatcttcagtgtaaatgaccatgtataaactgtaaagtgcaatagaaaactgtgtgtgtgaggaaagtaaggcccaccccttcctgccctggcgccgtttagagctgggagcccgtggactcccggcctgtttctaccttctattcaaccactctgacgtggggagacaagaagaaatagaactttttgatagtgtggtaaaaacattgatttgaactattttagtaaaaggagtaacaaacaagattgtgatagtgtctactttgagctagataaataaaggcctctttgtgagcctcctggctgggtgctcagtgcttgtttctgtcgtgggtggcagggtcagcaggcagagacagggccaaggcccctcaagcaccgcagatgggggctcagtcggggccccttccacagacagagccgtggcccctcaaggtggacagtgaggccgctgctcctccagctgcctctgtctcatcacaggccagaagtggaaagggtttcaaatccaagcccccgggttcctgtgtgcgttctacgcagcaaggcttcaaagtttcaaactggtttggaactcaaccaggtcctccaaaggaaaccaaggcaggcacaggatgggggcaggctggcttggcaggcagctgtgcggatccacccagagtgccttgggaggcagtggggttggctgtggctgctgtgagctgcagccaggcctctcccgcgtccccagggtctggaaggagggcctctgcacattttataagccacagactgcgaaggcctggagccccaccttccacccataacaaagaaagggatagtttcagaactgcttttatttggataactgactgaaggagtctcatttgtaaccaagatggaattcacagtatgttgttacattcacacttaaaaaatatatctctatgtacaggaatttgcaaagagatgtaaacatacattaatttccaagtacatttctccccttctccctggaggaaaaaaaaaaagccatccaatgaggcaaccccttcaaaataattttaatacaaaggatgcaaacatcta

SEQ ID NO: 353284 - DNA, 3593 bp, Homo sapiens
  misc_feature (896)..(896): n is a, c, g, or t
  misc_feature (1055)..(1055): n is a, c, g, or t
caaagattcagagaagccggaacgtggctccgctcccagttaacctgctggagctcatcaggcttgctcagagcccctgcaccaactcaccctgtaccctctctccttcttcgttagtcttctttcccccttttccctcctctgtctgtgcctatcccccgacttttgcatctgaccaaaggacgaatgagggagacgttcctgcagatcggggcagcaactttcctcagctggtctctgggctccgggagccagagagcgctgatcctccgcggtctgcggcccatggaagaggaggaggaggagccgtgatgggctagcgacagcactgaggagccccgagagagctcagccttgccagccagctccgcggtcccacgcgggttccctcgagctcgctccgtggggagcgcgcagcgtgcttggaaccggagcatccagagaggatgaggcggggacccggcccaagttgggtgcatctctcgggcgtccggcagcggctgtatctcggcatgaattaagaagctaggaagatggagcacggcacactcctcgcccagcccgggctctggaccagggacaccagctgggcactcctctatttcctctgctatatcctccctcagaccgccccgcaagtactcaggatcggagggatttttgaaacagtggaaaatgagcctgttaatgttgaagaattagctttcaagtttgcagtcaccagcattaacagaaaccgaaccctgatgcctaacaccacattaacctatgacatccagagaattaacctttttgatagttttgaagcctcgcggagagcatgtgaccagctggctcttggtgtggctgctctctttggcccttcccatagctcctccgtcagtgctgtgcagtcnatttgcaatgctctcgaagttccacacatacagacccgctggaaacacccctcggtggacaacaaagatttgttttacatcaacctttacccagattatgcagctatcagcagggcgatcctggatctggtcctctattacaactggaaaacagtgacngtggtgtatgaagacagcacaggtctaattcgtctacaagagctcatcaaagctccctccagatataatattaaaatcaaaatccgccagctgccctctgggaataaagatgccaagcctttactcaaggagatgaagaaaggcaaggagttctatgtgatatttgattgttcacatgaaacagccgctgaaatccttaagcagattctgttcatgggcatgatgaccgagtactatcactactttttcacaaccctggacttatttgctttggatctggaactctataggtacagtggcgtaaacatgaccgggtttcggctgcttaacattgacaaccctcacgtgtcatccatcattgagaagtggtccatggagagactgcaggccccacccaggcccgagactggccttttggatggcatgatgacaactgaagcggctctgatgtacgatgctgtgtacatggtggccattgcctcgcaccgggcatcccagctgaccgtcagctccctgcagtgccatagacataagccatggcgcctcggacccagatttatgaacctgatcaaagaggcccggtgggatggcttgactgggcatatcacctttaataaaaccaatggcttgaggaaggattttgatctggacattattagtctcaaagaggaaggaactgaaaaggctgctggcgaagtgtctaaacacttgtataaagtgtggaagaagattgggatttggaattccaacagtgggcttaacatgacggacagcaacaaagacaagtccagcaatatcactgattcattggccaacagaacactcattgtcaccaccattctggaagaaccctatgttatgtacaggaaatctgataagcctctatatggaaatgacagatttgaaggatattgcctagacctgttgaaagaattgtcaaacatcctgggtttcatttatgatgttaaactagttcccgatggcaaatatggggcccagaatgacaaaggggagtggaacgggatggttaaagaactcatagatcacagggctgacctggcagtggctcctcttaccatcacctacgtgcgggagaaagtcattgacttctccaaacccttcatgaccctaggcatcagcattctctaccggaagcccaatggtaccaatccaggcgttttctccttcctcaaccccctgtctccagatatttggatgtatgtgctcttagcctgcttgggagtcagctgtgtactctttgtgattgcaaggtttacaccctacgagtggtataacccccacccatgcaaccctgactcagacgtggtggaaaacaattttactttactaaatagtttctggtttggagttggagctctcatgcagcaaggatcagagctgatgcccaaagctctatcgaccagaatagttggagggatatggtggtttttcaccctaatcatcatttcatcctacacggccaatctggctgccttcttgacagtagagagaatggaatcccccatagattcggcagatgatctggcaaagcaaaccaagatagaatatggggcggttagagatggatcaacaatgaccttcttcaagaaatcaaaaatctccacctatgagaagatgtgggctttcatgagcagcaggcagcagaccgccctggtaagaaacagtgatgaggggatccagagagtgctcaccacagactacgcgctgctgatggagtccaccagcattgagtatgtgacgcagagaaactgcaacctcactcagatcgggggcctcattgactccaaaggttacggagtgggaacacctattggttctccttaccgggataaaattactattgctattcttcaactccaagaagaagggaagctgcatatgatgaaagagaagtggtggcgtgggaatggctgccccgaggaagacaacaaagaagccagtgccctgggagtggaaaatattggaggcatcttcattgttctggctgccggactggtcctttctgtatttgtagctattggagaattcatatacaaatcacggaagaataatgatattgaacaggctttttgtttcttttatggactgcaatgtaagcaaacccatccaaccaactccacttctggaactactttatctacggatttagaatgtggtaaattaattcgagaggagagagggattcgaaaacagtcctcagttcatactgtgtaatcagtttaaaaaaaaaaaaaaagatgtgcccagtagaaaatgtttttgctaattggtgttgttgatatttgtatttgctaagcataaatagccacaattctctattcctttaggatagcaaaactcatgtattctagacattgaaatgaatacactggaaagatacttgcactgtatgttgaagcaggggcatattaggggtataaagacttctagaaatgtgtatttacaggaatcttctctgtcccactcatcatcttagttctatcttcatgcattaaaaataagtaactcttccttcat

SEQ ID NO: 353285 - DNA, 3719 bp, Homo sapiens
  misc_feature (896)..(896): n is a, c, g, or t
  misc_feature (1055)..(1055): n is a, c, g, or t
caaagattcagagaagccggaacgtggctccgctcccagttaacctgctggagctcatcaggcttgctcagagcccctgcaccaactcaccctgtaccctctctccttcttcgttagtcttctttcccccttttccctcctctgtctgtgcctatcccccgacttttgcatctgaccaaaggacgaatgagggagacgttcctgcagatcggggcagcaactttcctcagctggtctctgggctccgggagccagagagcgctgatcctccgcggtctgcggcccatggaagaggaggaggaggagccgtgatgggctagcgacagcactgaggagccccgagagagctcagccttgccagccagctccgcggtcccacgcgggttccctcgagctcgctccgtggggagcgcgcagcgtgcttggaaccggagcatccagagaggatgaggcggggacccggcccaagttgggtgcatctctcgggcgtccggcagcggctgtatctcggcatgaattaagaagctaggaagatggagcacggcacactcctcgcccagcccgggctctggaccagggacaccagctgggcactcctctatttcctctgctatatcctccctcagaccgccccgcaagtactcaggatcggagggatttttgaaacagtggaaaatgagcctgttaatgttgaagaattagctttcaagtttgcagtcaccagcattaacagaaaccgaaccctgatgcctaacaccacattaacctatgacatccagagaattaacctttttgatagttttgaagcctcgcggagagcatgtgaccagctggctcttggtgtggctgctctctttggcccttcccatagctcctccgtcagtgctgtgcagtcnatttgcaatgctctcgaagttccacacatacagacccgctggaaacacccctcggtggacaacaaagatttgttttacatcaacctttacccagattatgcagctatcagcagggcgatcctggatctggtcctctattacaactggaaaacagtgacngtggtgtatgaagacagcacaggtctaattcgtctacaagagctcatcaaagctccctccagatataatattaaaatcaaaatccgccagctgccctctgggaataaagatgccaagcctttactcaaggagatgaagaaaggcaaggagttctatgtgatatttgattgttcacatgaaacagccgctgaaatccttaagcagattctgttcatgggcatgatgaccgagtactatcactactttttcacaaccctggacttatttgctttggatctggaactctataggtacagtggcgtaaacatgaccgggtttcggctgcttaacattgacaaccctcacgtgtcatccatcattgagaagtggtccatggagagactgcaggccccacccaggcccgagactggccttttggatggcatgatgacaactgaagcggctctgatgtacgatgctgtgtacatggtggccattgcctcgcaccgggcatcccagctgaccgtcagctccctgcagtgccatagacataagccatggcgcctcggacccagatttatgaacctgatcaaagaggcccggtgggatggcttgactgggcatatcacctttaataaaaccaatggcttgaggaaggattttgatctggacattattagtctcaaagaggaaggaactgaaaagattgggatttggaattccaacagtgggcttaacatgacggacagcaacaaagacaagtccagcaatatcactgattcattggccaacagaacactcattgtcaccaccattctggaagaaccctatgttatgtacaggaaatctgataagcctctatatggaaatgacagatttgaaggatattgcctagacctgttgaaagaattgtcaaacatcctgggtttcatttatgatgttaaactagttcccgatggcaaatatggggcccagaatgacaaaggggagtggaacgggatggttaaagaactcatagatcacagggctgacctggcagtggctcctcttaccatcacctacgtgcgggagaaagtcattgacttctccaaacccttcatgaccctaggcatcagcattctctaccggaagcccaatggtaccaatccaggcgttttctccttcctcaaccccctgtctccagatatttggatgtatgtgctcttagcctgcttgggagtcagctgtgtactctttgtgattgcaaggtttacaccctacgagtggtataacccccacccatgcaaccctgactcagacgtggtggaaaacaattttactttactaaatagtttctggtttggagttggagctctcatgcagcaaggatcagagctgatgcccaaagctctatcgaccagaatagttggagggatatggtggtttttcaccctaatcatcatttcatcctacacggccaatctggctgccttcttgacagtagagagaatggaatcccccatagattcggcagatgatctggcaaagcaaaccaagatagaatatggggcggttagagatggatcaacaatgaccttcttcaagaaatcaaaaatctccacctatgagaagatgtgggctttcatgagcagcaggcagcagaccgccctggtaagaaacagtgatgaggggatccagagagtgctcaccacagactacgcgctgctgatggagtccaccagcattgagtatgtgacgcagagaaactgcaacctcactcagatcgggggcctcattgactccaaaggttacggagtgggaacacctattggttctccttaccgggataaaattactattgctattcttcaactccaagaagaagggaagctgcatatgatgaaagagaagtggtggcgtgggaatggctgccccgaggaagacaacaaagaagccagtgccctgggagtggaaaatattggaggcatcttcattgttctggctgccggactggtcctttctgtatttgtagctattggagaattcatatacaaatcacggaagaataatgatattgaacagtgtctctctttcaacgctatcatggaagaactgggaatctcactgaagaatcagaaaaaaataaagaaaaagtcaagaactaaggggaaatcttccttcacaagtatccttacttgtcatcagagacgaactcagagaaaagagactgtggcgtgatccaaggaaacgcctgtaggaagaaaaaggatgcattccctacagatttttggagaaaggatttctgaggagtgtgtgatgtgtttccatatatctatatccataactctgattatgaatacagatataagaaatacaaaagtttaaaaagctcacatagatatgacttgggaagtgacaccagttcttttaaaataaatttgtatgctcaattattttgcattttttctttttccccaataaattgttgtgtgtgctttctaaataataataaaacaacagggtttttttccagaacaagttgagcttggtttgttccccattacttgctcccattggcaaaggtgtgtttgctgtatgtcgtcagttgtgcagtttgctattttgaaaattcttcttattggtttagacaaacatagtcattttgggctgagttttaaaaattacttttagtttataccaagttac

SEQ ID NO: 353286 - DNA, 955 bp, Homo sapiens
tcagaaaggaaagtcatcaagaattagattttattttaggaacaaagtaaggtttcatgggagaaaaaaacaaagccttggtgtagagaaggtttgttcattttctatagcattactgaagtgtccgtatgccttgataatcctatcaatgtttggatcatctcagtgggggaaatgacttaatttaactctattttggtgtctcagcaaaggtaagttatctattttgagagccctgagtttgctttaactgggtagttttatactactgcatttgtgaatgaaatcccaaagtttgcccagctaacttgccatctcagtttccccgattagaaaaggtgggtggccagcgggtggaggaggaggtgatgggaactggccaattgtgacagagctgccttcaagccaatatcttgtgttcataaatacctaggcaagaggcaggtcaacggcacatgcgataggcttaattaagctgatggtctgtatctcatgttccctagtgtctctctttcaacgctatcatggaagaactgggaatctcactgaagaatcagaaaaaaataaagaaaaagtcaagaactaaggggaaatcttccttcacaagtatccttacttgtcatcagagacgaactcagagaaaagagactgtggcgtgatccaaggaaacgcctgtaggaagaaaaaggatgcattccctacagatttttggagaaaggatttctgaggagtgtgtgatgtgtttccatatatctatatccataactctgattatgaatacagatataagaaatacaaaagtttaaaaagctcacatagatatgacttgggaagtgacaccagttcttttaaaataaatttgtatgctcaattattttgcattttttctttttccccaataaattgttgtgtgtgctttctaaataataataaaacaacagggtttttttccaga

SEQ ID NO: 353287 - DNA, 3547 bp, Homo sapiens
  misc_feature (896)..(896): n is a, c, g, or t
  misc_feature (1055)..(1055): n is a, c, g, or t
caaagattcagagaagccggaacgtggctccgctcccagttaacctgctggagctcatcaggcttgctcagagcccctgcaccaactcaccctgtaccctctctccttcttcgttagtcttctttcccccttttccctcctctgtctgtgcctatcccccgacttttgcatctgaccaaaggacgaatgagggagacgttcctgcagatcggggcagcaactttcctcagctggtctctgggctccgggagccagagagcgctgatcctccgcggtctgcggcccatggaagaggaggaggaggagccgtgatgggctagcgacagcactgaggagccccgagagagctcagccttgccagccagctccgcggtcccacgcgggttccctcgagctcgctccgtggggagcgcgcagcgtgcttggaaccggagcatccagagaggatgaggcggggacccggcccaagttgggtgcatctctcgggcgtccggcagcggctgtatctcggcatgaattaagaagctaggaagatggagcacggcacactcctcgcccagcccgggctctggaccagggacaccagctgggcactcctctatttcctctgctatatcctccctcagaccgccccgcaagtactcaggatcggagggatttttgaaacagtggaaaatgagcctgttaatgttgaagaattagctttcaagtttgcagtcaccagcattaacagaaaccgaaccctgatgcctaacaccacattaacctatgacatccagagaattaacctttttgatagttttgaagcctcgcggagagcatgtgaccagctggctcttggtgtggctgctctctttggcccttcccatagctcctccgtcagtgctgtgcagtcnatttgcaatgctctcgaagttccacacatacagacccgctggaaacacccctcggtggacaacaaagatttgttttacatcaacctttacccagattatgcagctatcagcagggcgatcctggatctggtcctctattacaactggaaaacagtgacngtggtgtatgaagacagcacaggtctaattcgtctacaagagctcatcaaagctccctccagatataatattaaaatcaaaatccgccagctgccctctgggaataaagatgccaagcctttactcaaggagatgaagaaaggcaaggagttctatgtgatatttgattgttcacatgaaacagccgctgaaatccttaagcagattctgttcatgggcatgatgaccgagtactatcactactttttcacaaccctggacttatttgctttggatctggaactctataggtacagtggcgtaaacatgaccgggtttcggctgcttaacattgacaaccctcacgtgtcatccatcattgagaagtggtccatggagagactgcaggccccacccaggcccgagactggccttttggatggcatgatgacaactgaagcggctctgatgtacgatgctgtgtacatggtggccattgcctcgcaccgggcatcccagctgaccgtcagctccctgcagtgccatagacataagccatggcgcctcggacccagatttatgaacctgatcaaagaggcccggtgggatggcttgactgggcatatcacctttaataaaaccaatggcttgaggaaggattttgatctggacattattagtctcaaagaggaaggaactgaaaagattgggatttggaattccaacagtgggcttaacatgacggacagcaacaaagacaagtccagcaatatcactgattcattggccaacagaacactcattgtcaccaccattctggaagaaccctatgttatgtacaggaaatctgataagcctctatatggaaatgacagatttgaaggatattgcctagacctgttgaaagaattgtcaaacatcctgggtttcatttatgatgttaaactagttcccgatggcaaatatggggcccagaatgacaaaggggagtggaacgggatggttaaagaactcatagatcacagggctgacctggcagtggctcctcttaccatcacctacgtgcgggagaaagtcattgacttctccaaacccttcatgaccctaggcatcagcattctctaccggaagcccaatggtaccaatccaggcgttttctccttcctcaaccccctgtctccagatatttggatgtatgtgctcttagcctgcttgggagtcagctgtgtactctttgtgattgcaaggtttacaccctacgagtggtataacccccacccatgcaaccctgactcagacgtggtggaaaacaattttactttactaaatagtttctggtttggagttggagctctcatgcagcaaggatcagagctgatgcccaaagctctatcgaccagaatagttggagggatatggtggtttttcaccctaatcatcatttcatcctacacggccaatctggctgccttcttgacagtagagagaatggaatcccccatagattcggcagatgatctggcaaagcaaaccaagatagaatatggggcggttagagatggatcaacaatgaccttcttcaagaaatcaaaaatctccacctatgagaagatgtgggctttcatgagcagcaggcagcagaccgccctggtaagaaacagtgatgaggggatccagagagtgctcaccacagactacgcgctgctgatggagtccaccagcattgagtatgtgacgcagagaaactgcaacctcactcagatcgggggcctcattgactccaaaggttacggagtgggaacacctattggttctccttaccgggataaaattactattgctattcttcaactccaagaagaagggaagctgcatatgatgaaagagaagtggtggcgtgggaatggctgccccgaggaagacaacaaagaagccagtgccctgggagtggaaaatattggaggcatcttcattgttctggctgccggactggtcctttctgtatttgtagctattggagaattcatatacaaatcacggaagaataatgatattgaacagtgtctctctttcaacgctatcatggaagaactgggaatctcactgaagaatcagaaaaaaataaagaaaaagtcaagaactaaggggaaatcttccttcacaagtatccttacttgtcatcagagacgaactcagagaaaagagactgtggcgtgatccaaggaaacgcctgtaggaagaaaaaggatgcattccctacagatttttggagaaaggatttctgaggagtgtgtgatgtgtttccatatatctatatccataactctgattatgaatacagatataagaaatacaaaagtttaaaaagctcacatagatatgacttgggaagtgacaccagttcttttaaaataaatttgtatgctcaattattttgcattttttctttttccccaataaattgttgtgtgtgctttctaaataataataaaacaacagggtttttttccaga

SEQ ID NO: 353288 - DNA, 313 bp, Homo sapiens
agctcactgtagcctcaaactcctgggctcaagccatcttcccgccttatcctcgtgagtagctgagactacaggtgtgtgccaccacacccagctaactttttaatttttattttgtagagacagggtttcgctatgttgcccaggctggtcttggactcctggacttaatcctcctgccacagcctcccaaagtgctgggattacagatgtgagccaaagtgtatgacctcacattttaaatttgtagaagaaacaaattgtaaaaatgtgttgtgtttaccaagggtctgcctagtactgtttagtgccc

SEQ ID NO: 353289 - DNA, 327 bp, Homo sapiens
agagcccccaggagccaggacaggttggagtccccactgtcacccagaacaggggcgggcactcaggaaatgcttgacgaatgacagagtgagccccacttgtccacctgttctttccaagccctcagtatgcacaaggcaccaccatctgggacacagatggatcaacctacaacacccctcaacacacacaaacccttaagctgctcacagtctttccaggcagtggagtgtagtagagacaggctgcctggattcgaatcctaactttgccacttagtagctatgtgattttgggttttatttatttatttatttatgaaacag

SEQ ID NO: 353290 - DNA, 219 bp, Homo sapiens
gaagaaggcaagagtaacctcttgaaacatgtttgaggaggacaaatatatcaggcagtgattagtaacatctgagtaataatgaatttatcagattttttttttttctcctgagatggagtctcactctgtttcccaggctggagtgcggtggagcaatctctgctcactgcaccctctacctcccgggttcaaacgattctcctgcttcagcctgct

SEQ ID NO: 353291 - DNA, 456 bp, Homo sapiens
cgtggctttgagcctcagaaacggtgcaaaatgcagtccacgcgtggctttcggccccggtctggtgctcggaagacatgtgcctccctctacctgccccccgtcctcccgccactgtgaggccctgagaggccctgagattcttgcgatgtgtgaataagggtgccgcattttcatgttgcactgggcactgaatggtggagctgagtgatgcggtttggttctgtgtccccacccaaatctcatctcagattataatccccacctgtcaagggagagacccgctggaggtgagtgcatcgtggggccattcaccccatgttctcgtggtagcgagaaagttctcacaagatctgtttgttgttgtttttgttggtggtggtggtttttaagacggagtttcactcttgttgcccactgcactccagcctgagtgacagagcgagactccgtatc

SEQ ID NO: 353292 - DNA, 518 bp, Homo sapiens
tttgagacagagtcttgctctatcacccaggctggagtgcagtggcgcgatctcggctcactgcaagctccgcctcccgggttcacgtcattctcctgcctcagcctcccgagtagctgggactacaggcgcctgccaccttttttttttgtatttttagtagagatggggtttcacggcgttagccagaaaggtctcgatctcctgacctcgtgatccacccgccctggcctcccaaagcgctgggattataggcgtgagcctctgcacccggtcacctcattttttaaaatgtacaaatgaaaaagggtccatttccacgatggcgccttgtgcatatgcgagccacgagtctccaagaagcgggtgggagaggaactgtatgggccttagtgggggacgaaaggaaggctctgcagctcctcttctcaccgcgacatcccctccacggcctgaacacaggttgggcgatccctgcccagatacaggactgcagcccagtgctccctggactccag

SEQ ID NO: 353293 - DNA, 469 bp, Homo sapiens
ctttttgtttgtttgtttgagacagagtctcactctgtcactcaggctggagtgcagttgcacaatgtcggctcactgcagtctacacctttcaggttcaagcaattctcctggctcagcctcctgagtagctgggattacaggtgtccaccaccacacctggctgatttcttttatttttagtagagatagggtttcaccatgttggccaggctggtcttgaactcctggcctcagatgaagtgcctccttggcctcctaaagtgcagggattacagatgtgagccaccacgaccagccttctcagaacgtattcttgtctttaagtgataagtgactgtatgtgtctgcattgtccaattaagggtagccactagctgcatgtggcttttgagcacttgaaatatgcctagtctgaatagaggcatgctgtgttacacatacgtactattttcaaagatttagtatg

SEQ ID NO: 353294 - DNA, 3680 bp, Homo sapiens
gcagccttgtaagtaacgccgcggaccgggaaagtgggaggggccgctcccggaacgcagccttcttgtaagaacctccaaggaagcaagaagaaaaaagaggcgctaccctgcgctcccgggaggcctctgaaagcttccactagagaaaaactccccactcttacaatttctttaaccgcaagaagcggaggacctggacaaggactcgaggagcaaggtggcgaaccaagggtagggcgcaccgggcccgagaggtcccccgcaggttgcagatacggtggactctctgcggcttctgagcacggagggagctgtcgcggggtcgggaggtcgtctctcatccctgcctcatcttccgacggccggcggggccatgtccagaggcccgagctccgcggtcctgcctagcgccctgggatcccggaagctcggcccccggagcctcagctgcctgtcggacctggacggcggcgtggccctggagccgcgggcctgtaggccccctgggagcccgggccgcgcgccgccgccaacgccagcgccgtcgggctgcgacccccgcctgcggcccatcatcctgcggcgggcgcgctcactgcccagctcccccgaacgccgccagaaggccgcgggcgccccgggcgctgcgtgtcggccgggctgcagccagaagctccgcgtgcgcttcgccgacgccctgggcttggagctggcacaggtcaaggtgttcaacgcgggagacgacccgtccgtgccgctgcacgtgctgtcgcggctcgcaatcaactcggacctgtgctgcagcagccaggacctggagttcaccctgcattgcctggtgcccgatttcccgccgcccgtcgaggccgccgactttggcgagcgcctgcagcggcagctcgtgtgcctggagcgtgtcacttgctcggaccttggcatcagcggtacggtgcgcgtgtgcaacgtggccttcgagaagcaggtggctgtgcgctacactttctcgggctggcgcagtacccacgaggcggtggcgcggtggcgcgggcccgcaggccccgagggcacggaggacgttttcaccttcggctttccagtaccgcccttcctgctggagctcggctcccgcgtgcacttcgcggtgcgctaccaagtggcgggtgccgagtactgggacaacaacgaccaccgagactacagcctcacatgtcgcaaccacgcgctgcacatgcctcgcggggagtgcgaagagagctggatccacttcatctgagccgcgcggggaccggccacctggagcctccacacctaagctgcgcctcctgtcatttccctgctgggctctcacatctatctggttgttcttcaccaccctccaagtcctctgacctaattttctgctgcaaggtcccctggcagtggcccatcctgtcttctacttgaaacgtctgagtcacttggtctaaaaagtagcctcaggtggccagaaggccgagttgtgtaatgagttggggcagggtggtggggtaggtgcatgggagggtgggccctctggggaggcccaagcagcttgttttgcaaaggcccaagtcctcctgctaggaaaagcttttgcatgtgtcctgaatgtgtctctgtaaacatagctgttatttattattgtgatgttgggacctttagcccatagcggatgcctcctcaggaatattctcgatttaataagctaaaaaaaaaaagttctgtgtttgtgcccacagtaaacagaatgtacagtgtgacccacatcgtggtccctccaggcattcctgccccaggataaggaaaacctgagcccacatctgattgccaacggctgtagccttctaacagtgggaaactattaataggcaagaaatttctgctttatcagtcatcacacaaccattcctgggcattgagactgtcctggttaggctgtgtgtctcctacattaacagctggggaggagggaaaagcttcagacttttaaactagcaaaacagttatttctctgcattcacaattctgatttcatgtatttctctgtacatgtttgatcattatcaggccattctgtttaagtttgaaactaagcattttaagaagtcttgcctcagttatttcagttttcaggtgactagagaatttcaggcaacagtgccctttgcaattacctttttgatgattaaggtgactatttttatttcttgttaagcatcagaagatgtcagcattcatcttttgggagtccagttacaaggtggaactagaaggtgttttcagcaatagccagagcactggaggaaaaataattgacaaatatttatacttttaaattgttttgaactgtatttacatacatcatgttttatcaggtacccaccaactttatactttctgccttcagatagagtttctaacattttctagtttgtcagttttaaaatataaaattcttttatgtttttaaaccgtcaaccaagaagtcaagaccactgtcccctgctgagttaggcaatcacttaaaactccaaagaactccaggctgaggagttcttttggtgctgaacagtggtctgacaacaggtgctagaattaaggtgtgggaaaaaaaaaaaaacagccaggaaggacaagatctccaattttgtgaagcttatgatacagctgaaaccagtctgatcaattttatgctacctgtcaccaagaaattaactctaaatttttgaatgcttgttggcatctgtcaaatcaatactgaaaggatgcatttcggcttttaaccagtttggttctgatcattgcaacctctgtgcttttataattcaaagaacaaggatagctttcttcggtatcttttaatataagaacactgaattttggcttgaaatattgtgactaaattgcacaatctctggctattagcactgttcactacattaacatgcaagagagagagaagccttgttacatttcctgctatttaacaaactgtccaattaggtcagcaagcctgttagggccttcactgctacgcccctggccccaaaacagagagcaagacagttgtccagagaatttagatatgagttaagagctgccagatttattttaaggcatgtagagaatctcataatctatgtgaaagtcacttgccaaaaaggttttggttatgaaagtgaatgttatatatttaatattaagtgaacctcccgtgccttttaaaaaataccaacattatgaaatttaaaagcttaaatatatttgcctagttgataaagaggctgtggaacaactgaaggagaactttcagaccctaaaacagttatattacttagatgttaaaattttctagtgggctgtgcaattgctgggttgtccccccaaacatattttaatatgttatttaaaatgattttacccaagcctaagtattaaagtatatgtgcaaaaaacaaaaaaaagacacaacaaaaaaactgttgggggcggccacgccccagaaaaagttcaacccatatcgggggggcggggccccggagtaagttaccatgggcacaacctgtccccaagaaaccgggcacgccaggcgggggttctccaaaaaaacccccgggcacggggtctgacaacccaggggcgggccacgggcacacggc

SEQ ID NO: 353295 - DNA, 3475 bp, Homo sapiens
gcagccttgtaagtaacgccgcggaccgggaaagtgggaggggccgctcccggaacgcagccttcttgtaagaacctccaaggaagcaagaagaaaaaagaggcgctaccctgcgctcccgggaggcctctgaaagcttccactagagaaaaactccccactcttacaatttctttaaccgcaagaagcggaggacctggacaaggactcgaggagcaaggtggcgaaccaagggtagggcgcaccgggcccgagaggtcccccgcaggttgcagatacggtggactctctgcggcttctgagcacggagggagctgtcgcggggtcgggaggtcgtctctcatccctgcctcatcttccgacggccggcggggccatgtccagaggcccgagctccgcggtcctgcctagcgccctgggatcccggaagctcggcccccggagcctcagctgcctgtcggacctggacggcggcgtggccctggagccgcgggcctgtaggccccctgggagcccgggccgcgcgccgccgccaacgccagcgccgtcgggctgcgacccccgcctgcggcccatcatcctgcggcgggcgcgctcactgcccagctcccccgaacgccgccagaaggccgcgggcgccccgggcgctgcgtgtcggccgggctgcagccagaagctccgcgtgcgcttcgccgacgccctgggcttggagctggcacaggtcaaggtgttcaacgcgggagacgacccgtccgtgccgctgcacgtgctgtcgcggctcgcaatcaactcggacctgtgctgcagcagccaggacctggagttcaccctgcattgcctggtgcccgatttcccgccgcccgtcgaggccgccgactttggcgagcgcctgcagcggcagctcgtgtgcctggagcgtgtcacttgctcggaccttggcatcagcggtacggtgcgcgtgtgcaacgtggccttcgagaagcaggtggctgtgcgctacactttctcgggctggcgcagtacccacgaggcggtggcgcggtggcgcgggcccgcaggccccgagggcacggaggacgttttcaccttcggctttccagtaccgcccttcctgctggagctcggctcccgcgtgcacttcgcggtgcgctaccaagtggcgggtgccgagtactgggacaacaacgaccaccgagactacagcctcacatgtcgcaaccacgcgctgcacatgcctcgcggggagtgcgaagagagctggatccacttcatctgagccgcgcggggaccggccacctggagcctccacacctaagctgcgcctcctgtcatttccctgctgggctctcacatctatctggttgttcttcaccaccctccaagtcctctgacctaattttctgctgcaaggtcccctggcagtggcccatcctgtcttctacttgaaacgtctgagtcacttggtctaaaaagtagcctcaggtggccagaaggccgagttgtgtaatgagttggggcagggtggtggggtaggtgcatgggagggtgggccctctggggaggcccaagcagcttgttttgcaaaggcccaagtcctcctgctaggaaaagcttttgcatgtgtcctgaatgtgtctctgtaaacatagctgttatttattattgtgatgttgggacctttagcccatagcggatgcctcctcaggaatattctcgatttaataagctaaaaaaaaaaagttctgtgtttgtgcccacagtaaacagaatgtacagtgtgacccacatcgtggtccctccaggcattcctgccccaggataaggaaaacctgagcccacatctgattgccaacggctgtagccttctaacagtgggaaactattaataggcaagaaatttctgctttatcagtcatcacacaaccattcctgggcattgagactgtcctggttaggctgtgtgtctcctacattaacagctggggaggagggaaaagcttcagacttttaaactagcaaaacagttatttctctgcattcacaattctgatttcatgtatttctctgtacatgtttgatcattatcaggccattctgtttaagtttgaaactaagcattttaagaagtcttgcctcagttatttcagttttcaggtgactagagaatttcaggcaacagtgccctttgcaattacctttttgatgattaaggtgactatttttatttcttgttaagcatcagaagatgtcagcattcatcttttgggagtccagttacaaggtggaactagaaggtgttttcagcaatagccagagcactggaggaaaaataattgacaaatatttatacttttaaattgttttgaactgtatttacatacatcatgttttatcaggtacccaccaactttatactttctgccttcagatagagtttctaacattttctagtttgtcagttttaaaatataaaattcttttatgtttttaaaccgtcaaccaagaagtcaagaccactgtcccctgctgagttaggcaatcacttaaaactccaaagaactccaggctgaggagttcttttggtgctgaacagtggtctgacaacaggtgctagaattaaggtgtgggaaaaaaaaaaaaacagccaggaaggacaagatctccaattttgtgaagcttatgatacagctgaaaccagtctgatcaattttatgctacctgtcaccaagaaattaactctaaatttttgaatgcttgttggcatctgtcaaatcaatactgaaaggatgcatttcggcttttaaccagtttggttctgatcattgcaacctctgtgcttttataattcaaagaacaaggatagctttcttcggtatcttttaatataagaacactgaattttggcttgaaatattgtgactaaattgcacaatctctggctattagcactgttcactacattaacatgcaagagagagagaagccttgttacatttcctgctatttaacaaactgtccaattaggtcagcaagcctgttagggccttcactgctacgcccctggccccaaaacagagagcaagacagttgtccagagaatttagatatgagttaagagctgccagatttattttaaggcatgtagagaatctcataatctatgtgaaagtcacttgccaaaaaggttttggttatgaaagtgaatgttatatatttaatattaagtgaacctcccgtgccttttaaaaaataccaacattatgaaatttaaaagcttaaatatatttgcctagttgataaagaggctgtggaacaactgaaggagaactttcagaccctaaaacagttatattacttagatgttaaaattttctagtgggctgtgcaattgctgggttgtccccccaaacatattttaatatgttatttaaaatgattttacccaagcctaagtattaaagtatatgtgcaaaaa

SEQ ID NO: 353296 - DNA, 842 bp, Homo sapiens
attcaattaatttatggttgaaaattttttaatatttttttaaaatcaggatttccagactgtattaccatcatttgagctcttctcaaagtatggaaaattatattcaaaagctggacagattgtataaagaaaacagaagatgaaatgtaaaactgagattaaggtgtgaagtgagtgtgaatagaagaccccacactgcctggagtcctggattcttccacgtctgatgagtgaccttggatctcttaatctctctagttttctctctcttaggcgtcagaagaagaaactgaagccatctgcattttaaaacttaacagttctgaaaggaaaacacagatgaagatcctgtaggaaatatacttgctatgattcaataaactataaaattttgattttgtagctctagtcatgaattaattattgtgtgtatgtatttgaaatctcttagacatatcttttcaaacaaatacttaaacttgagtctgttacctctgagaatgtctgtcacaatcacagcccctggtgaccaacagtgccataaatggttcccctgaaatacccatattctgaccccatcacccgggtcacaaatgatgacaccagtgctgggtacccaaattaagggcgactaacatgtaagtaggatgatgaatggtttgaagtgtaaattgtgtgaaatagttcagcatgaaagctctgccctgagaaataatgactgattatacccgttagaaacccttcagactgttgaacttgagacacacagacacaacagacacagactagtgggtgtgggagcagaagcataggcactctcaaatagagaagacatttgc

SEQ ID NO: 353297 - DNA, 410 bp, Homo sapiens
aatattttcgcattttctgttgaatataagagccggccatgtaggcctcgagggttacaggagatttccagactgtattaccatcatttgagctcttctcaaagtatggaaaattatattcaaaagctggacagattgtataaagaaaacagaagatgaaatgtaaaactgagattaaggtgtgaagtgagtgtgaatagaagaccccacactgcctggagtcctggattcttccacgtctgatgagtgaccttggatctcttaatctctctagttttctctctcttaggcgtcagaagaagaaactgaagccatctgcattttaaaacttaacagttctgaaaggaaaacacagatgaagatcctgtaggaaatatacttgctatgattcaataaactataaaattttg

SEQ ID NO: 353298 - DNA, 386 bp, Homo sapiens
cgcctcaccacggatcatggggaggctggcggtttcgggatttccagactgtattaccatcatttgagctcttctcaaagtatggaaaattatattcaaaagctggacagattgtataaagaaaacagaagatgaaatgtaaaactgagattaaggtgtgaagtgagtgtgaatagaagaccccacactgcctggagtcctggattcttccacgtctgatgagtgaccttggatctcttaatctctctagttttctctctcttaggcgtcagaagaagaaactgaagccatctgcattttaaaacttaacagttctgaaaggaaaacacagatgaagatcctgtaggaaatatacttgctatgattcaataaactataaaattttg

SEQ ID NO: 353299 - DNA, 832 bp, Homo sapiens
gcatagctgcaacgactctcttaacctccaccgctacacgatttccagactgtattaccatcatttgagctcttctcaaagtatggaaaattatattcaaaagctggacagattgtataaagaaaacagaagatgaaatgtaaaactgagattaaggtgtgaagtgagtgtgaatagaagaccccacactgcctggagtcctggattcttccacgtctgatgagtgaccttggatctcttaatctctctagttttctctctcttaggcgtcagaagaagaaactgaagccatctgcattttaaaacttaacagttctgaaaggaaaacacagatgaagatcctgtaggaaatatacttgctatgattcaataaactataaaattttgattttgtagctctagtcatgaattaattattgtgtgtatgtatttgaaatctcttagacatatcttttcaaacaaatacttaaacttgagtctgttacctctgagaatgtctgtcacaatcacagcccctggtgaccaacagtgccataaatggttcccctgaaatacccatattctgaccccatcacccgggtcacaaatgatgacaccagtgctgggtacccaaattaagggcgactaacatgtaagtaggatgatgaatggtttgaagtgtaaattgtgtgaaatagttcagcatgaaagctctgccctgagaaataatgactgattatacccgttagaaacccttcagactgttgaacttgagacacacagacacaacagacacagactagtgggtgtgggagcagaagcataggcactctcaaatagagaagacatttgc

SEQ ID NO: 353300 - DNA, 264 bp, Homo sapiens
  misc_feature (56)..(56): n is a, c, g, or t
gagcgcgttcgcgccgaataccctctttatatttgagaaagcgcgctttcggtatncacagatttccagactgtattaccatcatttgagctcttctcaaagtatggaaaattatattcaaaagctggacagattgtataaaggcgtcagaagaagaaactgaagccatctgcattttaaaacttaacagttctgaaaggaaaacacagatgaagatcctgtaggaaatatacttgctatgattcaataaactataaaattttg

SEQ ID NO: 353301 - DNA, 254 bp, Homo sapiens
agacttaaattagaggtttgcgctcgcaaccagaccacaggcagcttgaggatttccagactgtattaccatcatttgagctcttctcaaagtatggaaaattatattcaaaagctggacagattgtataaaggcgtcagaagaagaaactgaagccatctgcattttaaaacttaacagttctgaaaggaaaacacagatgaagatcctgtaggaaatatacttgctatgattcaataaactataaaattttg

SEQ ID NO: 353302 - DNA, 251 bp, Homo sapiens
ttttatttttttatatataatataccgaaccccccaagccacaccgggatttccagactgtattaccatcatttgagctcttctcaaagtatggaaaattatattcaaaagctggacagattgtataaaggcgtcagaagaagaaactgaagccatctgcattttaaaacttaacagttctgaaaggaaaacacagatgaagatcctgtaggaaatatacttgctatgattcaataaactataaaattttg

SEQ ID NO: 353303 - DNA, 220 bp, Homo sapiens
actttttcctcctagggatttccagactgtattaccatcatttgagctcttctcaaagtatggaaaattatattcaaaagctggacagattgtataaaggcgtcagaagaagaaactgaagccatctgcattttaaaacttaacagttctgaaaggaaaacacagatgaagatcctgtaggaaatatacttgctatgattcaataaactataaaattttg

SEQ ID NO: 353304 - DNA, 266 bp, Homo sapiens
gctgctgggaacctctcttattctcaccgctacaagatttccagactgtattaccatcatttgagctcttctcaaagtatggaaaattatattcaaaagctggacagattgtataaaggaaatgaatgtctagtgtttaattttggcgtcagaagaagaaactgaagccatctgcattttaaaacttaacagttctgaaaggaaaacacagatgaagatcctgtaggaaatatacttgctatgattcaataaactataaaattttg

SEQ ID NO: 353305 - DNA, 1412 bp, Homo sapiens
agcccagttaccatggagaccggtagtaacaccagttgtaaacccaaggccaagagaccatggccacgttagcccggctgcaagctaggtcgtcgactgtaggaaatcagtactactttaggaacagtgttgtagatccatttagaaaaaaggagaatgatgcagcagttaaaatccaaagctggtttcgaggatgtcaagttcgggcatatatcaggcatttaaacaggattgtaacaattattcaaaaatggtggagaagtttcttaggcagaaagcaatatcaactaactgtgcaggtagcatattatactatgatgatgaatctctacaatgcaatggctgtcaggattcagagacgatggcgaggctatagggttcggaagtacctctttaattattattatttgaaagagtacctgaaagtcgtttcagagaccaatgatgcaattaggaaggcactggaggagtttgcagaaatgaaagaaagagaagagaagaaggctaacctcgaaagggaagagaagaaaagagattaccaagcccgaaagatgcattacctcctcagcacaaagcagattccaggaatatacaattcacccttcagaaaagagcctgatccatgggagctgcaattacaaaaggcaaagcctttaacacaccgaagacctaaagttaagcagaaggactccaccagccttactgattggctagcttgtacaagcgcccgttcttttcctcggtctgaaattctaccacctattaatagaaagcaatgtcaggggcccttccgagatatcaccgaagtattagaacaacgctacaggcctttggagccaacgttgcgggtggcagaaccaatcgatgagttaaagttggccagagaggagctcagaagagaggaatggctgcaaaatgtaaatgacaatatgtttttgccattttcttcataccataaaaatgaaaagtacatcccatcaatgcatttatcaagcaagtatggtcctatttcttacaaagaacaattccgaagtgaaaatcctaagaaatggatctgtgacaaggatttccagactgtattaccatcatttgagctcttctcaaagtatggaaaattatattcaaaagctggacagattgtataaagaaaacagaagatgaaatgtaaaactgagattaaggtgtgaagtgagtgtgaatagaagaccccacactgcctggagtcctggattcttccacgtctgatgagtgaccttggatctcttaatctctctagttttctctctcttaggcgtcagaagaagaaactgaagccatctgcattttaaaacttaacagttctgaaaggaaaacacagatgaagatcctgtaggaaatatacttgctatgattcaataaactataaaattttg

SEQ ID NO: 353306 - DNA, 1857 bp, Homo sapiens
agcccagttaccatggagaccggtagtaacaccagttgtaaacccaaggccaagagaccatggccacgttagcccggctgcaagctaggtcgtcgactgtaggaaatcagtactactttaggaacagtgttgtagatccatttagaaaaaaggagaatgatgcagcagttaaaatccaaagctggtttcgaggatgtcaagttcgggcatatatcaggcatttaaacaggattgtaacaattattcaaaaatggtggagaagtttcttaggcagaaagcaatatcaactaactgtgcaggtagcatattatactatgatgatgaatctctacaatgcaatggctgtcaggattcagagacgatggcgaggctatagggttcggaagtacctctttaattattattatttgaaagagtacctgaaagtcgtttcagagaccaatgatgcaattaggaaggcactggaggagtttgcagaaatgaaagaaagagaagagaagaaggctaacctcgaaagggaagagaagaaaagagattaccaagcccgaaagatgcattacctcctcagcacaaagcagattccaggaatatacaattcacccttcagaaaagagcctgatccatgggagctgcaattacaaaaggcaaagcctttaacacaccgaagacctaaagttaagcagaaggactccaccagccttactgattggctagcttgtacaagcgcccgttcttttcctcggtctgaaattctaccacctattaatagaaagcaatgtcaggggcccttccgagatatcaccgaagtattagaacaacgctacaggcctttggagccaacgttgcgggtggcagaaccaatcgatgagttaaagttggccagagaggagctcagaagagaggaatggctgcaaaatgtaaatgacaatatgtttttgccattttcttcataccataaaaatgaaaagtacatcccatcaatgcatttatcaagcaagtatggtcctatttcttacaaagaacaattccgaagtgaaaatcctaagaaatggatctgtgacaaggatttccagactgtattaccatcatttgagctcttctcaaagtatggaaaattatattcaaaagctggacagattgtataaagaaaacagaagatgaaatgtaaaactgagattaaggtgtgaagtgagtgtgaatagaagaccccacactgcctggagtcctggattcttccacgtctgatgagtgaccttggatctcttaatctctctagttttctctctcttaggcgtcagaagaagaaactgaagccatctgcattttaaaacttaacagttctgaaaggaaaacacagatgaagatcctgtaggaaatatacttgctatgattcaataaactataaaattttgattttgtagctctagtcatgaattaattattgtgtgtatgtatttgaaatctcttagacatatcttttcaaacaaatacttaaacttgagtctgttacctctgagaatgtctgtcacaatcacagcccctggtgaccaacagtgccataaatggttcccctgaaatacccatattctgaccccatcacccgggtcacaaatgatgacaccagtgctgggtacccaaattaagggcgactaacatgtaagtaggatgatgaatggtttgaagtgtaaattgtgtgaaatagttcagcatgaaagctctgccctgagaaataatgactgattatacccgttagaaacccttcagactgttgaacttgagacacacagacacaacagacacagactagtgggtgtgggagcagaagcataggcactctcaaatagagaagacatttgc

SEQ ID NO: 353307 - DNA, 1473 bp, Homo sapiens
  misc_feature (1414)..(1414): n is a, c, g, or t
  misc_feature (1439)..(1439): n is a, c, g, or t
agcccagttaccatggagaccggtagtaacaccagttgtaaacccaaggccaagagaccatggccacgttagcccggctgcaagctaggtcgtcgactgtaggaaatcagtactactttaggaacagtgttgtagatccatttagaaaaaaggagaatgatgcagcagttaaaatccaaagctggtttcgaggatgtcaagttcgggcatatatcaggcatttaaacaggattgtaacaattattcaaaaatggtggagaagtttcttaggcagaaagcaatatcaactaactgtgcaggtagcatattatactatgatgatgaatctctacaatgcaatggctgtcaggattcagagacgatggcgaggctatagggttcggaagtacctctttaattattattatttgaaagagtacctgaaagtcgtttcagagaccaatgatgcaattaggaaggcactggaggagtttgcagaaatgaaagaaagagaagagaagaaggctaacctcgaaagggaagagaagaaaagagattaccaagcccgaaagatgcattacctcctcagcacaaagcagattccaggaatatacaattcacccttcagaaaagagcctgatccatgggagctgcaattacaaaaggcaaagcctttaacacaccgaagacctaaagttaagcagaaggactccaccagccttactgattggctagcttgtacaagcgcccgttcttttcctcggtctgaaattctaccacctattaatagaaagcaatgtcaggggcccttccgagatatcaccgaagtattagaacaacgctacaggcctttggagccaacgttgcgggtggcagaaccaatcgatgagttaaagttggccagagaggagctcagaagagaggaatggctgcaaaatgtaaatgacaatatgtttttgccattttcttcataccataaaaatgaaaagtacatcccatcaatgcatttatcaagcaagtatggtcctatttcttacaaagaacaattccgaagtgaaaatcctaagaaatggatctgtgacaaggatttccagactgtattaccatcatttgagctcttctcaaagtatggaaaattatattcaaaagctggacagattgtataaagaaaacagaagatgaaatgtaaaactgagattaaggtgtgaagtgagtgtgaatagaagaccccacactgcctggagtcctggattcttccacgtctgatgagtgaccttggatctcttaatctctctagttttctctctcttaggcgtcagaagaagaaactgaagccatctgcattttaaaacttaacagttctgaaaggaaaacacagatgaagatcctgtaggaaatatacttgctatgattcaataaactataaaattttgcngtatgcggccagattctgctttatntgggcgccatacactcgacagccactactccccc

SEQ ID NO: 353308 - DNA, 1474 bp, Homo sapiens
agcccagttaccatggagaccggtagtaacaccagttgtaaacccaaggccaagagaccatggccacgttagcccggctgcaagctaggtcgtcgactgtaggaaatcagtactactttaggaacagtgttgtagatccatttagaaaaaaggagaatgatgcagcagttaaaatccaaagctggtttcgaggatgtcaagttcgggcatatatcaggcatttaaacaggattgtaacaattattcaaaaatggtggagaagtttcttaggcagaaagcaatatcaactaactgtgcaggtagcatattatactatgatgatgaatctctacaatgcaatggctgtcaggattcagagacgatggcgaggctatagggttcggaagtacctctttaattattattatttgaaagagtacctgaaagtcgtttcagagaccaatgatgcaattaggaaggcactggaggagtttgcagaaatgaaagaaagagaagagaagaaggctaacctcgaaagggaagagaagaaaagagattaccaagcccgaaagatgcattacctcctcagcacaaagcagattccaggaatatacaattcacccttcagaaaagagcctgatccatgggagctgcaattacaaaaggcaaagcctttaacacaccgaagacctaaagttaagcagaaggactccaccagccttactgattggctagcttgtacaagcgcccgttcttttcctcggtctgaaattctaccacctattaatagaaagcaatgtcaggggcccttccgagatatcaccgaagtattagaacaacgctacaggcctttggagccaacgttgcgggtggcagaaccaatcgatgagttaaagttggccagagaggagctcagaagagaggaatggctgcaaaatgtaaatgacaatatgtttttgccattttcttcataccataaaaatgaaaagtacatcccatcaatgcatttatcaagcaagtatggtcctatttcttacaaagaacaattccgaagtgaaaatcctaagaaatggatctgtgacaaggatttccagactgtattaccatcatttgagctcttctcaaagtatggaaaattatattcaaaagctggacagattgtataaagaaaacagaagatgaaatgtaaaactgagattaaggtgtgaagtgagtgtgaatagaagaccccacactgcctggagtcctggattcttccacgtctgatgagtgaccttggatctcttaatctctctagttttctctctcttaggcgtcagaagaagaaactgaagccatctgcattttaaaacttaacagttctgaaaggaaaacacagatgaagatcctgtaggaaatatacttgctatgattcaataaactataaaattttgcccaccacaacaaatgatgccccaacccaaacaaaacactaaaatgggctccttggcctcta

SEQ ID NO: 353309 - DNA, 1302 bp, Homo sapiens
agcccagttaccatggagaccggtagtaacaccagttgtaaacccaaggccaagagaccatggccacgttagcccggctgcaagctaggtcgtcgactgtaggaaatcagtactactttaggaacagtgttgtagatccatttagaaaaaaggagaatgatgcagcagttaaaatccaaagctggtttcgaggatgtcaagttcgggcatatatcaggcatttaaacaggattgtaacaattattcaaaaatggtggagaagtttcttaggcagaaagcaatatcaactaactgtgcaggtagcatattatactatgatgatgaatctctacaatgcaatggctgtcaggattcagagacgatggcgaggctatagggttcggaagtacctctttaattattattatttgaaagagtacctgaaagtcgtttcagagaccaatgatgcaattaggaaggcactggaggagtttgcagaaatgaaagaaagagaagagaagaaggctaacctcgaaagggaagagaagaaaagagattaccaagcccgaaagatgcattacctcctcagcacaaagcagattccaggaatatacaattcacccttcagaaaagagcctgatccatgggagctgcaattacaaaaggcaaagcctttaacacaccgaagacctaaagttaagcagaaggactccaccagccttactgattggctagcttgtacaagcgcccgttcttttcctcggtctgaaattctaccacctattaatagaaagcaatgtcaggggcccttccgagatatcaccgaagtattagaacaacgctacaggcctttggagccaacgttgcgggtggcagaaccaatcgatgagttaaagttggccagagaggagctcagaagagaggaatggctgcaaaatgtaaatgacaatatgtttttgccattttcttcataccataaaaatgaaaagtacatcccatcaatgcatttatcaagcaagtatggtcctatttcttacaaagaacaattccgaagtgaaaatcctaagaaatggatctgtgacaaggatttccagactgtattaccatcatttgagctcttctcaaagtatggaaaattatattcaaaagctggacagattgtataaagaaaacagaagatgaaatgtaaaactgagattaaggcgtcagaagaagaaactgaagccatctgcattttaaaacttaacagttctgaaaggaaaacacagatgaagatcctgtaggaaatatacttgctatgattcaataaactataaaattttg

SEQ ID NO: 353310 - DNA, 1325 bp, Homo sapiens
agcccagttaccatggagaccggtagtaacaccagttgtaaacccaaggccaagagaccatggccacgttagcccggctgcaagctaggtcgtcgactgtaggaaatcagtactactttaggaacagtgttgtagatccatttagaaaaaaggagaatgatgcagcagttaaaatccaaagctggtttcgaggatgtcaagttcgggcatatatcaggcatttaaacaggattgtaacaattattcaaaaatggtggagaagtttcttaggcagaaagcaatatcaactaactgtgcaggtagcatattatactatgatgatgaatctctacaatgcaatggctgtcaggattcagagacgatggcgaggctatagggttcggaagtacctctttaattattattatttgaaagagtacctgaaagtcgtttcagagaccaatgatgcaattaggaaggcactggaggagtttgcagaaatgaaagaaagagaagagaagaaggctaacctcgaaagggaagagaagaaaagagattaccaagcccgaaagatgcattacctcctcagcacaaagcagattccaggaatatacaattcacccttcagaaaagagcctgatccatgggagctgcaattacaaaaggcaaagcctttaacacaccgaagacctaaagttaagcagaaggactccaccagccttactgattggctagcttgtacaagcgcccgttcttttcctcggtctgaaattctaccacctattaatagaaagcaatgtcaggggcccttccgagatatcaccgaagtattagaacaacgctacaggcctttggagccaacgttgcgggtggcagaaccaatcgatgagttaaagttggccagagaggagctcagaagagaggaatggctgcaaaatgtaaatgacaatatgtttttgccattttcttcataccataaaaatgaaaagtacatcccatcaatgcatttatcaagcaagtatggtcctatttcttacaaagaacaattccgaagtgaaaatcctaagaaatggatctgtgacaaggatttccagactgtattaccatcatttgagctcttctcaaagtatggaaaattatattcaaaagctggacagattgtataaaggcgtcagaagaagaaactgaagccatctgcattttaaaacttaacagttctgaaaggaaaacacagatgaagatcctgtaggaaatatacttgctatgattcaataaactataaaattttgcaacacggatgcggccgtagtcaaataaaggttgcaaatgaaaaaggataaaacaaa

SEQ ID NO: 353311 - DNA, 1393 bp, Homo sapiens
agcccagttaccatggagaccggtagtaacaccagttgtaaacccaaggccaagagaccatggccacgttagcccggctgcaagctaggtcgtcgactgtaggaaatcagtactactttaggaacagtgttgtagatccatttagaaaaaaggagaatgatgcagcagttaaaatccaaagctggtttcgaggatgtcaagttcgggcatatatcaggcatttaaacaggattgtaacaattattcaaaaatggtggagaagtttcttaggcagaaagcaatatcaactaactgtgcaggtagcatattatactatgatgatgaatctctacaatgcaatggctgtcaggattcagagacgatggcgaggctatagggttcggaagtacctctttaattattattatttgaaagagtacctgaaagtcgtttcagagaccaatgatgcaattaggaaggcactggaggagtttgcagaaatgaaagaaagagaagagaagaaggctaacctcgaaagggaagagaagaaaagagattaccaagcccgaaagatgcattacctcctcagcacaaagcagattccaggaatatacaattcacccttcagaaaagagcctgatccatgggagctgcaattacaaaaggcaaagcctttaacacaccgaagacctaaagttaagcagaaggactccaccagccttactgattggctagcttgtacaagcgcccgttcttttcctcggtctgaaattctaccacctattaatagaaagcaatgtcaggggcccttccgagatatcaccgaagtattagaacaacgctacaggcctttggagccaacgttgcgggtggcagaaccaatcgatgagttaaagttggccagagaggagctcagaagagaggaatggctgcaaaatgtaaatgacaatatgtttttgccattttcttcataccataaaaatgaaaagtacatcccatcaatgcatttatcaagcaagtatggtcctatttcttacaaagaacaattccgaagtgaaaatcctaagaaatggatctgtgacaaggatttccagactgtattaccatcatttgagctcttctcaaagtatggaaaattatattcaaaagctggacagattgtataaagagagacagggtctcactctgttgcccagggtggaatgcagtggcgtgatcatagctcactgcaacctcgaactcctgggtcaagtgatcctcatgcctcagcctcttgagtagctgggattacaggcgtcagaagaagaaactgaagccatctgcattttaaaacttaacagttctgaaaggaaaacacagatgaagatcctgtaggaaatatacttgctatgattcaataaactataaaattttg

SEQ ID NO: 353312 - DNA, 450 bp, Homo sapiens
atggagtctcgctgtgtcgccaggctggagtgcactggcatgatctcagctcactgcaacctccgtctcctgggttcaagctattctcctgccttagcctcccaagtaactgagactacaggatttccagactgtattaccatcatttgagctcttctcaaagtatggaaaattatattcaaaagctggacagattgtataaagagagacagggtctcactctgttgcccagggtggaatgcagtggcgtgatcatagctcactgcaacctcgaactcctgggtcaagtgatcctcatgcctcagcctcttgagtagctgggattacaggcgtcagaagaagaaactgaagccatctgcattttaaaacttaacagttctgaaaggaaaacacagatgaagatcctgtaggaaatatacttgctatgattcaataaactataaaattttg

SEQ ID NO: 353313 - DNA, 1268 bp, Homo sapiens
agcccagttaccatggagaccggtagtaacaccagttgtaaacccaaggccaagagaccatggccacgttagcccggctgcaagctaggtcgtcgactgtaggaaatcagtactactttaggaacagtgttgtagatccatttagaaaaaaggagaatgatgcagcagttaaaatccaaagctggtttcgaggatgtcaagttcgggcatatatcaggcatttaaacaggattgtaacaattattcaaaaatggtggagaagtttcttaggcagaaagcaatatcaactaactgtgcaggtagcatattatactatgatgatgaatctctacaatgcaatggctgtcaggattcagagacgatggcgaggctatagggttcggaagtacctctttaattattattatttgaaagagtacctgaaagtcgtttcagagaccaatgatgcaattaggaaggcactggaggagtttgcagaaatgaaagaaagagaagagaagaaggctaacctcgaaagggaagagaagaaaagagattaccaagcccgaaagatgcattacctcctcagcacaaagcagattccaggaatatacaattcacccttcagaaaagagcctgatccatgggagctgcaattacaaaaggcaaagcctttaacacaccgaagacctaaagttaagcagaaggactccaccagccttactgattggctagcttgtacaagcgcccgttcttttcctcggtctgaaattctaccacctattaatagaaagcaatgtcaggggcccttccgagatatcaccgaagtattagaacaacgctacaggcctttggagccaacgttgcgggtggcagaaccaatcgatgagttaaagttggccagagaggagctcagaagagaggaatggctgcaaaatgtaaatgacaatatgtttttgccattttcttcataccataaaaatgaaaagtacatcccatcaatgcatttatcaagcaagtatggtcctatttcttacaaagaacaattccgaagtgaaaatcctaagaaatggatctgtgacaaggatttccagactgtattaccatcatttgagctcttctcaaagtatggaaaattatattcaaaagctggacagattgtataaaggcgtcagaagaagaaactgaagccatctgcattttaaaacttaacagttctgaaaggaaaacacagatgaagatcctgtaggaaatatacttgctatgattcaataaactataaaattttg

SEQ ID NO: 353314 - DNA, 1598 bp, Homo sapiens
agcccagttaccatggagaccggtagtaacaccagttgtaaacccaaggccaagagaccatggccacgttagcccggctgcaagctaggtcgtcgactgtaggaaatcagtactactttaggaacagtgttgtagatccatttagaaaaaaggagaatgatgcagcagttaaaatccaaagctggtttcgaggatgtcaagttcgggcatatatcaggcatttaaacaggattgtaacaattattcaaaaatggtggagaagtttcttaggcagaaagcaatatcaactaactgtgcagtgatctgaaatactcaagtgtgttagttacatcaatcagcccaattaggatgccttgctttaagcaattggaaactattgaaagtctatgatcttaaaaattcaaaaaaggagttgataaaagcaatactttacaaaattaatctagaagaactgttccaaatggattaaacagaagattaagcaggtagcatattatactatgatgatgaatctctacaatgcaatggctgtcaggattcagagacgatggcgaggctatagggttcggaagtacctctttaattattattatttgaaagagtacctgaaagtcgtttcagagaccaatgatgcaattaggaaggcactggaggagtttgcagaaatgaaagaaagagaagagaagaaggctaacctcgaaagggaagagaagaaaagagattaccaagcccgaaagatgcattacctcctcagcacaaagcagattccaggaatatacaattcacccttcagaaaagagcctgatccatgggagctgcaattacaaaaggcaaagcctttaacacaccgaagacctaaagttaagcagaaggactccaccagccttactgattggctagcttgtacaagcgcccgttcttttcctcggtctgaaattctaccacctattaatagaaagcaatgtcaggggcccttccgagatatcaccgaagtattagaacaacgctacaggcctttggagccaacgttgcgggtggcagaaccaatcgatgagttaaagttggccagagaggagctcagaagagaggaatggctgcaaaatgtaaatgacaatatgtttttgccattttcttcataccataaaaatgaaaagtacatcccatcaatgcatttatcaagcaagtatggtcctatttcttacaaagaacaattccgaagtgaaaatcctaagaaatggatctgtgacaaggatttccagactgtattaccatcatttgagctcttctcaaagtatggaaaattatattcaaaagctggacagattgtataaagaaaacagaagatgaaatgtaaaactgagattaaggtgtgaagtgagtgtgaatagaagaccccacactgcctggagtcctggattcttccacgtctgatgagtgaccttggatctcttaatctctctagttttctctctcttaggcgtcagaagaagaaactgaagccatctgcattttaaaacttaacagttctgaaaggaaaacacagatgaagatcctgtaggaaatatacttgctatgattcaataaactataaaattttg

SEQ ID NO: 353315 - DNA, 1450 bp, Homo sapiens
agcccagttaccatggagaccggtagtaacaccagttgtaaacccaaggccaagagaccatggccacgttagcccggctgcaagctaggtcgtcgactgtaggaaatcagtactactttaggaacagtgttgtagatccatttagaaaaaaggagaatgatgcagcagttaaaatccaaagctggtttcgaggatgtcaagttcgggcatatatcaggcatttaaacaggattgtaacaattattcaaaaatggtggagaagtttcttaggcagaaagcaatatcaactaactgtgcaggtagcatattatactatgatgatgaatctctacaatgcaatggctgtcaggattcagagacgatggcgaggctatagggttcggaagtacctctttaattattattatttgaaagagtacctgaaagtcgtttcagagaccaatgatgcaattaggaaggcactggaggagtttgcagaaatgaaagaaagagaagagaagaaggctaacctcgaaagggaagagaagaaaagagattaccaagcccgaaagatgcattacctcctcagcacaaagcagattccaggaatatacaattcacccttcagaaaagagcctgatccatgggagctgcaattacaaaaggcaaagcctttaacacaccgaagacctaaagttaagcagaaggactccaccagccttactgattggctagcttgtacaagcgcccgttcttttcctcggtctgaaattctaccacctattaatagaaagcaatgtcaggggcccttccgagatatcaccgaagtattagaacaacgctacaggcctttggagccaacgttgcgggtggcagaaccaatcgatgagttaaagttggccagagaggagctcagaagagaggaatggctgcaaaatgtaaatgacaatatgtttttgccattttcttcataccataaaaatgaaaagtacatcccatcaatgcatttatcaagcaagtatggtcctatttcttacaaagaacaattccgaagtgaaaatcctaagaaatggatctgtgacaaggatttccagactgtattaccatcatttgagctcttctcaaagtatggaaaattatattcaaaagctggacagattgtataaagaaaacagaagatgaaatgtaaaactgagattaaggtgtgaagtgagtgtgaatagaagaccccacactgcctggagtcctggattcttccacgtctgatgagtgaccttggatctcttaatctctctagttttctctctcttaggcgtcagaagaagaaactgaagccatctgcattttaaaacttaacagttctgaaaggaaaacacagatgaagatcctgtaggaaatatacttgctatgattcaataaactataaaattttgaaaaaaaaaacaaatggacctaactggaactcactgga

SEQ ID NO: 353316 - DNA, 1322 bp, Homo sapiens
  misc_feature (1269)..(1269): n is a, c, g, or t
agcccagttaccatggagaccggtagtaacaccagttgtaaacccaaggccaagagaccatggccacgttagcccggctgcaagctaggtcgtcgactgtaggaaatcagtactactttaggaacagtgttgtagatccatttagaaaaaaggagaatgatgcagcagttaaaatccaaagctggtttcgaggatgtcaagttcgggcatatatcaggcatttaaacaggattgtaacaattattcaaaaatggtggagaagtttcttaggcagaaagcaatatcaactaactgtgcaggtagcatattatactatgatgatgaatctctacaatgcaatggctgtcaggattcagagacgatggcgaggctatagggttcggaagtacctctttaattattattatttgaaagagtacctgaaagtcgtttcagagaccaatgatgcaattaggaaggcactggaggagtttgcagaaatgaaagaaagagaagagaagaaggctaacctcgaaagggaagagaagaaaagagattaccaagcccgaaagatgcattacctcctcagcacaaagcagattccaggaatatacaattcacccttcagaaaagagcctgatccatgggagctgcaattacaaaaggcaaagcctttaacacaccgaagacctaaagttaagcagaaggactccaccagccttactgattggctagcttgtacaagcgcccgttcttttcctcggtctgaaattctaccacctattaatagaaagcaatgtcaggggcccttccgagatatcaccgaagtattagaacaacgctacaggcctttggagccaacgttgcgggtggcagaaccaatcgatgagttaaagttggccagagaggagctcagaagagaggaatggctgcaaaatgtaaatgacaatatgtttttgccattttcttcataccataaaaatgaaaagtacatcccatcaatgcatttatcaagcaagtatggtcctatttcttacaaagaacaattccgaagtgaaaatcctaagaaatggatctgtgacaaggatttccagactgtattaccatcatttgagctcttctcaaagtatggaaaattatattcaaaagctggacagattgtataaaggcgtcagaagaagaaactgaagccatctgcattttaaaacttaacagttctgaaaggaaaacacagatgaagatcctgtaggaaatatacttgctatgattcaataaactataaaattttgnagatcggccgacgactaaacattaaatacataaaaaacaaaagcgggggggag

SEQ ID NO: 353317 - DNA, 1323 bp, Homo sapiens
  misc_feature (1269)..(1269): n is a, c, g, or t
agcccagttaccatggagaccggtagtaacaccagttgtaaacccaaggccaagagaccatggccacgttagcccggctgcaagctaggtcgtcgactgtaggaaatcagtactactttaggaacagtgttgtagatccatttagaaaaaaggagaatgatgcagcagttaaaatccaaagctggtttcgaggatgtcaagttcgggcatatatcaggcatttaaacaggattgtaacaattattcaaaaatggtggagaagtttcttaggcagaaagcaatatcaactaactgtgcaggtagcatattatactatgatgatgaatctctacaatgcaatggctgtcaggattcagagacgatggcgaggctatagggttcggaagtacctctttaattattattatttgaaagagtacctgaaagtcgtttcagagaccaatgatgcaattaggaaggcactggaggagtttgcagaaatgaaagaaagagaagagaagaaggctaacctcgaaagggaagagaagaaaagagattaccaagcccgaaagatgcattacctcctcagcacaaagcagattccaggaatatacaattcacccttcagaaaagagcctgatccatgggagctgcaattacaaaaggcaaagcctttaacacaccgaagacctaaagttaagcagaaggactccaccagccttactgattggctagcttgtacaagcgcccgttcttttcctcggtctgaaattctaccacctattaatagaaagcaatgtcaggggcccttccgagatatcaccgaagtattagaacaacgctacaggcctttggagccaacgttgcgggtggcagaaccaatcgatgagttaaagttggccagagaggagctcagaagagaggaatggctgcaaaatgtaaatgacaatatgtttttgccattttcttcataccataaaaatgaaaagtacatcccatcaatgcatttatcaagcaagtatggtcctatttcttacaaagaacaattccgaagtgaaaatcctaagaaatggatctgtgacaaggatttccagactgtattaccatcatttgagctcttctcaaagtatggaaaattatattcaaaagctggacagattgtataaaggcgtcagaagaagaaactgaagccatctgcattttaaaacttaacagttctgaaaggaaaacacagatgaagatcctgtaggaaatatacttgctatgattcaataaactataaaattttgngatgcggccagtcgtttcccccgtctacgtgcacagaggggacaaatgaataaa

SEQ ID NO: 353318 - DNA, 1324 bp, Homo sapiens
  misc_feature (1279)..(1279): n is a, c, g, or t
agcccagttaccatggagaccggtagtaacaccagttgtaaacccaaggccaagagaccatggccacgttagcccggctgcaagctaggtcgtcgactgtaggaaatcagtactactttaggaacagtgttgtagatccatttagaaaaaaggagaatgatgcagcagttaaaatccaaagctggtttcgaggatgtcaagttcgggcatatatcaggcatttaaacaggattgtaacaattattcaaaaatggtggagaagtttcttaggcagaaagcaatatcaactaactgtgcaggtagcatattatactatgatgatgaatctctacaatgcaatggctgtcaggattcagagacgatggcgaggctatagggttcggaagtacctctttaattattattatttgaaagagtacctgaaagtcgtttcagagaccaatgatgcaattaggaaggcactggaggagtttgcagaaatgaaagaaagagaagagaagaaggctaacctcgaaagggaagagaagaaaagagattaccaagcccgaaagatgcattacctcctcagcacaaagcagattccaggaatatacaattcacccttcagaaaagagcctgatccatgggagctgcaattacaaaaggcaaagcctttaacacaccgaagacctaaagttaagcagaaggactccaccagccttactgattggctagcttgtacaagcgcccgttcttttcctcggtctgaaattctaccacctattaatagaaagcaatgtcaggggcccttccgagatatcaccgaagtattagaacaacgctacaggcctttggagccaacgttgcgggtggcagaaccaatcgatgagttaaagttggccagagaggagctcagaagagaggaatggctgcaaaatgtaaatgacaatatgtttttgccattttcttcataccataaaaatgaaaagtacatcccatcaatgcatttatcaagcaagtatggtcctatttcttacaaagaacaattccgaagtgaaaatcctaagaaatggatctgtgacaaggatttccagactgtattaccatcatttgagctcttctcaaagtatggaaaattatattcaaaagctggacagattgtataaaggcgtcagaagaagaaactgaagccatctgcattttaaaacttaacagttctgaaaggaaaacacagatgaagatcctgtaggaaatatacttgctatgattcaataaactataaaattttgcaggatgcgancaggcaccgtccccgttctcacgcgggaaatctatattaacatgt

SEQ ID NO: 353319 - DNA, 2239 bp, Homo sapiens
ctatgattctcgaatcgttatgaatatcaaatgtccatttctattgtaatgaattcagtggaaccatcacacaaaagcacacaaagacctcctcctccacaggggagacagagaattctgcttggtcagaatcgtgatggcattgtgttcagcactgatgactattttcaccatcaagatgggtacaggtataatgttaatcaacttggtgatgcccatgactggaaccagaacagagcaaaacaagctatcgatcagggaagatctccagttataatagataacactaatatacaagcttgggaaatgaagccatatgtggaagtggccataggaaaaggatacagagtagagtttcatgaacctgaaacttggtggaaatttgatcctgaagaattagaaaagaggaataaacatggtgtgtctcgaaagaagattgctcagatgttggatcgttatgaatatcaaatgtccatttctattgtaatgaattcagtggaaccatcacacaaaagcacacaaagacctcctcctccacaggggagacagaggtggggaggctctcttggctcacataatcgtgtctgtgtcacaaataatcattaaattagctattttcagctaacacatttgttgttgcacttgaaaaagagttagtgagcctgtcttggagtttaagtagtttcaaataaaaaaaggctacagtgcctcacaaaggatgttcccagcaagttgtttaaattcccagcaagttgttaaagtgtaaataaaaatatatgaaattgtattttaaatgtttttatattctcttgttgtaatactcttggctgttatggaagcacctgagtaatagagtggtgggtaggagctaggatgtttttctacaatcgaattttaaactaatttatctattttatagacactattgaacagttttttaatagttcatatctaaatctaacttttcataaaactttacggtttttccttcactaccttaaatatgcaagaaatactgacttggtatagggtaccttagttttctctattcattagacaggtaaaattatatttcagctgattgatctgtgtgacaaaattatttcttagctataatcagcacatcacttagttcaaacaaaattccccagcaaatgttagatagtaggtatatcagtcacctggggagttttcttcataatatgcatattcatcttgtaatgcatacatagttatcatcctccttctcaacccatctccctaaccccacatgcttgccagttcttgaagggataaagtgattctaataatgttttacttctctctgttcaatttaatgtgatataattctagtataaaaatattttggacagttgcttaacatggtcataagaggatttgtactatagaatatcttctagtactaatttttctgtagagcaaattatatttctctcactggatagtttttagatgtgtttcttcatataaaattaaaaactgagatggaattcatttcagaggtcttgtcattcatcccctgccttcaaaccaagctttacctagactaacctagataattaagcatttctctttgcaacatgaggaaaaaaaacactactacttctcttaataccattgttaccaatgtcttctgaagaatatttcttcaacagttttgatttacttttttgatttactctttttaggggaaaaaaaacccagctaattacaatgctgtcttaaaaattaagcattatgattctttatatgttttacataatattttgtggcctttaagctttctcctaaaccagcacatcttgaatcccatagtatttctttgttttaaaaccttttgctattcctttcaactttagatattctctcacatctttatattactttttaagttgtcaggccaaaaactagattcactgctatcaacaaggtctttgttacattgcctttagtgaaataagaatatgattttatttgtactattcagtgctgttaacatttgaatgaatattacctttatcttgtttaatacgtgtgtttgtatatatttgttcatcttaactacgatgtaagaatatgctaattcatgttttgtgtgtaaatgtatattgtatacatatacacatcttcatctatgttttcatatattcttttatttcagagtaatacttgttggtgtttggacttgtgtttctaagtattttattctgtagattag

SEQ ID NO: 353320 - DNA, 798 bp, Homo sapiens
ggccaggctggtctcgaactcctgagctcagcccatctgccgtgctcagcctcccaaagtgctgggattacaggcatgagccaccacgcccagcctcatattgttttgactttccttaaggatagtaatcttaaggaattactattccttgagaatagtaatcaaaatttatccggttaaatagtcttaactgttataaaccatattattttataaagcgtcatttttcttggtcgagcaagtgtatagtattgtcgaaatgaaatttaactgtctgccttctttttactttaagaagtacttctctgggtttttgttttcttcctttcctttgtgtaggccataggaaaaggatacagagtagagtttcatgaacctgaaacttggtggaaatttgatcctgaagaattagaaaagaggaataaacatggtgtgtctcgaaagaagattgctcagatgttggatcgttatgaatatcaaatgtccatttctattgtaatgaattcagtggaaccatcacacaaaagcacacaaagacctcctcctccacaggggagacagaggtggggaggctctcttggctcacataatcgtgtctgtgtcacaaataatcattaaattagctattttcagctaacacatttgttgttgcacttgaaaaagagttagtgagcctgtcttggagtttaagtagtttcaaataaaaaaaggctacagtgcctcacaaaggatgttcccagcaagttgtttaaattcccagcaagttgttaaagtgtaaataaaaatatatgaaattgt

SEQ ID NO: 353321 - DNA, 1454 bp, Homo sapiens
tttatccaggccattgcggaaaacagggccgatgctgtgcacccttagatattttggtttcattgatctggggtggggcctaaacattgatactttttgttttgaaatttctccagacgattctgatgtatagtcagaattgaaaactgttgatctgaactataagtaaatacatatgctatgttattttaaaagaatggattgatgattaaacaaatagcttttattatgaaaaattttaaacagattaaagagactgtaatgaacctcatagacccatcacccagaattatcaggtattgagattttggtatatgggcttttatctttttgtttgtacccctttctctttttaaagcaaattctagacatcatactttatacatttcaaaataacttttttactaatcacatctttcacttcagtgccgttatcacacatttaaaaaaatgccagttccttcagatcatgtaacccagtgtgtaattgaatctcctctgttgttcgaaaaaatctcttcacagttattttgtttgaattgggatccaaacgaagtcctcaaaatgcattttgttttatttaattaagttaatccatagcatgttccttcttttaaccctcataccattaacttgttgcagaaactatgttgtttgtcctgtagaaagttccacatgctgtagttgtctatttgcttcttggtgttaaccatttaacttgctcctcttctttgttttctgtgaatggaaattagctctagattagaggcttgattaggttcaacatttttttttttttttttttggcaagcagatatttggttgtcctgttcttagtaatggtgagcttaatcagtagctgcacagggacaacctcttccctctgtctgctgtcaagttccctattaaccttatatctgatggttttatccaataataaattgtttcctgagtcagttatttcattcagaattgcaaagtgatgatttttagtttagttattccttccatgtttaatggaattcttctgtaatgaagaacttctctcaaagctgccaactagggttgccctaaagtataatatatacaagaaaaatagtaatgcttttctttttaattgtcaaatacagtaaggaatttcagtgaggatgtttgtgtgtgttttggagatggggtcttgctttgttgcccaggctggagcgtagtgacacagtcatagctcagtgcagcctcgaattcctggactcaagggatcctcctgcctcggcctcctgagtaactaggactacaggcaggtagctgggactacatacgtgtaccagcacacccagctattttttaaaaaaactttgtagaattttgaatgagccacagtgcctggctgaggatggtttcgagttaaaagttttcacgctgttacaatttatagtttcacaagaatgtttaaacatcag

SEQ ID NO: 353322 - DNA, 653 bp, Homo sapiens
ctatgattctcgaatcgttatgaatatcaaatgtccatttctattgtaatgaattcagtggaaccatcacacaaaagcacacaaagacctcctcctccacaggggagacagagaattctgcttggtcagaatcgtgatggcattgtgttcagcactgatgactattttcaccatcaagatgggtacaggtataatgttaatcaacttggtgatgcccatgactggaaccagaacagagcaaaacaagctatcgatcagggaagatctccagttataatagataacactaatatacaagcttgggaaatgaagccatatgtggaagtggccataggaaaaggatacagagtagagtttcatgaacctgaaacttggtggaaatttgatcctgaagaattagaaaagaggaataaacatggtgtgtctcgaaagaagattgctcagatgttggatcgttatgaatatcaaatgtccatttctattgtaatgaattcagtggaaccatcacacaaaagcacacaaagacctcctcctccacaggggagacagagaattctgcttggtcagaatcgtgatggcattgtgttcagcactgatgactattttcaccatcaagatgggtacagcaaaacagtaaccggatcgagaacata

SEQ ID NO: 353323 - DNA, 980 bp, Homo sapiens
gtatttatttttaatgcaacaaacacttacatagcgcttattctaccaggagctcgctgttctacttgcttgcacgtattgactcttttaatgggaaagctcagtgattggtctgtatttccaaaaacaaaacaaaacagcgacctgacactaaacgattttgttcataagtatttttatctgttattggggacctgcgccgcagtaattctgtccttccacagaaaagcatgagcctaaaattacgtcaggtggtctttcgtagaaacgaccggaatgcaaatttgtggtaccaactgtggagttccgttggaaaagtcagctggttgtcttctagaaagctctaagaagcatgcactgagagccgattatacatctattggggggcgccagtttctcaaattcctttttccttcgggggtgaacgccagaggaggtcgctgctttcttttaacgaaagttggtgtttttagataacttccctgctccagatctaggaactaattccggtctacttttgttgccaaattactgcgtttgtcacgccatggattctgggagacctagtctccgtgccgtgaggtttacggagccggtgtgaacgtcggacttcaattcccacaatgcctggcgcaaacgcctagttttggcctgggtaaccgagaggtgaccgccatcttgcgtacggaggtgaggtttgttaccgcgattctgagaggtgggcttttagtccctccagacctcggctttagtgctgtctccgcttttctttcaccttcacagaggttcgtgtcttcctaaaagaaggttttattgggaggtaaaggtcaatgcgtaggggtagagtaaggtgagtagacaccccgttttaggtgagggtggggcggtggtggtgtttttcgctttcacttcttgactggactgtttagattagctgtaaacgtagacgtaagctctgtgtgaacttttgcgcctcagag

SEQ ID NO: 353324 - DNA, 603 bp, Homo sapiens
ctatgattctcgaatcgttatgaatatcaaatgtccatttctattgtaatgaattcagtggaaccatcacacaaaagcacacaaagacctcctcctccacaggggagacagagaattctgcttggtcagaatcgtgatggcattgtgttcagcactgatgactattttcaccatcaagatgggtacagcaaaacaagctatcgatcagggaagatctccagttataatagataacactaatatacaagcttgggaaatgaagccatatgtggaagtggccataggaaaaggatacagagtagagtttcatgaacctgaaacttggtggaaatttgatcctgaagaattagaaaagaggaataaacatggtgtgtctcgaaagaagattgctcagatgttggatcgttatgaatatcaaatgtccatttctattgtaatgaattcagtggaaccatcacacaaaagcacacaaagacctcctcctccacaggggagacagagaattctgcttggtcagaatcgtgatggcattgtgttcagcactgatgactattttcaccatcaagatgggtacagcaaaacagtaaccggatcgagaacata

SEQ ID NO: 353325 - DNA, 678 bp, Homo sapiens
gttagcatctgtaattgtgtagatttaagtgtaaagtgatttgaaatctgaaatctttgtaagattattcagctcttgtgctggtctgttcgtgatatactttcaggtaagtatcagaaatccatttaataacctttcctgtgtgatttatttcacttggttatatttatttctgatagtttatttctgatggttatagattttgtaaatggcacctttatgatttcttttattaacagaattctgcttggtcagaatcgtgatggcattgtgttcagcactgatgactattttcaccatcaagatgggtacaggtataatgttaatcaacttggtgatgcccatgactggaaccagaacagagaggtttgttttgggctaagtgtcccaggatagaatatttggctaggagtcaaaagacctagattttattttcagcttaggtttttaccagctgaatgactgtaggcaagccgtttaaatagctttgagacctaatttctccatctgttagaggtggtgataattatacttgccctacctgatcagggtttttgtgaaaagcagagaatttagataaaacgctttgtaaactgtaaatagtttatcagtataagctggttattcccccttggaattttgagtcttatttatcactgagagttccaggactttgtt

SEQ ID NO: 353326 - DNA, 282 bp, Homo sapiens
  misc_feature (240)..(240): n is a, c, g, or t
  misc_feature (249)..(250): n is a, c, g, or t
  misc_feature (257)..(257): n is a, c, g, or t
ctatgattctcgaatcgttatgaatatcaaatgtccatttctattgtaatgaattcagtggaaccatcacacaaaagcacacaaagacctcctcctccacaggggagacagagaattctgcttggtcagaatcgtgatggcattgtgttcagcactgatgactattttcaccatcaagatgggtacaggtataatgttaatcaacttggtgatgcccatgactggaaccagaacagagcnaaacagctnncgatcgngacatagggtaccgctcgattcgta

SEQ ID NO: 353327 - DNA, 4235 bp, Homo sapiens
gtatttatttttaatgcaacaaacacttacatagcgcttattctaccaggagctcgctgttctacttgcttgcacgtattgactcttttaatgggaaagctcagtgattggtctgtatttccaaaaacaaaacaaaacagcgacctgacactaaacgattttgttcataagtatttttatctgttattggggacctgcgccgcagtaattctgtccttccacagaaaagcatgagcctaaaattacgtcaggtggtctttcgtagaaacgaccggaatgcaaatttgtggtaccaactgtggagttccgttggaaaagtcagctggttgtcttctagaaagctctaagaagcatgcactgagagccgattatacatctattggggggcgccagtttctcaaattcctttttccttcgggggtgaacgccagaggaggtcgctgctttcttttaacgaaagttggtgtttttagataacttccctgctccagatctaggaactaattccggtctacttttgttgccaaattactgcgtttgtcacgccatggattctgggagacctagtctccgtgccgtgaggtttacggagccggtgtgaacgtcggacttcaattcccacaatgcctggcgcaaacgcctagttttggcctgggtaaccgagaggtgaccgccatcttgcgtacggaggtgaggtttgttaccgcgattctgagaggtgggcttttagtccctccagacctcggctttagtgctgtctccgcttttctttcaccttcacagaggttcgtgtcttcctaaaagaaggttttattgggaggtaaaggtcaatgcgtaggggtagagtaagatgtcttatggtgaaattgaaggtaaattcttgggacctagagaagaagtaacgagtgagccacgctgtaaaaaattgaagtcaaccacagagtcgtatgtttttcacaatcatagtaatgctgattttcacagaatccaagagaaaactggaaatgattgggtccctgtgaccatcattgatgtcagaggacatagttatttgcaggagaacaaaatcaaaactacagatttgcatagacctttgcatgatgagatgcctggtaatagaccagatgttattgaatccattgattcacaggttttacaggaagcacgtcctccattagtatccgcagacgatgagatatatagcacaagtaaagcatttataggacccatttacaaaccccctgagaaaaagaaacgtaatgaagggaggaatgaggcacatgttctaaatggtataaatgacagaggaggacaaaaagagaaacagaaatttaactctgaaaaatcagagattgacaatgaattattccagttttacaaagaaattgaagagcttgaaaaggaaaaagatggttttgagaacagttgtaaagaatctgaaccttctcaggaacaatttgttccattttatgagggtcataataatggtctcttaaaacctgatgaagaaaagaaagatcttagtaataaagctatgccatcacattgtgattatcagcagaacttggggaatgagccagacaaatatccctgtaatggacaagtaatacctacattttgtgacacttcatttacttctttcaggcctgaatggcagtcagtatatccttttatagtgccctatggtccccctcttcccagtttgaactatcatttaaacattcagagattcagtggtccaccaaatccaccatcaaatattttccaagcccaagatgactctcagatacaaaatggatattatgtaaataattgtcatgttaactggaattgcatgacttttgatcagaacaatgaatatactgactgtagtgagaataggagtagtgttcatccctctggaaatggctgcagtatgcaagatcgatatgtgagtaatggtttctgtgaagtcagagaaagatgctggaaagatcattgtatggacaagcataatggaacagacaggtttgtgaaccagcagtttcaagaggaaaagttaaataaattgcagaagttacttattcttttaagaggtctgcctggttctgggaaaacaacattgtctcgaattctgcttggtcagaatcgtgatggcattgtgttcagcactgatgactattttcaccatcaagatgggtacaggtataatgttaatcaacttggtgatgcccatgactggaaccagaacagagcaaaacaagctatcgatcagggaagatctccagttataatagataacactaatatacaagcttgggaaatgaagccatatgtggaagtggccataggaaaaggatacagagtagagtttcatgaacctgaaacttggtggaaatttgatcctgaagaattagaaaagaggaataaacatggtgtgtctcgaaagaagattgctcagatgttggatcgttatgaatatcaaatgtccatttctattgtaatgaattcagtggaaccatcacacaaaagcacacaaagacctcctcctccacaggggagacagaggtggggaggctctcttggctcacataatcgtgtctgtgtcacaaataatcattaaattagctattttcagctaacacatttgttgttgcacttgaaaaagagttagtgagcctgtcttggagtttaagtagtttcaaataaaaaaaggctacagtgcctcacaaaggatgttcccagcaagttgtttaaattcccagcaagttgttaaagtgtaaataaaaatatatgaaattgtattttaaatgtttttatattctcttgttgtaatactcttggctgttatggaagcacctgagtaatagagtggtgggtaggagctaggatgtttttctacaatcgaattttaaactaatttatctattttatagacactattgaacagttttttaatagttcatatctaaatctaacttttcataaaactttacggtttttccttcactaccttaaatatgcaagaaatactgacttggtatagggtaccttagttttctctattcattagacaggtaaaattatatttcagctgattgatctgtgtgacaaaattatttcttagctataatcagcacatcacttagttcaaacaaaattccccagcaaatgttagatagtaggtatatcagtcacctggggagttttcttcataatatgcatattcatcttgtaatgcatacatagttatcatcctccttctcaacccatctccctaaccccacatgcttgccagttcttgaagggataaagtgattctaataatgttttacttctctctgttcaatttaatgtgatataattctagtataaaaatattttggacagttgcttaacatggtcataagaggatttgtactatagaatatcttctagtactaatttttctgtagagcaaattatatttctctcactggatagtttttagatgtgtttcttcatataaaattaaaaactgagatggaattcatttcagaggtcttgtcattcatcccctgccttcaaaccaagctttacctagactaacctagataattaagcatttctctttgcaacatgaggaaaaaaaacactactacttctcttaataccattgttaccaatgtcttctgaagaatatttcttcaacagttttgatttacttttttgatttactctttttaggggaaaaaaaacccagctaattacaatgctgtcttaaaaattaagcattatgattctttatatgttttacataatattttgtggcctttaagctttctcctaaaccagcacatcttgaatcccatagtatttctttgttttaaaaccttttgctattcctttcaactttagatattctctcacatctttatattactttttaagttgtcaggccaaaaactagattcactgctatcaacaaggtctttgttacattgcctttagtgaaataagaatatgattttatttgtactattcagtgctgttaacatttgaatgaatattacctttatcttgtttaatacgtgtgtttgtatatatttgttcatcttaactacgatgtaagaatatgctaattcatgttttgtgtgtaaatgtatattgtatacatatacacatcttcatctatgttttcatatattcttttatttcagagtaatacttgttggtgtttggacttgtgtttctaagtattttattctgtagattag

SEQ ID NO: 353328 - DNA, 4168 bp, Homo sapiens
gtatttatttttaatgcaacaaacacttacatagcgcttattctaccaggagctcgctgttctacttgcttgcacgtattgactcttttaatgggaaagctcagtgattggtctgtatttccaaaaacaaaacaaaacagcgacctgacactaaacgattttgttcataagtatttttatctgttattggggacctgcgccgcagtaattctgtccttccacagaaaagcatgagcctaaaattacgtcaggtggtctttcgtagaaacgaccggaatgcaaatttgtggtaccaactgtggagttccgttggaaaagtcagctggttgtcttctagaaagctctaagaagcatgcactgagagccgattatacatctattggggggcgccagtttctcaaattcctttttccttcgggggtgaacgccagaggaggtcgctgctttcttttaacgaaagttggtgtttttagataacttccctgctccagatctaggaactaattccggtctacttttgttgccaaattactgcgtttgtcacgccatggattctgggagacctagtctccgtgccgtgaggtttacggagccggtgtgaacgtcggacttcaattcccacaatgcctggcgcaaacgcctagttttggcctgggtaaccgagaggtgaccgccatcttgcgtacggaggtgaggtttgttaccgcgattctgagaggtgggcttttagtccctccagacctcggctttagtgctgtctccgcttttctttcaccttcacagatgtcttatggtgaaattgaaggtaaattcttgggacctagagaagaagtaacgagtgagccacgctgtaaaaaattgaagtcaaccacagagtcgtatgtttttcacaatcatagtaatgctgattttcacagaatccaagagaaaactggaaatgattgggtccctgtgaccatcattgatgtcagaggacatagttatttgcaggagaacaaaatcaaaactacagatttgcatagacctttgcatgatgagatgcctggtaatagaccagatgttattgaatccattgattcacaggttttacaggaagcacgtcctccattagtatccgcagacgatgagatatatagcacaagtaaagcatttataggacccatttacaaaccccctgagaaaaagaaacgtaatgaagggaggaatgaggcacatgttctaaatggtataaatgacagaggaggacaaaaagagaaacagaaatttaactctgaaaaatcagagattgacaatgaattattccagttttacaaagaaattgaagagcttgaaaaggaaaaagatggttttgagaacagttgtaaagaatctgaaccttctcaggaacaatttgttccattttatgagggtcataataatggtctcttaaaacctgatgaagaaaagaaagatcttagtaataaagctatgccatcacattgtgattatcagcagaacttggggaatgagccagacaaatatccctgtaatggacaagtaatacctacattttgtgacacttcatttacttctttcaggcctgaatggcagtcagtatatccttttatagtgccctatggtccccctcttcccagtttgaactatcatttaaacattcagagattcagtggtccaccaaatccaccatcaaatattttccaagcccaagatgactctcagatacaaaatggatattatgtaaataattgtcatgttaactggaattgcatgacttttgatcagaacaatgaatatactgactgtagtgagaataggagtagtgttcatccctctggaaatggctgcagtatgcaagatcgatatgtgagtaatggtttctgtgaagtcagagaaagatgctggaaagatcattgtatggacaagcataatggaacagacaggtttgtgaaccagcagtttcaagaggaaaagttaaataaattgcagaagttacttattcttttaagaggtctgcctggttctgggaaaacaacattgtctcgaattctgcttggtcagaatcgtgatggcattgtgttcagcactgatgactattttcaccatcaagatgggtacaggtataatgttaatcaacttggtgatgcccatgactggaaccagaacagagcaaaacaagctatcgatcagggaagatctccagttataatagataacactaatatacaagcttgggaaatgaagccatatgtggaagtggccataggaaaaggatacagagtagagtttcatgaacctgaaacttggtggaaatttgatcctgaagaattagaaaagaggaataaacatggtgtgtctcgaaagaagattgctcagatgttggatcgttatgaatatcaaatgtccatttctattgtaatgaattcagtggaaccatcacacaaaagcacacaaagacctcctcctccacaggggagacagaggtggggaggctctcttggctcacataatcgtgtctgtgtcacaaataatcattaaattagctattttcagctaacacatttgttgttgcacttgaaaaagagttagtgagcctgtcttggagtttaagtagtttcaaataaaaaaaggctacagtgcctcacaaaggatgttcccagcaagttgtttaaattcccagcaagttgttaaagtgtaaataaaaatatatgaaattgtattttaaatgtttttatattctcttgttgtaatactcttggctgttatggaagcacctgagtaatagagtggtgggtaggagctaggatgtttttctacaatcgaattttaaactaatttatctattttatagacactattgaacagttttttaatagttcatatctaaatctaacttttcataaaactttacggtttttccttcactaccttaaatatgcaagaaatactgacttggtatagggtaccttagttttctctattcattagacaggtaaaattatatttcagctgattgatctgtgtgacaaaattatttcttagctataatcagcacatcacttagttcaaacaaaattccccagcaaatgttagatagtaggtatatcagtcacctggggagttttcttcataatatgcatattcatcttgtaatgcatacatagttatcatcctccttctcaacccatctccctaaccccacatgcttgccagttcttgaagggataaagtgattctaataatgttttacttctctctgttcaatttaatgtgatataattctagtataaaaatattttggacagttgcttaacatggtcataagaggatttgtactatagaatatcttctagtactaatttttctgtagagcaaattatatttctctcactggatagtttttagatgtgtttcttcatataaaattaaaaactgagatggaattcatttcagaggtcttgtcattcatcccctgccttcaaaccaagctttacctagactaacctagataattaagcatttctctttgcaacatgaggaaaaaaaacactactacttctcttaataccattgttaccaatgtcttctgaagaatatttcttcaacagttttgatttacttttttgatttactctttttaggggaaaaaaaacccagctaattacaatgctgtcttaaaaattaagcattatgattctttatatgttttacataatattttgtggcctttaagctttctcctaaaccagcacatcttgaatcccatagtatttctttgttttaaaaccttttgctattcctttcaactttagatattctctcacatctttatattactttttaagttgtcaggccaaaaactagattcactgctatcaacaaggtctttgttacattgcctttagtgaaataagaatatgattttatttgtactattcagtgctgttaacatttgaatgaatattacctttatcttgtttaatacgtgtgtttgtatatatttgttcatcttaactacgatgtaagaatatgctaattcatgttttgtgtgtaaatgtatattgtatacatatacacatcttcatctatgttttcatatattcttttatttcagagtaatacttgttggtgtttggacttgtgtttctaagtattttattctgtagattag

SEQ ID NO: 353329 - DNA, 4142 bp, Homo sapiens
gtatttatttttaatgcaacaaacacttacatagcgcttattctaccaggagctcgctgttctacttgcttgcacgtattgactcttttaatgggaaagctcagtgattggtctgtatttccaaaaacaaaacaaaacagcgacctgacactaaacgattttgttcataagtatttttatctgttattggggacctgcgccgcagtaattctgtccttccacagaaaagcatgagcctaaaattacgtcaggtggtctttcgtagaaacgaccggaatgcaaatttgtggtaccaactgtggagttccgttggaaaagtcagctggttgtcttctagaaagctctaagaagcatgcactgagagccgattatacatctattggggggcgccagtttctcaaattcctttttccttcgggggtgaacgccagaggaggtcgctgctttcttttaacgaaagttggtgtttttagataacttccctgctccagatctaggaactaattccggtctacttttgttgccaaattactgcgtttgtcacgccatggattctgggagacctagtctccgtgccgtgaggtttacggagccggtgtgaacgtcggacttcaattcccacaatgcctggcgcaaacgcctagttttggcctgggtaaccgagaggtgaccgccatcttgcgtacggagaggttcgtgtcttcctaaaagaaggttttattgggaggtaaaggtcaatgcgtaggggtagagtaagatgtcttatggtgaaattgaaggtaaattcttgggacctagagaagaagtaacgagtgagccacgctgtaaaaaattgaagtcaaccacagagtcgtatgtttttcacaatcatagtaatgctgattttcacagaatccaagagaaaactggaaatgattgggtccctgtgaccatcattgatgtcagaggacatagttatttgcaggagaacaaaatcaaaactacagatttgcatagacctttgcatgatgagatgcctggtaatagaccagatgttattgaatccattgattcacaggttttacaggaagcacgtcctccattagtatccgcagacgatgagatatatagcacaagtaaagcatttataggacccatttacaaaccccctgagaaaaagaaacgtaatgaagggaggaatgaggcacatgttctaaatggtataaatgacagaggaggacaaaaagagaaacagaaatttaactctgaaaaatcagagattgacaatgaattattccagttttacaaagaaattgaagagcttgaaaaggaaaaagatggttttgagaacagttgtaaagaatctgaaccttctcaggaacaatttgttccattttatgagggtcataataatggtctcttaaaacctgatgaagaaaagaaagatcttagtaataaagctatgccatcacattgtgattatcagcagaacttggggaatgagccagacaaatatccctgtaatggacaagtaatacctacattttgtgacacttcatttacttctttcaggcctgaatggcagtcagtatatccttttatagtgccctatggtccccctcttcccagtttgaactatcatttaaacattcagagattcagtggtccaccaaatccaccatcaaatattttccaagcccaagatgactctcagatacaaaatggatattatgtaaataattgtcatgttaactggaattgcatgacttttgatcagaacaatgaatatactgactgtagtgagaataggagtagtgttcatccctctggaaatggctgcagtatgcaagatcgatatgtgagtaatggtttctgtgaagtcagagaaagatgctggaaagatcattgtatggacaagcataatggaacagacaggtttgtgaaccagcagtttcaagaggaaaagttaaataaattgcagaagttacttattcttttaagaggtctgcctggttctgggaaaacaacattgtctcgaattctgcttggtcagaatcgtgatggcattgtgttcagcactgatgactattttcaccatcaagatgggtacaggtataatgttaatcaacttggtgatgcccatgactggaaccagaacagagcaaaacaagctatcgatcagggaagatctccagttataatagataacactaatatacaagcttgggaaatgaagccatatgtggaagtggccataggaaaaggatacagagtagagtttcatgaacctgaaacttggtggaaatttgatcctgaagaattagaaaagaggaataaacatggtgtgtctcgaaagaagattgctcagatgttggatcgttatgaatatcaaatgtccatttctattgtaatgaattcagtggaaccatcacacaaaagcacacaaagacctcctcctccacaggggagacagaggtggggaggctctcttggctcacataatcgtgtctgtgtcacaaataatcattaaattagctattttcagctaacacatttgttgttgcacttgaaaaagagttagtgagcctgtcttggagtttaagtagtttcaaataaaaaaaggctacagtgcctcacaaaggatgttcccagcaagttgtttaaattcccagcaagttgttaaagtgtaaataaaaatatatgaaattgtattttaaatgtttttatattctcttgttgtaatactcttggctgttatggaagcacctgagtaatagagtggtgggtaggagctaggatgtttttctacaatcgaattttaaactaatttatctattttatagacactattgaacagttttttaatagttcatatctaaatctaacttttcataaaactttacggtttttccttcactaccttaaatatgcaagaaatactgacttggtatagggtaccttagttttctctattcattagacaggtaaaattatatttcagctgattgatctgtgtgacaaaattatttcttagctataatcagcacatcacttagttcaaacaaaattccccagcaaatgttagatagtaggtatatcagtcacctggggagttttcttcataatatgcatattcatcttgtaatgcatacatagttatcatcctccttctcaacccatctccctaaccccacatgcttgccagttcttgaagggataaagtgattctaataatgttttacttctctctgttcaatttaatgtgatataattctagtataaaaatattttggacagttgcttaacatggtcataagaggatttgtactatagaatatcttctagtactaatttttctgtagagcaaattatatttctctcactggatagtttttagatgtgtttcttcatataaaattaaaaactgagatggaattcatttcagaggtcttgtcattcatcccctgccttcaaaccaagctttacctagactaacctagataattaagcatttctctttgcaacatgaggaaaaaaaacactactacttctcttaataccattgttaccaatgtcttctgaagaatatttcttcaacagttttgatttacttttttgatttactctttttaggggaaaaaaaacccagctaattacaatgctgtcttaaaaattaagcattatgattctttatatgttttacataatattttgtggcctttaagctttctcctaaaccagcacatcttgaatcccatagtatttctttgttttaaaaccttttgctattcctttcaactttagatattctctcacatctttatattactttttaagttgtcaggccaaaaactagattcactgctatcaacaaggtctttgttacattgcctttagtgaaataagaatatgattttatttgtactattcagtgctgttaacatttgaatgaatattacctttatcttgtttaatacgtgtgtttgtatatatttgttcatcttaactacgatgtaagaatatgctaattcatgttttgtgtgtaaatgtatattgtatacatatacacatcttcatctatgttttcatatattcttttatttcagagtaatacttgttggtgtttggacttgtgtttctaagtattttattctgtagattag

SEQ ID NO: 353330 - DNA, 3991 bp, Homo sapiens
  misc_feature (6)..(6): n is a, c, g, or t
  misc_feature (18)..(18): n is a, c, g, or t
  misc_feature (53)..(53): n is a, c, g, or t
  misc_feature (126)..(126): n is a, c, g, or t
ccgagnaacccgggaccnacggccgggtagcccggggacccaccaaaccgggnacccccaccacacccccgacccaattttttaaaaaaaaaaccttgtaagaaattttggaatggaggcccacantcccccggccgaggatggtttccgagttaaaaagttttccacgctgttaacaatttaatagtttccacaagaatgtttaaacatcagataagtttgatcataagactgtttcctagtatttattttataacgctctagaatttctccaaatatattagagggtggcatagcagtctaaaaaaatattaatttttttatttttttaatgccatagaacatttttgctcaaatcaaataatgatggtattgcaattctgaaaatgtttggagttactggcctaaaggtaaggggagcaagattagttgataagttgaatgaatagacagggcagagccagtatacctttggtgaactagtaagtttatttgcgtgggacattttttttctctttgcagtactatcttgcgtacggaggttcgtgtcttcctaaaagaaggttttattgggaggtaaaggtcaatgcgtaggggtagagtaagatgtcttatggtgaaattgaaggtaaattcttgggacctagagaagaagtaacgagtgagccacgctgtaaaaaattgaagtcaaccacagagtcgtatgtttttcacaatcatagtaatgctgattttcacagaatccaagagaaaactggaaatgattgggtccctgtgaccatcattgatgtcagaggacatagttatttgcaggagaacaaaatcaaaactacagatttgcatagacctttgcatgatgagatgcctggtaatagaccagatgttattgaatccattgattcacaggttttacaggaagcacgtcctccattagtatccgcagacgatgagatatatagcacaagtaaagcatttataggacccatttacaaaccccctgagaaaaagaaacgtaatgaagggaggaatgaggcacatgttctaaatggtataaatgacagaggaggacaaaaagagaaacagaaatttaactctgaaaaatcagagattgacaatgaattattccagttttacaaagaaattgaagagcttgaaaaggaaaaagatggttttgagaacagttgtaaagaatctgaaccttctcaggaacaatttgttccattttatgagggtcataataatggtctcttaaaacctgatgaagaaaagaaagatcttagtaataaagctatgccatcacattgtgattatcagcagaacttggggaatgagccagacaaatatccctgtaatggacaagtaatacctacattttgtgacacttcatttacttctttcaggcctgaatggcagtcagtatatccttttatagtgccctatggtccccctcttcccagtttgaactatcatttaaacattcagagattcagtggtccaccaaatccaccatcaaatattttccaagcccaagatgactctcagatacaaaatggatattatgtaaataattgtcatgttaactggaattgcatgacttttgatcagaacaatgaatatactgactgtagtgagaataggagtagtgttcatccctctggaaatggctgcagtatgcaagatcgatatgtgagtaatggtttctgtgaagtcagagaaagatgctggaaagatcattgtatggacaagcataatggaacagacaggtttgtgaaccagcagtttcaagaggaaaagttaaataaattgcagaagttacttattcttttaagaggtctgcctggttctgggaaaacaacattgtctcgaattctgcttggtcagaatcgtgatggcattgtgttcagcactgatgactattttcaccatcaagatgggtacaggtataatgttaatcaacttggtgatgcccatgactggaaccagaacagagcaaaacaagctatcgatcagggaagatctccagttataatagataacactaatatacaagcttgggaaatgaagccatatgtggaagtggccataggaaaaggatacagagtagagtttcatgaacctgaaacttggtggaaatttgatcctgaagaattagaaaagaggaataaacatggtgtgtctcgaaagaagattgctcagatgttggatcgttatgaatatcaaatgtccatttctattgtaatgaattcagtggaaccatcacacaaaagcacacaaagacctcctcctccacaggggagacagaggtggggaggctctcttggctcacataatcgtgtctgtgtcacaaataatcattaaattagctattttcagctaacacatttgttgttgcacttgaaaaagagttagtgagcctgtcttggagtttaagtagtttcaaataaaaaaaggctacagtgcctcacaaaggatgttcccagcaagttgtttaaattcccagcaagttgttaaagtgtaaataaaaatatatgaaattgtattttaaatgtttttatattctcttgttgtaatactcttggctgttatggaagcacctgagtaatagagtggtgggtaggagctaggatgtttttctacaatcgaattttaaactaatttatctattttatagacactattgaacagttttttaatagttcatatctaaatctaacttttcataaaactttacggtttttccttcactaccttaaatatgcaagaaatactgacttggtatagggtaccttagttttctctattcattagacaggtaaaattatatttcagctgattgatctgtgtgacaaaattatttcttagctataatcagcacatcacttagttcaaacaaaattccccagcaaatgttagatagtaggtatatcagtcacctggggagttttcttcataatatgcatattcatcttgtaatgcatacatagttatcatcctccttctcaacccatctccctaaccccacatgcttgccagttcttgaagggataaagtgattctaataatgttttacttctctctgttcaatttaatgtgatataattctagtataaaaatattttggacagttgcttaacatggtcataagaggatttgtactatagaatatcttctagtactaatttttctgtagagcaaattatatttctctcactggatagtttttagatgtgtttcttcatataaaattaaaaactgagatggaattcatttcagaggtcttgtcattcatcccctgccttcaaaccaagctttacctagactaacctagataattaagcatttctctttgcaacatgaggaaaaaaaacactactacttctcttaataccattgttaccaatgtcttctgaagaatatttcttcaacagttttgatttacttttttgatttactctttttaggggaaaaaaaacccagctaattacaatgctgtcttaaaaattaagcattatgattctttatatgttttacataatattttgtggcctttaagctttctcctaaaccagcacatcttgaatcccatagtatttctttgttttaaaaccttttgctattcctttcaactttagatattctctcacatctttatattactttttaagttgtcaggccaaaaactagattcactgctatcaacaaggtctttgttacattgcctttagtgaaataagaatatgattttatttgtactattcagtgctgttaacatttgaatgaatattacctttatcttgtttaatacgtgtgtttgtatatatttgttcatcttaactacgatgtaagaatatgctaattcatgttttgtgtgtaaatgtatattgtatacatatacacatcttcatctatgttttcatatattcttttatttcagagtaatacttgttggtgtttggacttgtgtttctaagtattttattctgtagattag

SEQ ID NO: 353331 - DNA, 4178 bp, Homo sapiens
gtatttatttttaatgcaacaaacacttacatagcgcttattctaccaggagctcgctgttctacttgcttgcacgtattgactcttttaatgggaaagctcagtgattggtctgtatttccaaaaacaaaacaaaacagcgacctgacactaaacgattttgttcataagtatttttatctgttattggggacctgcgccgcagtaattctgtccttccacagaaaagcatgagcctaaaattacgtcaggtggtctttcgtagaaacgaccggaatgcaaatttgtggtaccaactgtggagttccgttggaaaagtcagctggttgtcttctagaaagctctaagaagcatgcactgagagccgattatacatctattggggggcgccagtttctcaaattcctttttccttcgggggtgaacgccagaggaggtcgctgctttcttttaacgaaagttggtgtttttagataacttccctgctccagatctaggaactaattccggtctacttttgttgccaaattactgcgtttgtcacgccatggattctgggagacctagtctccgtgccgtgaggtttacggagccggtgtgaacgtcggacttcaattcccacaatgcctggcgcaaacgcctagttttggcctgggtaaccgagaggtgaccgccatcttgcgtacggaggtgaggtttgttaccgcgattctgagaggtgggcttttagtccctccagacctcggctttagtgctgtctccgcttttctttcaccttcacagaggttcgtgtcttcctaaaagaaggttttattgggaggtaaaggtcaatgcgtaggggtagagtaagatgtcttatggtgaaattgaaggtaaattcttgggacctagagaagaacacaatcatagtaatgctgattttcacagaatccaagagaaaactggaaatgattgggtccctgtgaccatcattgatgtcagaggacatagttatttgcaggagaacaaaatcaaaactacagatttgcatagacctttgcatgatgagatgcctggtaatagaccagatgttattgaatccattgattcacaggttttacaggaagcacgtcctccattagtatccgcagacgatgagatatatagcacaagtaaagcatttataggacccatttacaaaccccctgagaaaaagaaacgtaatgaagggaggaatgaggcacatgttctaaatggtataaatgacagaggaggacaaaaagagaaacagaaatttaactctgaaaaatcagagattgacaatgaattattccagttttacaaagaaattgaagagcttgaaaaggaaaaagatggttttgagaacagttgtaaagaatctgaaccttctcaggaacaatttgttccattttatgagggtcataataatggtctcttaaaacctgatgaagaaaagaaagatcttagtaataaagctatgccatcacattgtgattatcagcagaacttggggaatgagccagacaaatatccctgtaatggacaagtaatacctacattttgtgacacttcatttacttctttcaggcctgaatggcagtcagtatatccttttatagtgccctatggtccccctcttcccagtttgaactatcatttaaacattcagagattcagtggtccaccaaatccaccatcaaatattttccaagcccaagatgactctcagatacaaaatggatattatgtaaataattgtcatgttaactggaattgcatgacttttgatcagaacaatgaatatactgactgtagtgagaataggagtagtgttcatccctctggaaatggctgcagtatgcaagatcgatatgtgagtaatggtttctgtgaagtcagagaaagatgctggaaagatcattgtatggacaagcataatggaacagacaggtttgtgaaccagcagtttcaagaggaaaagttaaataaattgcagaagttacttattcttttaagaggtctgcctggttctgggaaaacaacattgtctcgaattctgcttggtcagaatcgtgatggcattgtgttcagcactgatgactattttcaccatcaagatgggtacaggtataatgttaatcaacttggtgatgcccatgactggaaccagaacagagcaaaacaagctatcgatcagggaagatctccagttataatagataacactaatatacaagcttgggaaatgaagccatatgtggaagtggccataggaaaaggatacagagtagagtttcatgaacctgaaacttggtggaaatttgatcctgaagaattagaaaagaggaataaacatggtgtgtctcgaaagaagattgctcagatgttggatcgttatgaatatcaaatgtccatttctattgtaatgaattcagtggaaccatcacacaaaagcacacaaagacctcctcctccacaggggagacagaggtggggaggctctcttggctcacataatcgtgtctgtgtcacaaataatcattaaattagctattttcagctaacacatttgttgttgcacttgaaaaagagttagtgagcctgtcttggagtttaagtagtttcaaataaaaaaaggctacagtgcctcacaaaggatgttcccagcaagttgtttaaattcccagcaagttgttaaagtgtaaataaaaatatatgaaattgtattttaaatgtttttatattctcttgttgtaatactcttggctgttatggaagcacctgagtaatagagtggtgggtaggagctaggatgtttttctacaatcgaattttaaactaatttatctattttatagacactattgaacagttttttaatagttcatatctaaatctaacttttcataaaactttacggtttttccttcactaccttaaatatgcaagaaatactgacttggtatagggtaccttagttttctctattcattagacaggtaaaattatatttcagctgattgatctgtgtgacaaaattatttcttagctataatcagcacatcacttagttcaaacaaaattccccagcaaatgttagatagtaggtatatcagtcacctggggagttttcttcataatatgcatattcatcttgtaatgcatacatagttatcatcctccttctcaacccatctccctaaccccacatgcttgccagttcttgaagggataaagtgattctaataatgttttacttctctctgttcaatttaatgtgatataattctagtataaaaatattttggacagttgcttaacatggtcataagaggatttgtactatagaatatcttctagtactaatttttctgtagagcaaattatatttctctcactggatagtttttagatgtgtttcttcatataaaattaaaaactgagatggaattcatttcagaggtcttgtcattcatcccctgccttcaaaccaagctttacctagactaacctagataattaagcatttctctttgcaacatgaggaaaaaaaacactactacttctcttaataccattgttaccaatgtcttctgaagaatatttcttcaacagttttgatttacttttttgatttactctttttaggggaaaaaaaacccagctaattacaatgctgtcttaaaaattaagcattatgattctttatatgttttacataatattttgtggcctttaagctttctcctaaaccagcacatcttgaatcccatagtatttctttgttttaaaaccttttgctattcctttcaactttagatattctctcacatctttatattactttttaagttgtcaggccaaaaactagattcactgctatcaacaaggtctttgttacattgcctttagtgaaataagaatatgattttatttgtactattcagtgctgttaacatttgaatgaatattacctttatcttgtttaatacgtgtgtttgtatatatttgttcatcttaactacgatgtaagaatatgctaattcatgttttgtgtgtaaatgtatattgtatacatatacacatcttcatctatgttttcatatattcttttatttcagagtaatacttgttggtgtttggacttgtgtttctaagtattttattctgtagattag

SEQ ID NO: 353332 - DNA, 4242 bp, Homo sapiens
gtatttatttttaatgcaacaaacacttacatagcgcttattctaccaggagctcgctgttctacttgcttgcacgtattgactcttttaatgggaaagctcagtgattggtctgtatttccaaaaacaaaacaaaacagcgacctgacactaaacgattttgttcataagtatttttatctgttattggggacctgcgccgcagtaattctgtccttccacagaaaagcatgagcctaaaattacgtcaggtggtctttcgtagaaacgaccggaatgcaaatttgtggtaccaactgtggagttccgttggaaaagtcagctggttgtcttctagaaagctctaagaagcatgcactgagagccgattatacatctattggggggcgccagtttctcaaattcctttttccttcgggggtgaacgccagaggaggtcgctgctttcttttaacgaaagttggtgtttttagataacttccctgctccagatctaggaactaattccggtctacttttgttgccaaattactgcgtttgtcacgccatggattctgggagacctagtctccgtgccgtgaggtttacggagccggtgtgaacgtcggacttcaattcccacaatgcctggcgcaaacgcctagttttggcctgggtaaccgagaggtgaccgccatcttgcgtacggaggtgaggtttgttaccgcgattctgagaggtgggcttttagtccctccagacctcggctttagtgctgtctccgcttttctttcaccttcacagaggttcgtgtcttcctaaaagaaggttttattgggaggtaaaggtcaatgcgtaggggtagagtaagatgtcttatggtgaaattgaaggtaaattcttgggacctagagaagaagtaacgagtgagccacgctgtaaaaaattgaagtcaaccacagagtcgtatgtttttcacaatcatagtaatgctgattttcacagaatccaagagaaaactggaaatgattgggtccctgtgaccatcattgatgtcagaggacatagttatttgcaggagaacaaaatcaaaactacagatttgcatagacctttgcatgatgagatgcctggtaatagaccagatgttattgaatccattgattcacaggttttacaggaagcacgtcctccattagtatccgcagacgatgagatatatagcacaagtaaagcatttataggacccatttacaaaccccctgagaaaaagaaacgtaatgaagggaggaatgaggcacatgttctaaatggtataaatgacagaggaggacaaaaagagaaacagaaatttaactctgaaaaatcagagattgacaatgaattattccagttttacaaagaaattgaagagcttgaaaaggaaaaagatggttttgagaacagttgtaaagaatctgaaccttctcaggaacaatttgttccattttatgagggtcataataatggtctcttaaaacctgatgaagaaaagaaagatcttagtaataaagctatgccatcacattgtgattatcagcagaacttggggaatgagccagacaaatatccctgtaatggacaagtaatacctacattttgtgacacttcatttacttctttcaggcctgaatggcagtcagtatatccttttatagtgccctatggtccccctcttcccagtttgaactatcatttaaacattcagagattcagtggtccaccaaatccaccatcaaatattttccaagcccaagatgactctcagatacaaaatggatattatgtaaataattgtcatgttaactggaattgcatgacttttgatcagaacaatgaatatactgactgtagtgagaataggagtagtgttcatccctctggaaatggctgcagtatgcaagatcgatatgtgagtaatggtttctgtgaagtcagagaaagatgctggaaagatcattgtatggacaagcataatggaacagacaggtttgtgaaccagcagtttcaagaggaaaagttaaataaattgcagaagttacttattcttttaagaggtctgcctggttctgggaaaacaacattgtctcgaattctgcttggtcagaatcgtgatggcattgtgttcagcactgatgactattttcaccatcaagatgggtacaggtataatgttaatcaacttggtgatgcccatgactggaaccagaacagagaggtttgttttgggctaagtgtcccaggatagaatatttggctaggagtcaaaagacctagattttattttcagcttaggtttttaccagctgaatgactgtaggcaagccgtttaaatagctttgagacctaatttctccatctgttagaggtggtgataattatacttgccctacctgatcagggtttttgtgaaaagcagagaatttagataaaacgctttgtaaactgtaaatagtttatcagtataagctggtaaaataatagcagcatgggatattttaagaggctttattttatacttgatgagtaaattcagagaactttgaatctgtaccattgttatgtagtcccaaagttatttccccgagaataatgctaatgttttccaaggcttaatatactggttgtgaatattaaaagtttttctcattgatattgctctacaagaaacctacttaatacattttttagcggacatgggtcaatttctgtttatcattaataggggttcttaacctgggctacacttttgaatttcttggggactttaaaaaaagcaaaaaaaaaagacaaaaagtgtgcctggcctcagccttagatattttggtttcattgatctggggtggggcctaaacattgatactttttgttttgaaatttctccagacgattctgatgtatagtcagaattgaaaactgttgatctgaactataagtaaatacatatgctatgttattttaaaagaatggattgatgattaaacaaatagcttttattatgaaaaattttaaacagattaaagagactgtaatgaacctcatagacccatcacccagaattatcaggtattgagattttggtatatgggcttttatctttttgtttgtacccctttctctttttaaagcaaattctagacatcatactttatacatttcaaaataacttttttactaatcacatctttcacttcagtgccgttatcacacatttaaaaaaatgccagttccttcagatcatgtaacccagtgtgtaattgaatctcctctgttgttcgaaaaaatctcttcacagttattttgtttgaattgggatccaaacgaagtcctcaaaatgcattttgttttatttaattaagttaatccatagcatgttccttcttttaaccctcataccattaacttgttgcagaaactatgttgtttgtcctgtagaaagttccacatgctgtagttgtctatttgcttcttggtgttaaccatttaacttgctcctcttctttgttttctgtgaatggaaattagctctagattagaggcttgattaggttcaacatttttttttttttttttttggcaagcagatatttggttgtcctgttcttagtaatggtgagcttaatcagtagctgcacagggacaacctcttccctctgtctgctgtcaagttccctattaaccttatatctgatggttttatccaataataaattgtttcctgagtcagttatttcattcagaattgcaaagtgatgatttttagtttagttattccttccatgtttaatggaattcttctgtaatgaagaacttctctcaaagctgccaactagggttgccctaaagtataatatatacaagaaaaatagtaatgcttttctttttaattgtcaaatacagtaaggaatttcagtgaggatgtttgtgtgtgttttggagatggggtcttgctttgttgcccaggctggagcgtagtgacacagtcatagctcagtgcagcctcgaattcctggactcaagggatcctcctgcctcggcctcctgagtaactaggactacaggcaggtagctgggactacatacgtgtaccagcacacccagctattttttaaaaaaactttgtagaattttgaatgagccacagtgcctggctgaggatggtttcgagttaaaagttttcacgctgttacaatttatagtttcacaagaatgtttaaacatcag

SEQ ID NO: 353333 - DNA, 4350 bp, Homo sapiens
gtatttatttttaatgcaacaaacacttacatagcgcttattctaccaggagctcgctgttctacttgcttgcacgtattgactcttttaatgggaaagctcagtgattggtctgtatttccaaaaacaaaacaaaacagcgacctgacactaaacgattttgttcataagtatttttatctgttattggggacctgcgccgcagtaattctgtccttccacagaaaagcatgagcctaaaattacgtcaggtggtctttcgtagaaacgaccggaatgcaaatttgtggtaccaactgtggagttccgttggaaaagtcagctggttgtcttctagaaagctctaagaagcatgcactgagagccgattatacatctattggggggcgccagtttctcaaattcctttttccttcgggggtgaacgccagaggaggtcgctgctttcttttaacgaaagttggtgtttttagataacttccctgctccagatctaggaactaattccggtctacttttgttgccaaattactgcgtttgtcacgccatggattctgggagacctagtctccgtgccgtgaggtttacggagccggtgtgaacgtcggacttcaattcccacaatgcctggcgcaaacgcctagttttggcctgggtaaccgagaggtgaccgccatcttgcgtacggaggtgaggtttgttaccgcgattctgagaggtgggcttttagtccctccagacctcggctttagtgctgtctccgcttttctttcaccttcacagaggttcgtgtcttcctaaaagaaggttttattgggaggtaaaggtcaatgcgtaggggtagagtaagatgtcttatggtgaaattgaaggtaaattcttgggacctagagaagaagtaacgagtgagccacgctgtaaaaaattgaagtcaaccacagagtcgtatgtttttcacaatcatagtaatgctgattttcacagaatccaagagaaaactggaaatgattgggtccctgtgaccatcattgatgtcagaggacatagttatttgcaggagaacaaaatcaaaactacagatttgcatagacctttgcatgatgagatgcctggtaatagaccagatgttattgaatccattgattcacaggttttacaggaagcacgtcctccattagtatccgcagacgatgagatatatagcacaagtaaagcatttataggacccatttacaaaccccctgagaaaaagaaacgtaatgaagggaggaatgaggcacatgttctaaatggtataaatgacagaggaggacaaaaagagaaacagaaatttaactctgaaaaatcagagattgacaatgaattattccagttttacaaagaaattgaagagcttgaaaaggaaaaagatggttttgagaacagttgtaaagaatctgaaccttctcaggaacaatttgttccattttatgagggtcataataatggtctcttaaaacctgatgaagaaaagaaagatcttagtaataaagctatgccatcacattgtgattatcagcagaacttggggaatgagccagacaaatatccctgtaatggacaagtaatacctacattttgtgacacttcatttacttctttcaggcctgaatggcagtcagtatatccttttatagtgccctatggtccccctcttcccagtttgaactatcatttaaacattcagagattcagtggtccaccaaatccaccatcaaatattttccaagcccaagatgactctcagatacaaaatggatattatgtaaataattgtcatgttaactggaattgcatgacttttgatcagaacaatgaatatactgactgtagtgagaataggagtagtgttcatccctctggaaatggctgcagtatgcaagatcgatatgtgagtaatggtttctgtgaagtcagagaaagatgctggaaagatcattgtatggacaagcataatggaacagacaggtttgtgaaccagcagtttcaagaggaaaagttaaataaattgcagaagttacttattcttttaagaggtctgcctggttctgggaaaacaacattgtctcggtaagtaaaggataccaactgaatacttggtaattcattatttaaaaattataaatgatatttgtcgccggctgcagtgactcatgcatgtaatcccaacactttgggaggccagggtggaccagtcacttgagctcaggagtttgagaccagcctgggcaacatagtgagaccctgtctctaaaaaatgaaataaaaatgttagaactataatgatacttgtaatcactgacaagtgcttttatgtttctagtagaagaaaatctttaatttgctacacttgagaatagcatctgacagtgtaactatttaaaaatcttttctgatagaagaaaggagaattggcatatgtttatatttagattctgctaagggctttaaaaatagataacactacgtataattatggcagtgatgaaagcaaatgctacttgagaactgtcctggcctacccttttgagtcagctgttcaaggaaagttggactcagtgttagaaaatttgagtttttcaagttcagttggaggtgagaaaaagagaaaatttgggtattgactcagttatttccctttttcaccttgggcaagttttgctctctgttaatggaataaatgatacttactttttctggaattgggaatcaaatgagatgacccaaggaaaggaattttgaatgtgttgagcactgtgccatgttcataccattgattggcagaaggaacccttttttgatttcttaaaattcaggagtttgaagtgagtaatatctgaattggtgttagaactgttggtggtttattgtattacaagatatttcaaattcctttttttgtttacatttttaaactattgatgcacttgaatatgtttatgcagttgtgaaaaaatagtgtaaagaaagcagtacaaattatcttgagtttatataagatgattcaagatttgtgccggacaaggagaaaaagaaaatttgttgatatctttgggtgaggatggagaggtccaagaaaccattttgcaaatgttttatattactaacaagacaatctaaacctaaataaacatctttttcagagaaaagacactagagaaagatttaatttgtgatatttcaagctagattataaactgtgatctttgtgaatgaattaattcattccagaattaaattttggtctttgtattttgattccttttactttagtgaggattttgtagagaagatgaaatttcacctctataataatagaagttaggagtgaggtctcacaaacatgggctgtcttctagatttgggatataccatcagagacaataaataactgaaatttggaaactggataaaagagtctgctagttaggaccacttgactaagagtgggtatagaagaaacctaaggaagaaaagttagatttgagacaacatattggagtatgttgaaattaaaggtgaataaagtagtggaaattcgatagaatttaaaggagacattgtagtgggagatggtagaggtgattagatataatatgtatatttatttgaaaaatagatatataagaatgaaagttgtatgtagtaccaacaagtaccattcgtattatgattcacaatttacagagtattttcatatataaaaatcttgtgcaatgggttgttttttcattttatagaaggagcagaggctaaaggaagttgaggttaagtgatttggaagttacaaaaactagtaagagctcaaactagcaataaaattatagtatgtttttcccttgccttcactgtaatgcttaatggttgtgtagtcttatacgtgactcctgacttcaaggatcctggtctgtacctctttaggtcaacacgttttgagtgaactggtgttggttatttggaattagatataaagtcatatattctttggtgaggaatggcttcatataggagttcacattcaaaacaagctttgacaaaataatagagtgaaaattggtagatcagagttgagctgattggaggaccaaattaaaagactggctgggcatgatggctcacacctgaaaacccagcactttgggaggccaaggcaggcagattgtttgagcccaggaattcaagaccagcctagataacctgggtatcccagctacttgggaggctgagctgccgaggctacagtgagccatgatcgtgccattgctttctagcctgggtgacagattgagaccctgtctcaaaaaaaaaaaa

SEQ ID NO: 353334 - DNA, 5353 bp, Homo sapiens
  misc_feature (5351)..(5352): n is a, c, g, or t
gtatttatttttaatgcaacaaacacttacatagcgcttattctaccaggagctcgctgttctacttgcttgcacgtattgactcttttaatgggaaagctcagtgattggtctgtatttccaaaaacaaaacaaaacagcgacctgacactaaacgattttgttcataagtatttttatctgttattggggacctgcgccgcagtaattctgtccttccacagaaaagcatgagcctaaaattacgtcaggtggtctttcgtagaaacgaccggaatgcaaatttgtggtaccaactgtggagttccgttggaaaagtcagctggttgtcttctagaaagctctaagaagcatgcactgagagccgattatacatctattggggggcgccagtttctcaaattcctttttccttcgggggtgaacgccagaggaggtcgctgctttcttttaacgaaagttggtgtttttagataacttccctgctccagatctaggaactaattccggtctacttttgttgccaaattactgcgtttgtcacgccatggattctgggagacctagtctccgtgccgtgaggtttacggagccggtgtgaacgtcggacttcaattcccacaatgcctggcgcaaacgcctagttttggcctgggtaaccgagaggtgaccgccatcttgcgtacggaggtgaggtttgttaccgcgattctgagaggtgggcttttagtccctccagacctcggctttagtgctgtctccgcttttctttcaccttcacagaggttcgtgtcttcctaaaagaaggttttattgggaggtaaaggtcaatgcgtaggggtagagtaagatgtcttatggtgaaattgaaggtaaattcttgggacctagagaagaagtaacgagtgagccacgctgtaaaaaattgaagtcaaccacagagtcgtatgtttttcacaatcatagtaatgctgattttcacagaatccaagagaaaactggaaatgattgggtccctgtgaccatcattgatgtcagaggacatagttatttgcaggagaacaaaatcaaaactacagatttgcatagacctttgcatgatgagatgcctggtaatagaccagatgttattgaatccattgattcacaggttttacaggaagcacgtcctccattagtatccgcagacgatgagatatatagcacaagtaaagcatttataggacccatttacaaaccccctgagaaaaagaaacgtaatgaagggaggaatgaggcacatgttctaaatggtataaatgacagaggaggacaaaaagagaaacagaaatttaactctgaaaaatcagagattgacaatgaattattccagttttacaaagaaattgaagagcttgaaaaggaaaaagatggttttgagaacagttgtaaagaatctgaaccttctcaggaacaatttgttccattttatgagggtcataataatggtctcttaaaacctgatgaagaaaagaaagatcttagtaataaagctatgccatcacattgtgattatcagcagaacttggggaatgagccagacaaatatccctgtaatggacaagtaatacctacattttgtgacacttcatttacttctttcaggcctgaatggcagtcagtatatccttttatagtgccctatggtccccctcttcccagtttgaactatcatttaaacattcagagattcagtggtccaccaaatccaccatcaaatattttccaagcccaagatgactctcagatacaaaatggatattatgtaaataattgtcatgttaactggaattgcatgacttttgatcagaacaatgaatatactgactgtagtgagaataggagtagtgttcatccctctggaaatggctgcagtatgcaagatcgatatgtgagtaatggtttctgtgaagtcagagaaagatgctggaaagatcattgtatggacaagcataatggaacagacaggtttgtgaaccagcagtttcaagaggaaaagttaaataaattgcagaagttacttattcttttaagaggtctgcctggttctgggaaaacaacattgtctcgaattctgcttggtcagaatcgtgatggcattgtgttcagcactgatgactattttcaccatcaagatgggtacaggtataatgttaatcaacttggtgatgcccatgactggaaccagaacagagcaaaacaagctatcgatcagggaagatctccagttataatagataacactaatatacaagcttgggaaatgaagccatatgtggaagtggccataggaaaaggatacagagtagagtttcatgaacctgaaacttggtggaaatttgatcctgaagaattagaaaagaggaataaacatggtgtgtctcgaaagaagattgctcagatgttggatcgttatgaatatcaaatgtccatttctattgtaatgaattcagtggaaccatcacacaaaagcacacaaagacctcctcctccacaggggagacagagtgactgaagaaatatcaaatgtttcctagtaagacagcaactcaggactctaggatggaagaaggtgtctgaccgtaaattacacctgcagtgcaaccagcagactaatggggatgaggttctggtacaagatgatgaacaccagtatgtcagacaatgacttgggagctggaatcaaggacatgaccaagagcagcaagaacaaaagggagactgacacattgatcactttctcaacctttgatctcttgagaggatggttcacatttgagtaaagacaggggagtttgttttcagaatgacatactagtctgcaggatgaatttcataactgacattgcaccttggactgcaactaggactttcactggaatcagagaaagagttttgaagaaaactgggcataggctcagcaaaaccaaacagaagaggaacagaaaaagaaacaaaaagcagaacagtcagaatagaatcatggaggaaaactcattagaattcttaagtgatcttacaccgggagatcaggacccatctcagagtgaagaggaagacattgaaaagaccagaagagaatcagaatatcccttcattgatggtctacaaaatgaagtcggagattttgtgactggatataaagaaaaaagatggaaaaataaagatcctaaagacagtttccaaaacgttatgtctatagttgaattagacaacacaccaaagaattacctctctaaggaaggtgataacttgtttgtaagtttgttactgaggccaaatgaaatctccgttacttgtccaatactgactcaaaacctttcctgtgtaacaactgatgactgctctggcatgaaggtagaaaagcatattagaaataggcataccatagcattagacacccaggacctttctgcggaaacttcatgcttatttatgaagaagagagaaatagtagataaaaatctctcacatgaacccattctgtgccatcaacatggaatcagaatgtcagataaagttttaagagaggaacaagtgtatacaactaaaatcaatcactgggcttttttcacaaccaatttatctgatgaagatttacagctgggctctgacagacagccctattttggtagctggcctgcaggacctcataagtttatatgtgaacagagaccaaagaaagatagagcatgtaagttggctggtcctgacagcagggggcaatggattcaaatgatcttcacttcggtggcagcatcagaaccaggaaacaatccagaaatattgacagacaaactactgataggaaatgaagatttttcacctccacctgaaactatggattcattcatagaaacaaacctcttcagaagctgcttacctcaaccggatataccaaagaatgccttagaatcaacaaaaaataagaaaaggaggaagaaaaggattttcaatttggtaccaaattttgacttattaggacagagtcgtatcggtgtaaaagaaagggagaaatgtgacctgttaacaaaaaaccatggactaaaaattactttgggagaagaaaaagatagaatttcagaaaggaacagtgaagaggagaataaacaaaaacttatgacctttgatcatcatccattgtggttttaccttgatattatcaaagctacccctttaaatattgatggacagcgttattctcattgcctgtcatttaacagactaaggtgctctgcatctttatacaaaaattatattccttcttttgtgctacataatttatctagtatttggaagccatcttttacaaacaagaaactgtttttgactttcgaatctcagacaagagtaggtaataaactaaatgatgcagggtttatttctccagaaattttacatagtcatcctgatacttcgtgctctttgggagtcacttctgattttcactttttaaatgaaaggtttgatagaaagctgaaaagatgggaagaacctaaggaattaccagctgaggacagccaagacttaacaagcactgactaccgttcccttgagctaccattatcacaagggtttgcctttcaattagtaaagctttttggatctccaggcgttccaatggaatccttgttgcctgatgactatgtggttccccttgactggaagacactaaagatgatctacttgcaatggaagatgtcagtggagaaaagacagaagaagattggttgaaaaatgaaaattccttgaactttgagttctgctgtcttcatggtactgctgaagatcatgatcacggagaaaagtcagagtgctcagtgccaacccaagggattctttccagagacgtacccgttggataccaaaattagtttggataatctgttcaaccattcttgataagttatctgaataataaaaaaactcaacagaggaggtaacaatttgaacattttattgtctaatttgaagatgtatgccatactttgtttgatagaagaaagtaaggcacagaaaacttgagtaccttatttttaaaactgcattaggattaaaaggttagcccctatatccaagtattggtctgagatcccatttctagaattctgaaatccaaaaagctctgaaaatcaatagttatttttccaaatgtattcattgtggtaaaatacaccaatataaaatttaccatcttaaccacttttaagtgtgttataaatacattcatgctaccatcactagcatccatctctggaactcttttcatcttgcaaaactgcaattctatacccattaaacaatgacccatnnc

SEQ ID NO: 353335 - DNA, 3579 bp, Homo sapiens
gtatttatttttaatgcaacaaacacttacatagcgcttattctaccaggagctcgctgttctacttgcttgcacgtattgactcttttaatgggaaagctcagtgattggtctgtatttccaaaaacaaaacaaaacagcgacctgacactaaacgattttgttcataagtatttttatctgttattggggacctgcgccgcagtaattctgtccttccacagaaaagcatgagcctaaaattacgtcaggtggtctttcgtagaaacgaccggaatgcaaatttgtggtaccaactgtggagttccgttggaaaagtcagctggttgtcttctagaaagctctaagaagcatgcactgagagccgattatacatctattggggggcgccagtttctcaaattcctttttccttcgggggtgaacgccagaggaggtcgctgctttcttttaacgaaagttggtgtttttagataacttccctgctccagatctaggaactaattccggtctacttttgttgccaaattactgcgtttgtcacgccatggattctgggagacctagtctccgtgccgtgaggtttacggagccggtgtgaacgtcggacttcaattcccacaatgcctggcgcaaacgcctagttttggcctgggtaaccgagaggtgaccgccatcttgcgtacggaggtgaggtttgttaccgcgattctgagaggtgggcttttagtccctccagacctcggctttagtgctgtctccgcttttctttcaccttcacagaggttcgtgtcttcctaaaagaaggttttattgggaggtaaaggtcaatgcgtaggggtagagtaagatgtcttatggtgaaattgaaggtaaattcttgggacctagagaagaagtaacgagtgagccacgctgtaaaaaattgaagtcaaccacagagtcgtatgtttttcacaatcatagtaatgctgattttcacagaatccaagagaaaactggaaatgattgggtccctgtgaccatcattgatgtcagaggacatagttatttgcaggagaacaaaatcaaaactacagatttgcatagacctttgcatgatgagatgcctggtaatagaccagatgttattgaatccattgattcacaggttttacaggaagcacgtcctccattagtatccgcagacgatgagatatatagcacaagtaaagcatttataggacccatttacaaaccccctgagaaaaagaaacgtaatgaagggaggaatgaggcacatgttctaaatggtataaatgacagaggaggacaaaaagagaaacagaaatttaactctgaaaaatcagagattgacaatgaattattccagttttacaaagaaattgaagagcttgaaaaggaaaaagatggttttgagaacagttgtaaagaatctgaaccttctcaggaacaatttgttccattttatgagggtcataataatggtctcttaaaacctgatgaagaaaagaaagatcttagtaataaagctatgccatcacattgtgattatcagcagaacttggggaatgagccagacaaatatccctgtaatggacaagtaatacctacattttgtgacacttcatttacttctttcaggcctgaatggcagtcagtatatccttttatagtgccctatggtccccctcttcccagtttgaactatcatttaaacattcagagattcagtggtccaccaaatccaccatcaaatattttccaagcccaagatgactctcagatacaaaatggatattatgtaaataattgtcatgttaactggaattgcatgacttttgatcagaacaatgaatatactgactgtagtgagaataggagtagtgttcatccctctggaaatggctgcagtatgcaagatcgatatgtgagtaatggtttctgtgaagtcagagaaagatgctggaaagatcattgtatggacaagcataatggaacagacaggtttgtgaaccagcagtttcaagaggaaaagttaaataaattgcagaagttacttattcttttaagaggtctgcctggttctgggaaaacaacattgtctcgaattctgcttggtcagaatcgtgatggcattgtgttcagcactgatgactattttcaccatcaagatgggtacaggtataatgttaatcaacttggtgatgcccatgactggaaccagaacagagaggtttgttttgggctaagtgtcccaggatagaatatttggctaggagtcaaaagacctagattttattttcagcttaggtttttaccagctgaatgactgtaggcaagccgtttaaatagctttgagacctaatttctccatctgttagaggtggtgataattatacttgccctacctgatcagggtttttgtgaaaagcagagaatttagataaaacgctttgtaaactgtaaatagtttatcagtataagctggtaaaataatagcagcatgggatattttaagaggctttattttatacttgatgagtaaattcagagaactttgaatctgtaccattgttatgtagtcccaaagttatttccccgagaataatgctaatgttttccaaggcttaatatactggttgtgaatattaaaagtttttctcattgatattgctctacaagaaacctacttaatacattttttagcggacatgggtcaatttctgtttatcattaataggggttcttaacctgggctacacttttgaatttcttggggactttaaaaaaagcaaaaaaaaaagacaaaaagtgtgcctggcctcagccttagatattttggtttcattgatctggggtggggcctaaacattgatactttttgttttgaaatttctccagacgattctgatgtatagtcagaattgaaaactgttgatctgaactataagtaaatacatatgctatgttattttaaaagaatggattgatgattaaacaaatagcttttattatgaaaaattttaaacagattaaagagactgtaatgaacctcatagacccatcacccagaattatcaggtattgagattttggtatatgggcttttatctttttgtttgtacccctttctctttttaaagcaaattctagacatcatactttatacatttcaaaataacttttttactaatcacatctttcacttcagtgccgttatcacacatttaaaaaaatgccagttccttcagatcatgtaacccagtgtgtaattgaatctcctctgttgttcgaaaaaatctcttcacagttattttgtttgaattgggatccaaacgaagtcctcaaaatgcattttgttttatttaattaagttaatccatagcatgttccttcttttaaccctcataccattaacttgttgcagaaactatgttgtttgtcctgtagaaagttccacatgctgtagttgtctatttgcttcttggtgttaaccatttaacttgctcctcttctttgtttataaaggcagcgattacatacccacccacctctccagagttagggcatggggcc

SEQ ID NO: 353336 - DNA, 4058 bp, Homo sapiens
gtatttatttttaatgcaacaaacacttacatagcgcttattctaccaggagctcgctgttctacttgcttgcacgtattgactcttttaatgggaaagctcagtgattggtctgtatttccaaaaacaaaacaaaacagcgacctgacactaaacgattttgttcataagtatttttatctgttattggggacctgcgccgcagtaattctgtccttccacagaaaagcatgagcctaaaattacgtcaggtggtctttcgtagaaacgaccggaatgcaaatttgtggtaccaactgtggagttccgttggaaaagtcagctggttgtcttctagaaagctctaagaagcatgcactgagagccgattatacatctattggggggcgccagtttctcaaattcctttttccttcgggggtgaacgccagaggaggtcgctgctttcttttaacgaaagttggtgtttttagataacttccctgctccagatctaggaactaattccggtctacttttgttgccaaattactgcgtttgtcacgccatggattctgggagacctagtctccgtgccgtgaggtttacggagccggtgtgaacgtcggacttcaattcccacaatgcctggcgcaaacgcctagttttggcctgggtaaccgagaggtgaccgccatcttgcgtacggaggtgaggtttgttaccgcgattctgagaggtgggcttttagtccctccagacctcggctttagtgctgtctccgcttttctttcaccttcacagaggttcgtgtcttcctaaaagaaggttttattgggaggtaaaggtcaatgcgtaggggtagagtaagatgtcttatggtgaaattgaaggtaaattcttgggacctagagaagaagtaacgagtgagccacgctgtaaaaaattgaagtcaaccacagagtcgtatgtttttcacaatcatagtaatgctgattttcacagaatccaagagaaaactggaaatgattgggtccctgtgaccatcattgatgtcagaggacatagttatttgcaggagaacaaaatcaaaactacagatttgcatagacctttgcatgatgagatgcctggtaatagaccagatgttattgaatccattgattcacaggttttacaggaagcacgtcctccattagtatccgcagacgatgagatatatagcacaagtaaagcatttataggacccatttacaaaccccctgagaaaaagaaacgtaatgaagggaggaatgaggcacatgttctaaatggtataaatgacagaggaggacaaaaagagaaacagaaatttaactctgaaaaatcagagattgacaatgaattattccagttttacaaagaaattgaagagcttgaaaaggaaaaagatggttttgagaacagttgtaaagaatctgaaccttctcaggaacaatttgttccattttatgagggtcataataatggtctcttaaaacctgatgaagaaaagaaagatcttagtaataaagctatgccatcacattgtgattatcagcagaacttggggaatgagccagacaaatatccctgtaatggacaagtaatacctacattttgtgacacttcatttacttctttcaggcctgaatggcagtcagtatatccttttatagtgccctatggtccccctcttcccagtttgaactatcatttaaacattcagagattcagtggtccaccaaatccaccatcaaatattttccaatcagagaaagatgctggaaagatcattgtatggacaagcataatggaacagacaggtttgtgaaccagcagtttcaagaggaaaagttaaataaattgcagaagttacttattcttttaagaggtctgcctggttctgggaaaacaacattgtctcgaattctgcttggtcagaatcgtgatggcattgtgttcagcactgatgactattttcaccatcaagatgggtacaggtataatgttaatcaacttggtgatgcccatgactggaaccagaacagagaggtttgttttgggctaagtgtcccaggatagaatatttggctaggagtcaaaagacctagattttattttcagcttaggtttttaccagctgaatgactgtaggcaagccgtttaaatagctttgagacctaatttctccatctgttagaggtggtgataattatacttgccctacctgatcagggtttttgtgaaaagcagagaatttagataaaacgctttgtaaactgtaaatagtttatcagtataagctggtaaaataatagcagcatgggatattttaagaggctttattttatacttgatgagtaaattcagagaactttgaatctgtaccattgttatgtagtcccaaagttatttccccgagaataatgctaatgttttccaaggcttaatatactggttgtgaatattaaaagtttttctcattgatattgctctacaagaaacctacttaatacattttttagcggacatgggtcaatttctgtttatcattaataggggttcttaacctgggctacacttttgaatttcttggggactttaaaaaaagcaaaaaaaaaagacaaaaagtgtgcctggcctcagccttagatattttggtttcattgatctggggtggggcctaaacattgatactttttgttttgaaatttctccagacgattctgatgtatagtcagaattgaaaactgttgatctgaactataagtaaatacatatgctatgttattttaaaagaatggattgatgattaaacaaatagcttttattatgaaaaattttaaacagattaaagagactgtaatgaacctcatagacccatcacccagaattatcaggtattgagattttggtatatgggcttttatctttttgtttgtacccctttctctttttaaagcaaattctagacatcatactttatacatttcaaaataacttttttactaatcacatctttcacttcagtgccgttatcacacatttaaaaaaatgccagttccttcagatcatgtaacccagtgtgtaattgaatctcctctgttgttcgaaaaaatctcttcacagttattttgtttgaattgggatccaaacgaagtcctcaaaatgcattttgttttatttaattaagttaatccatagcatgttccttcttttaaccctcataccattaacttgttgcagaaactatgttgtttgtcctgtagaaagttccacatgctgtagttgtctatttgcttcttggtgttaaccatttaacttgctcctcttctttgttttctgtgaatggaaattagctctagattagaggcttgattaggttcaacatttttttttttttttttttggcaagcagatatttggttgtcctgttcttagtaatggtgagcttaatcagtagctgcacagggacaacctcttccctctgtctgctgtcaagttccctattaaccttatatctgatggttttatccaataataaattgtttcctgagtcagttatttcattcagaattgcaaagtgatgatttttagtttagttattccttccatgtttaatggaattcttctgtaatgaagaacttctctcaaagctgccaactagggttgccctaaagtataatatatacaagaaaaatagtaatgcttttctttttaattgtcaaatacagtaaggaatttcagtgaggatgtttgtgtgtgttttggagatggggtcttgctttgttgcccaggctggagcgtagtgacacagtcatagctcagtgcagcctcgaattcctggactcaagggatcctcctgcctcggcctcctgagtaactaggactacaggcaggtagctgggactacatacgtgtaccagcacacccagctattttttaaaaaaactttgtagaattttgaatgagccacagtgcctggctgaggatggtttcgagttaaaagttttcacgctgttacaatttatagtttcacaagaatgtttaaacatcag

SEQ ID NO: 353337 - DNA, 3125 bp, Homo sapiens
ttttgagacagagtctcactctttgctcaggctgtagtgctgcggcgtgatcttggctcacagcaacctccacttcataaggttcaagtgattctcgtgcctcagcctcccaagtagctgggactacaggcgcataccaccacacctggctaatttttttatttttaatagagatgaggttttgccattttggccagggtggtcttgaattcctgacctctggtgatccacctgctttggcctcccaaagtgctgggattataggtgtgagctaccacacccagccttgtgacagtgattcttatctcatagtgcaaaagatggcatttggatgggagataatagttcagaaaagttccattctacagcaactcacaatttgaggaccatagttctaagaaatatccacaaagtcagttgaactatgatttttagctacttggcatataaagttttgctggtaagtaatgacttaaatccataacttttcaaaaacataagccttacttcaaaagcattatttgtacattgtagaaaattagaaaatacagataatcatctgcggtaactttcccaaaaaagagaaaatacagataaaatattaaatgaaaatattcttaccacctacaggcgaccaattttaatatctccataagtcttccccagctctatcttttgacttaaataggatcatatttaactattgtcttgtaacttgccattttcatttaataacctccatccttccgtgtcaaaataatttttcacctcttctcttacttagtctatattcagatgtaaattgttcatctcttatatttcccataagtgaaagttagtcctagacttgaagcctttattagctgtaagttcagcaaaatgcctttcagagccagtttgtcaaagccagcatccagtctggagaatgcacctggcatatggttgtgtcctttaattccctttcaatctagtggagttctttttttcatgatactgactgaagagattgcacagttttggttttaagtacagagacgtagtacatttcttaataataaatgtttaacttttgtgtgttttaacctaatttgtttttttatttttaaatttatattttatttcagcaaaacaagctatcgatcagggaagatctccagttataatagataacactaatatacaagcttgggaaatgaagccatatgtggaagtggccataggaaaaggatacagagtagagtttcatgaacctgaaacttggtggaaatttgatcctgaagaattagaaaagaggaataaacatggtgtgtctcgaaagaagattgctcagatgttggatcgttatgaatatcaaatgtccatttctattgtaatgaattcagtggaaccatcacacaaaagcacacaaagacctcctcctccacaggggagacagaggtggggaggctctcttggctcacataatcgtgtctgtgtcacaaataatcattaaattagctattttcagctaacacatttgttgttgcacttgaaaaagagttagtgagcctgtcttggagtttaagtagtttcaaataaaaaaaggctacagtgcctcacaaaggatgttcccagcaagttgtttaaattcccagcaagttgttaaagtgtaaataaaaatatatgaaattgtattttaaatgtttttatattctcttgttgtaatactcttggctgttatggaagcacctgagtaatagagtggtgggtaggagctaggatgtttttctacaatcgaattttaaactaatttatctattttatagacactattgaacagttttttaatagttcatatctaaatctaacttttcataaaactttacggtttttccttcactaccttaaatatgcaagaaatactgacttggtatagggtaccttagttttctctattcattagacaggtaaaattatatttcagctgattgatctgtgtgacaaaattatttcttagctataatcagcacatcacttagttcaaacaaaattccccagcaaatgttagatagtaggtatatcagtcacctggggagttttcttcataatatgcatattcatcttgtaatgcatacatagttatcatcctccttctcaacccatctccctaaccccacatgcttgccagttcttgaagggataaagtgattctaataatgttttacttctctctgttcaatttaatgtgatataattctagtataaaaatattttggacagttgcttaacatggtcataagaggatttgtactatagaatatcttctagtactaatttttctgtagagcaaattatatttctctcactggatagtttttagatgtgtttcttcatataaaattaaaaactgagatggaattcatttcagaggtcttgtcattcatcccctgccttcaaaccaagctttacctagactaacctagataattaagcatttctctttgcaacatgaggaaaaaaaacactactacttctcttaataccattgttaccaatgtcttctgaagaatatttcttcaacagttttgatttacttttttgatttactctttttaggggaaaaaaaacccagctaattacaatgctgtcttaaaaattaagcattatgattctttatatgttttacataatattttgtggcctttaagctttctcctaaaccagcacatcttgaatcccatagtatttctttgttttaaaaccttttgctattcctttcaactttagatattctctcacatctttatattactttttaagttgtcaggccaaaaactagattcactgctatcaacaaggtctttgttacattgcctttagtgaaataagaatatgattttatttgtactattcagtgctgttaacatttgaatgaatattacctttatcttgtttaatacgtgtgtttgtatatatttgttcatcttaactacgatgtaagaatatgctaattcatgttttgtgtgtaaatgtatattgtatacatatacacatcttcatctatgttttcatatattcttttatttcagagtaatacttgttggtgtttggacttgtgtttctaagtattttattctgtagattag

SEQ ID NO: 353338 - DNA, 4283 bp, Homo sapiens
gtatttatttttaatgcaacaaacacttacatagcgcttattctaccaggagctcgctgttctacttgcttgcacgtattgactcttttaatgggaaagctcagtgattggtctgtatttccaaaaacaaaacaaaacagcgacctgacactaaacgattttgttcataagtatttttatctgttattggggacctgcgccgcagtaattctgtccttccacagaaaagcatgagcctaaaattacgtcaggtggtctttcgtagaaacgaccggaatgcaaatttgtggtaccaactgtggagttccgttggaaaagtcagctggttgtcttctagaaagctctaagaagcatgcactgagagccgattatacatctattggggggcgccagtttctcaaattcctttttccttcgggggtgaacgccagaggaggtcgctgctttcttttaacgaaagttggtgtttttagataacttccctgctccagatctaggaactaattccggtctacttttgttgccaaattactgcgtttgtcacgccatggattctgggagacctagtctccgtgccgtgaggtttacggagccggtgtgaacgtcggacttcaattcccacaatgcctggcgcaaacgcctagttttggcctgggtaaccgagaggtgaccgccatcttgcgtacggaggtgaggtttgttaccgcgattctgagaggtgggcttttagtccctccagacctcggctttagtgctgtctccgcttttctttcaccttcacagaggttcgtgtcttcctaaaagaaggttttattgggaggtaaaggtcaatgcgtaggggtagagtaagatgtcttatggtgaaattgaaggtaaattcttgggacctagagaagaagtaacgagtgagccacgctgtaaaaaattgaagtcaaccacagagtcgtatgtttttcacaatcatagtaatgctgattttcacagaatccaagagaaaactggaaatgattgggtccctgtgaccatcattgatgtcagaggacatagttatttgcaggagaacaaaatcaaaactacagatttgcatagacctttgcatgatgagatgcctggtaatagaccagatgttattgaatccattgattcacaggttttacaggaagcacgtcctccattagtatccgcagacgatgagatatatagcacaagtaaagcatttataggacccatttacaaaccccctgagaaaaagaaacgtaatgaagggaggaatgaggcacatgttctaaatggtataaatgacagaggaggacaaaaagagaaacagaaatttaactctgaaaaatcagagattgacaatgaattattccagttttacaaagaaattgaagagcttgaaaaggaaaaagatggttttgagaacagttgtaaagaatctgaaccttctcaggaacaatttgttccattttatgagggtcataataatggtctcttaaaacctgatgaagaaaagaaagatcttagtaataaagctatgccatcacattgtgattatcagcagaacttggggaatgagccagacaaatatccctgtaatggacaagtaatacctacattttgtgacacttcatttacttctttcaggcctgaatggcagtcagtatatccttttatagtgccctatggtccccctcttcccagtttgaactatcatttaaacattcagagattcagtggtccaccaaatccaccatcaaatattttccaagcccaagatgactctcagatacaaaatggatattatgtaaataattgtcatgttaactggaattgcatgacttttgatcagaacaatgaatatactgactgtagtgagaataggagtagtgttcatccctctggaaatggctgcagtatgcaagatcgatatgtgagtaatggtttctgtgaagtcagagaaagatgctggaaagatcattgtatggacaagcataatggaacagacaggtttgtgaaccagcagtttcaagaggaaaagttaaataaattgcagaagttacttattcttttaagaggtctgcctggttctgggaaaacaacattgtctcgaattctgcttggtcagaatcgtgatggcattgtgttcagcactgatgactattttcaccatcaagatgggtacaggtataatgttaatcaacttggtgatgcccatgactggaaccagaacagagcaaaacaagctatcgatcagggaagatctccagttataatagataacactaatatacaagcttgggaaatgaagccatatgtggaagtggccataggaaaaggatacagagtagagtttcatgaaccctgaaacttggtggaaatttgatcctgaagaattagaaaagaggaataaacatggtgtgtctcgaaagaagattgctcagatgttggatcgttatgaatatcaaatgtccatttctattgtaatgaattcagtggaaccatcacacaaaagcacacaaagacctcctcctccacaggggagacagaggtggggaggctctcttggctcacataatcgtgtctgtgtcacaaataatcattaaattagctattttcagctaacacatttgttgttgcacttgaaaaagagttagtgagcctgtcttggagtttaagtagtttcaaataaaaaaaggctacagtgcctcacaaaggatgttcccagcaagttgtttaaattcccagcaagttgttaaagtgtaaataaaaatatatgaaattgtattttaaaaaaaaaaaaaaaaaaaagaaaaaaaaaaaaaaaaaaaaaaaaaaaagaaaaaaacagacaaaaagtgtgcctggcctcagccttagatattttggtttcattgatctggggtggggcctaaacattgatactttttgttttgaaatttctccagacgattctgatgtatagtcagaattgaaaactgttgatctgaactataagtaaatacatatgctatgttattttaaaagaatggattgatgattaaacaaatagcttttattatgaaaaattttaaacagattaaagagactgtaatgaacctcatagacccatcacccagaattatcaggtattgagattttggtatatgggcttttatctttttgtttgtacccctttctctttttaaagcaaattctagacatcatactttatacatttcaaaataacttttttactaatcacatctttcacttcagtgccgttatcacacatttaaaaaaatgccagttccttcagatcatgtaacccagtgtgtaattgaatctcctctgttgttcgaaaaaatctcttcacagttattttgtttgaattgggatccaaacgaagtcctcaaaatgcattttgttttatttaattaagttaatccatagcatgttccttcttttaaccctcataccattaacttgttgcagaaactatgttgtttgtcctgtagaaagttccacatgctgtagttgtctatttgcttcttggtgttaaccatttaacttgctcctcttctttgttttctgtgaatggaaattagctctagattagaggcttgattaggttcaacatttttttttttttttttttggcaagcagatatttggttgtcctgttcttagtaatggtgagcttaatcagtagctgcacagggacaacctcttccctctgtctgctgtcaagttccctattaaccttatatctgatggttttatccaataataaattgtttcctgagtcagttatttcattcagaattgcaaagtgatgatttttagtttagttattccttccatgtttaatggaattcttctgtaatgaagaacttctctcaaagctgccaactagggttgccctaaagtataatatatacaagaaaaatagtaatgcttttctttttaattgtcaaatacagtaaggaatttcagtgaggatgtttgtgtgtgttttggagatggggtcttgctttgttgcccaggctggagcgtagtgacacagtcatagctcagtgcagcctcgaattcctggactcaagggatcctcctgcctcggcctcctgagtaactaggactacaggcaggtagctgggactacatacgtgtaccagcacacccagctattttttaaaaaaactttgtagaattttgaatgagccacagtgcctggctgaggatggtttcgagttaaaagttttcacgctgttacaatttatagtttcacaagaatgtttaaacatcag

SEQ ID NO: 353339 - DNA, 5296 bp, Homo sapiens
  misc_feature (5294)..(5295): n is a, c, g, or t
gtatttatttttaatgcaacaaacacttacatagcgcttattctaccaggagctcgctgttctacttgcttgcacgtattgactcttttaatgggaaagctcagtgattggtctgtatttccaaaaacaaaacaaaacagcgacctgacactaaacgattttgttcataagtatttttatctgttattggggacctgcgccgcagtaattctgtccttccacagaaaagcatgagcctaaaattacgtcaggtggtctttcgtagaaacgaccggaatgcaaatttgtggtaccaactgtggagttccgttggaaaagtcagctggttgtcttctagaaagctctaagaagcatgcactgagagccgattatacatctattggggggcgccagtttctcaaattcctttttccttcgggggtgaacgccagaggaggtcgctgctttcttttaacgaaagttggtgtttttagataacttccctgctccagatctaggaactaattccggtctacttttgttgccaaattactgcgtttgtcacgccatggattctgggagacctagtctccgtgccgtgaggtttacggagccggtgtgaacgtcggacttcaattcccacaatgcctggcgcaaacgcctagttttggcctgggtaaccgagaggtgaccgccatcttgcgtacggaggtgaggtttgttaccgcgattctgagaggtgggcttttagtccctccagacctcggctttagtgctgtctccgcttttctttcaccttcacagaggttcgtgtcttcctaaaagaaggttttattgggaggtaaaggtcaatgcgtaggggtagagtaagatgtcttatggtgaaattgaaggtaaattcttgggacctagagaagaagtaacgagtgagccacgctgtaaaaaattgaagtcaaccacagagtcgtatgtttttcacaatcatagtaatgctgattttcacagaatccaagagaaaactggaaatgattgggtccctgtgaccatcattgatgtcagaggacatagttatttgcaggagaacaaaatcaaaactacagatttgcatagacctttgcatgatgagatgcctggtaatagaccagatgttattgaatccattgattcacaggttttacaggaagcacgtcctccattagtatccgcagacgatgagatatatagcacaagtaaagcatttataggacccatttacaaaccccctgagaaaaagaaacgtaatgaagggaggaatgaggcacatgttctaaatggtataaatgacagaggaggacaaaaagagaaacagaaatttaactctgaaaaatcagagattgacaatgaattattccagttttacaaagaaattgaagagcttgaaaaggaaaaagatggttttgagaacagttgtaaagaatctgaaccttctcaggaacaatttgttccattttatgagggtcataataatggtctcttaaaacctgatgaagaaaagaaagatcttagtaataaagctatgccatcacattgtgattatcagcagaacttggggaatgagccagacaaatatccctgtaatggacaagtaatacctacattttgtgacacttcatttacttctttcaggcctgaatggcagtcagtatatccttttatagtgccctatggtccccctcttcccagtttgaactatcatttaaacattcagagattcagtggtccaccaaatccaccatcaaatattttccaagcccaagatgactctcagatacaaaatggatattatgtaaataattgtcatgttaactggaattgcatgacttttgatcagaacaatgaatatactgactgtagtgagaataggagtagtgttcatccctctggaaatggctgcagtatgcaagatcgatatgtgagtaatggtttctgtgaagtcagagaaagatgctggaaagatcattgtatggacaagcataatggaacagacaggtttgtgaaccagcagtttcaagaggaaaagttaaataaattgcagaagttacttattcttttaagaggtctgcctggttctgggaaaacaacattgtctcgaattctgcttggtcagaatcgtgatggcattgtgttcagcactgatgactattttcaccatcaagatgggtacaggtataatgttaatcaacttggtgatgcccatgactggaaccagaacagagcaaaacaagctatcgatcagggaagatctccagttataatagataacactaatatacaagcttgggaaatgaagccatatgtggaagtggccataggaaaaggatacagagtagagtttcatgaacctgaaacttggtggaaatttgatcctgaagaattagaaaagaggaataaacatggtgtgtctcgaaagaagattgctcagatgttggatcgttatgaatatcaaatgtccatttctattgtaatgaattcagtggaaccatcacacaaaagcacacaaagacctcctcctccacaggggagacagagtgactgaagaaatatcaaatgtttcctagtaagacagcaactcaggactctaggatggaagaaggtgtctgaccgtaaattacacctgcagtgcaaccagcagactaatggggatgaggttctggtacaagatgatgaacaccagtatgtcagacaatgacttgggagctggaatcaaggacatgaccaagagcagcaagaacaaaagggagactgacacattgatcactttctcaacctttgatctcttgagaggatggttcacatttgagtaaagacaggggagtttgttttcagaatgacatactagtctgcaggatgaatttcataactgacattgcaccttggactgcaactaggactttcactggaatcagagaaagagttttgaagaaaactgggcataggctcagcaaaaccaaacagaagaggaacagaaaaagaaacaaaaagcagaacagtcagaatagaatcatggaggaaaactcattagaattcttaagtgatcttacaccgggagatcaggacccatctcagagtgaagaggaagacattgaaaagaccagaagagaatcagaatatcccttcattgatggtctacaaaatgaagtcggagattttgtgactggatataaagaaaaaagatggaaaaataaagatcctaaagacagtttccaaaacgttatgtctatagttgaattagacaacacaccaaagaattacctctctaaggaaggtgataacttgtttgtaagtttgttactgaggccaaatgaaatctccgttacttgtccaatactgactcaaaacctttcctgtgtaacaactgatgactgctctggcatgaaggtagaaaagcatattagaaataggcataccatagcattagacacccaggacctttctgcggaaacttcatgcttatttatgaagaagagagaaatagtagataaaaatctctcacatgaacccattctgtgccatcaacatggaatcagaatgtcagataaagttttaagagaggaacaagtgtatacaactaaaatcaatcactgggcttttttcacaaccaatttatctgatgaagatttacagctgggctctgacagacagccctattttggtagctggcctgcaggacctcataagtttatatgtgaacagagaccaaagaaagatagagcatgtaagttggctggtcctgacagcagggggcaatggattcaaatgatcttcacttcggtggcagcatcagaaccaggaaacaatccagaaatattgacagacaaactactgataggaaatgaagatttttcacctccacctgaaactatggattcattcatagaaacaaacctcttcagaagctgcttacctcaaccggatataccaaagaatgccttagaatcaacaaaaaataagaaaaggaggaagaaaaggattttcaatttggtaccaaattttgacttattaggacagagtcgtatcggtgtaaaagaaagggagaaatgtgacctgttaacaaaaaaccatggactaaaaattactttgggagaagaaaaagatagaatttcagaaaggaacagtgaagaggagaataaacaaaaacttatgacctttgatcatcatccattgtggttttaccttgatattatcaaagctacccctttaaatattgatggacagcgttattctcattgcctgtcatttaacagactaaggtgctctgcatctttatacaaaaattatattccttcttttgtgctacataatttatctagtatttggaagccatcttttacaaacaagaaactgtttttgactttcgaatctcagacaagagtaggtaataaactaaatgatgcagggtttatttctccagaaattttacatagtcatcctgatacttcgtgctctttgggagtcacttctgattttcactttttaaatgaaaggtttgatagaaagctgaaaagatgggaagaacctaaggaattaccagctgaggacagccaagacttaacaagcactgactaccgttcccttgagctaccattatcacaagggtttgcctttcaattagtaaagctttttggatctccaggcgttccaatggaatccttgttgcctgatgactatgtggttccccttgactggaagacactaaagatgatctacttgcaatggaagatgtcagtggagaaaagacagaagaagattggttgaaaaatgaaaattccttgaactttgagttctgctgtcttcatggtactgctgaagatcatgatcacggagaaaagtcagagtgctcagtgccaacccaagggattctttccagagacgtacccgttggataccaaaattagtttggataatctgttcaaccattcttgataagttattttgaagatgtatgccatactttgtttgatagaagaaagtaaggcacagaaaacttgagtaccttatttttaaaactgcattaggattaaaaggttagcccctatatccaagtattggtctgagatcccatttctagaattctgaaatccaaaaagctctgaaaatcaatagttatttttccaaatgtattcattgtggtaaaatacaccaatataaaatttaccatcttaaccacttttaagtgtgttataaatacattcatgctaccatcactagcatccatctctggaactcttttcatcttgcaaaactgcaattctatacccattaaacaatgacccatnnc

SEQ ID NO: 353340 - DNA, 4926 bp, Homo sapiens
  misc_feature (4924)..(4925): n is a, c, g, or t
gtatttatttttaatgcaacaaacacttacatagcgcttattctaccaggagctcgctgttctacttgcttgcacgtattgactcttttaatgggaaagctcagtgattggtctgtatttccaaaaacaaaacaaaacagcgacctgacactaaacgattttgttcataagtatttttatctgttattggggacctgcgccgcagtaattctgtccttccacagaaaagcatgagcctaaaattacgtcaggtggtctttcgtagaaacgaccggaatgcaaatttgtggtaccaactgtggagttccgttggaaaagtcagctggttgtcttctagaaagctctaagaagcatgcactgagagccgattatacatctattggggggcgccagtttctcaaattcctttttccttcgggggtgaacgccagaggaggtcgctgctttcttttaacgaaagttggtgtttttagataacttccctgctccagatctaggaactaattccggtctacttttgttgccaaattactgcgtttgtcacgccatggattctgggagacctagtctccgtgccgtgaggtttacggagccggtgtgaacgtcggacttcaattcccacaatgcctggcgcaaacgcctagttttggcctgggtaaccgagaggtgaccgccatcttgcgtacggaggtgaggtttgttaccgcgattctgagaggtgggcttttagtccctccagacctcggctttagtgctgtctccgcttttctttcaccttcacagaggttcgtgtcttcctaaaagaaggttttattgggaggtaaaggtcaatgcgtaggggtagagtaagatgtcttatggtgaaattgaaggtaaattcttgggacctagagaagaagtaacgagtgagccacgctgtaaaaaattgaagtcaaccacagagtcgtatgtttttcacaatcatagtaatgctgattttcacagaatccaagagaaaactggaaatgattgggtccctgtgaccatcattgatgtcagaggacatagttatttgcaggagaacaaaatcaaaactacagatttgcatagacctttgcatgatgagatgcctggtaatagaccagatgttattgaatccattgattcacaggttttacaggaagcacgtcctccattagtatccgcagacgatgagatatatagcacaagtaaagcatttataggacccatttacaaaccccctgagaaaaagaaacgtaatgaagggaggaatgaggcacatgttctaaatggtataaatgacagaggaggacaaaaagagaaacagaaatttaactctgaaaaatcagagattgacaatgaattattccagttttacaaagaaattgaagagcttgaaaaggaaaaagatggttttgagaacagttgtaaagaatctgaaccttctcaggaacaatttgttccattttatgagggtcataataatggtctcttaaaacctgatgaagaaaagaaagatcttagtaataaagctatgccatcacattgtgattatcagcagaacttggggaatgagccagacaaatatccctgtaatggacaagtaatacctacattttgtgacacttcatttacttctttcaggcctgaatggcagtcagtatatccttttatagtgccctatggtccccctcttcccagtttgaactatcatttaaacattcagagattcagtggtccaccaaatccaccatcaaatattttccaagcccaagatgactctcagatacaaaatggatattatgtaaataattgtcatgttaactggaattgcatgacttttgatcagaacaatgaatatactgactgtagtgagaataggagtagtgttcatccctctggaaatggctgcagtatgcaagatcgatatgtgagtaatggtttctgtgaagtcagagaaagatgctggaaagatcattgtatggacaagcataatggaacagacaggtttgtgaaccagcagtttcaagaggaaaagttaaataaattgcagaagttacttattcttttaagaggtctgcctggttctgggaaaacaacattgtctcgaattctgcttggtcagaatcgtgatggcattgtgttcagcactgatgactattttcaccatcaagatgggtacagcaaaacaagctatcgatcagggaagatctccagttataatagataacactaatatacaagcttgggaaatgaagccatatgtggaagtggccataggaaaaggatacagagtagagtttcatgaacctgaaacttggtggaaatttgatcctgaagaattagaaaagaggaataaacatggtgtgtctcgaaagaagattgctcagatgttggatcgttatgaatatcaaatgtccatttctattgtaatgaattcagtggaaccatcacacaaaagcacacaaagacctcctcctccacaggggagacagagagaaagagttttgaagaaaactgggcataggctcagcaaaaccaaacagaagaggaacagaaaaagaaacaaaaagcagaacagtcagaatagaatcatggaggaaaactcattagaattcttaagtgatcttacaccgggagatcaggacccatctcagagtgaagaggaagacattgaaaagaccagaagagaatcagaatatcccttcattgatggtctacaaaatgaagtcggagattttgtgactggatataaagaaaaaagatggaaaaataaagatcctaaagacagtttccaaaacgttatgtctatagttgaattagacaacacaccaaagaattacctctctaaggaaggtgataacttgtttgtaagtttgttactgaggccaaatgaaatctccgttacttgtccaatactgactcaaaacctttcctgtgtaacaactgatgactgctctggcatgaaggtagaaaagcatattagaaataggcataccatagcattagacacccaggacctttctgcggaaacttcatgcttatttatgaagaagagagaaatagtagataaaaatctctcacatgaacccattctgtgccatcaacatggaatcagaatgtcagataaagttttaagagaggaacaagtgtatacaactaaaatcaatcactgggcttttttcacaaccaatttatctgatgaagatttacagctgggctctgacagacagccctattttggtagctggcctgcaggacctcataagtttatatgtgaacagagaccaaagaaagatagagcatgtaagttggctggtcctgacagcagggggcaatggattcaaatgatcttcacttcggtggcagcatcagaaccaggaaacaatccagaaatattgacagacaaactactgataggaaatgaagatttttcacctccacctgaaactatggattcattcatagaaacaaacctcttcagaagctgcttacctcaaccggatataccaaagaatgccttagaatcaacaaaaaataagaaaaggaggaagaaaaggattttcaatttggtaccaaattttgacttattaggacagagtcgtatcggtgtaaaagaaagggagaaatgtgacctgttaacaaaaaaccatggactaaaaattactttgggagaagaaaaagatagaatttcagaaaggaacagtgaagaggagaataaacaaaaacttatgacctttgatcatcatccattgtggttttaccttgatattatcaaagctacccctttaaatattgatggacagcgttattctcattgcctgtcatttaacagactaaggtgctctgcatctttatacaaaaattatattccttcttttgtgctacataatttatctagtatttggaagccatcttttacaaacaagaaactgtttttgactttcgaatctcagacaagagtaggtaataaactaaatgatgcagggtttatttctccagaaattttacatagtcatcctgatacttcgtgctctttgggagtcacttctgattttcactttttaaatgaaaggtttgatagaaagctgaaaagatgggaagaacctaaggaattaccagctgaggacagccaagacttaacaagcactgactaccgttcccttgagctaccattatcacaagggtttgcctttcaattagtaaagctttttggatctccaggcgttccaatggaatccttgttgcctgatgactatgtggttccccttgactggaagacactaaagatgatctacttgcaatggaagatgtcagtggagaaaagacagaagaagattggttgaaaaatgaaaattccttgaactttgagttctgctgtcttcatggtactgctgaagatcatgatcacggagaaaagtcagagtgctcagtgccaacccaagggattctttccagagacgtacccgttggataccaaaattagtttggataatctgttcaaccattcttgataagttatctgaataataaaaaaactcaacagaggaggtaacaatttgaacattttattgtctaatttgaagatgtatgccatactttgtttgatagaagaaagtaaggcacagaaaacttgagtaccttatttttaaaactgcattaggattaaaaggttagcccctatatccaagtattggtctgagatcccatttctagaattctgaaatccaaaaagctctgaaaatcaatagttatttttccaaatgtattcattgtggtaaaatacaccaatataaaatttaccatcttaaccacttttaagtgtgttataaatacattcatgctaccatcactagcatccatctctggaactcttttcatcttgcaaaactgcaattctatacccattaaacaatgacccatnnc

SEQ ID NO: 353341 - DNA, 2251 bp, Homo sapiens
ggccaggctggtctcgaactcctgagctcagcccatctgccgtgctcagcctcccaaagtgctgggattacaggcatgagccaccacgcccagcctcatattgttttgactttccttaaggatagtaatcttaaggaattactattccttgagaatagtaatcaaaatttatccggttaaatagtcttaactgttataaaccatattattttataaagcgtcatttttcttggtcgagcaagtgtatagtattgtcgaaatgaaatttaactgtctgccttctttttactttaagaagtacttctctgggtttttgttttcttcctttcctttgtgtaggccataggaaaaggatacagagtagagtttcatgaacctgaaacttggtggaaatttgatcctgaagaattagaaaagaggaataaacatggtgtgtctcgaaagaagattgctcagatgttggatcgttatgaatatcaaatgtccatttctattgtaatgaattcagtggaaccatcacacaaaagcacacaaagacctcctcctccacaggggagacagaggtggggaggctctcttggctcacataatcgtgtctgtgtcacaaataatcattaaattagctattttcagctaacacatttgttgttgcacttgaaaaagagttagtgagcctgtcttggagtttaagtagtttcaaataaaaaaaggctacagtgcctcacaaaggatgttcccagcaagttgtttaaattcccagcaagttgttaaagtgtaaataaaaatatatgaaattgtattttaaatgtttttatattctcttgttgtaatactcttggctgttatggaagcacctgagtaatagagtggtgggtaggagctaggatgtttttctacaatcgaattttaaactaatttatctattttatagacactattgaacagttttttaatagttcatatctaaatctaacttttcataaaactttacggtttttccttcactaccttaaatatgcaagaaatactgacttggtatagggtaccttagttttctctattcattagacaggtaaaattatatttcagctgattgatctgtgtgacaaaattatttcttagctataatcagcacatcacttagttcaaacaaaattccccagcaaatgttagatagtaggtatatcagtcacctggggagttttcttcataatatgcatattcatcttgtaatgcatacatagttatcatcctccttctcaacccatctccctaaccccacatgcttgccagttcttgaagggataaagtgattctaataatgttttacttctctctgttcaatttaatgtgatataattctagtataaaaatattttggacagttgcttaacatggtcataagaggatttgtactatagaatatcttctagtactaatttttctgtagagcaaattatatttctctcactggatagtttttagatgtgtttcttcatataaaattaaaaactgagatggaattcatttcagaggtcttgtcattcatcccctgccttcaaaccaagctttacctagactaacctagataattaagcatttctctttgcaacatgaggaaaaaaaacactactacttctcttaataccattgttaccaatgtcttctgaagaatatttcttcaacagttttgatttacttttttgatttactctttttaggggaaaaaaaacccagctaattacaatgctgtcttaaaaattaagcattatgattctttatatgttttacataatattttgtggcctttaagctttctcctaaaccagcacatcttgaatcccatagtatttctttgttttaaaaccttttgctattcctttcaactttagatattctctcacatctttatattactttttaagttgtcaggccaaaaactagattcactgctatcaacaaggtctttgttacattgcctttagtgaaataagaatatgattttatttgtactattcagtgctgttaacatttgaatgaatattacctttatcttgtttaatacgtgtgtttgtatatatttgttcatcttaactacgatgtaagaatatgctaattcatgttttgtgtgtaaatgtatattgtatacatatacacatcttcatctatgttttcatatattcttttatttcagagtaatacttgttggtgtttggacttgtgtttctaagtattttattctgtagattag

SEQ ID NO: 353342 - DNA, 2649 bp, Homo sapiens
gtatttatttttaatgcaacaaacacttacatagcgcttattctaccaggagctcgctgttctacttgcttgcacgtattgactcttttaatgggaaagctcagtgattggtctgtatttccaaaaacaaaacaaaacagcgacctgacactaaacgattttgttcataagtatttttatctgttattggggacctgcgccgcagtaattctgtccttccacagaaaagcatgagcctaaaattacgtcaggtggtctttcgtagaaacgaccggaatgcaaatttgtggtaccaactgtggagttccgttggaaaagtcagctggttgtcttctagaaagctctaagaagcatgcactgagagccgattatacatctattggggggcgccagtttctcaaattcctttttccttcgggggtgaacgccagaggaggtcgctgctttcttttaacgaaagttggtgtttttagataacttccctgctccagatctaggaactaattccggtctacttttgttgccaaattactgcgtttgtcacgccatggattctgggagacctagtctccgtgccgtgaggtttacggagccggtgtgaacgtcggacttcaattcccacaatgcctggcgcaaacgcctagttttggcctgggtaaccgagaggtgaccgccatcttgcgtacggaggtgaggtttgttaccgcgattctgagaggtgggcttttagtccctccagacctcggctttagtgctgtctccgcttttctttcaccttcacagaggttcgtgtcttcctaaaagaaggttttattgggaggtaaaggtcaatgcgtaggggtagagtaagatgtcttatggtgaaattgaaggtaaattcttgggacctagagaagaagtaacgagtgagccacgctgtaaaaaattgaagtcaaccacagagtcgtatgtttttcacaatcatagtaatgctgattttcacagaatccaagagaaaactggaaatgattgggtccctgtgaccatcattgatgtcagaggacatagttatttgcaggagaacaaaatcaaaactacagatttgcatagacctttgcatgatgagatgcctggtaatagaccagatgttattgaatccattgattcacaggttttacaggaagcacgtcctccattagtatccgcagacgatgagatatatagcacaagtaaagcatttataggacccatttacaaaccccctgagaaaaagaaacgtaatgaagggaggaatgaggcacatgttctaaatggtataaatgacagaggaggacaaaaagagaaacagaaatttaactctgaaaaatcagagattgacaatgaattattccagttttacaaagaaattgaagagcttgaaaaggaaaaagatggttttgagaacagttgtaaagaatctgaaccttctcaggaacaatttgttccattttatgagggtcataataatggtctcttaaaacctgatgaagaaaagaaagatcttagtaataaagctatgccatcacattgtgattatcagcagaacttggggaatgagccagacaaatatccctgtaatggacaagtaatacctacattttgtgacacttcatttacttctttcaggcctgaatggcagtcagtatatccttttatagtgccctatggtccccctcttcccagtttgaactatcatttaaacattcagagattcagtggtccaccaaatccaccatcaaatattttccaagcccaagatgactctcagatacaaaatggatattatgtaaataattgtcatgttaactggaattgcatgacttttgatcagaacaatgaatatactgactgtagtgagaataggagtagtgttcatccctctggaaatggctgcagtatgcaagatcgatatgtgagtaatggtttctgtgaagtcagagaaagatgctggaaagatcattgtatggacaagcataatggaacagacaggtttgtgaaccagcagtttcaagaggaaaagttaaataaattgcagaagttacttattcttttaagaggtctgcctggttctgggaaaacaacattgtctcgaattctgcttggtcagaatcgtgatggcattgtgttcagcactgatgactattttcaccatcaagatgggtacaggtataatgttaatcaacttggtgatgcccatgactggaaccagaacagagcaaaacaagctatcgatcagggaagatctccagttataatagataacactaatatacaagcttgggaaatgaagccatatgtggaagtggccataggaaaaggatacagagtagagtttcatgaacctgaaacttggtggaaatttgatcctgaagaattagaaaagaggaataaacatggtgtgtctcgaaagaagattgctcagatgttggatcgttatgaatatcaaatgtccatttctattgtaatgaattcagtggaaccatcacacaaaagcacacaaagacctcctcctccacaggggagacagagaattctgcttggtcagaatcgtgatggcattgtgttcagcactgatgactattttcaccatcaagatgggtacagcaaaacagtaaccggatcgagaacata

SEQ ID NO: 353343 - DNA, 2372 bp, Homo sapiens
gttagcatctgtaattgtgtagatttaagtgtaaagtgatttgaaatctgaaatctttgtaagattattcagctcttgtgctggtctgttcgtgatatactttcaggtaagtatcagaaatccatttaataacctttcctgtgtgatttatttcacttggttatatttatttctgatagtttatttctgatggttatagattttgtaaatggcacctttatgatttcttttattaacagaattctgcttggtcagaatcgtgatggcattgtgttcagcactgatgactattttcaccatcaagatgggtacaggtataatgttaatcaacttggtgatgcccatgactggaaccagaacagagaggtttgttttgggctaagtgtcccaggatagaatatttggctaggagtcaaaagacctagattttattttcagcttaggtttttaccagctgaatgactgtaggcaagccgtttaaatagctttgagacctaatttctccatctgttagaggtggtgataattatacttgccctacctgatcagggtttttgtgaaaagcagagaatttagataaaacgctttgtaaactgtaaatagtttatcagtataagctggtaaaataatagcagcatgggatattttaagaggctttattttatacttgatgagtaaattcagagaactttgaatctgtaccattgttatgtagtcccaaagttatttccccgagaataatgctaatgttttccaaggcttaatatactggttgtgaatattaaaagtttttctcattgatattgctctacaagaaacctacttaatacattttttagcggacatgggtcaatttctgtttatcattaataggggttcttaacctgggctacacttttgaatttcttggggactttaaaaaaagcaaaaaaaaaagacaaaaagtgtgcctggcctcagccttagatattttggtttcattgatctggggtggggcctaaacattgatactttttgttttgaaatttctccagacgattctgatgtatagtcagaattgaaaactgttgatctgaactataagtaaatacatatgctatgttattttaaaagaatggattgatgattaaacaaatagcttttattatgaaaaattttaaacagattaaagagactgtaatgaacctcatagacccatcacccagaattatcaggtattgagattttggtatatgggcttttatctttttgtttgtacccctttctctttttaaagcaaattctagacatcatactttatacatttcaaaataacttttttactaatcacatctttcacttcagtgccgttatcacacatttaaaaaaatgccagttccttcagatcatgtaacccagtgtgtaattgaatctcctctgttgttcgaaaaaatctcttcacagttattttgtttgaattgggatccaaacgaagtcctcaaaatgcattttgttttatttaattaagttaatccatagcatgttccttcttttaaccctcataccattaacttgttgcagaaactatgttgtttgtcctgtagaaagttccacatgctgtagttgtctatttgcttcttggtgttaaccatttaacttgctcctcttctttgttttctgtgaatggaaattagctctagattagaggcttgattaggttcaacatttttttttttttttttttggcaagcagatatttggttgtcctgttcttagtaatggtgagcttaatcagtagctgcacagggacaacctcttccctctgtctgctgtcaagttccctattaaccttatatctgatggttttatccaataataaattgtttcctgagtcagttatttcattcagaattgcaaagtgatgatttttagtttagttattccttccatgtttaatggaattcttctgtaatgaagaacttctctcaaagctgccaactagggttgccctaaagtataatatatacaagaaaaatagtaatgcttttctttttaattgtcaaatacagtaaggaatttcagtgaggatgtttgtgtgtgttttggagatggggtcttgctttgttgcccaggctggagcgtagtgacacagtcatagctcagtgcagcctcgaattcctggactcaagggatcctcctgcctcggcctcctgagtaactaggactacaggcaggtagctgggactacatacgtgtaccagcacacccagctattttttaaaaaaactttgtagaattttgaatgagccacagtgcctggctgaggatggtttcgagttaaaagttttcacgctgttacaatttatagtttcacaagaatgtttaaacatcag

SEQ ID NO: 353344 - DNA, 2992 bp, Homo sapiens
  misc_feature (2990)..(2991): n is a, c, g, or t
ggccaggctggtctcgaactcctgagctcagcccatctgccgtgctcagcctcccaaagtgctgggattacaggcatgagccaccacgcccagcctcatattgttttgactttccttaaggatagtaatcttaaggaattactattccttgagaatagtaatcaaaatttatccggttaaatagtcttaactgttataaaccatattattttataaagcgtcatttttcttggtcgagcaagtgtatagtattgtcgaaatgaaatttaactgtctgccttctttttactttaagaagtacttctctgggtttttgttttcttcctttcctttgtgtaggccataggaaaaggatacagagtagagtttcatgaacctgaaacttggtggaaatttgatcctgaagaattagaaaagaggaataaacatggtgtgtctcgaaagaagattgctcagatgttggatcgttatgaatatcaaatgtccatttctattgtaatgaattcagtggaaccatcacacaaaagcacacaaagacctcctcctccacaggggagacagagagaaagagttttgaagaaaactgggcataggctcagcaaaaccaaacagaagaggaacagaaaaagaaacaaaaagcagaacagtcagaatagaatcatggaggaaaactcattagaattcttaagtgatcttacaccgggagatcaggacccatctcagagtgaagaggaagacattgaaaagaccagaagagaatcagaatatcccttcattgatggtctacaaaatgaagtcggagattttgtgactggatataaagaaaaaagatggaaaaataaagatcctaaagacagtttccaaaacgttatgtctatagttgaattagacaacacaccaaagaattacctctctaaggaaggtgataacttgtttgtaagtttgttactgaggccaaatgaaatctccgttacttgtccaatactgactcaaaacctttcctgtgtaacaactgatgactgctctggcatgaaggtagaaaagcatattagaaataggcataccatagcattagacacccaggacctttctgcggaaacttcatgcttatttatgaagaagagagaaatagtagataaaaatctctcacatgaacccattctgtgccatcaacatggaatcagaatgtcagataaagttttaagagaggaacaagtgtatacaactaaaatcaatcactgggcttttttcacaaccaatttatctgatgaagatttacagctgggctctgacagacagccctattttggtagctggcctgcaggacctcataagtttatatgtgaacagagaccaaagaaagatagagcatgtaagttggctggtcctgacagcagggggcaatggattcaaatgatcttcacttcggtggcagcatcagaaccaggaaacaatccagaaatattgacagacaaactactgataggaaatgaagatttttcacctccacctgaaactatggattcattcatagaaacaaacctcttcagaagctgcttacctcaaccggatataccaaagaatgccttagaatcaacaaaaaataagaaaaggaggaagaaaaggattttcaatttggtaccaaattttgacttattaggacagagtcgtatcggtgtaaaagaaagggagaaatgtgacctgttaacaaaaaaccatggactaaaaattactttgggagaagaaaaagatagaatttcagaaaggaacagtgaagaggagaataaacaaaaacttatgacctttgatcatcatccattgtggttttaccttgatattatcaaagctacccctttaaatattgatggacagcgttattctcattgcctgtcatttaacagactaaggtgctctgcatctttatacaaaaattatattccttcttttgtgctacataatttatctagtatttggaagccatcttttacaaacaagaaactgtttttgactttcgaatctcagacaagagtaggtaataaactaaatgatgcagggtttatttctccagaaattttacatagtcatcctgatacttcgtgctctttgggagtcacttctgattttcactttttaaatgaaaggtttgatagaaagctgaaaagatgggaagaacctaaggaattaccagctgaggacagccaagacttaacaagcactgactaccgttcccttgagctaccattatcacaagggtttgcctttcaattagtaaagctttttggatctccaggcgttccaatggaatccttgttgcctgatgactatgtggttccccttgactggaagacactaaagatgatctacttgcaatggaagatgtcagtggagaaaagacagaagaagattggttgaaaaatgaaaattccttgaactttgagttctgctgtcttcatggtactgctgaagatcatgatcacggagaaaagtcagagtgctcagtgccaacccaagggattctttccagagacgtacccgttggataccaaaattagtttggataatctgttcaaccattcttgataagttatctgaataataaaaaaactcaacagaggaggtaacaatttgaacattttattgtctaatttgaagatgtatgccatactttgtttgatagaagaaagtaaggcacagaaaacttgagtaccttatttttaaaactgcattaggattaaaaggttagcccctatatccaagtattggtctgagatcccatttctagaattctgaaatccaaaaagctctgaaaatcaatagttatttttccaaatgtattcattgtggtaaaatacaccaatataaaatttaccatcttaaccacttttaagtgtgttataaatacattcatgctaccatcactagcatccatctctggaactcttttcatcttgcaaaactgcaattctatacccattaaacaatgacccatnnc

SEQ ID NO: 353345 - DNA, 1724 bp, Homo sapiens
  misc_feature (10)..(10): n is a, c, g, or t
  misc_feature (18)..(18): n is a, c, g, or t
  misc_feature (64)..(64): n is a, c, g, or t
  misc_feature (67)..(67): n is a, c, g, or t
  misc_feature (73)..(73): n is a, c, g, or t
gcagtttttnttggcccntgtaacatttccaattttgatttggggtgaaggcttctcaaaggtnggngcctgnatgtgtaagaagaaactcatatactggttgtgaatattaaaagtttttctcattgatattgctctacaagaaacctacttaatacattttttagcggacatgggtcaatttctgtttatcattaataggggttcttaacctgggctacacttttgaatttcttggggactttaaaaaaagcaaaaaaaaaaaaaaaaaaaaaaaagaaaaaaacagacaaaaagtgtgcctggcctcagccttagatattttggtttcattgatctggggtggggcctaaacattgatactttttgttttgaaatttctccagacgattctgatgtatagtcagaattgaaaactgttgatctgaactataagtaaatacatatgctatgttattttaaaagaatggattgatgattaaacaaatagcttttattatgaaaaattttaaacagattaaagagactgtaatgaacctcatagacccatcacccagaattatcaggtattgagattttggtatatgggcttttatctttttgtttgtacccctttctctttttaaagcaaattctagacatcatactttatacatttcaaaataacttttttactaatcacatctttcacttcagtgccgttatcacacatttaaaaaaatgccagttccttcagatcatgtaacccagtgtgtaattgaatctcctctgttgttcgaaaaaatctcttcacagttattttgtttgaattgggatccaaacgaagtcctcaaaatgcattttgttttatttaattaagttaatccatagcatgttccttcttttaaccctcataccattaacttgttgcagaaactatgttgtttgtcctgtagaaagttccacatgctgtagttgtctatttgcttcttggtgttaaccatttaacttgctcctcttctttgttttctgtgaatggaaattagctctagattagaggcttgattaggttcaacatttttttttttttttttttggcaagcagatatttggttgtcctgttcttagtaatggtgagcttaatcagtagctgcacagggacaacctcttccctctgtctgctgtcaagttccctattaaccttatatctgatggttttatccaataataaattgtttcctgagtcagttatttcattcagaattgcaaagtgatgatttttagtttagttattccttccatgtttaatggaattcttctgtaatgaagaacttctctcaaagctgccaactagggttgccctaaagtataatatatacaagaaaaatagtaatgcttttctttttaattgtcaaatacagtaaggaatttcagtgaggatgtttgtgtgtgttttggagatggggtcttgctttgttgcccaggctggagcgtagtgacacagtcatagctcagtgcagcctcgaattcctggactcaagggatcctcctgcctcggcctcctgagtaactaggactacaggcaggtagctgggactacatacgtgtaccagcacacccagctattttttaaaaaaactttgtagaattttgaatgagccacagtgcctggctgaggatggtttcgagttaaaagttttcacgctgttacaatttatagtttcacaagaatgtttaaacatcag

SEQ ID NO: 353346 - DNA, 978 bp, Homo sapiens
  misc_feature (976)..(977): n is a, c, g, or t
taaaaaaactcaacagaggaggtaacaattggacattttagtgtctaatttgaagatgtatgccatacttgttgatagaagaaagtaaggcacagaaaacttgagtaccttatttttaaacatgttaacacatttgcatgaattagtgcatttatttttaattttttgtaatgtacatagctggatcctcagggaatgggatctagaacaagtttcagctgaaggacaaggagttgggaaatgtcagggaacaggctcttgaatgaggcaggactaagcagtgtagactgtggggacagctgtgaagtcctggatgccaggggagtggcataactcaggaagtaaaggctgggaacctgaaaacaaactgttcatgtcacatgttttctggtcttgtctgggcttgtgtttgcttgtagttgagttctgctgtcttcatggtactgctgaagatcatgatcacggagaaaagtcagagtgctcagtgccaacccaagggattctttccagagacgtacccgttggataccaaaattagtttggataatctgttcaaccattcttgataagttatctgaataataaaaaaactcaacagaggaggtaacaatttgaacattttattgtctaatttgaagatgtatgccatactttgtttgatagaagaaagtaaggcacagaaaacttgagtaccttatttttaaaactgcattaggattaaaaggttagcccctatatccaagtattggtctgagatcccatttctagaattctgaaatccaaaaagctctgaaaatcaatagttatttttccaaatgtattcattgtggtaaaatacaccaatataaaatttaccatcttaaccacttttaagtgtgttataaatacattcatgctaccatcactagcatccatctctggaactcttttcatcttgcaaaactgcaattctatacccattaaacaatgacccatnnc

SEQ ID NO: 353347 - DNA, 691 bp, Homo sapiens
ggccaggctggtctcgaactcctgagctcagcccatctgccgtgctcagcctcccaaagtgctgggattacaggcatgagccaccacgcccagcctcatattgttttgactttccttaaggatagtaatcttaaggaattactattccttgagaatagtaatcaaaatttatccggttaaatagtcttaactgttataaaccatattattttataaagcgtcatttttcttggtcgagcaagtgtatagtattgtcgaaatgaaatttaactgtctgccttctttttactttaagaagtacttctctgggtttttgttttcttcctttcctttgtgtaggccataggaaaaggatacagagtagagtttcatgaacctgaaacttggtggaaatttgatcctgaagaattagaaaagtaagacactcgaatttttattgaatccttaacttttcttctttcttttgtgaattctgacatcctttcacagtttattgaatacaaatgtaggttcaggaaactgagggtaaaatgtgaggaccttttttctctggtttttggctaggccacttctctgcattgtccttctgccttcatctccttctcattttaggtcccatcaactttttactttgtgctttcatgttgctcccacttttctatcttttcaactacaggaccgtagtattata

SEQ ID NO: 353348 - DNA, 1281 bp, Homo sapiens
gtatttatttttaatgcaacaaacacttacatagcgcttattctaccaggagctcgctgttctacttgcttgcacgtattgactcttttaatgggaaagctcagtgattggtctgtatttccaaaaacaaaacaaaacagcgacctgacactaaacgattttgttcataagtatttttatctgttattggggacctgcgccgcagtaattctgtccttccacagaaaagcatgagcctaaaattacgtcaggtggtctttcgtagaaacgaccggaatgcaaatttgtggtaccaactgtggagttccgttggaaaagtcagctggttgtcttctagaaagctctaagaagcatgcactgagagccgattatacatctattggggggcgccagtttctcaaattcctttttccttcgggggtgaacgccagaggaggtcgctgctttcttttaacgaaagttggtgtttttagataacttccctgctccagatctaggaactaattccggtctacttttgttgccaaattactgcgtttgtcacgccatggattctgggagacctagtctccgtgccgtgaggtttacggagccggtgtgaacgtcggacttcaattcccacaatgcctggcgcaaacgcctagttttggcctgggtaaccgagaggtgaccgccatcttgcgtacggaggtgaggtttgttaccgcgattctgagaggtgggcttttagtccctccagacctcggctttagtgctgtctccgcttttctttcaccttcacagatgtcttatggtgaaattgaaggtaaattcttgggacctagagaagaagtaacgagtgagccacgctgtaaaaaattgaagtcaaccacagagtcgtatgtttttcacaatcatagtaatgctgattttcacagaatccaagagaaaactggaaatgattgggtccctgtgaccatcattgatgtcagaggacatagttatttgcaggagaacaaaatcaaaactacagatttgcatagacctttgcatgatgagatgcctggtaatagaccagatgttattgaatccattgattcacaggttttacaggaagcacgtcctccattagtatccgcagacgatgagatatatagcacaagtaaagcatttataggacccatttacaaaccccctgagtcagagggggaccaaaggagaaccccaatttaactcttgaaacccaagattgacatggattatcccgttttacacagaaactgaaagcttgactggaaacgc

SEQ ID NO: 353349 - DNA, 296 bp, Homo sapiens
ctcatccatgacatactctacctctgcatccaggcatccaggtggcttctcaatgtagcggtagtaggcagcaggcagcgggggtgcttgtggctggatgcctgagtccaccatacggaagctgggctgtgggaggtggaaggaagtaccagatgcatgcttggagcaggattccttctttttgcccttggatgagggtttcttggacttgccagggaactgactgaagaaatatcaaatgtttcctagtaagacagcaactcaggtgagatggaaactccaagtaatgatataat

SEQ ID NO: 353350 - DNA, 2782 bp, Homo sapiens
gtatttatttttaatgcaacaaacacttacatagcgcttattctaccaggagctcgctgttctacttgcttgcacgtattgactcttttaatgggaaagctcagtgattggtctgtatttccaaaaacaaaacaaaacagcgacctgacactaaacgattttgttcataagtatttttatctgttattggggacctgcgccgcagtaattctgtccttccacagaaaagcatgagcctaaaattacgtcaggtggtctttcgtagaaacgaccggaatgcaaatttgtggtaccaactgtggagttccgttggaaaagtcagctggttgtcttctagaaagctctaagaagcatgcactgagagccgattatacatctattggggggcgccagtttctcaaattcctttttccttcgggggtgaacgccagaggaggtcgctgctttcttttaacgaaagttggtgtttttagataacttccctgctccagatctaggaactaattccggtctacttttgttgccaaattactgcgtttgtcacgccatggattctgggagacctagtctccgtgccgtgaggtttacggagccggtgtgaacgtcggacttcaattcccacaatgcctggcgcaaacgcctagttttggcctgggtaaccgagaggtgaccgccatcttgcgtacggaggtgaggtttgttaccgcgattctgagaggtgggcttttagtccctccagacctcggctttagtgctgtctccgcttttctttcaccttcacagaggttcgtgtcttcctaaaagaaggttttattgggaggtaaaggtcaatgcgtaggggtagagtaagatgtcttatggtgaaattgaaggtaaattcttgggacctagagaagaagtaacgagtgagccacgctgtaaaaaattgaagtcaaccacagagtcgtatgtttttcacaatcatagtaatgctgattttcacagaatccaagagaaaactggaaatgattgggtccctgtgaccatcattgatgtcagaggacatagttatttgcaggagaacaaaatcaaaactacagatttgcatagacctttgcatgatgagatgcctggtaatagaccagatgttattgaatccattgattcacaggttttacaggaagcacgtcctccattagtatccgcagacgatgagatatatagcacaagtaaagcatttataggacccatttacaaaccccctgagaaaaagaaacgtaatgaagggaggaatgaggcacatgttctaaatggtataaatgacagaggaggacaaaaagagaaacagaaatttaactctgaaaaatcagagattgacaatgaattattccagttttacaaagaaattgaagagcttgaaaaggaaaaagatggttttgagaacagttgtaaagaatctgaaccttctcaggaacaatttgttccattttatgagggtcataataatggtctcttaaaacctgatgaagaaaagaaagatcttagtaataaagctatgccatcacattgtgattatcagcagaacttggggaatgagccagacaaatatccctgtaatggacaagtaatacctacattttgtgacacttcatttacttctttcaggcctgaatggcagtcagtatatccttttatagtgccctatggtccccctcttcccagtttgaactatcatttaaacattcagagattcagtggtccaccaaatccaccatcaaatattttccaagcccaagatgactctcagatacaaaatggatattatgtaaataattgtcatgttaactggaattgcatgacttttgatcagaacaatgaatatactgactgtagtgagaataggagtagtgttcatccctctggaaatggctgcagtatgcaagatcgatatgtgagtaatggtttctgtgaagtcagagaaagatgctggaaagatcattgtatggacaagcataatggaacagacaggtttgtgaaccagcagtttcaagaggaaaagttaaataaattgcagaagttacttattcttttaagaggtctgcctggttctgggaaaacaacattgtctcgaattctgcttggtcagaatcgtgatggcattgtgttcagcactgatgactattttcaccatcaagatgggtacaggtataatgttaatcaacttggtgatgcccatgactggaaccagaacagagcaaaacaagctatcgatcagggaagatctccagttataatagataacactaatatacaagcttgggaaatgaagccatatgtggaagtggccataggaaaaggatacagagtagagtttcatgaacctgaaacttggtggaaatttgatcctgaagaattagaaaagaggaataaacatggtgtgtctcgaaagaagattgctcagatgttggatcgttatgaatatcaaatgtccatttctattgtaatgaattcagtggaaccatcacacaaaagcacacaaagacctcctcctccacaggggagacagaggtggggaggctctcttggctcacataatcgtgtctgtgtcacaaataatcattaaattagctattttcagctaacacatttgttgttgcacttgaaaaagagttagtgagcctgtcttggagtttaagtagtttcaaataaaaaaaggctacagtgcctcacaaaggatgttcccagcaagttgtttaaattcccagcaagttgttaaagtgtaaataaaaatatatgaaattgt

SEQ ID NO: 353351 - DNA, 4075 bp, Homo sapiens
gtatttatttttaatgcaacaaacacttacatagcgcttattctaccaggagctcgctgttctacttgcttgcacgtattgactcttttaatgggaaagctcagtgattggtctgtatttccaaaaacaaaacaaaacagcgacctgacactaaacgattttgttcataagtatttttatctgttattggggacctgcgccgcagtaattctgtccttccacagaaaagcatgagcctaaaattacgtcaggtggtctttcgtagaaacgaccggaatgcaaatttgtggtaccaactgtggagttccgttggaaaagtcagctggttgtcttctagaaagctctaagaagcatgcactgagagccgattatacatctattggggggcgccagtttctcaaattcctttttccttcgggggtgaacgccagaggaggtcgctgctttcttttaacgaaagttggtgtttttagataacttccctgctccagatctaggaactaattccggtctacttttgttgccaaattactgcgtttgtcacgccatggattctgggagacctagtctccgtgccgtgaggtttacggagccggtgtgaacgtcggacttcaattcccacaatgcctggcgcaaacgcctagttttggcctgggtaaccgagaggtgaccgccatcttgcgtacggagatgtcttatggtgaaattgaaggtaaattcttgggacctagagaagaagtaacgagtgagccacgctgtaaaaaattgaagtcaaccacagagtcgtatgtttttcacaatcatagtaatgctgattttcacagaatccaagagaaaactggaaatgattgggtccctgtgaccatcattgatgtcagaggacatagttatttgcaggagaacaaaatcaaaactacagatttgcatagacctttgcatgatgagatgcctggtaatagaccagatgttattgaatccattgattcacaggttttacaggaagcacgtcctccattagtatccgcagacgatgagatatatagcacaagtaaagcatttataggacccatttacaaaccccctgagaaaaagaaacgtaatgaagggaggaatgaggcacatgttctaaatggtataaatgacagaggaggacaaaaagagaaacagaaatttaactctgaaaaatcagagattgacaatgaattattccagttttacaaagaaattgaagagcttgaaaaggaaaaagatggttttgagaacagttgtaaagaatctgaaccttctcaggaacaatttgttccattttatgagggtcataataatggtctcttaaaacctgatgaagaaaagaaagatcttagtaataaagctatgccatcacattgtgattatcagcagaacttggggaatgagccagacaaatatccctgtaatggacaagtaatacctacattttgtgacacttcatttacttctttcaggcctgaatggcagtcagtatatccttttatagtgccctatggtccccctcttcccagtttgaactatcatttaaacattcagagattcagtggtccaccaaatccaccatcaaatattttccaagcccaagatgactctcagatacaaaatggatattatgtaaataattgtcatgttaactggaattgcatgacttttgatcagaacaatgaatatactgactgtagtgagaataggagtagtgttcatccctctggaaatggctgcagtatgcaagatcgatatgtgagtaatggtttctgtgaagtcagagaaagatgctggaaagatcattgtatggacaagcataatggaacagacaggtttgtgaaccagcagtttcaagaggaaaagttaaataaattgcagaagttacttattcttttaagaggtctgcctggttctgggaaaacaacattgtctcgaattctgcttggtcagaatcgtgatggcattgtgttcagcactgatgactattttcaccatcaagatgggtacaggtataatgttaatcaacttggtgatgcccatgactggaaccagaacagagcaaaacaagctatcgatcagggaagatctccagttataatagataacactaatatacaagcttgggaaatgaagccatatgtggaagtggccataggaaaaggatacagagtagagtttcatgaacctgaaacttggtggaaatttgatcctgaagaattagaaaagaggaataaacatggtgtgtctcgaaagaagattgctcagatgttggatcgttatgaatatcaaatgtccatttctattgtaatgaattcagtggaaccatcacacaaaagcacacaaagacctcctcctccacaggggagacagaggtggggaggctctcttggctcacataatcgtgtctgtgtcacaaataatcattaaattagctattttcagctaacacatttgttgttgcacttgaaaaagagttagtgagcctgtcttggagtttaagtagtttcaaataaaaaaaggctacagtgcctcacaaaggatgttcccagcaagttgtttaaattcccagcaagttgttaaagtgtaaataaaaatatatgaaattgtattttaaatgtttttatattctcttgttgtaatactcttggctgttatggaagcacctgagtaatagagtggtgggtaggagctaggatgtttttctacaatcgaattttaaactaatttatctattttatagacactattgaacagttttttaatagttcatatctaaatctaacttttcataaaactttacggtttttccttcactaccttaaatatgcaagaaatactgacttggtatagggtaccttagttttctctattcattagacaggtaaaattatatttcagctgattgatctgtgtgacaaaattatttcttagctataatcagcacatcacttagttcaaacaaaattccccagcaaatgttagatagtaggtatatcagtcacctggggagttttcttcataatatgcatattcatcttgtaatgcatacatagttatcatcctccttctcaacccatctccctaaccccacatgcttgccagttcttgaagggataaagtgattctaataatgttttacttctctctgttcaatttaatgtgatataattctagtataaaaatattttggacagttgcttaacatggtcataagaggatttgtactatagaatatcttctagtactaatttttctgtagagcaaattatatttctctcactggatagtttttagatgtgtttcttcatataaaattaaaaactgagatggaattcatttcagaggtcttgtcattcatcccctgccttcaaaccaagctttacctagactaacctagataattaagcatttctctttgcaacatgaggaaaaaaaacactactacttctcttaataccattgttaccaatgtcttctgaagaatatttcttcaacagttttgatttacttttttgatttactctttttaggggaaaaaaaacccagctaattacaatgctgtcttaaaaattaagcattatgattctttatatgttttacataatattttgtggcctttaagctttctcctaaaccagcacatcttgaatcccatagtatttctttgttttaaaaccttttgctattcctttcaactttagatattctctcacatctttatattactttttaagttgtcaggccaaaaactagattcactgctatcaacaaggtctttgttacattgcctttagtgaaataagaatatgattttatttgtactattcagtgctgttaacatttgaatgaatattacctttatcttgtttaatacgtgtgtttgtatatatttgttcatcttaactacgatgtaagaatatgctaattcatgttttgtgtgtaaatgtatattgtatacatatacacatcttcatctatgttttcatatattcttttatttcagagtaatacttgttggtgtttggacttgtgtttctaagtattttattctgtagattag

SEQ ID NO: 353352 - DNA, 4975 bp, Homo sapiens
gtatttatttttaatgcaacaaacacttacatagcgcttattctaccaggagctcgctgttctacttgcttgcacgtattgactcttttaatgggaaagctcagtgattggtctgtatttccaaaaacaaaacaaaacagcgacctgacactaaacgattttgttcataagtatttttatctgttattggggacctgcgccgcagtaattctgtccttccacagaaaagcatgagcctaaaattacgtcaggtggtctttcgtagaaacgaccggaatgcaaatttgtggtaccaactgtggagttccgttggaaaagtcagctggttgtcttctagaaagctctaagaagcatgcactgagagccgattatacatctattggggggcgccagtttctcaaattcctttttccttcgggggtgaacgccagaggaggtcgctgctttcttttaacgaaagttggtgtttttagataacttccctgctccagatctaggaactaattccggtctacttttgttgccaaattactgcgtttgtcacgccatggattctgggagacctagtctccgtgccgtgaggtttacggagccggtgtgaacgtcggacttcaattcccacaatgcctggcgcaaacgcctagttttggcctgggtaaccgagaggtgaccgccatcttgcgtacggaggtgaggtttgttaccgcgattctgagaggtgggcttttagtccctccagacctcggctttagtgctgtctccgcttttctttcaccttcacagaggttcgtgtcttcctaaaagaaggttttattgggaggtaaaggtcaatgcgtaggggtagagtaagatgtcttatggtgaaattgaaggtaaattcttgggacctagagaagaagtaacgagtgagccacgctgtaaaaaattgaagtcaaccacagagtcgtatgtttttcacaatcatagtaatgctgattttcacagaatccaagagaaaactggaaatgattgggtccctgtgaccatcattgatgtcagaggacatagttatttgcaggagaacaaaatcaaaactacagatttgcatagacctttgcatgatgagatgcctggtaatagaccagatgttattgaatccattgattcacaggttttacaggaagcacgtcctccattagtatccgcagacgatgagatatatagcacaagtaaagcatttataggacccatttacaaaccccctgagaaaaagaaacgtaatgaagggaggaatgaggcacatgttctaaatggtataaatgacagaggaggacaaaaagagaaacagaaatttaactctgaaaaatcagagattgacaatgaattattccagttttacaaagaaattgaagagcttgaaaaggaaaaagatggttttgagaacagttgtaaagaatctgaaccttctcaggaacaatttgttccattttatgagggtcataataatggtctcttaaaacctgatgaagaaaagaaagatcttagtaataaagctatgccatcacattgtgattatcagcagaacttggggaatgagccagacaaatatccctgtaatggacaagtaatacctacattttgtgacacttcatttacttctttcaggcctgaatggcagtcagtatatccttttatagtgccctatggtccccctcttcccagtttgaactatcatttaaacattcagagattcagtggtccaccaaatccaccatcaaatattttccaagcccaagatgactctcagatacaaaatggatattatgtaaataattgtcatgttaactggaattgcatgacttttgatcagaacaatgaatatactgactgtagtgagaataggagtagtgttcatccctctggaaatggctgcagtatgcaagatcgatatgtgagtaatggtttctgtgaagtcagagaaagatgctggaaagatcattgtatggacaagcataatggaacagacaggtttgtgaaccagcagtttcaagaggaaaagttaaataaattgcagaagttacttattcttttaagaggtctgcctggttctgggaaaacaacattgtctcgaattctgcttggtcagaatcgtgatggcattgtgttcagcactgatgactattttcaccatcaagatgggtacaggtataatgttaatcaacttggtgatgcccatgactggaaccagaacagagcaaaacaagctatcgatcagggaagatctccagttataatagataacactaatatacaagcttgggaaatgaagccatatgtggaagtggccataggaaaaggatacagagtagagtttcatgaacctgaaacttggtggaaatttgatcctgaagaattagaaaagaggaataaacatggtgtgtctcgaaagaagattgctcagatgttggatcgttatgaatatcaaatgtccatttctattgtaatgaattcagtggaaccatcacacaaaagcacacaaagacctcctcctccacaggggagacagagtgactgaagaaatatcaaatgtttcctagtaagacagcaactcaggactctaggatggaagaaggtgtctgaccgtaaattacacctgcagtgcaaccagcagactaatggggatgaggttctggtacaagatgatgaacaccagtatgtcagacaatgacttgggagctggaatcaaggacatgaccaagagcagcaagaacaaaagggagactgacacattgatcactttctcaacctttgatctcttgagaggatggttcacatttgagtaaagacaggggagtttgttttcagaatgacatactagtctgcaggatgaatttcataactgacattgcaccttggactgcaactaggactttcactggaatcagagaaagagttttgaagaaaactgggcataggctcagcaaaaccaaacagaagaggaacagaaaaagaaacaaaaagcagaacagtcagaatagaatcatggaggaaaactcattagaattcttaagtgatcttacaccgggagatcaggacccatctcagagtgaagaggaagacattgaaaagaccagaagagaatcagaatatcccttcattgatggtctacaaaatgaagtcggagattttgtgactggatataaagaaaaaagatggaaaaataaagatcctaaagacagtttccaaaacgttatgtctatagttgaattagacaacacaccaaagaattacctctctaaggaaggtgataacttgtttgtaagtttgttactgaggccaaatgaaatctccgttacttgtccaatactgactcaaaacctttcctgtgtaacaactgatgactgctctggcatgaaggtagaaaagcatattagaaataggcataccatagcattagacacccaggacctttctgcggaaacttcatgcttatttatgaagaagagagaaatagtagataaaaatctctcacatgaacccattctgtgccatcaacatggaatcagaatgtcagataaagttttaagagaggaacaagtgtatacaactaaaatcaatcactgggcttttttcacaaccaatttatctgatgaagatttacagctgggctctgacagacagccctattttggtagctggcctgcaggacctcataagtttatatgtgaacagagaccaaagaaagatagagcatgtaagttggctggtcctgacagcagggggcaatggattcaaatgatcttcacttcggtggcagcatcagaaccaggaaacaatccagaaatattgacagacaaactactgataggaaatgaagatttttcacctccacctgaaactatggattcattcatagaaacaaacctcttcagaagctgcttacctcaaccggatataccaaagaatgccttagaatcaacaaaaaataagaaaaggaggaagaaaaggattttcaatttggtaccaaattttgacttattaggacagagtcgtatcggtgtaaaagaaagggagaaatgtgacctgttaacaaaaaaccatggactaaaaattactttgggagaagaaaaagatagaatttcagaaaggaacagtgaagaggagaataaacaaaaacttatgacctttgatcatcatccattgtggttttaccttgatattatcaaagctacccctttaaatattgatggacagcgttattctcattgcctgtcatttaacagactaaggtgctctgcatctttatacaaaaattatattccttcttttgtgctacataatttatctagtatttggaagccatcttttacaaacaagaaactgtttttgactttcgaatctcagacaagagtaggtaataaactaaatgatgcagggtttatttctccagaaattttacatagtcatcctgatacttcgtgctctttgggagtcacttctgattttcactttttaaatgaaaggtttgatagaaagctgaaaagatgggaagaacctaaggaattaccagctgaggacagccaagacttaacaagcactgactaccgttcccttgagctaccattatcacaagggtttgcctttcaattagtaaagctttttggatctccaggcgttccaatggaatccttgttgcctgatgactatgtggttccccttgactggaagacactaaagatgatctacttgcaatggaagatgtcagtggagaaaagacagaagaagattggttgaaaaatgaaaattccttgaactttgagttctgctgtcttcatggtactgctgaagatcatgatcacggagaaaagtcagagtgctcagtgccaacccaagggattctttccagagacgtacccgttggataccaaaattagtttggataatctgttcaaccattcttgataagttatctgaataataaaaaaactcaacagag

SEQ ID NO: 353353 - DNA, 4181 bp, Homo sapiens
gtatttatttttaatgcaacaaacacttacatagcgcttattctaccaggagctcgctgttctacttgcttgcacgtattgactcttttaatgggaaagctcagtgattggtctgtatttccaaaaacaaaacaaaacagcgacctgacactaaacgattttgttcataagtatttttatctgttattggggacctgcgccgcagtaattctgtccttccacagaaaagcatgagcctaaaattacgtcaggtggtctttcgtagaaacgaccggaatgcaaatttgtggtaccaactgtggagttccgttggaaaagtcagctggttgtcttctagaaagctctaagaagcatgcactgagagccgattatacatctattggggggcgccagtttctcaaattcctttttccttcgggggtgaacgccagaggaggtcgctgctttcttttaacgaaagttggtgtttttagataacttccctgctccagatctaggaactaattccggtctacttttgttgccaaattactgcgtttgtcacgccatggattctgggagacctagtctccgtgccgtgaggtttacggagccggtgtgaacgtcggacttcaattcccacaatgcctggcgcaaacgcctagttttggcctgggtaaccgagaggtgaccgccatcttgcgtacggaggtgaggtttgttaccgcgattctgagaggtgggcttttagtccctccagacctcggctttagtgctgtctccgcttttctttcaccttcacagaggttcgtgtcttcctaaaagaaggttttattgggaggtaaaggtcaatgcgtaggggtagagtaagatgtcttatggtgaaattgaaggtaaattcttgggacctagagaagaagtaacgagtgagccacgctgtaaaaaattgaagtcaaccacagagtcgtatgtttttcacaatcatagtaatgctgattttcacagaatccaagagaaaactggaaatgattgggtccctgtgaccatcattgatgtcagaggacatagttatttgcaggagaacaaaatcaaaactacagatttgcatagacctttgcatgatgagatgcctggtaatagaccagatgttattgaatccattgattcacaggttttacaggaagcacgtcctccattagtatccgcagacgatgagatatatagcacaagtaaagcatttataggacccatttacaaaccccctgagaaaaagaaacgtaatgaagggaggaatgaggcacatgttctaaatggtataaatgacagaggaggacaaaaagagaaacagaaatttaactctgaaaaatcagagattgacaatgaattattccagttttacaaagaaattgaagagcttgaaaaggaaaaagatggttttgagaacagttgtaaagaatctgaaccttctcaggaacaatttgttccattttatgagggtcataataatggtctcttaaaacctgatgaagacttggggaatgagccagacaaatatccctgtaatggacaagtaatacctacattttgtgacacttcatttacttctttcaggcctgaatggcagtcagtatatccttttatagtgccctatggtccccctcttcccagtttgaactatcatttaaacattcagagattcagtggtccaccaaatccaccatcaaatattttccaagcccaagatgactctcagatacaaaatggatattatgtaaataattgtcatgttaactggaattgcatgacttttgatcagaacaatgaatatactgactgtagtgagaataggagtagtgttcatccctctggaaatggctgcagtatgcaagatcgatatgtgagtaatggtttctgtgaagtcagagaaagatgctggaaagatcattgtatggacaagcataatggaacagacaggtttgtgaaccagcagtttcaagaggaaaagttaaataaattgcagaagttacttattcttttaagaggtctgcctggttctgggaaaacaacattgtctcgaattctgcttggtcagaatcgtgatggcattgtgttcagcactgatgactattttcaccatcaagatgggtacaggtataatgttaatcaacttggtgatgcccatgactggaaccagaacagagcaaaacaagctatcgatcagggaagatctccagttataatagataacactaatatacaagcttgggaaatgaagccatatgtggaagtggccataggaaaaggatacagagtagagtttcatgaacctgaaacttggtggaaatttgatcctgaagaattagaaaagaggaataaacatggtgtgtctcgaaagaagattgctcagatgttggatcgttatgaatatcaaatgtccatttctattgtaatgaattcagtggaaccatcacacaaaagcacacaaagacctcctcctccacaggggagacagaggtggggaggctctcttggctcacataatcgtgtctgtgtcacaaataatcattaaattagctattttcagctaacacatttgttgttgcacttgaaaaagagttagtgagcctgtcttggagtttaagtagtttcaaataaaaaaaggctacagtgcctcacaaaggatgttcccagcaagttgtttaaattcccagcaagttgttaaagtgtaaataaaaatatatgaaattgtattttaaatgtttttatattctcttgttgtaatactcttggctgttatggaagcacctgagtaatagagtggtgggtaggagctaggatgtttttctacaatcgaattttaaactaatttatctattttatagacactattgaacagttttttaatagttcatatctaaatctaacttttcataaaactttacggtttttccttcactaccttaaatatgcaagaaatactgacttggtatagggtaccttagttttctctattcattagacaggtaaaattatatttcagctgattgatctgtgtgacaaaattatttcttagctataatcagcacatcacttagttcaaacaaaattccccagcaaatgttagatagtaggtatatcagtcacctggggagttttcttcataatatgcatattcatcttgtaatgcatacatagttatcatcctccttctcaacccatctccctaaccccacatgcttgccagttcttgaagggataaagtgattctaataatgttttacttctctctgttcaatttaatgtgatataattctagtataaaaatattttggacagttgcttaacatggtcataagaggatttgtactatagaatatcttctagtactaatttttctgtagagcaaattatatttctctcactggatagtttttagatgtgtttcttcatataaaattaaaaactgagatggaattcatttcagaggtcttgtcattcatcccctgccttcaaaccaagctttacctagactaacctagataattaagcatttctctttgcaacatgaggaaaaaaaacactactacttctcttaataccattgttaccaatgtcttctgaagaatatttcttcaacagttttgatttacttttttgatttactctttttaggggaaaaaaaacccagctaattacaatgctgtcttaaaaattaagcattatgattctttatatgttttacataatattttgtggcctttaagctttctcctaaaccagcacatcttgaatcccatagtatttctttgttttaaaaccttttgctattcctttcaactttagatattctctcacatctttatattactttttaagttgtcaggccaaaaactagattcactgctatcaacaaggtctttgttacattgcctttagtgaaataagaatatgattttatttgtactattcagtgctgttaacatttgaatgaatattacctttatcttgtttaatacgtgtgtttgtatatatttgttcatcttaactacgatgtaagaatatgctaattcatgttttgtgtgtaaatgtatattgtatacatatacacatcttcatctatgttttcatatattcttttatttcagagtaatacttgttggtgtttggacttgtgtttctaagtattttattctgtagattag

SEQ ID NO: 353354 - DNA, 4236 bp, Homo sapiens
gtatttatttttaatgcaacaaacacttacatagcgcttattctaccaggagctcgctgttctacttgcttgcacgtattgactcttttaatgggaaagctcagtgattggtctgtatttccaaaaacaaaacaaaacagcgacctgacactaaacgattttgttcataagtatttttatctgttattggggacctgcgccgcagtaattctgtccttccacagaaaagcatgagcctaaaattacgtcaggtggtctttcgtagaaacgaccggaatgcaaatttgtggtaccaactgtggagttccgttggaaaagtcagctggttgtcttctagaaagctctaagaagcatgcactgagagccgattatacatctattggggggcgccagtttctcaaattcctttttccttcgggggtgaacgccagaggaggtcgctgctttcttttaacgaaagttggtgtttttagataacttccctgctccagatctaggaactaattccggtctacttttgttgccaaattactgcgtttgtcacgccatggattctgggagacctagtctccgtgccgtgaggtttacggagccggtgtgaacgtcggacttcaattcccacaatgcctggcgcaaacgcctagttttggcctgggtaaccgagaggtgaccgccatcttgcgtacggaggtgaggtttgttaccgcgattctgagaggtgggcttttagtccctccagacctcggctttagtgctgtctccgcttttctttcaccttcacagaggttcgtgtcttcctaaaagaaggttttattgggaggtaaaggtcaatgcgtaggggtagagtaagatgtcttatggtgaaattgaaggtaaattcttgggacctagagaagaagtaacgagtgagccacgctgtaaaaaattgaagtcaaccacagagtcgtatgtttttcacaatcatagtaatgctgattttcacagaatccaagagaaaactggaaatgattgggtccctgtgaccatcattgatgtcagaggacatagttatttgcaggagaacaaaatcaaaactacagatttgcatagacctttgcatgatgagatgcctggtaatagaccagatgttattgaatccattgattcacaggttttacaggaagcacgtcctccattagtatccgcagacgatgagatatatagcacaagtaaagcatttataggacccatttacaaaccccctgagaaaaagaaacgtaatgaagggaggaatgaggcacatgttctaaatggtataaatgacagaggaggacaaaaagagaaacagaaatttaactctgaaaaatcagagattgacaatgaattattccagttttacaaagaaattgaagagcttgaaaaggaaaaagatggttttgagaacagttgtaaagaatctgaaccttctcaggaacaatttgttccattttatgagggtcataataatggtctcttaaaacctgatgaagaaaagaaagatcttagtaataaagctatgccatcacattgtgattatcagcagaacttggggaatgagccagacaaatatccctgtaatggacaagtaatacctacattttgtgacacttcatttacttctttcaggcctgaatggcagtcagtatatccttttatagtgccctatggtccccctcttcccagtttgaactatcatttaaacattcagagattcagtggtccaccaaatccaccatcaaatattttccaagcccaagatgactctcagatacaaaatggatattatgtaaataattgtcatgttaactggaattgcatgacttttgatcagaacaatgaatatactgactgtagtgagaataggagtagtgttcatccctctggaaatggctgcagtatgcaagatcgatatgtgagtaatggtttctgtgaagtcagagaaagatgctggaaagatcattgtatggacaagcataatggaacagacaggtttgtgaaccagcagtttcaagaggaaaagttaaataaattgcagaagttacttattcttttaagaggtctgcctggttctgggaaaacaacattgtctcgaattctgcttggtcagaatcgtgatggcattgtgttcagcactgatgactattttcaccatcaagatgggtacaggtataatgttaatcaacttggtgatgcccatgactggaaccagaacagagcaaaacaagctatcgatcagggaagatctccagttataatagataacactaatatacaagcttgggaaatgaagccatatgtggaagtggccataggaaaaggatacagagtagagtttcatgaaccctgaaacttggtggaaatttgatcctgaagaattagaaaagaggaataaacatggtgtgtctcgaaagaagattgctcagatgttggatcgttatgaatatcaaatgtccatttctattgtaatgaattcagtggaaccatcacacaaaagcacacaaagacctcctcctccacaggggagacagaggtggggaggctctcttggctcacataatcgtgtctgtgtcacaaataatcattaaattagctattttcagctaacacatttgttgttgcacttgaaaaagagttagtgagcctgtcttggagtttaagtagtttcaaataaaaaaaggctacagtgcctcacaaaggatgttcccagcaagttgtttaaattcccagcaagttgttaaagtgtaaataaaaatatatgaaattgtattttaaatgtttttatattctcttgttgtaatactcttggctgttatggaagcacctgagtaatagagtggtgggtaggagctaggatgtttttctacaatcgaattttaaactaatttatctattttatagacactattgaacagttttttaatagttcatatctaaatctaacttttcataaaactttacggtttttccttcactaccttaaatatgcaagaaatactgacttggtatagggtaccttagttttctctattcattagacaggtaaaattatatttcagctgattgatctgtgtgacaaaattatttcttagctataatcagcacatcacttagttcaaacaaaattccccagcaaatgttagatagtaggtatatcagtcacctggggagttttcttcataatatgcatattcatcttgtaatgcatacatagttatcatcctccttctcaacccatctccctaaccccacatgcttgccagttcttgaagggataaagtgattctaataatgttttacttctctctgttcaatttaatgtgatataattctagtataaaaatattttggacagttgcttaacatggtcataagaggatttgtactatagaatatcttctagtactaatttttctgtagagcaaattatatttctctcactggatagtttttagatgtgtttcttcatataaaattaaaaactgagatggaattcatttcagaggtcttgtcattcatcccctgccttcaaaccaagctttacctagactaacctagataattaagcatttctctttgcaacatgaggaaaaaaaacactactacttctcttaataccattgttaccaatgtcttctgaagaatatttcttcaacagttttgatttacttttttgatttactctttttaggggaaaaaaaacccagctaattacaatgctgtcttaaaaattaagcattatgattctttatatgttttacataatattttgtggcctttaagctttctcctaaaccagcacatcttgaatcccatagtatttctttgttttaaaaccttttgctattcctttcaactttagatattctctcacatctttatattactttttaagttgtcaggccaaaaactagattcactgctatcaacaaggtctttgttacattgcctttagtgaaataagaatatgattttatttgtactattcagtgctgttaacatttgaatgaatattacctttatcttgtttaatacgtgtgtttgtatatatttgttcatcttaactacgatgtaagaatatgctaattcatgttttgtgtgtaaatgtatattgtatacatatacacatcttcatctatgttttcatatattcttttatttcagagtaatacttgttggtgtttggacttgtgtttctaagtattttattctgtagattag

SEQ ID NO: 353355 - DNA, 4006 bp, Homo sapiens
gtatttatttttaatgcaacaaacacttacatagcgcttattctaccaggagctcgctgttctacttgcttgcacgtattgactcttttaatgggaaagctcagtgattggtctgtatttccaaaaacaaaacaaaacagcgacctgacactaaacgattttgttcataagtatttttatctgttattggggacctgcgccgcagtaattctgtccttccacagaaaagcatgagcctaaaattacgtcaggtggtctttcgtagaaacgaccggaatgcaaatttgtggtaccaactgtggagttccgttggaaaagtcagctggttgtcttctagaaagctctaagaagcatgcactgagagccgattatacatctattggggggcgccagtttctcaaattcctttttccttcgggggtgaacgccagaggaggtcgctgctttcttttaacgaaagttggtgtttttagataacttccctgctccagatctaggaactaattccggtctacttttgttgccaaattactgcgtttgtcacgccatggattctgggagacctagtctccgtgccgtgaggtttacggagccggtgtgaacgtcggacttcaattcccacaatgcctggcgcaaacgcctagttttggcctgggtaaccgagaggtgaccgccatcttgcgtacggaggtgaggtttgttaccgcgattctgagaggtgggcttttagtccctccagacctcggctttagtgctgtctccgcttttctttcaccttcacagaggttcgtgtcttcctaaaagaaggttttattgggaggtaaaggtcaatgcgtaggggtagagtaagatgtcttatggtgaaattgaaggtaaattcttgggacctagagaagaagtaacgagtgagccacgctgtaaaaaattgaagtcaaccacagagtcgtatgtttttcacaatcatagtaatgctgattttcacagaatccaagagaaaactggaaatgattgggtccctgtgaccatcattgatgtcagaggacatagttatttgcaggagaacaaaatcaaaactacagatttgcatagacctttgcatgatgagatgcctggtaatagaccagatgttattgaatccattgattcacaggttttacaggaagcacgtcctccattagtatccgcagacgatgagatatatagcacaagtaaagcatttataggacccatttacaaaccccctgagaaaaagaaacgtaatgaagggaggaatgaggcacatgttctaaatggtataaatgacagaggaggacaaaaagagaaacagaaatttaactctgaaaaatcagagattgacaatgaattattccagttttacaaagaaattgaagagcttgaaaaggaaaaagatggttttgagaacagttgtaaagaatctgaaccttctcaggaacaatttgttccattttatgagggtcataataatggtctcttaaaacctgatgaagaaaagaaagatcttagtaataaagctatgccatcacattgtgattatcagcagaacttggggaatgagccagacaaatatccctgtaatggacaagtaatacctacattttgtgacacttcatttacttctttcaggcctgaatggcagtcagtatatccttttatagtgccctatggtccccctcttcccagtttgaactatcatttaaacattcagagattcagtggtccaccaaatccaccatcaaatattttccaagcccaagatgactctcagatacaaaatggatattatgtaaataattgtcatgttaactggaattgcatgacttttgatcagaacaatgaatatactgactgtagtgagaataggagtagtgttcatccctctggaaatggctgcagtatgcaagatcgatatgtgagtaatggtttctgtgaagtcagagaaagatgctggaaagatcattgtatggacaagcataatggaggtttgttttgggctaagtgtcccaggatagaatatttggctaggagtcaaaagacctagattttattttcagcttaggtttttaccagctgaatgactgtaggcaagccgtttaaatagctttgagacctaatttctccatctgttagaggtggtgataattatacttgccctacctgatcagggtttttgtgaaaagcagagaatttagataaaacgctttgtaaactgtaaatagtttatcagtataagctggtaaaataatagcagcatgggatattttaagaggctttattttatacttgatgagtaaattcagagaactttgaatctgtaccattgttatgtagtcccaaagttatttccccgagaataatgctaatgttttccaaggcttaatatactggttgtgaatattaaaagtttttctcattgatattgctctacaagaaacctacttaatacattttttagcggacatgggtcaatttctgtttatcattaataggggttcttaacctgggctacacttttgaatttcttggggactttaaaaaaagcaaaaaaaaaagacaaaaagtgtgcctggcctcagccttagatattttggtttcattgatctggggtggggcctaaacattgatactttttgttttgaaatttctccagacgattctgatgtatagtcagaattgaaaactgttgatctgaactataagtaaatacatatgctatgttattttaaaagaatggattgatgattaaacaaatagcttttattatgaaaaattttaaacagattaaagagactgtaatgaacctcatagacccatcacccagaattatcaggtattgagattttggtatatgggcttttatctttttgtttgtacccctttctctttttaaagcaaattctagacatcatactttatacatttcaaaataacttttttactaatcacatctttcacttcagtgccgttatcacacatttaaaaaaatgccagttccttcagatcatgtaacccagtgtgtaattgaatctcctctgttgttcgaaaaaatctcttcacagttattttgtttgaattgggatccaaacgaagtcctcaaaatgcattttgttttatttaattaagttaatccatagcatgttccttcttttaaccctcataccattaacttgttgcagaaactatgttgtttgtcctgtagaaagttccacatgctgtagttgtctatttgcttcttggtgttaaccatttaacttgctcctcttctttgttttctgtgaatggaaattagctctagattagaggcttgattaggttcaacatttttttttttttttttttggcaagcagatatttggttgtcctgttcttagtaatggtgagcttaatcagtagctgcacagggacaacctcttccctctgtctgctgtcaagttccctattaaccttatatctgatggttttatccaataataaattgtttcctgagtcagttatttcattcagaattgcaaagtgatgatttttagtttagttattccttccatgtttaatggaattcttctgtaatgaagaacttctctcaaagctgccaactagggttgccctaaagtataatatatacaagaaaaatagtaatgcttttctttttaattgtcaaatacagtaaggaatttcagtgaggatgtttgtgtgtgttttggagatggggtcttgctttgttgcccaggctggagcgtagtgacacagtcatagctcagtgcagcctcgaattcctggactcaagggatcctcctgcctcggcctcctgagtaactaggactacaggcaggtagctgggactacatacgtgtaccagcacacccagctattttttaaaaaaactttgtagaattttgaatgagccacagtgcctggctgaggatggtttcgagttaaaagttttcacgctgttacaatttatagtttcacaagaatgtttaaacatcag

SEQ ID NO: 353356 - DNA, 3145 bp, Homo sapiens
gaaactcgcgcggacatttctgcccaggcttggagagaagagggattcctatgaaatgatattacacatatcacattgtggcaggttgttagtctggtattatatatgcttttaaaattcattagcaaatgacattctcatgcacacgagtgtgtcaaacacaagaagcaagtccagtttataggtagtccatgcactatttgtgtgtgtgtgtgtgtgtgtgtgtgtgtgtgtgtgtgtgtgtgtgctgaacagtcatagcagttgtcgacgcgactcatacgcgttctcgtggacatctgtagtgaaaaggaaaaagatggttttgagaacagttgtaaagaatctgaaccttctcaggaacaatttgttccattttatgagggtcataataatggtctcttaaaacctgatgaagaaaagaaagatcttagtaataaagctatgccatcacattgtgattatcagcagaacttggggaatgagccagacaaatatccctgtaatggacaagtaatacctacattttgtgacacttcatttacttctttcaggcctgaatggcagtcagtatatccttttatagtgccctatggtccccctcttcccagtttgaactatcatttaaacattcagagattcagtggtccaccaaatccaccatcaaatattttccaagcccaagatgactctcagatacaaaatggatattatgtaaataattgtcatgttaactggaattgcatgacttttgatcagaacaatgaatatactgactgtagtgagaataggagtagtgttcatccctctggaaatggctgcagtatgcaagatcgatatgtgagtaatggtttctgtgaagtcagagaaagatgctggaaagatcattgtatggacaagcataatggaacagacaggtttgtgaaccagcagtttcaagaggaaaagttaaataaattgcagaagttacttattcttttaagaggtctgcctggttctgggaaaacaacattgtctcgaattctgcttggtcagaatcgtgatggcattgtgttcagcactgatgactattttcaccatcaagatgggtacaggtataatgttaatcaacttggtgatgcccatgactggaaccagaacagagcaaaacaagctatcgatcagggaagatctccagttataatagataacactaatatacaagcttgggaaatgaagccatatgtggaagtggccataggaaaaggatacagagtagagtttcatgaacctgaaacttggtggaaatttgatcctgaagaattagaaaagaggaataaacatggtgtgtctcgaaagaagattgctcagatgttggatcgttatgaatatcaaatgtccatttctattgtaatgaattcagtggaaccatcacacaaaagcacacaaagacctcctcctccacaggggagacagaggtggggaggctctcttggctcacataatcgtgtctgtgtcacaaataatcattaaattagctattttcagctaacacatttgttgttgcacttgaaaaagagttagtgagcctgtcttggagtttaagtagtttcaaataaaaaaaggctacagtgcctcacaaaggatgttcccagcaagttgtttaaattcccagcaagttgttaaagtgtaaataaaaatatatgaaattgtattttaaatgtttttatattctcttgttgtaatactcttggctgttatggaagcacctgagtaatagagtggtgggtaggagctaggatgtttttctacaatcgaattttaaactaatttatctattttatagacactattgaacagttttttaatagttcatatctaaatctaacttttcataaaactttacggtttttccttcactaccttaaatatgcaagaaatactgacttggtatagggtaccttagttttctctattcattagacaggtaaaattatatttcagctgattgatctgtgtgacaaaattatttcttagctataatcagcacatcacttagttcaaacaaaattccccagcaaatgttagatagtaggtatatcagtcacctggggagttttcttcataatatgcatattcatcttgtaatgcatacatagttatcatcctccttctcaacccatctccctaaccccacatgcttgccagttcttgaagggataaagtgattctaataatgttttacttctctctgttcaatttaatgtgatataattctagtataaaaatattttggacagttgcttaacatggtcataagaggatttgtactatagaatatcttctagtactaatttttctgtagagcaaattatatttctctcactggatagtttttagatgtgtttcttcatataaaattaaaaactgagatggaattcatttcagaggtcttgtcattcatcccctgccttcaaaccaagctttacctagactaacctagataattaagcatttctctttgcaacatgaggaaaaaaaacactactacttctcttaataccattgttaccaatgtcttctgaagaatatttcttcaacagttttgatttacttttttgatttactctttttaggggaaaaaaaacccagctaattacaatgctgtcttaaaaattaagcattatgattctttatatgttttacataatattttgtggcctttaagctttctcctaaaccagcacatcttgaatcccatagtatttctttgttttaaaaccttttgctattcctttcaactttagatattctctcacatctttatattactttttaagttgtcaggccaaaaactagattcactgctatcaacaaggtctttgttacattgcctttagtgaaataagaatatgattttatttgtactattcagtgctgttaacatttgaatgaatattacctttatcttgtttaatacgtgtgtttgtatatatttgttcatcttaactacgatgtaagaatatgctaattcatgttttgtgtgtaaatgtatattgtatacatatacacatcttcatctatgttttcatatattcttttatttcagagtaatacttgttggtgtttggacttgtgtttctaagtattttattctgtagattag

SEQ ID NO: 353357 - DNA, 4976 bp, Homo sapiens
  misc_feature (4974)..(4975): n is a, c, g, or t
gtatttatttttaatgcaacaaacacttacatagcgcttattctaccaggagctcgctgttctacttgcttgcacgtattgactcttttaatgggaaagctcagtgattggtctgtatttccaaaaacaaaacaaaacagcgacctgacactaaacgattttgttcataagtatttttatctgttattggggacctgcgccgcagtaattctgtccttccacagaaaagcatgagcctaaaattacgtcaggtggtctttcgtagaaacgaccggaatgcaaatttgtggtaccaactgtggagttccgttggaaaagtcagctggttgtcttctagaaagctctaagaagcatgcactgagagccgattatacatctattggggggcgccagtttctcaaattcctttttccttcgggggtgaacgccagaggaggtcgctgctttcttttaacgaaagttggtgtttttagataacttccctgctccagatctaggaactaattccggtctacttttgttgccaaattactgcgtttgtcacgccatggattctgggagacctagtctccgtgccgtgaggtttacggagccggtgtgaacgtcggacttcaattcccacaatgcctggcgcaaacgcctagttttggcctgggtaaccgagaggtgaccgccatcttgcgtacggaggtgaggtttgttaccgcgattctgagaggtgggcttttagtccctccagacctcggctttagtgctgtctccgcttttctttcaccttcacagaggttcgtgtcttcctaaaagaaggttttattgggaggtaaaggtcaatgcgtaggggtagagtaagatgtcttatggtgaaattgaaggtaaattcttgggacctagagaagaagtaacgagtgagccacgctgtaaaaaattgaagtcaaccacagagtcgtatgtttttcacaatcatagtaatgctgattttcacagaatccaagagaaaactggaaatgattgggtccctgtgaccatcattgatgtcagaggacatagttatttgcaggagaacaaaatcaaaactacagatttgcatagacctttgcatgatgagatgcctggtaatagaccagatgttattgaatccattgattcacaggttttacaggaagcacgtcctccattagtatccgcagacgatgagatatatagcacaagtaaagcatttataggacccatttacaaaccccctgagaaaaagaaacgtaatgaagggaggaatgaggcacatgttctaaatggtataaatgacagaggaggacaaaaagagaaacagaaatttaactctgaaaaatcagagattgacaatgaattattccagttttacaaagaaattgaagagcttgaaaaggaaaaagatggttttgagaacagttgtaaagaatctgaaccttctcaggaacaatttgttccattttatgagggtcataataatggtctcttaaaacctgatgaagaaaagaaagatcttagtaataaagctatgccatcacattgtgattatcagcagaacttggggaatgagccagacaaatatccctgtaatggacaagtaatacctacattttgtgacacttcatttacttctttcaggcctgaatggcagtcagtatatccttttatagtgccctatggtccccctcttcccagtttgaactatcatttaaacattcagagattcagtggtccaccaaatccaccatcaaatattttccaagcccaagatgactctcagatacaaaatggatattatgtaaataattgtcatgttaactggaattgcatgacttttgatcagaacaatgaatatactgactgtagtgagaataggagtagtgttcatccctctggaaatggctgcagtatgcaagatcgatatgtgagtaatggtttctgtgaagtcagagaaagatgctggaaagatcattgtatggacaagcataatggaacagacaggtttgtgaaccagcagtttcaagaggaaaagttaaataaattgcagaagttacttattcttttaagaggtctgcctggttctgggaaaacaacattgtctcgaattctgcttggtcagaatcgtgatggcattgtgttcagcactgatgactattttcaccatcaagatgggtacaggtataatgttaatcaacttggtgatgcccatgactggaaccagaacagagcaaaacaagctatcgatcagggaagatctccagttataatagataacactaatatacaagcttgggaaatgaagccatatgtggaagtggccataggaaaaggatacagagtagagtttcatgaacctgaaacttggtggaaatttgatcctgaagaattagaaaagaggaataaacatggtgtgtctcgaaagaagattgctcagatgttggatcgttatgaatatcaaatgtccatttctattgtaatgaattcagtggaaccatcacacaaaagcacacaaagacctcctcctccacaggggagacagagagaaagagttttgaagaaaactgggcataggctcagcaaaaccaaacagaagaggaacagaaaaagaaacaaaaagcagaacagtcagaatagaatcatggaggaaaactcattagaattcttaagtgatcttacaccgggagatcaggacccatctcagagtgaagaggaagacattgaaaagaccagaagagaatcagaatatcccttcattgatggtctacaaaatgaagtcggagattttgtgactggatataaagaaaaaagatggaaaaataaagatcctaaagacagtttccaaaacgttatgtctatagttgaattagacaacacaccaaagaattacctctctaaggaaggtgataacttgtttgtaagtttgttactgaggccaaatgaaatctccgttacttgtccaatactgactcaaaacctttcctgtgtaacaactgatgactgctctggcatgaaggtagaaaagcatattagaaataggcataccatagcattagacacccaggacctttctgcggaaacttcatgcttatttatgaagaagagagaaatagtagataaaaatctctcacatgaacccattctgtgccatcaacatggaatcagaatgtcagataaagttttaagagaggaacaagtgtatacaactaaaatcaatcactgggcttttttcacaaccaatttatctgatgaagatttacagctgggctctgacagacagccctattttggtagctggcctgcaggacctcataagtttatatgtgaacagagaccaaagaaagatagagcatgtaagttggctggtcctgacagcagggggcaatggattcaaatgatcttcacttcggtggcagcatcagaaccaggaaacaatccagaaatattgacagacaaactactgataggaaatgaagatttttcacctccacctgaaactatggattcattcatagaaacaaacctcttcagaagctgcttacctcaaccggatataccaaagaatgccttagaatcaacaaaaaataagaaaaggaggaagaaaaggattttcaatttggtaccaaattttgacttattaggacagagtcgtatcggtgtaaaagaaagggagaaatgtgacctgttaacaaaaaaccatggactaaaaattactttgggagaagaaaaagatagaatttcagaaaggaacagtgaagaggagaataaacaaaaacttatgacctttgatcatcatccattgtggttttaccttgatattatcaaagctacccctttaaatattgatggacagcgttattctcattgcctgtcatttaacagactaaggtgctctgcatctttatacaaaaattatattccttcttttgtgctacataatttatctagtatttggaagccatcttttacaaacaagaaactgtttttgactttcgaatctcagacaagagtaggtaataaactaaatgatgcagggtttatttctccagaaattttacatagtcatcctgatacttcgtgctctttgggagtcacttctgattttcactttttaaatgaaaggtttgatagaaagctgaaaagatgggaagaacctaaggaattaccagctgaggacagccaagacttaacaagcactgactaccgttcccttgagctaccattatcacaagggtttgcctttcaattagtaaagctttttggatctccaggcgttccaatggaatccttgttgcctgatgactatgtggttccccttgactggaagacactaaagatgatctacttgcaatggaagatgtcagtggagaaaagacagaagaagattggttgaaaaatgaaaattccttgaactttgagttctgctgtcttcatggtactgctgaagatcatgatcacggagaaaagtcagagtgctcagtgccaacccaagggattctttccagagacgtacccgttggataccaaaattagtttggataatctgttcaaccattcttgataagttatctgaataataaaaaaactcaacagaggaggtaacaatttgaacattttattgtctaatttgaagatgtatgccatactttgtttgatagaagaaagtaaggcacagaaaacttgagtaccttatttttaaaactgcattaggattaaaaggttagcccctatatccaagtattggtctgagatcccatttctagaattctgaaatccaaaaagctctgaaaatcaatagttatttttccaaatgtattcattgtggtaaaatacaccaatataaaatttaccatcttaaccacttttaagtgtgttataaatacattcatgctaccatcactagcatccatctctggaactcttttcatcttgcaaaactgcaattctatacccattaaacaatgacccatnnc

SEQ ID NO: 353358 - DNA, 2189 bp, Homo sapiens
ctatgattctcgaatcgttatgaatatcaaatgtccatttctattgtaatgaattcagtggaaccatcacacaaaagcacacaaagacctcctcctccacaggggagacagagaattctgcttggtcagaatcgtgatggcattgtgttcagcactgatgactattttcaccatcaagatgggtacagcaaaacaagctatcgatcagggaagatctccagttataatagataacactaatatacaagcttgggaaatgaagccatatgtggaagtggccataggaaaaggatacagagtagagtttcatgaacctgaaacttggtggaaatttgatcctgaagaattagaaaagaggaataaacatggtgtgtctcgaaagaagattgctcagatgttggatcgttatgaatatcaaatgtccatttctattgtaatgaattcagtggaaccatcacacaaaagcacacaaagacctcctcctccacaggggagacagaggtggggaggctctcttggctcacataatcgtgtctgtgtcacaaataatcattaaattagctattttcagctaacacatttgttgttgcacttgaaaaagagttagtgagcctgtcttggagtttaagtagtttcaaataaaaaaaggctacagtgcctcacaaaggatgttcccagcaagttgtttaaattcccagcaagttgttaaagtgtaaataaaaatatatgaaattgtattttaaatgtttttatattctcttgttgtaatactcttggctgttatggaagcacctgagtaatagagtggtgggtaggagctaggatgtttttctacaatcgaattttaaactaatttatctattttatagacactattgaacagttttttaatagttcatatctaaatctaacttttcataaaactttacggtttttccttcactaccttaaatatgcaagaaatactgacttggtatagggtaccttagttttctctattcattagacaggtaaaattatatttcagctgattgatctgtgtgacaaaattatttcttagctataatcagcacatcacttagttcaaacaaaattccccagcaaatgttagatagtaggtatatcagtcacctggggagttttcttcataatatgcatattcatcttgtaatgcatacatagttatcatcctccttctcaacccatctccctaaccccacatgcttgccagttcttgaagggataaagtgattctaataatgttttacttctctctgttcaatttaatgtgatataattctagtataaaaatattttggacagttgcttaacatggtcataagaggatttgtactatagaatatcttctagtactaatttttctgtagagcaaattatatttctctcactggatagtttttagatgtgtttcttcatataaaattaaaaactgagatggaattcatttcagaggtcttgtcattcatcccctgccttcaaaccaagctttacctagactaacctagataattaagcatttctctttgcaacatgaggaaaaaaaacactactacttctcttaataccattgttaccaatgtcttctgaagaatatttcttcaacagttttgatttacttttttgatttactctttttaggggaaaaaaaacccagctaattacaatgctgtcttaaaaattaagcattatgattctttatatgttttacataatattttgtggcctttaagctttctcctaaaccagcacatcttgaatcccatagtatttctttgttttaaaaccttttgctattcctttcaactttagatattctctcacatctttatattactttttaagttgtcaggccaaaaactagattcactgctatcaacaaggtctttgttacattgcctttagtgaaataagaatatgattttatttgtactattcagtgctgttaacatttgaatgaatattacctttatcttgtttaatacgtgtgtttgtatatatttgttcatcttaactacgatgtaagaatatgctaattcatgttttgtgtgtaaatgtatattgtatacatatacacatcttcatctatgttttcatatattcttttatttcagagtaatacttgttggtgtttggacttgtgtttctaagtattttattctgtagattag

SEQ ID NO: 353359 - DNA, 2607 bp, Homo sapiens
gtatttatttttaatgcaacaaacacttacatagcgcttattctaccaggagctcgctgttctacttgcttgcacgtattgactcttttaatgggaaagctcagtgattggtctgtatttccaaaaacaaaacaaaacagcgacctgacactaaacgattttgttcataagtatttttatctgttattggggacctgcgccgcagtaattctgtccttccacagaaaagcatgagcctaaaattacgtcaggtggtctttcgtagaaacgaccggaatgcaaatttgtggtaccaactgtggagttccgttggaaaagtcagctggttgtcttctagaaagctctaagaagcatgcactgagagccgattatacatctattggggggcgccagtttctcaaattcctttttccttcgggggtgaacgccagaggaggtcgctgctttcttttaacgaaagttggtgtttttagataacttccctgctccagatctaggaactaattccggtctacttttgttgccaaattactgcgtttgtcacgccatggattctgggagacctagtctccgtgccgtgaggtttacggagccggtgtgaacgtcggacttcaattcccacaatgcctggcgcaaacgcctagttttggcctgggtaaccgagaggtgaccgccatcttgcgtacggaggtgaggtttgttaccgcgattctgagaggtgggcttttagtccctccagacctcggctttagtgctgtctccgcttttctttcaccttcacagaggttcgtgtcttcctaaaagaaggttttattgggaggtaaaggtcaatgcgtaggggtagagtaagatgtcttatggtgaaattgaaggtaaattcttgggacctagagaagaagtaacgagtgagccacgctgtaaaaaattgaagtcaaccacagagtcgtatgtttttcacaatcatagtaatgctgattttcacagaatccaagagaaaactggaaatgattgggtccctgtgaccatcattgatgtcagaggacatagttatttgcaggagaacaaaatcaaaactacagatttgcatagacctttgcatgatgagatgcctggtaatagaccagatgttattgaatccattgattcacaggttttacaggaagcacgtcctccattagtatccgcagacgatgagatatatagcacaagtaaagcatttataggacccatttacaaaccccctgagaaaaagaaacgtaatgaagggaggaatgaggcacatgttctaaatggtataaatgacagaggaggacaaaaagagaaacagaaatttaactctgaaaaatcagagattgacaatgaattattccagttttacaaagaaattgaagagcttgaaaaggaaaaagatggttttgagaacagttgtaaagaatctgaaccttctcaggaacaatttgttccattttatgagggtcataataatggtctcttaaaacctgatgaagaaaagaaagatcttagtaataaagctatgccatcacattgtgattatcagcagaacttggggaatgagccagacaaatatccctgtaatggacaagtaatacctacattttgtgacacttcatttacttctttcaggcctgaatggcagtcagtatatccttttatagtgccctatggtccccctcttcccagtttgaactatcatttaaacattcagagattcagtggtccaccaaatccaccatcaaatattttccaagcccaagatgactctcagatacaaaatggatattatgtaaataattgtcatgttaactggaattgcatgacttttgatcagaacaatgaatatactgactgtagtgagaataggagtagtgttcatccctctggaaatggctgcagtatgcaagatcgatatgtgagtaatggtttctgtgaagtcagagaaagatgctggaaagatcattgtatggacaagcataatggaacagacaggtttgtgaaccagcagtttcaagaggaaaagttaaataaattgcagaagttacttattcttttaagaggtctgcctggttctgggaaaacaacattgtctcgaattctgcttggtcagaatcgtgatggcattgtgttcagcactgatgactattttcaccatcaagatgggtacaggtataatgttaatcaacttggtgatgcccatgactggaaccagaacagagcaaaacaagctatcgatcagggaagatctccagttataatagataacactaatatacaagcttgggaaatgaagccatatgtggaagtggccataggaaaaggatacagagtagagtttcatgaacctgaaacttggtggaaatttgatcctgaagaattagaaaagaggaataaacatggtgtgtctcgaaagaagattgctcagatgttggatcgttatgaatatcaaatgtccatttctattgtaatgaattcagtggaaccatcacacaaaagcacacaaagacctcctcctccacaggggagacagagtattctgattgcatcagtatcgtcatggaagggttttcaagacatgaacgacgtattaca

SEQ ID NO: 353360 - DNA, 2647 bp, Homo sapiens
  misc_feature (2645)..(2646): n is a, c, g, or t
atcaaattcacacataacaatattaacctcaaatgtaaatgggctaaatgctccaattaaaagacacagactggcaaattggataaagagtcaagacccatcagtatgctgaattcagtggaaccatcacacaaaagcacacaaagacctcctcctccacaggggagacagagtgactgaagaaatatcaaatgtttcctagtaagacagcaactcagagaaagagttttgaagaaaactgggcataggctcagcaaaaccaaacagaagaggaacagaaaaagaaacaaaaagcagaacagtcagaatagaatcatggaggaaaactcattagaattcttaagtgatcttacaccgggagatcaggacccatctcagagtgaagaggaagacattgaaaagaccagaagagaatcagaatatcccttcattgatggtctacaaaatgaagtcggagattttgtgactggatataaagaaaaaagatggaaaaataaagatcctaaagacagtttccaaaacgttatgtctatagttgaattagacaacacaccaaagaattacctctctaaggaaggtgataacttgtttgtaagtttgttactgaggccaaatgaaatctccgttacttgtccaatactgactcaaaacctttcctgtgtaacaactgatgactgctctggcatgaaggtagaaaagcatattagaaataggcataccatagcattagacacccaggacctttctgcggaaacttcatgcttatttatgaagaagagagaaatagtagataaaaatctctcacatgaacccattctgtgccatcaacatggaatcagaatgtcagataaagttttaagagaggaacaagtgtatacaactaaaatcaatcactgggcttttttcacaaccaatttatctgatgaagatttacagctgggctctgacagacagccctattttggtagctggcctgcaggacctcataagtttatatgtgaacagagaccaaagaaagatagagcatgtaagttggctggtcctgacagcagggggcaatggattcaaatgatcttcacttcggtggcagcatcagaaccaggaaacaatccagaaatattgacagacaaactactgataggaaatgaagatttttcacctccacctgaaactatggattcattcatagaaacaaacctcttcagaagctgcttacctcaaccggatataccaaagaatgccttagaatcaacaaaaaataagaaaaggaggaagaaaaggattttcaatttggtaccaaattttgacttattaggacagagtcgtatcggtgtaaaagaaagggagaaatgtgacctgttaacaaaaaaccatggactaaaaattactttgggagaagaaaaagatagaatttcagaaaggaacagtgaagaggagaataaacaaaaacttatgacctttgatcatcatccattgtggttttaccttgatattatcaaagctacccctttaaatattgatggacagcgttattctcattgcctgtcatttaacagactaaggtgctctgcatctttatacaaaaattatattccttcttttgtgctacataatttatctagtatttggaagccatcttttacaaacaagaaactgtttttgactttcgaatctcagacaagagtaggtaataaactaaatgatgcagggtttatttctccagaaattttacatagtcatcctgatacttcgtgctctttgggagtcacttctgattttcactttttaaatgaaaggtttgatagaaagctgaaaagatgggaagaacctaaggaattaccagctgaggacagccaagacttaacaagcactgactaccgttcccttgagctaccattatcacaagggtttgcctttcaattagtaaagctttttggatctccaggcgttccaatggaatccttgttgcctgatgactatgtggttccccttgactggaagacactaaagatgatctacttgcaatggaagatgtcagtggagaaaagacagaagaagattggttgaaaaatgaaaattccttgaactttgagttctgctgtcttcatggtactgctgaagatcatgatcacggagaaaagtcagagtgctcagtgccaacccaagggattctttccagagacgtacccgttggataccaaaattagtttggataatctgttcaaccattcttgataagttatctgaataataaaaaaactcaacagaggaggtaacaatttgaacattttattgtctaatttgaagatgtatgccatactttgtttgatagaagaaagtaaggcacagaaaacttgagtaccttatttttaaaactgcattaggattaaaaggttagcccctatatccaagtattggtctgagatcccatttctagaattctgaaatccaaaaagctctgaaaatcaatagttatttttccaaatgtattcattgtggtaaaatacaccaatataaaatttaccatcttaaccacttttaagtgtgttataaatacattcatgctaccatcactagcatccatctctggaactcttttcatcttgcaaaactgcaattctatacccattaaacaatgacccatnnc

SEQ ID NO: 353361 - DNA, 3549 bp, Homo sapiens
cctgtatgttttgtcatgtccaggtcaagttacagaaaactatgagggtaaaataagttgtcaggagttctttgagggtccagaataaattttaaaccactttttagtgtcatataacctcacatacagaaaagtacataaatataaatatataacttaacaaagttcttacaagatcaacacacgtttagctatcacccatgtcatgggagcattgccagcatctcagaagctctttgcattcctcttcccagtcacagttaccttttattctctaaaggtagccattgttttgcctgggtaatcataatctctttttttaaagttttgccataatatctttggccttaatatcatagtttgggggcaggggcaaggttaaaaaaataccatagtttagttttgccttttatcaaagctttatattatgtataatacatatatatatggaatcctacagtttatatacattgtgtctaatttatttcactcaacattatgtttgtaagagatgttcaaattgtgtctgtaataataatttggtgttgcccattttaaaatgtgatagcaactgtcataaataacttctaaaaagtgatattttacttcaatttttgcaagtcctagaagtccactcaatctttctgtaattcttaaaacagtatttcataatctttaattttgttattaacaaggggatatagtcagcaggctcagtgaataggtagttctatgtgaaaaggatgtaattaacatttttctgtgatatatggaatctttatacctttttaaaatattgataaaaacatttgagtttttaataagtctttttacataaaatgtggacagatgaaatatatattgtttatttacaaaatattatttagaatttgtgtgctttttctctaaaacagttaatctctaagcctgtacattctgcaacaaagatttacaatccttttcttttttgttaggaggaataaacatggtgtgtctcgaaagaagattgctcagatgttggatcgttatgaatatcaaatgtccatttctattgtaatgaattcagtggaaccatcacacaaaagcacacaaagacctcctcctccacaggggagacagagtgactgaagaaatatcaaatgtttcctagtaagacagcaactcaggactctaggatggaagaaggtgtctgaccgtaaattacacctgcagtgcaaccagcagactaatggggatgaggttctggtacaagatgatgaacaccagtatgtcagacaatgacttgggagctggaatcaaggacatgaccaagagcagcaagaacaaaagggagactgacacattgatcactttctcaacctttgatctcttgagaggatggttcacatttgagtaaagacaggggagtttgttttcagaatgacatactagtctgcaggatgaatttcataactgacattgcaccttggactgcaactaggactttcactggaatcagagaaagagttttgaagaaaactgggcataggctcagcaaaaccaaacagaagaggaacagaaaaagaaacaaaaagcagaacagtcagaatagaatcatggaggaaaactcattagaattcttaagtgatcttacaccgggagatcaggacccatctcagagtgaagaggaagacattgaaaagaccagaagagaatcagaatatcccttcattgatggtctacaaaatgaagtcggagattttgtgactggatataaagaaaaaagatggaaaaataaagatcctaaagacagtttccaaaacgttatgtctatagttgaattagacaacacaccaaagaattacctctctaaggaaggtgataacttgtttgtaagtttgttactgaggccaaatgaaatctccgttacttgtccaatactgactcaaaacctttcctgtgtaacaactgatgactgctctggcatgaaggtagaaaagcatattagaaataggcataccatagcattagacacccaggacctttctgcggaaacttcatgcttatttatgaagaagagagaaatagtagataaaaatctctcacatgaacccattctgtgccatcaacatggaatcagaatgtcagataaagttttaagagaggaacaagtgtatacaactaaaatcaatcactgggcttttttcacaaccaatttatctgatgaagatttacagctgggctctgacagacagccctattttggtagctggcctgcaggacctcataagtttatatgtgaacagagaccaaagaaagatagagcatgtaagttggctggtcctgacagcagggggcaatggattcaaatgatcttcacttcggtggcagcatcagaaccaggaaacaatccagaaatattgacagacaaactactgataggaaatgaagatttttcacctccacctgaaactatggattcattcatagaaacaaacctcttcagaagctgcttacctcaaccggatataccaaagaatgccttagaatcaacaaaaaataagaaaaggaggaagaaaaggattttcaatttggtaccaaattttgacttattaggacagagtcgtatcggtgtaaaagaaagggagaaatgtgacctgttaacaaaaaaccatggactaaaaattactttgggagaagaaaaagatagaatttcagaaaggaacagtgaagaggagaataaacaaaaacttatgacctttgatcatcatccattgtggttttaccttgatattatcaaagctacccctttaaatattgatggacagcgttattctcattgcctgtcatttaacagactaaggtgctctgcatctttatacaaaaattatattccttcttttgtgctacataatttatctagtatttggaagccatcttttacaaacaagaaactgtttttgactttcgaatctcagacaagagtaggtaataaactaaatgatgcagggtttatttctccagaaattttacatagtcatcctgatacttcgtgctctttgggagtcacttctgattttcactttttaaatgaaaggtttgatagaaagctgaaaagatgggaagaacctaaggaattaccagctgaggacagccaagacttaacaagcactgactaccgttcccttgagctaccattatcacaagggtttgcctttcaattagtaaagctttttggatctccaggcgttccaatggaatccttgttgcctgatgactatgtggttccccttgactggaagacactaaagatgatctacttgcaatggaagatgtcagtggagaaaagacagaagaagattggttgaaaaatgaaaattccttgaactttgagttctgctgtcttcatggtactgctgaagatcatgatcacggagaaaagtcagagtgctcagtgccaacccaagggattctttccagagacgtacccgttggataccaaaattagtttggataatctgttcaaccattcttgataagttatctgaataataaaaaaactcaacagag

SEQ ID NO: 353362 - DNA, 3106 bp, Homo sapiens
atttctatgcagagtgttgacctagattaactcttttcttcacaagtgtaccttcaaagtcatctttaaaattaaggggtcatgaatgtattcaccaggattgagcccttgctgctgttttagtaagtattgttatctcgaccccacaaattacaccaattgaccttttccctctcctcccctcccctgccctgtgcccaagccactgcatgaggggcctgagcgaggggctccgaccggagcaagccctgacactcccccatgccagacctgtgcagatcctgacgctcgcccgccagccccgcctcgtcccaggccccaggacttctgggtcagatgaccgacgtgggaatctggtcggtgtgccatatcgccaggcatctccagacagctgaggctcagagagcacaggcctggggccgtcctatctggtggatgggtttctgagcaggtggacatgctgggcctttccagtacaagagcttgattaaagaaaactcacagggcgggaatttattagagatactagcagaggcgttcctttgagatacccgtaccttatatgtcatacggagtcttcactcacacacacaccctcatctttccttaggggtgccaacagttcctgtgtgtaaccagtatataccagggtaactggacctggaccccagggagggggtggtaactgaggccttctttaaaacgtgtggtagcattgaaggcttgcgggagttgtgggtctttcctaggaatggtacattccccaaggtcattagttgcaaatccatcacaagttctttttttcctttcttttcttttttttttttttttgagacagagttttgctcttgttgcccaggctggagtgcagtggcgcaatcttggctcactgcaacctccacctcccgggttcaagcaattctcctgcctcagcctcctgagtagctgggattacaggcatgcgccaccatgcccggcttattttgtatttttagtagacatggggtttccccatgttggtcagactggtctcgaactcctgacctcaggtgatccacctgcctcggcctcccaaagtgctgggattacaggtgggagccaccgcgcccagcccacaagttctaatccatatggaattgttttctttttcctccccgtgaagaccttcagtgggatgagccaagaggctggggactgccgtgagacttagaagggacaccccagagcctggtgctgtctctagctcctcacacagactctcctcctctcctccgggactcactgcagggaatggtttctggggaggcgtgatgaagaggccacttcaggatacattgagtttgaagtgcccttgagacctccagggggtgacatagaggatcttcagggtcagaggaaaggtggctttaggcatagttagcatgaggatggtgaatcaaaatgacaggtgtggggatggacatgggtctgtggacatggatgggtgaggagtcagggccgacaggtgtggacgtgggtggatgagggggcagggctgacaggtgtggacgtggatgggtgagggcagggctgacaggtgtggacgtgggtgggtgagggcagggctgacagatgtggacgtgggtgggtgagggcagggctgacaggtgtggacgtgggtgggtgagggcagggctgacaggtgtggacgtgggtgggtgagggcagggctgacaggtgtggacgtgggtgggtgagggggcagggctgacggatgtgggtgggctaaggggacagcgctgacaggtgtgggcctggtgggcagaggggacagtgctggtggagccccgtgttaacagccaggtggaaaggggcatgtgtgcctgcagctgggaaaggcggaaacccaggagtggagagatttgagaagaggcaccgtaggactgcatatccccggggggtccaggacaggaaagctgaaatgctttttgagtgggggcgtgggtgggtcgtgggtctgtggtggtgtgagccgctgctcctcagagtagtcctggcttccttgttgtgtagcagtaggaacacctttgcattgtcccaaacggaagtagcccaatttgcacactcaatcatatcgtgccctaggacatctcggagagctgatggggctgaagccagcatggtggggcaggagaggtggggtggggggctggaggggaagaggagggggacagagctgcgcccacacaggcaggggctgtggggtaggggctgagttacaaatgggctgagaaaaggaccctcatatagggtgctggaaaacaggagaaagggaaggaaagtgaagttatccgaagtttgttaagcacctttttactgacctttttggggtttttttggtgtagagggtgtgtagaaatagaaaagtaaactccagttctgttggatttagcgcgactggtgcccaggctgcccagctcacacaagctcttctctgggaaaaggagagcttgtcctttgtttgtttgtttgttttaactgatggtttcgttttgtttttttttaagatggagtctcactctgtcgccaggctggagtgcagtggcgcaatctcggctcactgcaacctccgactccctggttcaagcgattctcctgcctcagcctcctgagtagctgggattacaggcatgtggcaccgtgcccagctaatttttgtatttttagtagagacagggtttcaccaggttggccaggatggtctcgatctcctgacctcgtgatccgcccgcatcggcctccgaaagtgctgggattacaggcgtgagccaccgtgcccggccaatgtttttagaacagttataggtttacagaaaaattggatggagattacagacagttcactcccttccccctcaactctcccaatcattaacatcttctatagtgtgttacatttgttacaattaatgaactgatactgatactttattattaaataaagtttagcattaacattagggtttactcctgtgttgtgcggctttggacaaatgcaggagagcaagtcccacccagtgtgctctggagcagccgctggccctaaaccccctgagccatacctccc

SEQ ID NO: 353363 - DNA, 1586 bp, Homo sapiens
atttctatgcagagtgttgacctagattaactcttttcttcacaagtgtaccttcaaagtcatctttaaaattaaggggtcatgaatgtattcaccaggattgagcccttgctgctgttttagtaagtattgttatctcgaccccacaaattacaccaattgaccttttccctctcctcccctcccctgccctgtgcccaagccactgcatgaggggcctgagcgaggggctccgaccggagcaagccctgacactcccccatgccagacctgtgcagatcctgacgctcgcccgccagccccgcctcgtcccaggccccaggacttctgggtcagatgaccgacgtgggaatctggtcggtgtgccatatcgccaggcatctccagacagctgaggctcagagagcacaggcctggggccgtcctatctggtggatgggtttctgagcaggtggacatgctgggcctttccagtacaagagcttgattaaagaaaactcacagggcgggaatttattagagatactagcagaggcgttcctttgagatacccgtaccttatatgtcatacggagtcttcactcacacacacaccctcatctttccttaggggtgccaacagttcctgtgtgtaaccagtatataccagggtaactggacctggaccccagggagggggtggtaactgaggccttctttaaaacgtgtggtagcattgaaggcttgcgggagttgtgggtctttcctaggaatggtacattccccaaggtcattagttgcaaatccatcacaagttctttttttcctttcttttcttttttttttttttttgagacagagttttgctcttgttgcccaggctggagtgcagtggcgcaatcttggctcactgcaacctccacctcccgggttcaagcaattctcctgcctcagcctcctgagtagctgggattacaggcatgcgccaccatgcccggcttattttgtatttttagtagacatggggtttccccatgttggtcagactggtctcgaactcctgacctcaggtgatccacctgcctcggcctcccaaagtgctgggattacaggtgggagccaccgcgcccagcccacaagttctaatccatatggaattgttttctttttcctccccgtgaagaccttcagtgggatgagccaagaggctggggactgccgtgagacttagaagggacaccccagagcctggtgctgtctctagctcctcacacagactctcctcctctcctccgggactcactgcagggaatggtttctggggaggcgtgatgaagaggccacttcaggatacattgagtttgaagtgcccttgagacctccagggggtgacatagaggatcttcagggtcagaggaaaggtggctttaggcatagttagcatgaggatggtgaatcaaaatgacaggtgtggggatggacatgggtctgtggacatggatgggtgaggagtcagggccgacaggtgtggacgtgggtggatgagggggcagggactgcttcagtttcgtcgacgcggccgcgaatttagtagtagtaggggccgc

SEQ ID NO: 353364 - DNA, 692 bp, Homo sapiens
aaggtatctggcttcccctttgccttctgttataattgtaaatttcctgaggcctccccagccatgttgaactggagctgactgtggaggaagggctgcaacaaaccaggggcctggattgtgacatacttacagccacgaagccattgagtaaagataacagtttcttcaaggaagaatacggagtgtggatttcagccatgctgaacagactggggcaccctgaacatttaagttaacatcttcctgaacctctgggctactgtttcccaagatgatagggatctgaggaaggggcgccaatgctgacttgctctgcccctctgtgtcctggctgcctgatggttgtccaaggcggcccagcagctgccccctgccctggtcataagccttttatcacatcacaattgggttctggagcaaggctcatggtccagggaaatcaggtgccccaaactgccccctgttggctcctcatccttcaaacaggtcacagcagggaaagagaacaggcatggtatgctaccctggtaccctccagatgccaccaggaccctgtgggcatagtgcccagagctaaccacttgcacagttgacatctcctagtagactgggggatccaagcgggggaggggggaacttgggctgtcctattaacagctgtgacccctgccaggcgcagtggctcacac

SEQ ID NO: 353365 - DNA, 654 bp, Homo sapiens
cctaatgctaaatgacgagttaatgggtgcagcacatcaacatggcacatgtatacatatataacaaacctgcacaatgtgcacatgtaccctaaaacttaaagtataataataataaaattaaaaaaagataactgtgaaagacaaattataaattttttgtcagttttatgatgtaaataaaagtaaaatgtatgaaagcaaggatagcaggttgatatgaaagtataccattgtaaaatttttataaataaaataatagtatttaaggtagactgtgttaatttaagatgtatattataaactctagcacaatctctaaaacaatacaaagatgtatagtcagtaaatgcaataggggacataaaatgaaacccaaaatgtaatcaataaattctgaatgacaagagaaggagggggggccctgaaaacaaatttcaagggaaattaggaaattatatgaatgggattaaaaataaagacacagcatagtgaaatttgcgaaatgcagctaaagttgtgtttagagggaaatttttagctttagttgcttacattagaaaagaaaggaggtttcattgataatctaaacttccaccttaagaagctgcaaaaagagtgaattagacccaaagtaagtaaagggaagaaaat

SEQ ID NO: 353366 - DNA, 1303 bp, Homo sapiens
ctccacttctccccgcccaccctgccggaggctgctcctgattggcttcccggccgcggggctcaggttacattcgcgagcggagccgagcgcgggagaccggacccgagagcagagctgctgtttcggcgcgggtcggctggcggccgactgccccagagcccccacccggcaccacacagaccccacccccgccctgcgccagccttcgtccccgcagaggaccccccgacaccagcatggactgctgcaccgagaacgcctgctccaagccggacgacgacattctagacatcccgctggacgatcccggcgccaacgcggccgccgccaaaatccaggcgagttttcggggccacatggcgcggaagaagataaagagcggagagcgcggccggaagggcccgggccctggggggcctggcggagctggggtggcccggggaggcgcgggcggcggccccagcggagactaggccagaactgagcattttcaaagttcccgaggagagatggatgccgcgtccccttcgcagcgacgagacttccctgccgtgtttgtgaccccctcctgcccagcaacctgccagctacaggagccccctgcgtcccagagactccctcacccaggcaggctccgtcgcggagtcgctgagtccgtgcccttttagttagttctgcagtctagtatggtccccatttgcccttccactccaccccaccctaaaccatgcgctcccaatcttccttcttttgcttctcgcccacctcttcccgcacccagcatgcagctctgcctccgcagcctcagtgcgctttcctgcgcgcactgcggagggcgccctaagcgtcacccaagcacactcacttaaagaaaaaacgagttctttcgttctgtgcgcagctaaaaggggcgccctacatctccgtgccactcccgccccagcctagccccaagactttggatccggggcgagatgaagggaagagggttgttttggtttcggacgacccttgctctgaccggaagagaagtccctatcccacacctgcctgtcacgttccctcccctttccccagcgcactgttgagggcagcctctccagctctcttgtttatgcaaacgccgagcgcctgggaggctcggtaggaggagtcttccacggccccgccccgcccctgtcggtcccgccctcccccccgccgggctcctggggctgtggccgaaaggtttctgatctccgtgtgtgcatgtgactgtgctgggttggaatgtgaacaataaagaggaatgtccaagtgt

SEQ ID NO: 353367 - DNA, 540 bp, Homo sapiens
catctccctttcctctgtcctccatccttctcccaggatggtgaagggggacctggtacccagtgatccccaccccgtcgggtggagcgctccacccgacggggtggcccggggaggcgcgggcggcggccccagcggagactaggccagaactgagcattttcaaagttcccgaggagagatggatgccgcgtccccttcgcagcgacgagacttccctgccgtgtttgtgaccccctcctgcccagcaacctgccagctacaggagccccctgcgtcccagagactccctcacccaggcaggctccgtcgcggagtcgctgagtccgtgcccttttagttagttctgcagtctagtatggtccccatttgcccttccactccaccccaccccgtcgggtagagcggtaagccctgaagtcggtcagggtgacctctgcgttctctgggcagacgtcgatccgatcgatgacctggtcctggtcaaagtcagactcacagatgtctcccaccccgtcgggtggagcggggatcctctag

SEQ ID NO: 353368 - DNA, 438 bp, Homo sapiens
  misc_feature (122)..(122): n is a, c, g, or t
cccgactagcccgacaggagcctccctcccgcctcagtgctctgagccaagctcaccagatgcagaggacagagaaggtgctcttgccttgtaggacaaagccagtctgatctaagcacccncctgtcgggctagtcggggctgtcgggctagtcggggccccgactagcccgacagactttggatccggggcgagatgaagggaagagggttgttttggtttcggacgacccttgctctgaccggaagagaagtccctatcccacacctgcctgtcacgttccctcccctttccccagcgcactgttgagggcagcctctccagctctcttgtttatgcaaacgccgagcgcctgggaggctcggtaggaggagtcttccacggccccgccccgcccctgtcgggctagtcgggggggtaccgagctcgcaattcgt

SEQ ID NO: 353369 - DNA, 437 bp, Homo sapiens
  misc_feature (433)..(433): n is a, c, g, or t
ccaactctcccaggtcaagcagcagccccgcagacaagcaggcagagtcttcatcatgcctccaattctggagtctttgcacgcctcggtcagcgggcaaccctgtgcccgcgcgctcctccctggcgacgccgccactgtcgggctagtcggggccccgactagcccgacagactttggatccggggcgagatgaagggaagagggttgttttggtttcggacgacccttgctctgaccggaagagaagtccctatcccacacctgcctgtcacgttccctcccctttccccagcgcactgttgagggcagcctctccagctctcttgtttatgcaaacgccgagcgcctgggaggctcggtaggaggagtcttccacggccccgccccgcccctgtcggtgtcggctagtcggggggatcctctaatcacncacc

SEQ ID NO: 353370 - DNA, 972 bp, Homo sapiens
catctccctttcctctgtcctccatccttctcccaggatggtgaagggggacctggtacccagtgatccccaccccgtcgggtggagcgctccacccgacggggtggcccggggaggcgcgggcggcggccccagcggagactaggccagaactgagcattttcaaagttcccgaggagagatggatgccgcgtccccttcgcagcgacgagacttccctgccgtgtttgtgaccccctcctgcccagcaacctgccagctacaggagccccctgcgtcccagagactccctcacccaggcaggctccgtcgcggagtcgctgagtccgtgcccttttagttagttctgcagtctagtatggtccccatttgcccttccactccaccccaccctaaaccatgcgctcccaatcttccttcttttgcttctcgcccacctcttcccgcacccagcatgcagctctgcctccgcagcctcagtgcgctttcctgcgcgcactgcggagggcgccctaagcgtcacccaagcacactcacttaaagaaaaaacgagttctttcgttctgtgcgcagctaaaaggggcgccctacatctccgtgccactcccgccccagcctagccccaagactttggatccggggcgagatgaagggaagagggttgttttggtttcggacgacccttgctctgaccggaagagaagtccctatcccacacctgcctgtcacgttccctcccctttccccagcgcactgttgagggcagcctctccagctctcttgtttatgcaaacgccgagcgcctgggaggctcggtaggaggagtcttccacggccccgccccgcccctgtcggtcccgccctcccccccgccgggctcctggggctgtggccgaaaggtttctgatctccgtgtgtgcatgtgactgtgctgggttggaatgtgaacaataaagaggaatgtccaagtgt

SEQ ID NO: 353371 - DNA, 875 bp, Homo sapiens
ctggggcgcgactgggtgccgggagccggccgcgccccagcgagactggccagaactgagcattttcaaagttcccgaggagagatggatgccgcgtccccttcgcagcgacgagacttccctgccgtgtttgtgaccccctcctgcccagcaacctgccagctacaggagccccctgcgtcccagagactccctcacccaggcaggctccgtcgcggagtcgctgagtccgtgcccttttagttagttctgcagtctagtatggtccccatttgcccttccactccaccccaccctaaaccatgcgctcccaatcttccttcttttgcttctcgcccacctcttcccgcacccagcatgcagctctgcctccgcagcctcagtgcgctttcctgcgcgcactgcggagggcgccctaagcgtcacccaagcacactcacttaaagaaaaaacgagttctttcgttctgtgcgcagctaaaaggggcgccctacatctccgtgccactcccgccccagcctagccccaagactttggatccggggcgagatgaagggaagagggttgttttggtttcggacgacccttgctctgaccggaagagaagtccctatcccacacctgcctgtcacgttccctcccctttccccagcgcactgttgagggcagcctctccagctctcttgtttatgcaaacgccgagcgcctgggaggctcggtaggaggagtcttccacggccccgccccgcccctgtcggtcccgccctcccccccgccgggctcctggggctgtggccgaaaggtttctgatctccgtgtgtgcatgtgactgtgctgggttggaatgtgaacaataaagaggaatgtccaagtgt

SEQ ID NO: 353372 - DNA, 919 bp, Homo sapiens
ttggttggacgaccgtggctctgacggagagaagtccctatcccacacctggcctgtcacgttccctcccctttccccaggcggagtactaggccagaactgagcattttcaaagttcccgaggagagatggatgccgcgtccccttcgcagcgacgagacttccctgccgtgtttgtgaccccctcctgcccagcaacctgccagctacaggagccccctgcgtcccagagactccctcacccaggcaggctccgtcgcggagtcgctgagtccgtgcccttttagttagttctgcagtctagtatggtccccatttgcccttccactccaccccaccctaaaccatgcgctcccaatcttccttcttttgcttctcgcccacctcttcccgcacccagcatgcagctctgcctccgcagcctcagtgcgctttcctgcgcgcactgcggagggcgccctaagcgtcacccaagcacactcacttaaagaaaaaacgagttctttcgttctgtgcgcagctaaaaggggcgccctacatctccgtgccactcccgccccagcctagccccaagactttggatccggggcgagatgaagggaagagggttgttttggtttcggacgacccttgctctgaccggaagagaagtccctatcccacacctgcctgtcacgttccctcccctttccccagcgcactgttgagggcagcctctccagctctcttgtttatgcaaacgccgagcgcctgggaggctcggtaggaggagtcttccacggccccgccccgcccctgtcggtcccgccctcccccccgccgggctcctggggctgtggccgaaaggtttctgatctccgtgtgtgcatgtgactgtgctgggttggaatgtgaacaataaagaggaatgtccaagtgt

SEQ ID NO: 353373 - DNA, 1370 bp, Homo sapiens
ctccacttctccccgcccaccctgccggaggctgctcctgattggcttcccggccgcggggctcaggttacattcgcgagcggagccgagcgcgggagaccggacccgagagcagagctgctgtttcggcgcgggtcggctggcggccgactgccccagagcccccacccggcaccacacagaccccacccccgccctgcgccagccttcgtccccgcagaggaccccccgacaccagcatggactgctgcaccgagaacgcctgctccaagccggacgacgacattctagacatcccgctggacgatcccggcgccaacgcggccgccgccaaaatccaggcgagttttcggggccacatggcgcggaagaagataaagagcggagagcgcggccggaagggcccgggccctggggggcctggcggagctggggtggcccggggaggcgcgggcggcggccccagcggagactaggccagaactgagcattttcaaagttcccgaggagagatggatgccgcgtccccttcgcagcgacgagacttccctgccgtgtttgtgaccccctcctgcccagcaacctgccagctacaggagccccctgcgtcccagagactccctcacccaggcaggctccgtcgcggagtcgctgagtccgtgcccttttagttagttctgcagtctagtatggtccccatttgcccttccactccaccccaccctaaaccatgcgctcccaatcttccttcttttgcttctcgcccacctcttcccgcacccagcatgcagctctgcctccgcagcctcagtgcgctttcctgcgcgcactgcggagggcgccctaagcgtcacccaagcacactcacttaaagaaaaaacgagttctttcgttctgtgcgcagctaaaaggggcgccctacatctccgtgccactcccgccccagcctagccccaagactttggatccggggcgagatgaagggaagagggttgttttggtttcggacgacccttgctctgaccggaagagaagtccctatcccacacctgcctgtcacgttccctcccctttccccagcgcactgttgagggcagcctctccagctctcttgtttatgcaaacgccgagcgcctgggaggctcggtaggaggagtcttccacggccccgccccgcccctgtcggagtccgctgcattaatgcagcggactcggcatagtggggtggctgtgggctcccagcctggcccctgggaaccgtgggagcacagggacaagcacatggctatggaatgcagggtgacccaaggacaagcgagttgcgggatctctactgtgaccatgcagaatgatcgcagtccgctgcaatt

SEQ ID NO: 353374 - DNA, 1219 bp, Homo sapiens
ctccacttctccccgcccaccctgccggaggctgctcctgattggcttcccggccgcggggctcaggttacattcgcgagcggagccgagcgcgggagaccggacccgagagcagagctgctgtttcggcgcgggtcggctggcggccgactgccccagagcccccacccggcaccacacagaccccacccccgccctgcgccagccttcgtccccgcagaggaccccccgacaccagcatggactgctgcaccgagaacgcctgctccaagccggacgacgacattctagacatcccgctggacgatcccggcgccaacgcggccgccgccaaaatccaggcgagttttcggggccacatggcgcggaagaagataaagagcggagagcgcggccggaagggcccgggccctggggggcctggcggagctggggtggcccggggaggcgcgggcggcggccccagcggagactaggccagaactgagcattttcaaagttcccgaggagagatggatgccgcgtccccttcgcagcgacgagacttccctgccgtgtttgtgaccccctcctgcccagcaacctgccagctacaggagccccctgcgtcccagagactccctcacccaggcaggctccgtcgcggagtcgctgagtccgtgcccttttagttagttctgcagtctagtatggtccccatttgcccttccactccaccccaccctaaaccatgcgctcccaatcttccttcttttgcttctcgcccacctcttcccgcacccagcatgcagctctgcctccgcagcctcagtgcgctttcctgcgcgcactgcggagggcgccctaagcgtcacccaagcacactcacttaaagaaaaaacgagttctttcgttctgtgcgcagctaaaaggggcgccctacatctccgtgccactcccgccccagcctagccccaagactttggatccggggcgagatgaagggaagagggttgttttggtttcggacgacccttgctctgaccggaagagaagtccctatcccacacctgcctgtcacgttccctcccctttccccagcgcactgttgagggcagcctctccagctctcttgtttatgcaaacgccgagcgcctgggaggctcggtaggaggagtcttccacggccccgccccgcccctgtcgggctagtcgggggggtaccgagctcgcaattcgt

SEQ ID NO: 353375 - DNA, 1090 bp, Homo sapiens
  misc_feature (1086)..(1086): n is a, c, g, or t
ctccacttctccccgcccaccctgccggaggctgctcctgattggcttcccggccgcggggctcaggttacattcgcgagcggagccgagcgcgggagaccggacccgagagcagagctgctgtttcggcgcgggtcggctggcggccgactgccccagagcccccacccggcaccacacagaccccacccccgccctgcgccagccttcgtccccgcagaggaccccccgacaccagcatggactgctgcaccgagaacgcctgctccaagccggacgacgacattctagacatcccgctggacgatcccggcgccaacgcggccgccgccaaaatccaggcgagttttcggggccacatggcgcggaagaagataaagagcggagagcgcggccggaagggcccgggccctggggggcctggcggagctggggtggcccggggaggcgcgggcggcggccccagcggagactaggccagaactgagcattttcaaagttcccgaggagagatggatgccgcgtccccttcgcagcgacgagacttccctgccgtgtttgtgaccccctcctgcccagcaacctgccagctacaggagccccctgcgtcccagagactccctcacccaggcaggctccgtcgcggagtcgctgagtccgtgcccttttagttagttctgcagtctagtatggtccccatttgcccttccactccaccccaccctaaaccatgcgctcccaatcttccttcttttgcttctcgcccacctcttcccgcacccagcatgcagctctgcctccgcagcctcagtgcgctttcctgcgcgcactgcggagggcgccctaagcgtcacccaagcacactcacttaaagaaaaaacgagttctttcgttctgtgcgcagctaaaaggggcgccctacatctccgtgccactcccgccccagcctagccccaagactttggatccggggcgagatgaagggaagagggttgttttggtttcggacgacccttgctctgaccggaagagaagtccctatcccacacctgcctgtcggctagtcggggggatcctctaatcacncacc

SEQ ID NO: 353376 - DNA, 1125 bp, Homo sapiens
ctccacttctccccgcccaccctgccggaggctgctcctgattggcttcccggccgcggggctcaggttacattcgcgagcggagccgagcgcgggagaccggacccgagagcagagctgctgtttcggcgcgggtcggctggcggccgactgccccagagcccccacccggcaccacacagaccccacccccgccctgcgccagccttcgtccccgcagaggaccccccgacaccagcatggactgctgcaccgagaacgcctgctccaagccggacgacgacattctagacatcccgctggacgatcccggcgccaacgcggccgccgccaaaatccaggcgagttttcggggccacatggcgcggaagaagataaagagcggagagcgcggccggaagggcccgggccctggggggcctggcggagctggggtggcccggggaggcgcgggcggcggccccagcggagactaggccagaactgagcattttcaaagttcccgaggagagatggatgccgcgtccccttcgcagcgacgagacttccctgccgtgtttgtgaccccctcctgcccagcaacctgccagctacaggagccccctgcgtcccagagactccctcacccaggcaggctccgtcgcggagtcgctgagtccgtgcccttttagttagttctgcagtctagtatggtccccatttgcccttccactccaccccaccctaaaccatgcgctcccaatcttccttcttttgcttctcgcccacctcttcccgcacccagcatgcagctctgcctccgcagcctcagtgcgctttcctgcgcgcactgcggagggcgccctaagcgtcacccaagcacactcacttaaagaaaaaacgagttctttcgttctgtgcgcagctaaaaggggcgccctacatctccgtgccactcccgccccagcctagccccaagactttggatccggggcgagatgaagggaagagggttgttttggtttcggacgacccttgctctgaccggaagagaagtccctatcccacacctgccgagtccgctgcattaatgcagcggactcggcagcccaggatggtgatagcaggcagcagcttcccgtcctt

SEQ ID NO: 353377 - DNA, 844 bp, Homo sapiens
ctccacttctccccgcccaccctgccggaggctgctcctgattggcttcccggccgcggggctcaggttacattcgcgagcggagccgagcgcgggagaccggacccgagagcagagctgctgtttcggcgcgggtcggctggcggccgactgccccagagcccccacccggcaccacacagaccccacccccgccctgcgccagccttcgtccccgcagaggaccccccgacaccagcatggactgctgcaccgagaacgcctgctccaagccggacgacgacattctagacatcccgctggacgatcccggcgccaacgcggccgccgccaaaatccaggcgagttttcggggccacatggcgcggaagaagataaagagcggagagcgcggccggaagggcccgggccctggggggcctggcggagctggggtggcccggggaggcgcgggcggcggccccagcggagactaggccagaactgagcattttcaaagttcccgaggagagatggatgccgcgtccccttcgcagcgacgagacttccctgccgtgtttgtgaccccctcctgcccagcaacctgccagctacaggagccccctgcgtcccagagactccctcacccaggcaggctccgtcgcggagtcgctgagtccgtgcccttttagttagttctgcagtctagtatggtccccatttgcccttccactccaccccaccctaaaccatgcgctcccaatcttccttcttttgcttctcgcccacctcttcccggagggttaaggctcacaggagggttaaggctcacggagggttaaggctcacggagggttaaggcatc

SEQ ID NO: 353378 - DNA, 1023 bp, Homo sapiens
ctccacttctccccgcccaccctgccggaggctgctcctgattggcttcccggccgcggggctcaggttacattcgcgagcggagccgagcgcgggagaccggacccgagagcagagctgctgtttcggcgcgggtcggctggcggccgacggggtggcccggggaggcgcgggcggcggccccagcggagactaggccagaactgagcattttcaaagttcccgaggagagatggatgccgcgtccccttcgcagcgacgagacttccctgccgtgtttgtgaccccctcctgcccagcaacctgccagctacaggagccccctgcgtcccagagactccctcacccaggcaggctccgtcgcggagtcgctgagtccgtgcccttttagttagttctgcagtctagtatggtccccatttgcccttccactccaccccaccctaaaccatgcgctcccaatcttccttcttttgcttctcgcccacctcttcccgcacccagcatgcagctctgcctccgcagcctcagtgcgctttcctgcgcgcactgcggagggcgccctaagcgtcacccaagcacactcacttaaagaaaaaacgagttctttcgttctgtgcgcagctaaaaggggcgccctacatctccgtgccactcccgccccagcctagccccaagactttggatccggggcgagatgaagggaagagggttgttttggtttcggacgacccttgctctgaccggaagagaagtccctatcccacacctgcctgtcacgttccctcccctttccccagcgcactgttgagggcagcctctccagctctcttgtttatgcaaacgccgagcgcctgggaggctcggtaggaggagtcttccacggccccgccccgcccctgtcggtcccgccctcccccccgccgggctcctggggctgtggccgaaaggtttctgatctccgtgtgtgcatgtgactgtgctgggttggaatgtgaacaataaagaggaatgtccaagtgt

SEQ ID NO: 353379 - DNA, 1477 bp, Homo sapiens
gaaaaccctggactcagactgggtccttctgagctggaggtaccctctgagagcagggggacaggcggccactccaggagtgcctgctgctgttttccttgcccctccaaacccaccctccaatcagctctgcagacccctaactcggtgctggtgatgggcctggctctcccgcacccaatcctgcctgcacttctctttcctgaattgagacatgactgtccacctggccctgaaccttcttcgcctgtcgctgcccatgccccagtgagtgtccctgccatagccctgctccaggctcgacacccctctctgtacctcccacccccgcgtcgccatagtccctgtccctcagggctctattcctaccccactcccgcggatcaagacccagtgaccccacaagaacccccctgcttcgcccccaggagaacgcctgctccaagccggacgacgacattctagacatcccgctggacgatcccggcgccaacgcggccgccgccaaaatccaggcgagttttcggggccacatggcgcggaagaagataaagagcggagagcgcggccggaagggcccgggccctggggggcctggcggagctggggtggcccggggaggcgcgggcggcggccccagcggagactaggccagaactgagcattttcaaagttcccgaggagagatggatgccgcgtccccttcgcagcgacgagacttccctgccgtgtttgtgaccccctcctgcccagcaacctgccagctacaggagccccctgcgtcccagagactccctcacccaggcaggctccgtcgcggagtcgctgagtccgtgcccttttagttagttctgcagtctagtatggtccccatttgcccttccactccaccccaccctaaaccatgcgctcccaatcttccttcttttgcttctcgcccacctcttcccgcacccagcatgcagctctgcctccgcagcctcagtgcgctttcctgcgcgcactgcggagggcgccctaagcgtcacccaagcacactcacttaaagaaaaaacgagttctttcgttctgtgcgcagctaaaaggggcgccctacatctccgtgccactcccgccccagcctagccccaagactttggatccggggcgagatgaagggaagagggttgttttggtttcggacgacccttgctctgaccggaagagaagtccctatcccacacctgcctgtcacgttccctcccctttccccagcgcactgttgagggcagcctctccagctctcttgtttatgcaaacgccgagcgcctgggaggctcggtaggaggagtcttccacggccccgccccgcccctgtcggtcccgccctcccccccgccgggctcctggggctgtggccgaaaggtttctgatctccgtgtgtgcatgtgactgtgctgggttggaatgtgaacaataaagaggaatgtccaagtgt

SEQ ID NO: 353380 - DNA, 1163 bp, Homo sapiens
ctccacttctccccgcccaccctgccggaggctgctcctgattggcttcccggccgcggggctcaggttacattcgcgagcggagccgagcgcgggagaccggacccgagagcagagctgctgtttcggcgcgggtcggctggcggccgactgccccagagcccccacccggcaccacacagaccccacccccgccctgcgccagccttcgtccccgcagaggaccccccgacaccagcatggactgctgcaccgagaacgcctgctccaagccggacgacgacattctagacatcccgctggacgatcccggcgccaacgcggccgccgccaaaatccagaactgagcattttcaaagttcccgaggagagatggatgccgcgtccccttcgcagcgacgagacttccctgccgtgtttgtgaccccctcctgcccagcaacctgccagctacaggagccccctgcgtcccagagactccctcacccaggcaggctccgtcgcggagtcgctgagtccgtgcccttttagttagttctgcagtctagtatggtccccatttgcccttccactccaccccaccctaaaccatgcgctcccaatcttccttcttttgcttctcgcccacctcttcccgcacccagcatgcagctctgcctccgcagcctcagtgcgctttcctgcgcgcactgcggagggcgccctaagcgtcacccaagcacactcacttaaagaaaaaacgagttctttcgttctgtgcgcagctaaaaggggcgccctacatctccgtgccactcccgccccagcctagccccaagactttggatccggggcgagatgaagggaagagggttgttttggtttcggacgacccttgctctgaccggaagagaagtccctatcccacacctgcctgtcacgttccctcccctttccccagcgcactgttgagggcagcctctccagctctcttgtttatgcaaacgccgagcgcctgggaggctcggtaggaggagtcttccacggccccgccccgcccctgtcggtcccgccctcccccccgccgggctcctggggctgtggccgaaaggtttctgatctccgtgtgtgcatgtgactgtgctgggttggaatgtgaacaataaagaggaatgtccaagtgt

SEQ ID NO: 353381 - DNA, 1442 bp, Homo sapiens
ctccacttctccccgcccaccctgccggaggctgctcctgattggcttcccggccgcggggctcaggttacattcgcgagcggagccgagcgcgggagaccggacccgagagcagagctgctgtttcggcgcgggtcggctggcggccgactgccccagagcccccacccggcaccacacagaccccacccccgccctgcgccagccttcgtccccgcagaggaccccccgacaccagcatggactgctgcaccgagaacgcctgctccaagccggacgacgacattctagacatcccgctggacgatcccggcgccaacgcggccgccgccaaaatccaggcgagttttcggggccacatggcgcggaagaagataaagagcggagagcgcggccggaagggcccgggccctggggggcctggcggagctggggtggcccggggaggcgcgggcggcggccccagcggagactaggccagaactgagcattttcaaagttcccgaggagagatggatgccgcgtccccttcgcagcgacgagacttccctgccgtgtttgtgaccccctcctgcccagcaacctgccagctacaggagccccctgcgtcccagagactccctcacccaggcaggctccgtcgcggagtcgctgagtccgtgcccttttagttagttctgcagtctagtatggtccccatttgcccttccactccaccccaccctaaaccatgcgctcccaatcttccttcttttgcttctcgcccacctcttcccgcacccagcatgcagctctgcctccgcagcctcagtgcgctttcctgcgcgcactgcggagggcgccctaagcgtcacccaagcacactcacttaaagaaaaaacgagttctttcgttctgtgcgcagctaaaaggggcgccctacatctccgtgccactcccgccccagcctagccccaagactttggatccggggcgagatgaagggaagagggttgttttggtttcggacgacccttgctctgaccggaagagaagtccctatcccacacctgcctgtcacgttccctcccctttccccagcgcactgttgagggcagcctctccagctctcttgtttatgcaaacgccgagcgcctgggaggctcggtaggaggagtcttccacggccccgccccgcccctgtcggtcccgccctcccccccgccgggctcctggggctgtggccgaaaggtttctgatctccgtgtgtgcatgtgactgtgctgggttggaatgtgaacaataaagaggaatgtccaagtgttcagagggtgccgggggagggagtttgggtgcacaaggcctccgcttgcaacttgaacaagcctccttgggccaaaccagaaaccaacaatcgggggctggtggggtgaagtggaggggcacctaggttgaaacccacc

SEQ ID NO: 353382 - DNA, 1239 bp, Homo sapiens
  misc_feature (1203)..(1203): n is a, c, g, or t
  misc_feature (1235)..(1235): n is a, c, g, or t
ctccacttctccccgcccaccctgccggaggctgctcctgattggcttcccggccgcggggctcaggttacattcgcgagcggagccgagcgcgggagaccggacccgagagcagagctgctgtttcggcgcgggtcggctggcggccgactgccccagagcccccacccggcaccacacagaccccacccccgccctgcgccagccttcgtccccgcagaggaccccccgacaccagcatggactgctgcaccgagaacgcctgctccaagccggacgacgacattctagacatcccgctggacgatcccggcgccaacgcggccgccgccaaaatccaggcgagttttcggggccacatggcgcggaagaagataaagagcggagagcgcggccggaagggcccgggccctggggggcctggcggagctggggtggcccggggaggcgcgggcggcggccccagcggagactaggccagaactgagcattttcaaagttcccgaggagagatggatgccgcgtccccttcgcagcgacgagacttccctgccgtgtttgtgaccccctcctgcccagcaacctgccagctacaggagccccctgcgtcccagagactccctcacccaggcaggctccgtcgcggagtcgctgagtccgtgcccttttagttagttctgcagtctagtatggtccccatttgcccttccactccaccccaccctaaaccatgcgctcccaatcttccttcttttgcttctcgcccacctcttcccgcacccagcatgcagctctgcctccgcagcctcagtgcgctttcctgcgcgcactgcggagggcgccctaagcgtcacccaagcacactcacttaaagaaaaaacgagttctttcgttctgtgcgcagctaaaaggggcgccctacatctccgtgccactcccgccccagcctagccccaagactttggatccggggcgagatgaagggaagagggttgttttggtttcggacgacccttgctctgaccggaagagaagtccctatcccacacctgcctgtcacgttccctcccctttccccagcgcactgttgagggcagcctctccagctctcttgtttatgcaaacgccgagcgcctgggaggctcggtaggaggagtcttccacggccccgccccgcccctgtcggtgtcgggctagcggggntgtcggctagtcggggggatcctctaatcacncacc

SEQ ID NO: 353383 - DNA, 1107 bp, Homo sapiens
  misc_feature (1071)..(1071): n is a, c, g, or t
  misc_feature (1103)..(1103): n is a, c, g, or t
ctccacttctccccgcccaccctgccggaggctgctcctgattggcttcccggccgcggggctcaggttacattcgcgagcggagccgagcgcgggagaccggacccgagagcagagctgctgtttcggcgcgggtcggctggcggccgactgccccagagcccccacccggcaccacacagaccccacccccgccctgcgccagccttcgtccccgcagaggaccccccgacaccagcatggactgctgcaccgagaacgcctgctccaagccggacgacgacattctagacatcccgctggacgatcccggcgccaacgcggccgccgccaaaatccaggcgagttttcggggccacatggcgcggaagaagataaagagcggagagcgcggccggaagggcccgggccctggggggcctggcggagctggggtggcccggggaggcgcgggcggcggccccagcggagactaggccagaactgagcattttcaaagttcccgaggagagatggatgccgcgtccccttcgcagcgacgagacttccctgccgtgtttgtgaccccctcctgcccagcaacctgccagctacaggagccccctgcgtcccagagactccctcacccaggcaggctccgtcgcggagtcgctgagtccgtgcccttttagttagttctgcagtctagtatggtccccatttgcccttccactccaccccaccctaaaccatgcgctcccaatcttccttcttttgcttctcgcccacctcttcccgcacccagcatgcagctctgcctccgcagcctcagtgcgctttcctgcgcgcactgcggagggcgccctaagcgtcacccaagcacactcacttaaagaaaaaacgagttctttcgttctgtgcgcagctaaaaggggcgccctacatctccgtgccactcccgccccagcctagccccaagactttggatccggggcgagatgaagggaagagggttgttttggtttcggacgacccttgctctgaccggaagagaagtccctatcccacacctgcctgtcgggctagcggggntgtcggctagtcggggggatcctctaatcacncacc

SEQ ID NO: 353384 - DNA, 302 bp, Homo sapiens
  misc_feature (6)..(6): n is a, c, g, or t
tcccgnatagcccgacagtcagttttgcaggagattcagcactagtgtcttcctgtcacgttccctcccctttccccagcgcactgttgagggcagcctctccagctctcttgtttatgcaaacgccgagcgcctgggaggctcggtaggaggagtcttccacggccccgccccgcccctgtcggtcccgccctcccccccgccgggctcctggggctgtggccgaaaggtttctgatctccgtgtgtgcatgtgactgtgctgggttggaatgtgaacaataaagaggaatgtccaagtgt

SEQ ID NO: 353385 - DNA, 401 bp, Homo sapiens
ttttttttttggtctggtcacacagtgtttagcatagtatcatatcatgcttgctcattaagcaattcaaaaatacttgtctgattgaacttaataaagtaaaaggaaatgagagataacaaagcaaggtgaccaaataggtgagttattatttattaactcacaaatgatattttccttggatttatctggggaagaaaactcagtgcttaaaattgtatacttttgccagtaagttcaacctagctttctacttattctcagataatgcctgctttcgagtgaacagccttcaaacttgtcacagtcttagtaatttttttctatccctgaggaatattttattggctggaaagcagctgaaatgttgacttttatttgactttacctaaatggtaatt

SEQ ID NO: 353386 - DNA, 5568 bp, Homo sapiens
tggctgggagggggttggtagaggggtccagagtggcagtaaaggaggaagatggcggggtgcagggggtctctgtgctgctgctgcaggtggtgctgctgctgcggtgagcgtgagacccgcacccccgaggagctgaccatccttggagaaacacaggaggaggaggatgagattcttccaaggaaagactatgagagtttggattatgatcgctgtatcaatgacccttacctggaagttttggagaccatggataataagaaaggtcgaagatatgaggcggtgaagtggatggtggtgtttgccattggagtctgcactggcctggtgggtctctttgtggacttttttgtgcgactcttcacccaactcaagttcggagtggtacagacatcggtggaggagtgcagccagaaaggctgcctcgctctgtctctccttgaactcctgggttttaacctcacctttgtcttcctggcaagcctccttgttctcattgagccggtggcagcaggttccgggatacccgaggtcaaatgctatctgaatggcgtaaaggtgccaggaatcgtccgtctccggaccctgctctgcaaggtccttggagtgctgttcagtgtggctggagggctcttcgtggggaaggaaggccccatgatccacagtggttcggtggtgggagctggcctccctcagtttcagagcatctccttacggaagatccagtttaacttcccctatttccgaagcgacagagacaagagagactttgtatcagcaggagcggctgctggagttgctgcagctttcggggcgccaatcgggggtaccttgttcagtctagaggagggttcgtccttctggaaccaagggctcacgtggaaagtgctcttttgttccatgtctgccaccttcaccctcaacttcttccgttctgggattcagtttggaagctggggttccttccagctccctggattgctgaactttggcgagtttaagtgctctgactctgataaaaaatgtcatctctggacagctatggatttgggtttcttcgtcgtgatgggggtcattgggggcctcctgggagccacattcaactgtctgaacaagaggcttgcaaagtaccgtatgcgaaacgtgcacccgaaacctaagctcgtcagagtcttagagagcctccttgtgtctctggtaaccaccgtggtggtgtttgtggcctcgatggtgttaggagaatgccgacagatgtcctcttcgagtcaaatcggtaatgactcattccagctccaggtcacagaagatgtgaattcaagtatcaagacatttttttgtcccaatgatacctacaatgacatggccacactcttcttcaacccgcaggagtctgccatcctccagctcttccaccaggatggtactttcagccccgtcactctggccttgttcttcgttctctatttcttgcttgcatgttggacttacggcatttctgttccaagtggcctttttgtgccttctctgctgtgtggagctgcttttggacgtttagttgccaatgtcctaaaaagctacattggattgggccacatctattcggggacctttgccctgattggtgcagcggctttcttgggcggggtggtccgcatgaccatcagcctcacggtcatcctgatcgagtccaccaatgagatcacctacgggctccccatcatggtcacactgatggtggccaaatggacaggggactttttcaataagggcatttatgatatccacgtgggcctgcgaggcgtgccgcttctggaatgggagacagaggtggaaatggacaagctgagagccagcgacatcatggagcccaacctgacctacgtctacccgcacacccgcatccagtctctggtgagcatcctgcgcaccacggtccaccatgccttcccggtggtcacagagaaccgcggtaacgagaaggagttcatgaagggcaaccagctcatcagcaacaacatcaagttcaagaaatccagcatcctcacccgggctggcgagcagcgcaaacggagccagtccatgaagtcctacccatccagcgagctacggaacatgtgtgatgagcacatcgcctctgaggagccagccgagaaggaggacctcctgcagcagatgctggaaaggagatacactccctaccccaacctataccctgaccagtccccaagtgaagactggaccatggaggagcggttccgccctctgaccttccacggcctgatccttcggtcgcagcttgtcaccctgcttgtccgaggagtttgttactctgaaagccagtcgagcgccagccagccgcgcctctcctatgccgagatggccgaggactacccgcggtaccccgacatccacgacctggacctgacgctgctcaacccgcgcatgatcgtggatgtcaccccatacatgaacccttcgcctttcaccgtctcgcccaacacccacgtctcccaagtcttcaacctgttcagaacgatgggcctgcgccacctgcccgtggtgaacgctgtgggagagatcgtggggatcatcacacggcacaacctcacctatgaatttctgcaggcccggctgaggcagcactaccagaccatctgacagcccagcccaccctctcctggtgctgcctggggaggcaaatcatgctcactccggcgggcacagctggctggggctgttccggggcatggaagattcccagttacccactcactcagaaagccgggagtcatcggacaccttgctggtcagaggccctgggggtggttttgaaccatcagagcttggacttttctgacttccccagcaaggatcttcccacttcctgctccctgtgttcccaccctccagtgttggcacaggcccacccctggctccaccagagccagaagcagaggtagaatcaggcgggccccgggctgcactccgagcagtgttcctggccatctttgctactttcctagagaacccggctgttgccttaaatgtgtgagagggacttggccaaggcaaaagctggggagatgccagtgacaacatacagttcatgactaggtttaggaattgggcactgagaaaattctcaatatttcagagagtccttcccttatttgggactcctaacacggtatcctcgctagtttgttttaagggaaacactctgctcctgggtgtgagcagaggctctggtcttgccctgtggtttgactctccttagaaccaccgcccaccagaaacataaaggattaaaatcacactaataacccctggatggtcaatctgataataggatcagatttacgtctaccctaattcttaacattgcagctttctctccatctgcagattattcccagtctcccagtaacacgtttctacccagatcctttttcatttccttaagttttgatctccgtcttcctgatgaagcaggcagagctcagaggatcttggcatcacccaccaaagttagctgaaagcagggcactcctggataaagcagcttcactcaactctggggaatgctaccattttttttccaaagtagaaaggaagcacttctgagccagtgaccactgaaaggtatgtgctatgataaagcagatggcctatttgaggaagagggtgtctgcccttcacaaacacctctctctcccctgcactagctgtcccaagcttacatacagaggcccttcaggagggcctcctgtgccgcagggagggtgcgtggggaagatgcttcctgccagcacgtgcctgaaggtttcacatgaagcatgggaagcgcaccctgtcgttcagtgacgtcattcttctccaggctggcccgccccctctgactaggcacccaaagtgagcatctgggcattgggcattcatgcttatcttcccccaccttctacatggtatcagtcccagcaggcatccctggggcagacgtgctttggctcaagatggccttcatttacgtttagttttttttaaaaccgtggaggttgcccacgggcctcggcacctggccctggcagcacagctctcaggcccagccctgggcgacctccttggccaagtctgcctttcaccctggggtgagcatcagtcctggctctgctggtccagatcttgcgctcagcacactctagggaataattccactccagagatggggctgcttcaaggtcttttctagctgattgtggcccctccattttccccattttcttatctccctgaccaaaattgctttgacttctaaatgtttctgcttcccagaatgcacctgacttatgaaatggggataatactcccaggaaatagcgcaggacatcacaaggaccaaaaaggcaattcttatttaaatgttactatttggccagctgctgctgtgttttatggcagtgttcagagcttgatcacgttatttcttccttttattaagaaggaagccaattgtccaagtcaggagaatggtgtgatcacctgtcacagacactttgtcccctctccccgccccttcctggagctggcagagctaacgccctgcaggaggaccccggcctctcgagggctggatcagcagccgcctgccctgaggctgccccggtgaatgttattggaattcatccctcgtgcacatcctgttgtgtttaagtcaccagatattttgttcccatcagtttagcccagagatagacagtagaatgcaaatacctccctcccctaaactgactggacggctgccaaggaggccccaaacccaggccccatgcaaaggcacgtggtttccttttctcctctctctgcatctgcgctttccagataagcccaaagacagcaacttctccactcatgacaaatcaactgtgaccctcgctccttccatttctgtccattagaaaccagccttttcagcatctcacccattagcagccccatcacccagtgatcagtcgcctcagtaaagcagatctgtggatggggagcctacgggtggtaagaagtggtgttttgtgtttcatctccagcttggtgttccatggcccctaggcgaggtgatcagggagtggggccaatgggcccccggccctggctttgggaccttgtgctgagggatgatttgctcctgaccttgattaacttaacagttcccagctggaagggacactttcaggacccagtccactgtatggcatttgtgatgcagaattatgcactgacatgaccctgggtgacaggaaagcctttcgagaggcccaaggtggcctcgccagccctgcagtattgatgtgcagtattgcaccacagctctgcggaccttggccattgccgcagtcgcagcttccttttttctgtttgcactgtttgtttgtatgatgttagctaattccactgtgtatataaattgtattttttttaatttgtaaaatgctatttttatttgaacctttggaacttgggagttctcattgtaaccctaacatgtgagaataaaatgtcttctgtctc

SEQ ID NO: 353387 - DNA, 4020 bp, Homo sapiens
tggctgggagggggttggtagaggggtccagagtggcagtaaaggaggaagatggcggggtgcagggggtctctgtgctgctgctgcaggtggtgctgctgctgcggtgagcgtgagacccgcacccccgaggagctgaccatccttggagaaacacaggaggaggaggatgagattcttccaaggaaagactatgagagtttggattatgatcgctgtatcaatgacccttacctggaagttttggagaccatggataataagaaaggtcgaagatatgaggcggtgaagtggatggtggtgtttgccattggagtctgcactggcctggtgggtctctttgtggacttttttgtgcgactcttcacccaactcaagttcggagtggtacagacatcggtggaggagtgcagccagaaaggctgcctcgctctgtctctccttgaactcctgggttttaacctcacctttgtcttcctggcaagcctccttgttctcattgagccggtggcagcaggttccgggatacccgaggtcaaatgctatctgaatggcgtaaaggtgccaggaatcgtccgtctccggaccctgctctgcaaggtccttggagtgctgttcagtgtggctggagggctcttcgtggggaaggaaggccccatgatccacagtggttcggtggtgggagctggcctccctcagtttcagagcatctccttacggaagatccagtttaacttcccctatttccgaagcgacagagacaagagagactttgtatcagcaggagcggctgctggagttgctgcagctttcggggcgccaatcgggggtaccttgttcagtctagaggagggttcgtccttctggaaccaagggctcacgtggaaagtgctcttttgttccatgtctgccaccttcaccctcaacttcttccgttctgggattcagtttggaagctggggttccttccagctccctggattgctgaactttggcgagtttaagagtcttagagagcctccttgtgtctctggtaaccaccgtggtggtgtttgtggcctcgatggtgttaggagaatgccgacagatgtcctcttcgagtcaaatcggtaatagcccagcccaccctctcctggtgctgcctggggaggcaaatcatgctcactccggcgggcacagctggctggggctgttccggggcatggaagattcccagttacccactcactcagaaagccgggagtcatcggacaccttgctggtcagaggccctgggggtggttttgaaccatcagagcttggacttttctgacttccccagcaaggatcttcccacttcctgctccctgtgttcccaccctccagtgttggcacaggcccacccctggctccaccagagccagaagcagaggtagaatcaggcgggccccgggctgcactccgagcagtgttcctggccatctttgctactttcctagagaacccggctgttgccttaaatgtgtgagagggacttggccaaggcaaaagctggggagatgccagtgacaacatacagttcatgactaggtttaggaattgggcactgagaaaattctcaatatttcagagagtccttcccttatttgggactcctaacacggtatcctcgctagtttgttttaagggaaacactctgctcctgggtgtgagcagaggctctggtcttgccctgtggtttgactctccttagaaccaccgcccaccagaaacataaaggattaaaatcacactaataacccctggatggtcaatctgataataggatcagatttacgtctaccctaattcttaacattgcagctttctctccatctgcagattattcccagtctcccagtaacacgtttctacccagatcctttttcatttccttaagttttgatctccgtcttcctgatgaagcaggcagagctcagaggatcttggcatcacccaccaaagttagctgaaagcagggcactcctggataaagcagcttcactcaactctggggaatgctaccattttttttccaaagtagaaaggaagcacttctgagccagtgaccactgaaaggtatgtgctatgataaagcagatggcctatttgaggaagagggtgtctgcccttcacaaacacctctctctcccctgcactagctgtcccaagcttacatacagaggcccttcaggagggcctcctgtgccgcagggagggtgcgtggggaagatgcttcctgccagcacgtgcctgaaggtttcacatgaagcatgggaagcgcaccctgtcgttcagtgacgtcattcttctccaggctggcccgccccctctgactaggcacccaaagtgagcatctgggcattgggcattcatgcttatcttcccccaccttctacatggtatcagtcccagcaggcatccctggggcagacgtgctttggctcaagatggccttcatttacgtttagttttttttaaaaccgtggaggttgcccacgggcctcggcacctggccctggcagcacagctctcaggcccagccctgggcgacctccttggccaagtctgcctttcaccctggggtgagcatcagtcctggctctgctggtccagatcttgcgctcagcacactctagggaataattccactccagagatggggctgcttcaaggtcttttctagctgattgtggcccctccattttccccattttcttatctccctgaccaaaattgctttgacttctaaatgtttctgcttcccagaatgcacctgacttatgaaatggggataatactcccaggaaatagcgcaggacatcacaaggaccaaaaaggcaattcttatttaaatgttactatttggccagctgctgctgtgttttatggcagtgttcagagcttgatcacgttatttcttccttttattaagaaggaagccaattgtccaagtcaggagaatggtgtgatcacctgtcacagacactttgtcccctctccccgccccttcctggagctggcagagctaacgccctgcaggaggaccccggcctctcgagggctggatcagcagccgcctgccctgaggctgccccggtgaatgttattggaattcatccctcgtgcacatcctgttgtgtttaagtcaccagatattttgttcccatcagtttagcccagagatagacagtagaatgcaaatacctccctcccctaaactgactggacggctgccaaggaggccccaaacccaggccccatgcaaaggcacgtggtttccttttctcctctctctgcatctgcgctttccagataagcccaaagacagcaacttctccactcatgacaaatcaactgtgaccctcgctccttccatttctgtccattagaaaccagccttttcagcatctcacccattagcagccccatcacccagtgatcagtcgcctcagtaaagcagatctgtggatggggagcctacgggtggtaagaagtggtgttttgtgtttcatctccagcttggtgttccatggcccctaggcgaggtgatcagggagtggggccaatgggcccccggccctggctttgggaccttgtgctgagggatgatttgctcctgaccttgattaacttaacagttcccagctggaagggacactttcaggacccagtccactgtatggcatttgtgatgcagaattatgcactgacatgaccctgggtgacaggaaagcctttcgagaggcccaaggtggcctcgccagccctgcagtattgatgtgcagtattgcaccacagctctgcggaccttggccattgccgcagtcgcagcttccttttttctgtttgcactgtttgtttgtatgatgttagctaattccactgtgtatataaattgtattttttttaatttgtaaaatgctatttttatttgaacctttggaacttgggagttctcattgtaaccctaacatgtgagaataaaatgtcttctgtctc

SEQ ID NO: 353388 - DNA, 574 bp, Homo sapiens
agcggacttggaaagctgacagcaaggtgctttctgagccccagttactcttccacctccccttgcctgaaggggccacagcccagaggctcagcacccacctcatggcctctgtgactatgacagtcactcttgagaggaagaaatatctgtgtcagggcaaggaggcttctctcttcccagcatcctctgcctcttcccggcgttgggtcctttgtgggtgcgccaccctcctgcactcctccttttcccttcttggggggcgcgatattttccagaggctttccctgaggagtggtcccatgaggtagtccgtggagcctactccacgctgtgttctttcggtccaacccggaggctctgagagctacacctgtggttcagtgagtcagccagatgtgtgattccagcccttggctgcagacaggtgagcattctctaagtgcggtcggccatccacatttgtgggtcctgcatccatggaattacgtagggtcaaccaactgtggagcaaatatattcaggatgcaaaacataaaaaagaacaagacaacagtaaaaaataatgcaaata

SEQ ID NO: 353389 - DNA, 788 bp, Homo sapiens
tggctgggagggggttggtagaggggtccagagtggcagtaaaggaggaagatggcggggtgcagggggtctctgtgctgctgctgcaggtggtgctgctgctgcggtgagcgtgagacccgcacccccgaggagctgaccatccttggagaaacacaggaggaggaggatgagattcttccaaggaaagactatgagagtttggattatgatcgctgtatcaatgacccttacctggaagttttggagaccatggataataagaaaggtcgaagatatgaggcggtgaagtggatggtggtgtttgccattggagtctgcactggcctggtgggtctctttgtggacttttttgtgcgactcttcacccaactcaagttcggagtggtacagacatataaattccagatgaagatgtaaatatgcagaacaaaacttcgggagactatatgttgtcaagagtggggaataatttcttaaaactccagaaggcacagactataagaaaaaacatcaatggggccggacacagtggctcacgcctgtaatcccagcattttgggaggcagaggcaggcggatcacaaggtcaggagattgagaccatcctggctaacacggtgaaaccccgtctctactaaaaatacaaaaaaattagctgggcgtggcggtgtgcgcctgtagtcccagatgctggggaggctgaggcaggagaatggcatgaacctgggaggcggagcttgcagtaagccaagatcacgccactgcactccagcctgggtgacagag

SEQ ID NO: 353390 - DNA, 6542 bp, Homo sapiens
tggctgggagggggttggtagaggggtccagagtggcagtaaaggaggaagatggcggggtgcagggggtctctgtgctgctgctgcaggtggtgctgctgctgcggtgagcgtgagacccgcacccccgaggagctgaccatccttggagaaacacaggaggaggaggatgagattcttccaaggaaagactatgagagtttggattatgatcgctgtatcaatgacccttacctggaagttttggagaccatggataataagaaaggtcgaagatatgaggcggtgaagtggatggtggtgtttgccattggagtctgcactggcctggtgggtctctttgtggacttttttgtgcgactcttcacccaactcaagttcggagtggtacagacatcggtggaggagtgcagccagaaaggctgcctcgctctgtctctccttgaactcctgggttttaacctcacctttgtcttcctggcaagcctccttgttctcattgagccggtggcagcaggttccgggatacccgaggtcaaatgctatctgaatggcgtaaaggtgccaggaatcgtccgtctccggaccctgctctgcaaggtccttggagtgctgttcagtgtggctggagggctcttcgtggggaaggaaggccccatgatccacagtggttcggtggtgggagctggcctccctcagtttcagagcatctccttacggaagatccagtttaacttcccctatttccgaagcgacagagacaagagagactttgtatcagcaggagcggctgctggagttgctgcagctttcggggcgccaatcgggggtaccttgttcagtctagaggagggttcgtccttctggaaccaagggctcacgtggaaagtgctcttttgttccatgtctgccaccttcaccctcaacttcttccgttctgggattcagtttggaagctggggttccttccagctccctggattgctgaactttggcgagtttaagagtcttagagagcctccttgtgtctctggtaaccaccgtggtggtgtttgtggcctcgatggtgttaggagaatgccgacagatgtcctcttcgagtcaaatcggtaatgactcattccagctccaggtcacagaagatgtgaattcaagtatcaagacatttttttgtcccaatgatacctacaatgacatggccacactcttcttcaacccgcaggagtctgccatcctccagctcttccaccaggatggtactttcagccccgtcactctggccttgttcttcgttctctatttcttgcttgcatgttggacttacggcatttctgttccaagtggcctttttgtgccttctctgctgtgtggagctgcttttggacgtttagttgccaatgtcctaaaaagctacattggattgggccacatctattcggggacctttgccctgattggtgcagcggctttcttgggcggggtggtccgcatgaccatcagcctcacggtcatcctgatcgagtccaccaatgagatcacctacgggctccccatcatggtcacactgatggtggccaaatggacaggggactttttcaataagggcatttatgatatccacgtgggcctgcgaggcgtgccgcttctggaatgggagacagaggtggaaatggacaagctgagagccagcgacatcatggagcccaacctgacctacgtctacccgcacacccgcatccagtctctggtgagcatcctgcgcaccacggtccaccatgccttcccggtggtcacagagaaccgcggtaacgagaaggagttcatgaagggcaaccagctcatcagcaacaacatcaagttcaagaaatccagcatcctcacccgggctggcgagcagcgcaaacggagccagtccatgaagtcctacccatccagcgagctacggaacatgtgtgatgagcacatcgcctctgaggagccagccgagaaggaggacctcctgcagcagatgctggaaaggagatacactccctaccccaacctataccctgaccagtccccaagtgaagactggaccatggaggagcggttccgccctctgaccttccacggcctgatccttcggtcgcagcttgtcaccctgcttgtccgaggagtttgttactctgaaagccagtcgagcgccagccagccgcgcctctcctatgccgagatggccgaggactacccgcggtaccccgacatccacgacctggacctgacgctgctcaacccgcgcatgatcgtggatgtcaccccatacatgaacccttcgcctttcaccgtctcgcccaacacccacgtctcccaagtcttcaacctgttcagaacgatgggcctgcgccacctgcccgtggtgaacgctgtgggagagatcgtggggatcatcacacggcacaacctcacctatgaatttctgcaggcccggctgaggcagcactaccagaccatctgacagcccagcccaccctctcctggtgctgcctggggaggcaaatcatgctcactccggcgggcacagctggctggggctgttccggggcatggaagattcccagttacccactcactcagaaagccgggagtcatcggacaccttgctggtcagaggccctgggggtggttttgaaccatcagagcttggacttttctgacttccccagcaaggatcttcccacttcctgctccctgtgttcccaccctccagtgttggcacaggcccacccctggctccaccagagccagaagcagaggtagaatcaggcgggccccgggctgcactccgagcagtgttcctggccatctttgctactttcctagagaacccggctgttgccttaaatgtgtgagagggacttggccaaggcaaaagctggggagatgccagtgacaacatacagttcatgactaggtttaggaattgggcactgagaaaattctcaatatttcagagagtccttcccttatttgggactcctaacacggtatcctcgctagtttgttttaagggaaacactctgctcctgggtgtgagcagaggctctggtcttgccctgtggtttgactctccttagaaccaccgcccaccagaaacataaaggattaaaatcacactaataacccctggatggtcaatctgataataggatcagatttacgtctaccctaattcttaacattgcagctttctctccatctgcagattattcccagtctcccagtaacacgtttctacccagatcctttttcatttccttaagttttgatctccgtcttcctgatgaagcaggcagagctcagaggatcttggcatcacccaccaaagttagctgaaagcagggcactcctggataaagcagcttcactcaactctggggaatgctaccattttttttccaaagtagaaaggaagcacttctgagccagtgaccactgaaaggtatgtgctatgataaagcagatggcctatttgaggaagagggtgtctgcccttcacaaacacctctctctcccctgcactagctgtcccaagcttacatacagaggcccttcaggagggcctcctgtgccgcagggagggtgcgtggggaagatgcttcctgccagcacgtgcctgaaggtttcacatgaagcatgggaagcgcaccctgtcgttcagtgacgtcattcttctccaggctggcccgccccctctgactaggcacccaaagtgagcatctgggcattgggcattcatgcttatcttcccccaccttctacatggtatcagtcccagcaggcatccctggggcagacgtgctttggctcaagatggccttcatttacgtttagttttttttaaaaccgtggaggttgcccacgggcctcggcacctggccctggcagcacagctctcaggcccagccctgggcgacctccttggccaagtctgcctttcaccctggggtgagcatcagtcctggctctgctggtccagatcttgcgctcagcacactctagggaataattccactccagagatggggctgcttcaaggtcttttctagctgattgtggcccctccattttccccattttcttatctccctgaccaaaattgctttgacttctaaatgtttctgcttcccagaatgcacctgacttatgaaatggggataatactcccaggaaatagcgcaggacatcacaaggaccaaaaaggcaattcttatttaaatgttactatttggccagctgctgctgtgttttatggcagtgttcagagcttgatcacgttatttcttccttttattaagaaggaagccaattgtccaagtcaggagaatggtgtgatcacctgtcacagacactttgtcccctctccccgccccttcctggagctggcagagctaacgccctgcaggaggaccccggcctctcgagggctggatcagcagccgcctgccctgaggctgccccggtgaatgttattggaattcatccctcgtgcacatcctgttgtgtttaagtcaccagatattttgttcccatcagtttagcccagagatagacagtagaatgcaaatacctccctcccctaaactgactggacggctgccaaggaggccccaaacccaggccccatgcaaaggcacgtggtttccttttctcctctctctgcatctgcgctttccagataagcccaaagacagcaacttctccactcatgacaaatcaactgtgaccctcgctccttccatttctgtccattagaaaccagccttttcagcatctcacccattagcagccccatcacccagtgatcagtcgcctcagtaaagcagatctgtggatggggagcctacgggtgaattcatctcctcctgctagcagccgcgtcctggaggagcagcggatggggaatccattctgtttcttcctggtgtttaggaagttgccccacacacagattgccccgatgtccaaccagaagaagtgaaactgctgctgggtctggagaggtgaagacccgtggccagcttctgttgttgccatcggccattgctttttgttcgcttgcttttggttttgcaagaagagcggcctctgtctctgatctgcttcaaatcatcattccatcagtgacagaagtggctgttccatcagtggtcgcagccagttcagctcctgcatccatccccaagtgttctgagtggaatttgaggcctccccaaccacctaccaaaaaaggagggtgaaatgaaaggaagaagaaaaactcagcattctttcctctgacaaagagtaaaacgacaaggaatatcggcctgaattctcttcccaagaagaaagaaagcacaccaacgcaggcatttgtcttctgtccatggtgctgaagtttattcactttcaaaccactttcagtaacaggtgaggttctaccttaaaatttaatgcatggggtgggagaggcgaggaagtcaccatcaaaccactttatctacagttagcataagatgtgagaagtgttgacaggaagctgcagcttagatgggatgatcacaactccatggcaacaagatgacacgaatgcagcagagaccccaggggacaggagcctcttgcagtctgtccctaggcccagccctgcttgtcctccctggctgttatcttcggtaccggaagctgttacagcccagtccgctctgggctccaatcctgtccatcctgcccccgaagcagctggatctccgcaggctccgaggggcagtgagcagcgccctcagcttgctttttaggagggcagatcgatcagaggagtcccaggggccccgcccgagggcacctccatctctctgggctgggctgacttccccggtccagggaggcacctcagggagggggctgagagcagcccccgcttcttcattcggctcactgagcacttgtgggggcacgacctcatcttctaaaggcatcttttcttccaaatggtccagcaaattcttgaaatccatcaggtctgcgttggacacggcattgtacatgggattagctctggtctgacctaggagctggaatgccagtaaaaggaggaagctcacggtggtggtggagaaggagctcatgctggcgtcgtcaaggagcaatccactgcttgctgctctgtctctcccctctggttcctctctggttcccctctcttggcctacgtctgtccctgtctcccagctgcccagtgccgcctctttttatagccccccagctctccaagcacgcaggagagacagaacccttccccattctgtcacttgcagtgataaagctgccaagtgagaagccagcaggagatgcccttttaaagttatcatcccgcagggcttgtcacagcccctctctgccttgggcagccccaacagccccccagaccctcagctgcaagagccgcattcttactgatttgactcaagaggctcccacttcaaaggtgtgagaagagtaaaaaagagtccttggttatctca

SEQ ID NO: 353391 - DNA, 5837 bp, Homo sapiens
agcggacttggaaagctgacagcaaggtgctttctgagccccagttactcttccacctccccttgcctgaaggggccacagcccagaggctcagcacccacctcatggcctctgtgactatgacagtcactcttgagaggaagaaatatctgtgtcagggcaaggaggcttctctcttcccagcatcctctgcctcttcccggcgttgggtcctttgtgggtgcgccaccctcctgcactcctccttttcccttcttggggggcgcgatattttccagaggctttccctgaggagtggtcccatgaggtagtccgtggagcctactccacgctgtgttctttcggtccaacccggaggctctgagagctacacctgtggttcagtgagtcagccagatgtgtgattccagcccttggctgcagacaggtcacagaagatgtgaattcaagtatcaagacatttttttgtcccaatgatacctacaatgacatggccacactcttcttcaacccgcaggagtctgccatcctccagctcttccaccaggatggtactttcagccccgtcactctggccttgttcttcgttctctatttcttgcttgcatgttggacttacggcatttctgttccaagtggcctttttgtgccttctctgctgtgtggagctgcttttggacgtttagttgccaatgtcctaaaaagctacattggattgggccacatctattcggggacctttgccctgattggtgcagcggctttcttgggcggggtggtccgcatgaccatcagcctcacggtcatcctgatcgagtccaccaatgagatcacctacgggctccccatcatggtcacactgatggtggccaaatggacaggggactttttcaataagggcatttatgatatccacgtgggcctgcgaggcgtgccgcttctggaatgggagacagaggtggaaatggacaagctgagagccagcgacatcatggagcccaacctgacctacgtctacccgcacacccgcatccagtctctggtgagcatcctgcgcaccacggtccaccatgccttcccggtggtcacagagaaccgcggtaacgagaaggagttcatgaagggcaaccagctcatcagcaacaacatcaagttcaagaaatccagcatcctcacccgggctggcgagcagcgcaaacggagccagtccatgaagtcctacccatccagcgagctacggaacatgtgtgatgagcacatcgcctctgaggagccagccgagaaggaggacctcctgcagcagatgctggaaaggagatacactccctaccccaacctataccctgaccagtccccaagtgaagactggaccatggaggagcggttccgccctctgaccttccacggcctgatccttcggtcgcagcttgtcaccctgcttgtccgaggagtttgttactctgaaagccagtcgagcgccagccagccgcgcctctcctatgccgagatggccgaggactacccgcggtaccccgacatccacgacctggacctgacgctgctcaacccgcgcatgatcgtggatgtcaccccatacatgaacccttcgcctttcaccgtctcgcccaacacccacgtctcccaagtcttcaacctgttcagaacgatgggcctgcgccacctgcccgtggtgaacgctgtgggagagatcgtggggatcatcacacggcacaacctcacctatgaatttctgcaggcccggctgaggcagcactaccagaccatctgacagcccagcccaccctctcctggtgctgcctggggaggcaaatcatgctcactccggcgggcacagctggctggggctgttccggggcatggaagattcccagttacccactcactcagaaagccgggagtcatcggacaccttgctggtcagaggccctgggggtggttttgaaccatcagagcttggacttttctgacttccccagcaaggatcttcccacttcctgctccctgtgttcccaccctccagtgttggcacaggcccacccctggctccaccagagccagaagcagaggtagaatcaggcgggccccgggctgcactccgagcagtgttcctggccatctttgctactttcctagagaacccggctgttgccttaaatgtgtgagagggacttggccaaggcaaaagctggggagatgccagtgacaacatacagttcatgactaggtttaggaattgggcactgagaaaattctcaatatttcagagagtccttcccttatttgggactcctaacacggtatcctcgctagtttgttttaagggaaacactctgctcctgggtgtgagcagaggctctggtcttgccctgtggtttgactctccttagaaccaccgcccaccagaaacataaaggattaaaatcacactaataacccctggatggtcaatctgataataggatcagatttacgtctaccctaattcttaacattgcagctttctctccatctgcagattattcccagtctcccagtaacacgtttctacccagatcctttttcatttccttaagttttgatctccgtcttcctgatgaagcaggcagagctcagaggatcttggcatcacccaccaaagttagctgaaagcagggcactcctggataaagcagcttcactcaactctggggaatgctaccattttttttccaaagtagaaaggaagcacttctgagccagtgaccactgaaaggtatgtgctatgataaagcagatggcctatttgaggaagagggtgtctgcccttcacaaacacctctctctcccctgcactagctgtcccaagcttacatacagaggcccttcaggagggcctcctgtgccgcagggagggtgcgtggggaagatgcttcctgccagcacgtgcctgaaggtttcacatgaagcatgggaagcgcaccctgtcgttcagtgacgtcattcttctccaggctggcccgccccctctgactaggcacccaaagtgagcatctgggcattgggcattcatgcttatcttcccccaccttctacatggtatcagtcccagcaggcatccctggggcagacgtgctttggctcaagatggccttcatttacgtttagttttttttaaaaccgtggaggttgcccacgggcctcggcacctggccctggcagcacagctctcaggcccagccctgggcgacctccttggccaagtctgcctttcaccctggggtgagcatcagtcctggctctgctggtccagatcttgcgctcagcacactctagggaataattccactccagagatggggctgcttcaaggtcttttctagctgattgtggcccctccattttccccattttcttatctccctgaccaaaattgctttgacttctaaatgtttctgcttcccagaatgcacctgacttatgaaatggggataatactcccaggaaatagcgcaggacatcacaaggaccaaaaaggcaattcttatttaaatgttactatttggccagctgctgctgtgttttatggcagtgttcagagcttgatcacgttatttcttccttttattaagaaggaagccaattgtccaagtcaggagaatggtgtgatcacctgtcacagacactttgtcccctctccccgccccttcctggagctggcagagctaacgccctgcaggaggaccccggcctctcgagggctggatcagcagccgcctgccctgaggctgccccggtgaatgttattggaattcatccctcgtgcacatcctgttgtgtttaagtcaccagatattttgttcccatcagtttagcccagagatagacagtagaatgcaaatacctccctcccctaaactgactggacggctgccaaggaggccccaaacccaggccccatgcaaaggcacgtggtttccttttctcctctctctgcatctgcgctttccagataagcccaaagacagcaacttctccactcatgacaaatcaactgtgaccctcgctccttccatttctgtccattagaaaccagccttttcagcatctcacccattagcagccccatcacccagtgatcagtcgcctcagtaaagcagatctgtggatggggagcctacgggtgaattcatctcctcctgctagcagccgcgtcctggaggagcagcggatggggaatccattctgtttcttcctggtgtttaggaagttgccccacacacagattgccccgatgtccaaccagaagaagtgaaactgctgctgggtctggagaggtgaagacccgtggccagcttctgttgttgccatcggccattgctttttgttcgcttgcttttggttttgcaagaagagcggcctctgtctctgatctgcttcaaatcatcattccatcagtgacagaagtggctgttccatcagtggtcgcagccagttcagctcctgcatccatccccaagtgttctgagtggaatttgaggcctccccaaccacctaccaaaaaaggagggtgaaatgaaaggaagaagaaaaactcagcattctttcctctgacaaagagtaaaacgacaaggaatatcggcctgaattctcttcccaagaagaaagaaagcacaccaacgcaggcatttgtcttctgtccatggtgctgaagtttattcactttcaaaccactttcagtaacaggtgaggttctaccttaaaatttaatgcatggggtgggagaggcgaggaagtcaccatcaaaccactttatctacagttagcataagatgtgagaagtgttgacaggaagctgcagcttagatgggatgatcacaactccatggcaacaagatgacacgaatgcagcagagaccccaggggacaggagcctcttgcagtctgtccctaggcccagccctgcttgtcctccctggctgttatcttcggtaccggaagctgttacagcccagtccgctctgggctccaatcctgtccatcctgcccccgaagcagctggatctccgcaggctccgaggggcagtgagcagcgccctcagcttgctttttaggagggcagatcgatcagaggagtcccaggggccccgcccgagggcacctccatctctctgggctgggctgacttccccggtccagggaggcacctcagggagggggctgagagcagcccccgcttcttcattcggctcactgagcacttgtgggggcacgacctcatcttctaaaggcatcttttcttccaaatggtccagcaaattcttgaaatccatcaggtctgcgttggacacggcattgtacatgggattagctctggtctgacctaggagctggaatgccagtaaaaggaggaagctcacggtggtggtggagaaggagctcatgctggcgtcgtcaaggagcaatccactgcttgctgctctgtctctcccctctggttcctctctggttcccctctcttggcctacgtctgtccctgtctcccagctgcccagtgccgcctctttttatagccccccagctctccaagcacgcaggagagacagaacccttccccattctgtcacttgcagtgataaagctgccaagtgagaagccagcaggagatgcccttttaaagttatcatcccgcagggcttgtcacagcccctctctgccttgggcagccccaacagccccccagaccctcagctgcaagagccgcattcttactgatttgactcaagaggctcccacttcaaaggtgtgagaagagtaaaaaagagtccttggttatctca

SEQ ID NO: 353392 - DNA, 2016 bp, Homo sapiens
tacagtggactgggtcctgaaagtgtcccttccagctgggaactcttaagttaatcaaggtcaggagcaaatcatccctcagcacaaggtcccaaagccagggccgggggcccattggccccaaacccaggccccatgcaaaggcacgtggtttccttttctcctctctctgcatctgcgctttccagataagcccaaagacagcaacttctccactcatgacaaatcaactgtgaccctcgctccttccatttctgtccattagaaaccagccttttcagcatctcacccattagcagccccatcacccagtgatcagtcgcctcagtaaagcagatctgtggatggggagcctacgggtgaattcatctcctcctgctagcagccgcgtcctggaggagcagcggatggggaatccattctgtttcttcctggtgtttaggaagttgccccacacacagattgccccgatgtccaaccagaagaagtgaaactgctgctgggtctggagaggtgaagacccgtggccagcttctgttgttgccatcggccattgctttttgttcgcttgcttttggttttgcaagaagagcggcctctgtctctgatctgcttcaaatcatcattccatcagtgacagaagtggctgttccatcagtggtcgcagccagttcagctcctgcatccatccccaagtgttctgagtggaatttgaggcctccccaaccacctaccaaaaaaggagggtgaaatgaaaggaagaagaaaaactcagcattctttcctctgacaaagagtaaaacgacaaggaatatcggcctgaattctcttcccaagaagaaagaaagcacaccaacgcaggcatttgtcttctgtccatggtgctgaagtttattcactttcaaaccactttcagtaacaggtgaggttctaccttaaaatttaatgcatggggtgggagaggcgaggaagtcaccatcaaaccactttatctacagttagcataagatgtgagaagtgttgacaggaagctgcagcttagatgggatgatcacaactccatggcaacaagatgacacgaatgcagcagagaccccaggggacaggagcctcttgcagtctgtccctaggcccagccctgcttgtcctccctggctgttatcttcggtaccggaagctgttacagcccagtccgctctgggctccaatcctgtccatcctgcccccgaagcagctggatctccgcaggctccgaggggcagtgagcagcgccctcagcttgctttttaggagggcagatcgatcagaggagtcccaggggccccgcccgagggcacctccatctctctgggctgggctgacttccccggtccagggaggcacctcagggagggggctgagagcagcccccgcttcttcattcggctcactgagcacttgtgggggcacgacctcatcttctaaaggcatcttttcttccaaatggtccagcaaattcttgaaatccatcaggtctgcgttggacacggcattgtacatgggattagctctggtctgacctaggagctggaatgccagtaaaaggaggaagctcacggtggtggtggagaaggagctcatgctggcgtcgtcaaggagcaatccactgcttgctgctctgtctctcccctctggttcctctctggttcccctctcttggcctacgtctgtccctgtctcccagctgcccagtgccgcctctttttatagccccccagctctccaagcacgcaggagagacagaacccttccccattctgtcacttgcagtgataaagctgccaagtgagaagccagcaggagatgcccttttaaagttatcatcccgcagggcttgtcacagcccctctctgccttgggcagccccaacagccccccagaccctcagctgcaagagccgcattcttactgatttgactcaagaggctcccacttcaaaggtgtgagaagagtaaaaaagagtccttggttatctca

SEQ ID NO: 353393 - DNA, 6659 bp, Homo sapiens
tggctgggagggggttggtagaggggtccagagtggcagtaaaggaggaagatggcggggtgcagggggtctctgtgctgctgctgcaggtggtgctgctgctgcggtgagcgtgagacccgcacccccgaggagctgaccatccttggagaaacacaggaggaggaggatgagattcttccaaggaaagactatgagagtttggattatgatcgctgtatcaatgacccttacctggaagttttggagaccatggataataagaaaggtcgaagatatgaggcggtgaagtggatggtggtgtttgccattggagtctgcactggcctggtgggtctctttgtggacttttttgtgcgactcttcacccaactcaagttcggagtggtacagacatcggtggaggagtgcagccagaaaggctgcctcgctctgtctctccttgaactcctgggttttaacctcacctttgtcttcctggcaagcctccttgttctcattgagccggtggcagcaggttccgggatacccgaggtcaaatgctatctgaatggcgtaaaggtgccaggaatcgtccgtctccggaccctgctctgcaaggtccttggagtgctgttcagtgtggctggagggctcttcgtggggaaggaaggccccatgatccacagtggttcggtggtgggagctggcctccctcagtttcagagcatctccttacggaagatccagtttaacttcccctatttccgaagcgacagagacaagagagactttgtatcagcaggagcggctgctggagttgctgcagctttcggggcgccaatcgggggtaccttgttcagtctagaggagggttcgtccttctggaaccaagggctcacgtggaaagtgctcttttgttccatgtctgccaccttcaccctcaacttcttccgttctgggattcagtttggaagctggggttccttccagctccctggattgctgaactttggcgagtttaagtgctctgactctgataaaaaatgtcatctctggacagctatggatttgggtttcttcgtcgtgatgggggtcattgggggcctcctgggagccacattcaactgtctgaacaagaggcttgcaaagtaccgtatgcgaaacgtgcacccgaaacctaagctcgtcagagtcttagagagcctccttgtgtctctggtaaccaccgtggtggtgtttgtggcctcgatggtgttaggagaatgccgacagatgtcctcttcgagtcaaatcggtaatgactcattccagctccaggtcacagaagatgtgaattcaagtatcaagacatttttttgtcccaatgatacctacaatgacatggccacactcttcttcaacccgcaggagtctgccatcctccagctcttccaccaggatggtactttcagccccgtcactctggccttgttcttcgttctctatttcttgcttgcatgttggacttacggcatttctgttccaagtggcctttttgtgccttctctgctgtgtggagctgcttttggacgtttagttgccaatgtcctaaaaagctacattggattgggccacatctattcggggacctttgccctgattggtgcagcggctttcttgggcggggtggtccgcatgaccatcagcctcacggtcatcctgatcgagtccaccaatgagatcacctacgggctccccatcatggtcacactgatggtggccaaatggacaggggactttttcaataagggcatttatgatatccacgtgggcctgcgaggcgtgccgcttctggaatgggagacagaggtggaaatggacaagctgagagccagcgacatcatggagcccaacctgacctacgtctacccgcacacccgcatccagtctctggtgagcatcctgcgcaccacggtccaccatgccttcccggtggtcacagagaaccgcggtaacgagaaggagttcatgaagggcaaccagctcatcagcaacaacatcaagttcaagaaatccagcatcctcacccgggctggcgagcagcgcaaacggagccagtccatgaagtcctacccatccagcgagctacggaacatgtgtgatgagcacatcgcctctgaggagccagccgagaaggaggacctcctgcagcagatgctggaaaggagatacactccctaccccaacctataccctgaccagtccccaagtgaagactggaccatggaggagcggttccgccctctgaccttccacggcctgatccttcggtcgcagcttgtcaccctgcttgtccgaggagtttgttactctgaaagccagtcgagcgccagccagccgcgcctctcctatgccgagatggccgaggactacccgcggtaccccgacatccacgacctggacctgacgctgctcaacccgcgcatgatcgtggatgtcaccccatacatgaacccttcgcctttcaccgtctcgcccaacacccacgtctcccaagtcttcaacctgttcagaacgatgggcctgcgccacctgcccgtggtgaacgctgtgggagagatcgtggggatcatcacacggcacaacctcacctatgaatttctgcaggcccggctgaggcagcactaccagaccatctgacagcccagcccaccctctcctggtgctgcctggggaggcaaatcatgctcactccggcgggcacagctggctggggctgttccggggcatggaagattcccagttacccactcactcagaaagccgggagtcatcggacaccttgctggtcagaggccctgggggtggttttgaaccatcagagcttggacttttctgacttccccagcaaggatcttcccacttcctgctccctgtgttcccaccctccagtgttggcacaggcccacccctggctccaccagagccagaagcagaggtagaatcaggcgggccccgggctgcactccgagcagtgttcctggccatctttgctactttcctagagaacccggctgttgccttaaatgtgtgagagggacttggccaaggcaaaagctggggagatgccagtgacaacatacagttcatgactaggtttaggaattgggcactgagaaaattctcaatatttcagagagtccttcccttatttgggactcctaacacggtatcctcgctagtttgttttaagggaaacactctgctcctgggtgtgagcagaggctctggtcttgccctgtggtttgactctccttagaaccaccgcccaccagaaacataaaggattaaaatcacactaataacccctggatggtcaatctgataataggatcagatttacgtctaccctaattcttaacattgcagctttctctccatctgcagattattcccagtctcccagtaacacgtttctacccagatcctttttcatttccttaagttttgatctccgtcttcctgatgaagcaggcagagctcagaggatcttggcatcacccaccaaagttagctgaaagcagggcactcctggataaagcagcttcactcaactctggggaatgctaccattttttttccaaagtagaaaggaagcacttctgagccagtgaccactgaaaggtatgtgctatgataaagcagatggcctatttgaggaagagggtgtctgcccttcacaaacacctctctctcccctgcactagctgtcccaagcttacatacagaggcccttcaggagggcctcctgtgccgcagggagggtgcgtggggaagatgcttcctgccagcacgtgcctgaaggtttcacatgaagcatgggaagcgcaccctgtcgttcagtgacgtcattcttctccaggctggcccgccccctctgactaggcacccaaagtgagcatctgggcattgggcattcatgcttatcttcccccaccttctacatggtatcagtcccagcaggcatccctggggcagacgtgctttggctcaagatggccttcatttacgtttagttttttttaaaaccgtggaggttgcccacgggcctcggcacctggccctggcagcacagctctcaggcccagccctgggcgacctccttggccaagtctgcctttcaccctggggtgagcatcagtcctggctctgctggtccagatcttgcgctcagcacactctagggaataattccactccagagatggggctgcttcaaggtcttttctagctgattgtggcccctccattttccccattttcttatctccctgaccaaaattgctttgacttctaaatgtttctgcttcccagaatgcacctgacttatgaaatggggataatactcccaggaaatagcgcaggacatcacaaggaccaaaaaggcaattcttatttaaatgttactatttggccagctgctgctgtgttttatggcagtgttcagagcttgatcacgttatttcttccttttattaagaaggaagccaattgtccaagtcaggagaatggtgtgatcacctgtcacagacactttgtcccctctccccgccccttcctggagctggcagagctaacgccctgcaggaggaccccggcctctcgagggctggatcagcagccgcctgccctgaggctgccccggtgaatgttattggaattcatccctcgtgcacatcctgttgtgtttaagtcaccagatattttgttcccatcagtttagcccagagatagacagtagaatgcaaatacctccctcccctaaactgactggacggctgccaaggaggccccaaacccaggccccatgcaaaggcacgtggtttccttttctcctctctctgcatctgcgctttccagataagcccaaagacagcaacttctccactcatgacaaatcaactgtgaccctcgctccttccatttctgtccattagaaaccagccttttcagcatctcacccattagcagccccatcacccagtgatcagtcgcctcagtaaagcagatctgtggatggggagcctacgggtgaattcatctcctcctgctagcagccgcgtcctggaggagcagcggatggggaatccattctgtttcttcctggtgtttaggaagttgccccacacacagattgccccgatgtccaaccagaagaagtgaaactgctgctgggtctggagaggtgaagacccgtggccagcttctgttgttgccatcggccattgctttttgttcgcttgcttttggttttgcaagaagagcggcctctgtctctgatctgcttcaaatcatcattccatcagtgacagaagtggctgttccatcagtggtcgcagccagttcagctcctgcatccatccccaagtgttctgagtggaatttgaggcctccccaaccacctaccaaaaaaggagggtgaaatgaaaggaagaagaaaaactcagcattctttcctctgacaaagagtaaaacgacaaggaatatcggcctgaattctcttcccaagaagaaagaaagcacaccaacgcaggcatttgtcttctgtccatggtgctgaagtttattcactttcaaaccactttcagtaacaggtgaggttctaccttaaaatttaatgcatggggtgggagaggcgaggaagtcaccatcaaaccactttatctacagttagcataagatgtgagaagtgttgacaggaagctgcagcttagatgggatgatcacaactccatggcaacaagatgacacgaatgcagcagagaccccaggggacaggagcctcttgcagtctgtccctaggcccagccctgcttgtcctccctggctgttatcttcggtaccggaagctgttacagcccagtccgctctgggctccaatcctgtccatcctgcccccgaagcagctggatctccgcaggctccgaggggcagtgagcagcgccctcagcttgctttttaggagggcagatcgatcagaggagtcccaggggccccgcccgagggcacctccatctctctgggctgggctgacttccccggtccagggaggcacctcagggagggggctgagagcagcccccgcttcttcattcggctcactgagcacttgtgggggcacgacctcatcttctaaaggcatcttttcttccaaatggtccagcaaattctctggtctgacctaggagctggaatgccagtaaaaggaggaagctcacggtggtggtggagaaggagctcatgctggcgtcgtcaaggagcaatccactgcttgctgctctgtctctcccctctggttcctctctggttcccctctcttggcctacgtctgtccctgtctcccagctgcccagtgccgcctctttttatagccccccagctctccaagcacgcaggagagacagaacccttccccattctgtcacttgcagtgataaagctgccaagtgagaagccagcaggagatgcccttttaaagttatcatcccgcagggcttgtcacagcccctctctgccttgggcagccccaacagccccccagaccctcagctgcaagagccgcattcttactgatttgactcaagaggctcccacttcaaaggtgtgagaagagtaaaaaagagtccttggttatctca

SEQ ID NO: 353394 - DNA, 4126 bp, Homo sapiens
tggctgggagggggttggtagaggggtccagagtggcagtaaaggaggaagatggcggggtgcagggggtctctgtgctgctgctgcaggtggtgctgctgctgcggtgagcgtgagacccgcacccccgaggagctgaccatccttggagaaacacaggaggaggaggatgagattcttccaaggaaagactatgagagtttggattatgatcgctgtatcaatgacccttacctggaagttttggagaccatggataataagaaaggtcgaagatatgaggcggtgaagtggatggtggtgtttgccattggagtctgcactggcctggtgggtctctttgtggacttttttgtgcgactcttcacccaactcaagttcggagtggtacagacatcggtggaggagtgcagccagaaaggctgcctcgctctgtctctccttgaactcctgggttttaacctcacctttgtcttcctggcaagcctccttgttctcattgagccggtggcagcaggttccgggatacccgaggtcaaatgctatctgaatggcgtaaaggtgccaggaatcgtccgtctccggaccctgctctgcaaggtccttggagtgctgttcagtgtggctggagggctcttcgtggggaaggaaggccccatgatccacagtggttcggtggtgggagctggcctccctcagtttcagagcatctccttacggaagatccagtttaacttcccctatttccgaagcgacagagacaagagagactttgtatcagcaggagcggctgctggagttgctgcagctttcggggcgccaatcgggggtaccttgttcagtctagaggagggttcgtccttctggaaccaagggctcacgtggaaagtgctcttttgttccatgtctgccaccttcaccctcaacttcttccgttctgggattcagtttggaagctggggttccttccagctccctggattgctgaactttggcgagtttaagtgctctgactctgataaaaaatgtcatctctggacagctatggatttgggtttcttcgtcgtgatgggggtcattgggggcctcctgggagccacattcaactgtctgaacaagaggcttgcaaagtaccgtatgcgaaacgtgcacccgaaacctaagctcgtcagagtcttagagagcctccttgtgtctctggtaaccaccgtggtggtgtttgtggcctcgatggtgttaggagaatgccgacagatgtcctcttcgagtcaaatcggtaatgactcattccagctccaggtcacagaagatgtgaattcaagtatcaagacatttttttgtcccaatgatacctacaatgacatggccacactcttcttcaacccgcaggagtctgccatcctccagctcttccaccaggatggtactttcagccccgtcactctggccttgttcttcgttctctatttcttgcttgcatgttggacttacggcatttctgttccaagtggcctttttgtgccttctctgctgtgtggagctgcttttggacgtttagttgccaatgtcctaaaaagctacattggattgggccacatctattcggggacctttgccctgattggtgcagcggctttcttgggcggggtggtccgcatgaccatcagcctcacggtcatcctgatcgagtccaccaatgagatcacctacgggctccccatcatggtcacactgatggtggccaaatggacaggggactttttcaataagggcatttatgatatccacgtgggcctgcgaggcgtgccgcttctggaatgggagacagaggtggaaatggacaagctgagagccagcgacatcatggagcccaacctgacctacgtctacccgcacacccgcatccagtctctggtgagcatcctgcgcaccacggtccaccatgccttcccggtggtcacagagaaccgcggtaacgagaaggagttcatgaagggcaaccagctcatcagcaacaacatcaagttcaagaaatccagcatcctcacccgggctggcgagcagcgcaaacggagccagtccatgaagtcctacccatccagcgagctacggaacatgtgtgatgagcacatcgcctctgaggagccagccgagaaggaggacctcctgcagcagatgctggaaaggagatacactccctaccccaacctataccctgaccagtccccaagtgaagactggaccatggaggagcggttccgccctctgaccttccacggcctgatccttcggtcgcagcttgtcaccctgcttgtccgaggagtttgttactctgaaagccagtcgagcgccagccagccgcgcctctcctatgccgagatggccgaggactacccgcggtaccccgacatccacgacctggacctgacgctgctcaacccgcgcatgatcgtggatgtcaccccatacatgaacccttcgcctttcaccgtctcgcccaacacccacgtctcccaagtcttcaacctgttcagaacgatgggcctgcgccacctgcccgtggtgaacgctgtgggagagatcgtggggatcatcacacggcacaacctcacctatgaatttctgcaggcccggctgaggcagcactaccagaccatctgacagcccagcccaccctctcctggtgctgcctggggaggcaaatcatgctcactccggcgggcacagctggctggggctgttccggggcatggaagattcccagttacccactcactcagaaagccgggagtcatcggacaccttgctggtcagaggccctgggggtggttttgaaccatcagagcttggacttttctgacttccccagcaaggatcttcccacttcctgctccctgtgttcccaccctccagtgttggcacaggcccacccctggctccaccagagccagaagcagaggtagaatcaggcgggccccgggctgcactccgagcagtgttcctggccatctttgctactttcctagagaacccggctgttgccttaaatgtgtgagagggacttggccaaggcaaaagctggggagatgccagtgacaacatacagttcatgactaggtttaggaattgggcactgagaaaattctcaatatttcagagagtccttcccttatttgggactcctaacacggtatcctcgctagtttgttttaagggaaacactctgctcctgggtgtgagcagaggctctggtcttgccctgtggtttgactctccttagaaccaccgcccaccagaaacataaaggattaaaatcacactaataacccctggatggtcaatctgataataggatcagatttacgtctaccctaattcttaacattgcagctttctctccatctgcagattattcccagtctcccagtaacacgtttctacccagatcctttttcatttccttaagttttgatctccgtcttcctgatgaagcaggcagagctcagaggatcttggcatcacccaccaaagttagctgaaagcagggcactcctggataaagcagcttcactcaactctggggaatgctaccattttttttccaaagtagaaaggaagcacttctgagccagtgaccactgaaagcttggtgttccatggcccctaggcgaggtgatcagggagtggggccaatgggcccccggccctggctttgggaccttgtgctgagggatgatttgctcctgaccttgattaacttaacagttcccagctggaagggacactttcaggacccagtccactgtatggcatttgtgatgcagaattatgcactgacatgaccctgggtgacaggaaagcctttcgagaggcccaaggtggcctcgccagccctgcagtattgatgtgcagtattgcaccacagctctgcggaccttggccattgccgcagtcgcagcttccttttttctgtttgcactgtttgtttgtatgatgttagctaattccactgtgtatataaattgtattttttttaatttgtaaaatgctatttttatttgaacctttggaacttgggagttctcattgtaaccctaacatgtgagaataaaatgtcttctgtctc

SEQ ID NO: 353395 - DNA, 369 bp, Homo sapiens
accccaggggacaggagcctcttgcagtctgtccctaggcccagccctgcttgtcctccctggctgttatcttcggtactgcaaagagaacacagacatatctggcttggtgacctggctgtcctggaaaagtcagcttcatgtatgagtgtgcccatcctctgaacttgattactgaccacctgcttcccaccggcccccaccccagcctgatgaccctctgagcttcatgaattgataagcaagttactcatcagagtaaatttcacttaagcccttcaggatcttgcaattctggggaggaatatgaactgctaatcagccatgcaaagataacttggctctatgaatattttaatttcccagtgc

SEQ ID NO: 353396 - DNA, 434 bp, Homo sapiens
aaatcggggctgggggtaggcagggttatgttttgaatttctgagaccagagcttctttctgtggcgttgtaacagctgtgctttgcctcctagagtcttagagagcctccttgtgtctctggtaaccaccgtggtggtgtttgtggcctcgatggtgttaggagaatgccgacagatgtcctcttcgagtcaaatcggtaatgactcattccagctccaggtaaccccagtgcacctgctacctttatcccataccacgaggaagaatccagaaatgtatgaccttcctctgttgagaactaatagatatgttgggttcatccttccacacccattacctgagcgttgagagatatgggaatctgtagtcgtctttttacctcagagaaagtgcacaccacatgccctgtgtctttgccacttctgtgaacaa

SEQ ID NO: 353397 - DNA, 402 bp, Homo sapiens
gctgtttatcccaatcaagctgtgtctggctgtgcactatccaggcctccacattctgtgacaaactaacagggccggctcctgtcactcctgttctcgccagcgggttttaccctgaaggtgactcaggccttctctttgccctagatcgtggggatcatcacacggcacaacctcacctatgaatttctgcaggcccggctgaggcagcactaccagaccatctgacagcccagcccaccctctcctggtgctgcctggggaggcaaatcatgctcactccggcgggcacagctggctggggctgttccggggcatggaagattcccagttacccactcactcagaaagccgggagtcatcggacaccttgctggtcagaggccctgggggtggttttga

SEQ ID NO: 353398 - DNA, 3911 bp, Homo sapiens
tggctgggagggggttggtagaggggtccagagtggcagtaaaggaggaagatggcggggtgcagggggtctctgtgctgctgctgcaggtggtgctgctgctgcggtgagcgtgagacccgcacccccgaggagctgaccatccttggagaaacacaggaggaggaggatgagattcttccaaggaaagactatgagagtttggattatgatcgctgtatcaatgacccttacctggaagttttggagaccatggataataagaaaggtcgaagatatgaggcggtgaagtggatggtggtgtttgccattggagtctgcactggcctggtgggtctctttgtggacttttttgtgcgactcttcacccaactcaagttcggagtggtacagacatcggtggaggagtgcagccagaaaggctgcctcgctctgtctctccttgaactcctgggttttaacctcacctttgtcttcctggcaagcctccttgttctcattgagccggtggcagcaggttccgggatacccgaggtcaaatgctatctgaatggcgtaaaggtgccaggaatcgtccgtctccggaccctgctctgcaaggtccttggagtgctgttcagtgtggctggagggctcttcgtggggaaggaaggccccatgatccacagtggttcggtggtgggagctggcctccctcagtttcagagcatctccttacggaagatccagtttaacttcccctatttccgaagcgacagagacaagagagactttgtatcagcaggagcggctgctggagttgctgcagctttcggggcgccaatcgggggtaccttgttcagtctagaggagggttcgtccttctggaaccaagggctcacgtggaaagtgctcttttgttccatgtctgccaccttcaccctcaacttcttccgttctgggattcagtttggaagctggggttccttccagctccctggattgctgaactttggcgagtttaagagcccagcccaccctctcctggtgctgcctggggaggcaaatcatgctcactccggcgggcacagctggctggggctgttccggggcatggaagattcccagttacccactcactcagaaagccgggagtcatcggacaccttgctggtcagaggccctgggggtggttttgaaccatcagagcttggacttttctgacttccccagcaaggatcttcccacttcctgctccctgtgttcccaccctccagtgttggcacaggcccacccctggctccaccagagccagaagcagaggtagaatcaggcgggccccgggctgcactccgagcagtgttcctggccatctttgctactttcctagagaacccggctgttgccttaaatgtgtgagagggacttggccaaggcaaaagctggggagatgccagtgacaacatacagttcatgactaggtttaggaattgggcactgagaaaattctcaatatttcagagagtccttcccttatttgggactcctaacacggtatcctcgctagtttgttttaagggaaacactctgctcctgggtgtgagcagaggctctggtcttgccctgtggtttgactctccttagaaccaccgcccaccagaaacataaaggattaaaatcacactaataacccctggatggtcaatctgataataggatcagatttacgtctaccctaattcttaacattgcagctttctctccatctgcagattattcccagtctcccagtaacacgtttctacccagatcctttttcatttccttaagttttgatctccgtcttcctgatgaagcaggcagagctcagaggatcttggcatcacccaccaaagttagctgaaagcagggcactcctggataaagcagcttcactcaactctggggaatgctaccattttttttccaaagtagaaaggaagcacttctgagccagtgaccactgaaaggtatgtgctatgataaagcagatggcctatttgaggaagagggtgtctgcccttcacaaacacctctctctcccctgcactagctgtcccaagcttacatacagaggcccttcaggagggcctcctgtgccgcagggagggtgcgtggggaagatgcttcctgccagcacgtgcctgaaggtttcacatgaagcatgggaagcgcaccctgtcgttcagtgacgtcattcttctccaggctggcccgccccctctgactaggcacccaaagtgagcatctgggcattgggcattcatgcttatcttcccccaccttctacatggtatcagtcccagcaggcatccctggggcagacgtgctttggctcaagatggccttcatttacgtttagttttttttaaaaccgtggaggttgcccacgggcctcggcacctggccctggcagcacagctctcaggcccagccctgggcgacctccttggccaagtctgcctttcaccctggggtgagcatcagtcctggctctgctggtccagatcttgcgctcagcacactctagggaataattccactccagagatggggctgcttcaaggtcttttctagctgattgtggcccctccattttccccattttcttatctccctgaccaaaattgctttgacttctaaatgtttctgcttcccagaatgcacctgacttatgaaatggggataatactcccaggaaatagcgcaggacatcacaaggaccaaaaaggcaattcttatttaaatgttactatttggccagctgctgctgtgttttatggcagtgttcagagcttgatcacgttatttcttccttttattaagaaggaagccaattgtccaagtcaggagaatggtgtgatcacctgtcacagacactttgtcccctctccccgccccttcctggagctggcagagctaacgccctgcaggaggaccccggcctctcgagggctggatcagcagccgcctgccctgaggctgccccggtgaatgttattggaattcatccctcgtgcacatcctgttgtgtttaagtcaccagatattttgttcccatcagtttagcccagagatagacagtagaatgcaaatacctccctcccctaaactgactggacggctgccaaggaggccccaaacccaggccccatgcaaaggcacgtggtttccttttctcctctctctgcatctgcgctttccagataagcccaaagacagcaacttctccactcatgacaaatcaactgtgaccctcgctccttccatttctgtccattagaaaccagccttttcagcatctcacccattagcagccccatcacccagtgatcagtcgcctcagtaaagcagatctgtggatggggagcctacgggtggtaagaagtggtgttttgtgtttcatctccagcttggtgttccatggcccctaggcgaggtgatcagggagtggggccaatgggcccccggccctggctttgggaccttgtgctgagggatgatttgctcctgaccttgattaacttaacagttcccagctggaagggacactttcaggacccagtccactgtatggcatttgtgatgcagaattatgcactgacatgaccctgggtgacaggaaagcctttcgagaggcccaaggtggcctcgccagccctgcagtattgatgtgcagtattgcaccacagctctgcggaccttggccattgccgcagtcgcagcttccttttttctgtttgcactgtttgtttgtatgatgttagctaattccactgtgtatataaattgtattttttttaatttgtaaaatgctatttttatttgaacctttggaacttgggagttctcattgtaaccctaacatgtgagaataaaatgtcttctgtctc

SEQ ID NO: 353399 - DNA, 3885 bp, Homo sapiens
tggctgggagggggttggtagaggggtccagagtggcagtaaaggaggaagatggcggggtgcagggggtctctgtgctgctgctgcaggtggtgctgctgctgcggtgagcgtgagacccgcacccccgaggagctgaccatccttggagaaacacaggaggaggaggatgagattcttccaaggaaagactatgagagtttggattatgatcgctgtatcaatgacccttacctggaagttttggagaccatggataataagaaaggtcgaagatatgaggcggtgaagtggatggtggtgtttgccattggagtctgcactggcctggtgggtctctttgtggacttttttgtgcgactcttcacccaactcaagttcggagtggtacagacatcggtggaggagtgcagccagaaaggctgcctcgctctgtctctccttgaactcctgggttttaacctcacctttgtcttcctggcaagcctccttgttctcattgagccggtggcagcaggttccgggatacccgaggtcaaatgctatctgaatggcgtaaaggtgccaggaatcgtccgtctccggaccctgctctgcaaggtccttggagtgctgttcagtgtggctggagggctcttcgtggggaaggaaggccccatgatccacagtggttcggtggtgggagctggcctccctcagtttcagagcatctccttacggaagatccagtttaacttcccctatttccgaagcgacaggagcggctgctggagttgctgcagctttcggggcgccaatcgggggtaccttgttcagtctagaggagggttcgtccttctggaaccaagggctcacgtggaaagtgctcttttgttccatgtctgccaccttcaccctcaacttcttccgttctgggattcagtttggaagctggggttccttccagctccctggattgctgaactttggcgagtttaagagcccagcccaccctctcctggtgctgcctggggaggcaaatcatgctcactccggcgggcacagctggctggggctgttccggggcatggaagattcccagttacccactcactcagaaagccgggagtcatcggacaccttgctggtcagaggccctgggggtggttttgaaccatcagagcttggacttttctgacttccccagcaaggatcttcccacttcctgctccctgtgttcccaccctccagtgttggcacaggcccacccctggctccaccagagccagaagcagaggtagaatcaggcgggccccgggctgcactccgagcagtgttcctggccatctttgctactttcctagagaacccggctgttgccttaaatgtgtgagagggacttggccaaggcaaaagctggggagatgccagtgacaacatacagttcatgactaggtttaggaattgggcactgagaaaattctcaatatttcagagagtccttcccttatttgggactcctaacacggtatcctcgctagtttgttttaagggaaacactctgctcctgggtgtgagcagaggctctggtcttgccctgtggtttgactctccttagaaccaccgcccaccagaaacataaaggattaaaatcacactaataacccctggatggtcaatctgataataggatcagatttacgtctaccctaattcttaacattgcagctttctctccatctgcagattattcccagtctcccagtaacacgtttctacccagatcctttttcatttccttaagttttgatctccgtcttcctgatgaagcaggcagagctcagaggatcttggcatcacccaccaaagttagctgaaagcagggcactcctggataaagcagcttcactcaactctggggaatgctaccattttttttccaaagtagaaaggaagcacttctgagccagtgaccactgaaaggtatgtgctatgataaagcagatggcctatttgaggaagagggtgtctgcccttcacaaacacctctctctcccctgcactagctgtcccaagcttacatacagaggcccttcaggagggcctcctgtgccgcagggagggtgcgtggggaagatgcttcctgccagcacgtgcctgaaggtttcacatgaagcatgggaagcgcaccctgtcgttcagtgacgtcattcttctccaggctggcccgccccctctgactaggcacccaaagtgagcatctgggcattgggcattcatgcttatcttcccccaccttctacatggtatcagtcccagcaggcatccctggggcagacgtgctttggctcaagatggccttcatttacgtttagttttttttaaaaccgtggaggttgcccacgggcctcggcacctggccctggcagcacagctctcaggcccagccctgggcgacctccttggccaagtctgcctttcaccctggggtgagcatcagtcctggctctgctggtccagatcttgcgctcagcacactctagggaataattccactccagagatggggctgcttcaaggtcttttctagctgattgtggcccctccattttccccattttcttatctccctgaccaaaattgctttgacttctaaatgtttctgcttcccagaatgcacctgacttatgaaatggggataatactcccaggaaatagcgcaggacatcacaaggaccaaaaaggcaattcttatttaaatgttactatttggccagctgctgctgtgttttatggcagtgttcagagcttgatcacgttatttcttccttttattaagaaggaagccaattgtccaagtcaggagaatggtgtgatcacctgtcacagacactttgtcccctctccccgccccttcctggagctggcagagctaacgccctgcaggaggaccccggcctctcgagggctggatcagcagccgcctgccctgaggctgccccggtgaatgttattggaattcatccctcgtgcacatcctgttgtgtttaagtcaccagatattttgttcccatcagtttagcccagagatagacagtagaatgcaaatacctccctcccctaaactgactggacggctgccaaggaggccccaaacccaggccccatgcaaaggcacgtggtttccttttctcctctctctgcatctgcgctttccagataagcccaaagacagcaacttctccactcatgacaaatcaactgtgaccctcgctccttccatttctgtccattagaaaccagccttttcagcatctcacccattagcagccccatcacccagtgatcagtcgcctcagtaaagcagatctgtggatggggagcctacgggtggtaagaagtggtgttttgtgtttcatctccagcttggtgttccatggcccctaggcgaggtgatcagggagtggggccaatgggcccccggccctggctttgggaccttgtgctgagggatgatttgctcctgaccttgattaacttaacagttcccagctggaagggacactttcaggacccagtccactgtatggcatttgtgatgcagaattatgcactgacatgaccctgggtgacaggaaagcctttcgagaggcccaaggtggcctcgccagccctgcagtattgatgtgcagtattgcaccacagctctgcggaccttggccattgccgcagtcgcagcttccttttttctgtttgcactgtttgtttgtatgatgttagctaattccactgtgtatataaattgtattttttttaatttgtaaaatgctatttttatttgaacctttggaacttgggagttctcattgtaaccctaacatgtgagaataaaatgtcttctgtctc

SEQ ID NO: 353400 - DNA, 6709 bp, Homo sapiens
tggctgggagggggttggtagaggggtccagagtggcagtaaaggaggaagatggcggggtgcagggggtctctgtgctgctgctgcaggtggtgctgctgctgcggtgagcgtgagacccgcacccccgaggagctgaccatccttggagaaacacaggaggaggaggatgagattcttccaaggaaagactatgagagtttggattatgatcgctgtatcaatgacccttacctggaagttttggagaccatggataataagaaaggtcgaagatatgaggcggtgaagtggatggtggtgtttgccattggagtctgcactggcctggtgggtctctttgtggacttttttgtgcgactcttcacccaactcaagttcggagtggtacagacatcggtggaggagtgcagccagaaaggctgcctcgctctgtctctccttgaactcctgggttttaacctcacctttgtcttcctggcaagcctccttgttctcattgagccggtggcagcaggttccgggatacccgaggtcaaatgctatctgaatggcgtaaaggtgccaggaatcgtccgtctccggaccctgctctgcaaggtccttggagtgctgttcagtgtggctggagggctcttcgtggggaaggaaggccccatgatccacagtggttcggtggtgggagctggcctccctcagtttcagagcatctccttacggaagatccagtttaacttcccctatttccgaagcgacagagacaagagagactttgtatcagcaggagcggctgctggagttgctgcagctttcggggcgccaatcgggggtaccttgttcagtctagaggagggttcgtccttctggaaccaagggctcacgtggaaagtgctcttttgttccatgtctgccaccttcaccctcaacttcttccgttctgggattcagtttggaagctggggttccttccagctccctggattgctgaactttggcgagtttaagtgctctgactctgataaaaaatgtcatctctggacagctatggatttgggtttcttcgtcgtgatgggggtcattgggggcctcctgggagccacattcaactgtctgaacaagaggcttgcaaagtaccgtatgcgaaacgtgcacccgaaacctaagctcgtcagagtcttagagagcctccttgtgtctctggtaaccaccgtggtggtgtttgtggcctcgatggtgttaggagaatgccgacagatgtcctcttcgagtcaaatcggtaatgactcattccagctccaggtcacagaagatgtgaattcaagtatcaagacatttttttgtcccaatgatacctacaatgacatggccacactcttcttcaacccgcaggagtctgccatcctccagctcttccaccaggatggtactttcagccccgtcactctggccttgttcttcgttctctatttcttgcttgcatgttggacttacggcatttctgttccaagtggcctttttgtgccttctctgctgtgtggagctgcttttggacgtttagttgccaatgtcctaaaaagctacattggattgggccacatctattcggggacctttgccctgattggtgcagcggctttcttgggcggggtggtccgcatgaccatcagcctcacggtcatcctgatcgagtccaccaatgagatcacctacgggctccccatcatggtcacactgatggtggccaaatggacaggggactttttcaataagggcatttatgatatccacgtgggcctgcgaggcgtgccgcttctggaatgggagacagaggtggaaatggacaagctgagagccagcgacatcatggagcccaacctgacctacgtctacccgcacacccgcatccagtctctggtgagcatcctgcgcaccacggtccaccatgccttcccggtggtcacagagaaccgcggtaacgagaaggagttcatgaagggcaaccagctcatcagcaacaacatcaagttcaagaaatccagcatcctcacccgggctggcgagcagcgcaaacggagccagtccatgaagtcctacccatccagcgagctacggaacatgtgtgatgagcacatcgcctctgaggagccagccgagaaggaggacctcctgcagcagatgctggaaaggagatacactccctaccccaacctataccctgaccagtccccaagtgaagactggaccatggaggagcggttccgccctctgaccttccacggcctgatccttcggtcgcagcttgtcaccctgcttgtccgaggagtttgttactctgaaagccagtcgagcgccagccagccgcgcctctcctatgccgagatggccgaggactacccgcggtaccccgacatccacgacctggacctgacgctgctcaacccgcgcatgatcgtggatgtcaccccatacatgaacccttcgcctttcaccgtctcgcccaacacccacgtctcccaagtcttcaacctgttcagaacgatgggcctgcgccacctgcccgtggtgaacgctgtgggagagatcgtggggatcatcacacggcacaacctcacctatgaatttctgcaggcccggctgaggcagcactaccagaccatctgacagcccagcccaccctctcctggtgctgcctggggaggcaaatcatgctcactccggcgggcacagctggctggggctgttccggggcatggaagattcccagttacccactcactcagaaagccgggagtcatcggacaccttgctggtcagaggccctgggggtggttttgaaccatcagagcttggacttttctgacttccccagcaaggatcttcccacttcctgctccctgtgttcccaccctccagtgttggcacaggcccacccctggctccaccagagccagaagcagaggtagaatcaggcgggccccgggctgcactccgagcagtgttcctggccatctttgctactttcctagagaacccggctgttgccttaaatgtgtgagagggacttggccaaggcaaaagctggggagatgccagtgacaacatacagttcatgactaggtttaggaattgggcactgagaaaattctcaatatttcagagagtccttcccttatttgggactcctaacacggtatcctcgctagtttgttttaagggaaacactctgctcctgggtgtgagcagaggctctggtcttgccctgtggtttgactctccttagaaccaccgcccaccagaaacataaaggattaaaatcacactaataacccctggatggtcaatctgataataggatcagatttacgtctaccctaattcttaacattgcagctttctctccatctgcagattattcccagtctcccagtaacacgtttctacccagatcctttttcatttccttaagttttgatctccgtcttcctgatgaagcaggcagagctcagaggatcttggcatcacccaccaaagttagctgaaagcagggcactcctggataaagcagcttcactcaactctggggaatgctaccattttttttccaaagtagaaaggaagcacttctgagccagtgaccactgaaaggtatgtgctatgataaagcagatggcctatttgaggaagagggtgtctgcccttcacaaacacctctctctcccctgcactagctgtcccaagcttacatacagaggcccttcaggagggcctcctgtgccgcagggagggtgcgtggggaagatgcttcctgccagcacgtgcctgaaggtttcacatgaagcatgggaagcgcaccctgtcgttcagtgacgtcattcttctccaggctggcccgccccctctgactaggcacccaaagtgagcatctgggcattgggcattcatgcttatcttcccccaccttctacatggtatcagtcccagcaggcatccctggggcagacgtgctttggctcaagatggccttcatttacgtttagttttttttaaaaccgtggaggttgcccacgggcctcggcacctggccctggcagcacagctctcaggcccagccctgggcgacctccttggccaagtctgcctttcaccctggggtgagcatcagtcctggctctgctggtccagatcttgcgctcagcacactctagggaataattccactccagagatggggctgcttcaaggtcttttctagctgattgtggcccctccattttccccattttcttatctccctgaccaaaattgctttgacttctaaatgtttctgcttcccagaatgcacctgacttatgaaatggggataatactcccaggaaatagcgcaggacatcacaaggaccaaaaaggcaattcttatttaaatgttactatttggccagctgctgctgtgttttatggcagtgttcagagcttgatcacgttatttcttccttttattaagaaggaagccaattgtccaagtcaggagaatggtgtgatcacctgtcacagacactttgtcccctctccccgccccttcctggagctggcagagctaacgccctgcaggaggaccccggcctctcgagggctggatcagcagccgcctgccctgaggctgccccggtgaatgttattggaattcatccctcgtgcacatcctgttgtgtttaagtcaccagatattttgttcccatcagtttagcccagagatagacagtagaatgcaaatacctccctcccctaaactgactggacggctgccaaggaggccccaaacccaggccccatgcaaaggcacgtggtttccttttctcctctctctgcatctgcgctttccagataagcccaaagacagcaacttctccactcatgacaaatcaactgtgaccctcgctccttccatttctgtccattagaaaccagccttttcagcatctcacccattagcagccccatcacccagtgatcagtcgcctcagtaaagcagatctgtggatggggagcctacgggtgaattcatctcctcctgctagcagccgcgtcctggaggagcagcggatggggaatccattctgtttcttcctggtgtttaggaagttgccccacacacagattgccccgatgtccaaccagaagaagtgaaactgctgctgggtctggagaggtgaagacccgtggccagcttctgttgttgccatcggccattgctttttgttcgcttgcttttggttttgcaagaagagcggcctctgtctctgatctgcttcaaatcatcattccatcagtgacagaagtggctgttccatcagtggtcgcagccagttcagctcctgcatccatccccaagtgttctgagtggaatttgaggcctccccaaccacctaccaaaaaaggagggtgaaatgaaaggaagaagaaaaactcagcattctttcctctgacaaagagtaaaacgacaaggaatatcggcctgaattctcttcccaagaagaaagaaagcacaccaacgcaggcatttgtcttctgtccatggtgctgaagtttattcactttcaaaccactttcagtaacaggtgaggttctaccttaaaatttaatgcatggggtgggagaggcgaggaagtcaccatcaaaccactttatctacagttagcataagatgtgagaagtgttgacaggaagctgcagcttagatgggatgatcacaactccatggcaacaagatgacacgaatgcagcagagaccccaggggacaggagcctcttgcagtctgtccctaggcccagccctgcttgtcctccctggctgttatcttcggtaccggaagctgttacagcccagtccgctctgggctccaatcctgtccatcctgcccccgaagcagctggatctccgcaggctccgaggggcagtgagcagcgccctcagcttgctttttaggagggcagatcgatcagaggagtcccaggggccccgcccgagggcacctccatctctctgggctgggctgacttccccggtccagggaggcacctcagggagggggctgagagcagcccccgcttcttcattcggctcactgagcacttgtgggggcacgacctcatcttctaaaggcatcttttcttccaaatggtccagcaaattcttgaaatccatcaggtctgcgttggacacggcattgtacatgggattagctctggtctgacctaggagctggaatgccagtaaaaggaggaagctcacggtggtggtggagaaggagctcatgctggcgtcgtcaaggagcaatccactgcttgctgctctgtctctcccctctggttcctctctggttcccctctcttggcctacgtctgtccctgtctcccagctgcccagtgccgcctctttttatagccccccagctctccaagcacgcaggagagacagaacccttccccattctgtcacttgcagtgataaagctgccaagtgagaagccagcaggagatgcccttttaaagttatcatcccgcagggcttgtcacagcccctctctgccttgggcagccccaacagccccccagaccctcagctgcaagagccgcattcttactgatttgactcaagaggctcccacttcaaaggtgtgagaagagtaaaaaagagtccttggttatctca

SEQ ID NO: 353401 - DNA, 6683 bp, Homo sapiens
tggctgggagggggttggtagaggggtccagagtggcagtaaaggaggaagatggcggggtgcagggggtctctgtgctgctgctgcaggtggtgctgctgctgcggtgagcgtgagacccgcacccccgaggagctgaccatccttggagaaacacaggaggaggaggatgagattcttccaaggaaagactatgagagtttggattatgatcgctgtatcaatgacccttacctggaagttttggagaccatggataataagaaaggtcgaagatatgaggcggtgaagtggatggtggtgtttgccattggagtctgcactggcctggtgggtctctttgtggacttttttgtgcgactcttcacccaactcaagttcggagtggtacagacatcggtggaggagtgcagccagaaaggctgcctcgctctgtctctccttgaactcctgggttttaacctcacctttgtcttcctggcaagcctccttgttctcattgagccggtggcagcaggttccgggatacccgaggtcaaatgctatctgaatggcgtaaaggtgccaggaatcgtccgtctccggaccctgctctgcaaggtccttggagtgctgttcagtgtggctggagggctcttcgtggggaaggaaggccccatgatccacagtggttcggtggtgggagctggcctccctcagtttcagagcatctccttacggaagatccagtttaacttcccctatttccgaagcgacaggagcggctgctggagttgctgcagctttcggggcgccaatcgggggtaccttgttcagtctagaggagggttcgtccttctggaaccaagggctcacgtggaaagtgctcttttgttccatgtctgccaccttcaccctcaacttcttccgttctgggattcagtttggaagctggggttccttccagctccctggattgctgaactttggcgagtttaagtgctctgactctgataaaaaatgtcatctctggacagctatggatttgggtttcttcgtcgtgatgggggtcattgggggcctcctgggagccacattcaactgtctgaacaagaggcttgcaaagtaccgtatgcgaaacgtgcacccgaaacctaagctcgtcagagtcttagagagcctccttgtgtctctggtaaccaccgtggtggtgtttgtggcctcgatggtgttaggagaatgccgacagatgtcctcttcgagtcaaatcggtaatgactcattccagctccaggtcacagaagatgtgaattcaagtatcaagacatttttttgtcccaatgatacctacaatgacatggccacactcttcttcaacccgcaggagtctgccatcctccagctcttccaccaggatggtactttcagccccgtcactctggccttgttcttcgttctctatttcttgcttgcatgttggacttacggcatttctgttccaagtggcctttttgtgccttctctgctgtgtggagctgcttttggacgtttagttgccaatgtcctaaaaagctacattggattgggccacatctattcggggacctttgccctgattggtgcagcggctttcttgggcggggtggtccgcatgaccatcagcctcacggtcatcctgatcgagtccaccaatgagatcacctacgggctccccatcatggtcacactgatggtggccaaatggacaggggactttttcaataagggcatttatgatatccacgtgggcctgcgaggcgtgccgcttctggaatgggagacagaggtggaaatggacaagctgagagccagcgacatcatggagcccaacctgacctacgtctacccgcacacccgcatccagtctctggtgagcatcctgcgcaccacggtccaccatgccttcccggtggtcacagagaaccgcggtaacgagaaggagttcatgaagggcaaccagctcatcagcaacaacatcaagttcaagaaatccagcatcctcacccgggctggcgagcagcgcaaacggagccagtccatgaagtcctacccatccagcgagctacggaacatgtgtgatgagcacatcgcctctgaggagccagccgagaaggaggacctcctgcagcagatgctggaaaggagatacactccctaccccaacctataccctgaccagtccccaagtgaagactggaccatggaggagcggttccgccctctgaccttccacggcctgatccttcggtcgcagcttgtcaccctgcttgtccgaggagtttgttactctgaaagccagtcgagcgccagccagccgcgcctctcctatgccgagatggccgaggactacccgcggtaccccgacatccacgacctggacctgacgctgctcaacccgcgcatgatcgtggatgtcaccccatacatgaacccttcgcctttcaccgtctcgcccaacacccacgtctcccaagtcttcaacctgttcagaacgatgggcctgcgccacctgcccgtggtgaacgctgtgggagagatcgtggggatcatcacacggcacaacctcacctatgaatttctgcaggcccggctgaggcagcactaccagaccatctgacagcccagcccaccctctcctggtgctgcctggggaggcaaatcatgctcactccggcgggcacagctggctggggctgttccggggcatggaagattcccagttacccactcactcagaaagccgggagtcatcggacaccttgctggtcagaggccctgggggtggttttgaaccatcagagcttggacttttctgacttccccagcaaggatcttcccacttcctgctccctgtgttcccaccctccagtgttggcacaggcccacccctggctccaccagagccagaagcagaggtagaatcaggcgggccccgggctgcactccgagcagtgttcctggccatctttgctactttcctagagaacccggctgttgccttaaatgtgtgagagggacttggccaaggcaaaagctggggagatgccagtgacaacatacagttcatgactaggtttaggaattgggcactgagaaaattctcaatatttcagagagtccttcccttatttgggactcctaacacggtatcctcgctagtttgttttaagggaaacactctgctcctgggtgtgagcagaggctctggtcttgccctgtggtttgactctccttagaaccaccgcccaccagaaacataaaggattaaaatcacactaataacccctggatggtcaatctgataataggatcagatttacgtctaccctaattcttaacattgcagctttctctccatctgcagattattcccagtctcccagtaacacgtttctacccagatcctttttcatttccttaagttttgatctccgtcttcctgatgaagcaggcagagctcagaggatcttggcatcacccaccaaagttagctgaaagcagggcactcctggataaagcagcttcactcaactctggggaatgctaccattttttttccaaagtagaaaggaagcacttctgagccagtgaccactgaaaggtatgtgctatgataaagcagatggcctatttgaggaagagggtgtctgcccttcacaaacacctctctctcccctgcactagctgtcccaagcttacatacagaggcccttcaggagggcctcctgtgccgcagggagggtgcgtggggaagatgcttcctgccagcacgtgcctgaaggtttcacatgaagcatgggaagcgcaccctgtcgttcagtgacgtcattcttctccaggctggcccgccccctctgactaggcacccaaagtgagcatctgggcattgggcattcatgcttatcttcccccaccttctacatggtatcagtcccagcaggcatccctggggcagacgtgctttggctcaagatggccttcatttacgtttagttttttttaaaaccgtggaggttgcccacgggcctcggcacctggccctggcagcacagctctcaggcccagccctgggcgacctccttggccaagtctgcctttcaccctggggtgagcatcagtcctggctctgctggtccagatcttgcgctcagcacactctagggaataattccactccagagatggggctgcttcaaggtcttttctagctgattgtggcccctccattttccccattttcttatctccctgaccaaaattgctttgacttctaaatgtttctgcttcccagaatgcacctgacttatgaaatggggataatactcccaggaaatagcgcaggacatcacaaggaccaaaaaggcaattcttatttaaatgttactatttggccagctgctgctgtgttttatggcagtgttcagagcttgatcacgttatttcttccttttattaagaaggaagccaattgtccaagtcaggagaatggtgtgatcacctgtcacagacactttgtcccctctccccgccccttcctggagctggcagagctaacgccctgcaggaggaccccggcctctcgagggctggatcagcagccgcctgccctgaggctgccccggtgaatgttattggaattcatccctcgtgcacatcctgttgtgtttaagtcaccagatattttgttcccatcagtttagcccagagatagacagtagaatgcaaatacctccctcccctaaactgactggacggctgccaaggaggccccaaacccaggccccatgcaaaggcacgtggtttccttttctcctctctctgcatctgcgctttccagataagcccaaagacagcaacttctccactcatgacaaatcaactgtgaccctcgctccttccatttctgtccattagaaaccagccttttcagcatctcacccattagcagccccatcacccagtgatcagtcgcctcagtaaagcagatctgtggatggggagcctacgggtgaattcatctcctcctgctagcagccgcgtcctggaggagcagcggatggggaatccattctgtttcttcctggtgtttaggaagttgccccacacacagattgccccgatgtccaaccagaagaagtgaaactgctgctgggtctggagaggtgaagacccgtggccagcttctgttgttgccatcggccattgctttttgttcgcttgcttttggttttgcaagaagagcggcctctgtctctgatctgcttcaaatcatcattccatcagtgacagaagtggctgttccatcagtggtcgcagccagttcagctcctgcatccatccccaagtgttctgagtggaatttgaggcctccccaaccacctaccaaaaaaggagggtgaaatgaaaggaagaagaaaaactcagcattctttcctctgacaaagagtaaaacgacaaggaatatcggcctgaattctcttcccaagaagaaagaaagcacaccaacgcaggcatttgtcttctgtccatggtgctgaagtttattcactttcaaaccactttcagtaacaggtgaggttctaccttaaaatttaatgcatggggtgggagaggcgaggaagtcaccatcaaaccactttatctacagttagcataagatgtgagaagtgttgacaggaagctgcagcttagatgggatgatcacaactccatggcaacaagatgacacgaatgcagcagagaccccaggggacaggagcctcttgcagtctgtccctaggcccagccctgcttgtcctccctggctgttatcttcggtaccggaagctgttacagcccagtccgctctgggctccaatcctgtccatcctgcccccgaagcagctggatctccgcaggctccgaggggcagtgagcagcgccctcagcttgctttttaggagggcagatcgatcagaggagtcccaggggccccgcccgagggcacctccatctctctgggctgggctgacttccccggtccagggaggcacctcagggagggggctgagagcagcccccgcttcttcattcggctcactgagcacttgtgggggcacgacctcatcttctaaaggcatcttttcttccaaatggtccagcaaattcttgaaatccatcaggtctgcgttggacacggcattgtacatgggattagctctggtctgacctaggagctggaatgccagtaaaaggaggaagctcacggtggtggtggagaaggagctcatgctggcgtcgtcaaggagcaatccactgcttgctgctctgtctctcccctctggttcctctctggttcccctctcttggcctacgtctgtccctgtctcccagctgcccagtgccgcctctttttatagccccccagctctccaagcacgcaggagagacagaacccttccccattctgtcacttgcagtgataaagctgccaagtgagaagccagcaggagatgcccttttaaagttatcatcccgcagggcttgtcacagcccctctctgccttgggcagccccaacagccccccagaccctcagctgcaagagccgcattcttactgatttgactcaagaggctcccacttcaaaggtgtgagaagagtaaaaaagagtccttggttatctca

SEQ ID NO: 353402 - DNA, 6686 bp, Homo sapiens
tggctgggagggggttggtagaggggtccagagtggcagtaaaggaggaagatggcggggtgcagggggtctctgtgctgctgctgcaggtggtgctgctgctgcggtgagcgtgagacccgcacccccgaggagctgaccatccttggagaaacacaggaggaggaggatgagattcttccaaggaaagactatgagagtttggattatgatcgctgtatcaatgacccttacctggaagttttggagaccatggataataagaaaggtcgaagatatgaggcggtgaagtggatggtggtgtttgccattggagtctgcactggcctggtgggtctctttgtggacttttttgtgcgactcttcacccaactcaagttcggagtggtacagacatcggtggaggagtgcagccagaaaggctgcctcgctctgtctctccttgaactcctgggttttaacctcacctttgtcttcctggcaagcctccttgttctcattgagccggtggcagcaggttccgggatacccgaggtcaaatgctatctgaatggcgtaaaggtgccaggaatcgtccgtctccggaccctgctctgcaaggtccttggagtgctgttcagtgtggctggagggctcttcgtggggaaggaaggccccatgatccacagtggttcggtggtgggagctggcctccctcagtttcagagcatctccttacggaagatccagtttaacttcccctatttccgaagcgacagagacaagagagactttgtatcagcaggagcggctgctggagttgctgcagctttcggggcgccaatcgggggtaccttgttcagtctagaggagggttcgtccttctggaaccaagggctcacgtggaaagtgctcttttgttccatgtctgccaccttcaccctcaacttcttccgttctgggattcagtttggaagctggggttccttccagctccctggattgctgaactttggcgagtttaagtgctctgactctgataaaaaatgtcatctctggacagctatggatttgggtttcttcgtcgtgatgggggtcattgggggcctcctgggagccacattcaactgtctgaacaagaggcttgcaaagtaccgtatgcgaaacgtgcacccgaaacctaagctcgtcagagtcttagagagcctccttgtgtctctggtaaccaccgtggtggtgtttgtggcctcgatggtgttaggagaatgccgacagatgtcctcttcgagtcaaatcggtaatgactcattccagctccaggtcacagaagatgtgaattcaagtatcaagacatttttttgtcccaatgatacctacaatgacatggccacactcttcttcaacccgcaggagtctgccatcctccagctcttccaccaggatggtactttcagccccgtcactctggccttgttcttcgttctctatttcttgcttgcatgttggacttacggcatttctgttccaagtggcctttttgtgccttctctgctgtgtggagctgcttttggacgtttagttgccaatgtcctaaaaagctacattggattgggccacatctattcggggacctttgccctgattggtgcagcggctttcttgggcggggtggtccgcatgaccatcagcctcacggtcatcctgatcgagtccaccaatgagatcacctacgggctccccatcatggtcacactgatggtggccaaatggacaggggactttttcaataagggcatttatgatatccacgtgggcctgcgaggcgtgccgcttctggaatgggagacagaggtggaaatggacaagctgagagccagcgacatcatggagcccaacctgacctacgtctacccgcacacccgcatccagtctctggtgagcatcctgcgcaccacggtccaccatgccttcccggtggtcacagagaaccgcggtaacgagaaggagttcatgaagggcaaccagctcatcagcaacaacatcaagttcaagaaatccagcatcctcacccgggctggcgagcagcgcaaacggagccagtccatgaagtcctacccatccagcgagctacggaacatgtgtgatgagcacatcgcctctgaggagccagccgagaaggaggacctcctgcagcagatgctggaaaggagatacactccctaccccaacctataccctgaccagtccccaagtgaagactggaccatggaggagcggttccgccctctgaccttccacggcctgatccttcggtcgcagcttgtcaccctgcttgtccgaggagtttgttactctgaaagccagtcgagcgccagccagccgcgcctctcctatgccgagatggccgaggactacccgcggtaccccgacatccacgacctggacctgacgctgctcaacccgcgcatgatcgtggatgtcaccccatacatgaacccttcgcctttcaccgtctcgcccaacacccacgtctcccaagtcttcaacctgttcagaacgatgggcctgcgccacctgcccgtggtgaacgctgtgggagagatcgtggggatcatcacacggcacaacctcacctatgaatttctgcaggcccggctgaggcagcactaccagaccatctgacagcccagcccaccctctcctggtgctgcctggggaggcaaatcatgctcactccggcgggcacagctggctggggctgttccggggcatggaagattcccagttacccactcactcagaaagccgggagtcatcggacaccttgctggtcagaggccctgggggtggttttgaaccatcagagcttggacttttctgacttccccagcaaggatcttcccacttcctgctccctgtgttcccaccctccagtgttggcacaggcccacccctggctccaccagagccagaagcagaggtagaatcaggcgggccccgggctgcactccgagcagtgttcctggccatctttgctactttcctagagaacccggctgttgccttaaatgtgtgagagggacttggccaaggcaaaagctggggagatgccagtgacaacatacagttcatgactaggtttaggaattgggcactgagaaaattctcaatatttcagagagtccttcccttatttgggactcctaacacggtatcctcgctagtttgttttaagggaaacactctgctcctgggtgtgagcagaggctctggtcttgccctgtggtttgactctccttagaaccaccgcccaccagaaacataaaggattaaaatcacactaataacccctggatggtcaatctgataataggatcagatttacgtctaccctaattcttaacattgcagctttctctccatctgcagattattcccagtctcccagtaacacgtttctacccagatcctttttcatttccttaagttttgatctccgtcttcctgatgaagcaggcagagctcagaggatcttggcatcacccaccaaagttagctgaaagcagggcactcctggataaagcagcttcactcaactctggggaatgctaccattttttttccaaagtagaaaggaagcacttctgagccagtgaccactgaaaggtatgtgctatgataaagcagatggcctatttgaggaagagggtgtctgcccttcacaaacacctctctctcccctgcactagctgtcccaagcttacatacagaggcccttcaggagggcctcctgtgccgcagggagggtgcgtggggaagatgcttcctgccagcacgtgcctgaaggtttcacatgaagcatgggaagcgcaccctgtcgttcagtgacgtcattcttctccaggctggcccgccccctctgactaggcacccaaagtgagcatctgggcattgggcattcatgcttatcttcccccaccttctacatggtatcagtcccagcaggcatccctggggcagacgtgctttggctcaagatggccttcatttacgtttagttttttttaaaaccgtggaggttgcccacgggcctcggcacctggccctggcagcacagctctcaggcccagccctgggcgacctccttggccaagtctgcctttcaccctggggtgagcatcagtcctggctctgctggtccagatcttgcgctcagcacactctagggaataattccactccagagatggggctgcttcaaggtcttttctagctgattgtggcccctccattttccccattttcttatctccctgaccaaaattgctttgacttctaaatgtttctgcttcccagaatgcacctgacttatgaaatggggataatactcccaggaaatagcgcaggacatcacaaggaccaaaaaggcaattcttatttaaatgttactatttggccagctgctgctgtgttttatggcagtgttcagagcttgatcacgttatttcttccttttattaagaaggaagccaattgtccaagtcaggagaatggtgtgatcacctgtcacagacactttgtcccctctccccgccccttcctggagctggcagagctaacgccctgcaggaggaccccggcctctcgagggctggatcagcagccgcctgccctgaggctgccccggtgaatgttattggaattcatccctcgtgcacatcctgttgtgtttaagtcaccagatattttgttcccatcagtttagcccagagatagacagtagaatgcaaatacctccctcccctaaactgactggacggctgccaaggaggccccaaacccaggccccatgcaaaggcacgtggtttccttttctcctctctctgcatctgcgctttccagataagcccaaagacagcaacttctccactcatgacaaatcaactgtgaccctcgctccttccatttctgtccattagaaaccagccttttcagcatctcacccattagcagccccatcacccagtgatcagtcgcctcagtaaagcagatctgtggatggggagcctacgggtgaattcatctcctcctgctagcagccgcgtcctggaggagcagcggatggggaatccattctgtttcttcctggtgtttaggaagttgccccacacacagattgccccgatgtccaaccagaagaagtgaaactgctgctgggtctggagaggtgaagacccgtggccagcttctgttgttgccatcggccattgctttttgttcgcttgcttttggttttgcaagaagagcggcctctgtctctgatctgcttcaaatcatcattccatcagtgacagaagtggctgttccatcagtggtcgcagccagttcagctcctgcatccatccccaagtgttctgagtggaatttgaggcctccccaaccacctaccaaaaaaggagggtgaaatgaaaggaagaagaaaaactcagcattctttcctctgacaaagagtaaaacgacaaggaatatcggcctgaattctcttcccaagaagaaagaaagcacaccaacgcaggcatttgtcttctgtccatggtgctgaagtttattcactttcaaaccactttcagtaacaggtgaggttctaccttaaaatttaatgcatggggtgggagaggcgaggaagtcaccatcaaaccactttatctacagttagcataagatgtgagaagtgttgacaggaagctgcagcttagatgggatgatcacaactccatggcaacaagatgacacgaatgcagcagagaccccaggggacaggagcctcttgcagtctgtccctaggcccagccctgcttgtcctccctggctgttatcttcggtaccggaagctgttacagcccagtccgctctgggctccaatcctgtccatcctgcccccgaagcagctggatctccgcaggctccgaggggcagtgagcagcgccctcagcttgctttttaggagggcagatcgatcagagggcacctccatctctctgggctgggctgacttccccggtccagggaggcacctcagggagggggctgagagcagcccccgcttcttcattcggctcactgagcacttgtgggggcacgacctcatcttctaaaggcatcttttcttccaaatggtccagcaaattcttgaaatccatcaggtctgcgttggacacggcattgtacatgggattagctctggtctgacctaggagctggaatgccagtaaaaggaggaagctcacggtggtggtggagaaggagctcatgctggcgtcgtcaaggagcaatccactgcttgctgctctgtctctcccctctggttcctctctggttcccctctcttggcctacgtctgtccctgtctcccagctgcccagtgccgcctctttttatagccccccagctctccaagcacgcaggagagacagaacccttccccattctgtcacttgcagtgataaagctgccaagtgagaagccagcaggagatgcccttttaaagttatcatcccgcagggcttgtcacagcccctctctgccttgggcagccccaacagccccccagaccctcagctgcaagagccgcattcttactgatttgactcaagaggctcccacttcaaaggtgtgagaagagtaaaaaagagtccttggttatctca

SEQ ID NO: 353403 - DNA, 5689 bp, Homo sapiens
tggctgggagggggttggtagaggggtccagagtggcagtaaaggaggaagatggcggggtgcagggggtctctgtgctgctgctgcaggtggtgctgctgctgcggtgagcgtgagacccgcacccccgaggagctgaccatccttggagaaacacaggaggaggaggatgagattcttccaaggaaagactatgagagtttggattatgatcgctgtatcaatgacccttacctggaagttttggagaccatggataataagaaaggtcgaagatatgaggcggtgaagtggatggtggtgtttgccattggagtctgcactggcctggtgggtctctttgtggacttttttgtgcgactcttcacccaactcaagttcggagtggtacagacatcggtggaggagtgcagccagaaaggctgcctcgctctgtctctccttgaactcctgggttttaacctcacctttgtcttcctggcaagcctccttgttctcattgagccggtggcagcaggttccgggatacccgaggtcaaatgctatctgaatggcgtaaaggtgccaggaatcgtccgtctccggaccctgctctgcaaggtccttggagtgctgttcagtgtggctggagggctcttcgtggggaaggaaggccccatgatccacagtggttcggtggtgggagctggcctccctcagtttcagagcatctccttacggaagatccagtttaacttcccctatttccgaagcgacagagacaagagagactttgtatcagcaggagcggctgctggagttgctgcagctttcggggcgccaatcgggggtaccttgttcagtctagaggagggttcgtccttctggaaccaagggctcacgtggaaagtgctcttttgttccatgtctgccaccttcaccctcaacttcttccgttctgggattcagtttggaagctggggttccttccagctccctggattgctgaactttggcgagtttaagtgctctgactctgataaaaaatgtcatctctggacagctatggatttgggtttcttcgtcgtgatgggggtcattgggggcctcctgggagccacattcaactgtctgaacaagaggcttgcaaagtaccgtatgcgaaacgtgcacccgaaacctaagctcgtcagagtcttagagagcctccttgtgtctctggtaaccaccgtggtggtgtttgtggcctcgatggtgttaggagaatgccgacagatgtcctcttcgagtcaaatcggtaatgactcattccagctccaggtcacagaagatgtgaattcaagtatcaagacatttttttgtcccaatgatacctacaatgacatggccacactcttcttcaacccgcaggagtctgccatcctccagctcttccaccaggatggtactttcagccccgtcactctggccttgttcttcgttctctatttcttgcttgcatgttggacttacggcatttctgttccaagtggcctttttgtgccttctctgctgtgtggagctgcttttggacgtttagttgccaatgtcctaaaaagctacattggattgggccacatctattcggggacctttgccctgattggtgcagcggctttcttgggcggggtggtccgcatgaccatcagcctcacggtcatcctgatcgagtccaccaatgagatcacctacgggctccccatcatggtcacactgatggtggccaaatggacaggggactttttcaataagggcatttatgatatccacgtgggcctgcgaggcgtgccgcttctggaatgggagacagaggtggaaatggacaagctgagagccagcgacatcatggagcccaacctgacctacgtctacccgcacacccgcatccagtctctggtgagcatcctgcgcaccacggtccaccatgccttcccggtggtcacagagaaccgcggtaacgagaaggagttcatgaagggcaaccagctcatcagcaacaacatcaagttcaagaaatccagcatcctcacccgggctggcgagcagcgcaaacggagccagtccatgaagtcctacccatccagcgagctacggaacatgtgtgatgagcacatcgcctctgaggagccagccgagaaggaggacctcctgcagcagatgctggaaaggagatacactccctaccccaacctataccctgaccagtccccaagtgaagactggaccatggaggagcggttccgccctctgaccttccacggcctgatccttcggtcgcagcttgtcaccctgcttgtccgaggagtttgttactctgaaagccagtcgagcgccagccagccgcgcctctcctatgccgagatggccgaggactacccgcggtaccccgacatccacgacctggacctgacgctgctcaacccgcgcatgatcgtggatgtcaccccatacatgaacccttcgcctttcaccgtctcgcccaacacccacgtctcccaagtcttcaacctgttcagaacgatgggcctgcgccacctgcccgtggtgaacgctgtgggagagatcgtggggatcatcacacggcacaacctcacctatgaatttctgcaggcccggctgaggcagcactaccagaccatctgacagcccagcccaccctctcctggtgctgcctggggaggcaaatcatgctcactccggcgggcacagctggctggggctgttccggggcatggaagattcccagttacccactcactcagaaagccgggagtcatcggacaccttgctggtcagaggccctgggggtggttttgaaccatcagagcttggacttttctgacttccccagcaaggatcttcccacttcctgctccctgtgttcccaccctccagtgttggcacaggcccacccctggctccaccagagccagaagcagaggtagaatcaggcgggccccgggctgcactccgagcagtgttcctggccatctttgctactttcctagagaacccggctgttgccttaaatgtgtgagagggacttggccaaggcaaaagctggggagatgccagtgacaacatacagttcatgactaggtttaggaattgggcactgagaaaattctcaatatttcagagagtccttcccttatttgggactcctaacacggtatcctcgctagtttgttttaagggaaacactctgctcctgggtgtgagcagaggctctggtcttgccctgtggtttgactctccttagaaccaccgcccaccagaaacataaaggattaaaatcacactaataacccctggatggtcaatctgataataggatcagatttacgtctaccctaattcttaacattgcagctttctctccatctgcagattattcccagtctcccagtaacacgtttctacccagatcctttttcatttccttaagttttgatctccgtcttcctgatgaagcaggcagagctcagaggatcttggcatcacccaccaaagttagctgaaagcagggcactcctggataaagcagcttcactcaactctggggaatgctaccattttttttccaaagtagaaaggaagcacttctgagccagtgaccactgaaaggtatgtgctatgataaagcagatggcctatttgaggaagagggtgtctgcccttcacaaacacctctctctcccctgcactagctgtcccaagcttacatacagaggcccttcaggagggcctcctgtgccgcagggagggtgcgtggggaagatgcttcctgccagcacgtgcctgaaggtttcacatgaagcatgggaagcgcaccctgtcgttcagtgacgtcattcttctccaggctggcccgccccctctgactaggcacccaaagtgagcatctgggcattgggcattcatgcttatcttcccccaccttctacatggtatcagtcccagcaggcatccctggggcagacgtgctttggctcaagatggccttcatttacgtttagttttttttaaaaccgtggaggttgcccacgggcctcggcacctggccctggcagcacagctctcaggcccagccctgggcgacctccttggccaagtctgcctttcaccctggggtgagcatcagtcctggctctgctggtccagatcttgcgctcagcacactctagggaataattccactccagagatggggctgcttcaaggtcttttctagctgattgtggcccctccattttccccattttcttatctccctgaccaaaattgctttgacttctaaatgtttctgcttcccagaatgcacctgacttatgaaatggggataatactcccaggaaatagcgcaggacatcacaaggaccaaaaaggcaattcttatttaaatgttactatttggccagctgctgctgtgttttatggcagtgttcagagcttgatcacgttatttcttccttttattaagaaggaagccaattgtccaagtcaggagaatggtgtgatcacctgtcacagacactttgtcccctctccccgccccttcctggagctggcagagctaacgccctgcaggaggaccccggcctctcgagggctggatcagcagccgcctgccctgaggctgccccggtgaatgttattggaattcatccctcgtgcacatcctgttgtgtttaagtcaccagatattttgttcccatcagtttagcccagagatagacagtagaatgcaaatacctccctcccctaaactgactggacggctgccaaggaggccccaaacccaggccccatgcaaaggcacgtggtttccttttctcctctctctgcatctgcgctttccagataagcccaaagacagcaacttctccactcatgacaaatcaactgtgaccctcgctccttccatttctgtccattagaaaccagccttttcagcatctcacccattagcagccccatcacccagtgatcagtcgcctcagtaaagcagatctgtggatggggagcctacgggtgaattcatctcctcctgctagcagccgcgtcctggaggagcagcggatggggaatccattctgtttcttcctggtgtttaggaagttgccccacacacagattgccccgatgtccaaccagaagaagtgaaactgctgctgggtctggagaggtgaagacccgtggccagcttctgttgttgccatcggccattgctttttgttcgcttgcttttggttttgcaagaagagcggcctctgtctctgatctgcttcaaatcatcattccatcagtgacagaagtggctgttccatcagtggtcgcagccagttcagctcctgcatccatccccaagtgttctgagtggaatttgaggcctccccaaccacctaccaaaaaaggagggtgaaatgaaaggaagaagaaaaactcagcattctttcctctgacaaagagtaaaacgacaaggaatatcggcctgaattctcttcccaagaagaaagaaagcacaccaacgcaggcatttgtcttctgtccatggtgctgaagtttattcactttcaaaccactttcagtaacagttctttagaaaaggaaaatacagggaaagggataaacctcactgacttggaggaaatcaagaggagtgagcaca

SEQ ID NO: 353404 - DNA, 4679 bp, Homo sapiens
tggctgggagggggttggtagaggggtccagagtggcagtaaaggaggaagatggcggggtgcagggggtctctgtgctgctgctgcaggtggtgctgctgctgcggtgagcgtgagacccgcacccccgaggagctgaccatccttggagaaacacaggaggaggaggatgagattcttccaaggaaagactatgagagtttggattatgatcgctgtatcaatgacccttacctggaagttttggagaccatggataataagaaaggtcgaagatatgaggcggtgaagtggatggtggtgtttgccattggagtctgcactggcctggtgggtctctttgtggacttttttgtgcgactcttcacccaactcaagttcggagtggtacagacatcggtggaggagtgcagccagaaaggctgcctcgctctgtctctccttgaactcctgggttttaacctcacctttgtcttcctggcaagcctccttgttctcattgagccggtggcagcaggttccgggatacccgaggtcaaatgctatctgaatggcgtaaaggtgccaggaatcgtccgtctccggaccctgctctgcaaggtccttggagtgctgttcagtgtggctggagggctcttcgtggggaaggaaggccccatgatccacagtggttcggtggtgggagctggcctccctcagtttcagagcatctccttacggaagatccagtttaacttcccctatttccgaagcgacagagacaagagagactttgtatcagcaggagcggctgctggagttgctgcagctttcggggcgccaatcgggggtaccttgttcagtctagaggagggttcgtccttctggaaccaagggctcacgtggaaagtgctcttttgttccatgtctgccaccttcaccctcaacttcttccgttctgggattcagtttggaagctggggttccttccagctccctggattgctgaactttggcgagtttaagtgctctgactctgataaaaaatgtcatctctggacagctatggatttgggtttcttcgtcgtgatgggggtcattgggggcctcctgggagccacattcaactgtctgaacaagaggcttgcaaagtaccgtatgcgaaacgtgcacccgaaacctaagctcgtcagagtcttagagagcctccttgtgtctctggtaaccaccgtggtggtgtttgtggcctcgatggtgttaggagaatgccgacagatgtcctcttcgagtcaaatcggtaatgactcattccagctccaggtcacagaagatgtgaattcaagtatcaagacatttttttgtcccaatgatacctacaatgacatggccacactcttcttcaacccgcaggagtctgccatcctccagctcttccaccaggatggtactttcagccccgtcactctggccttgttcttcgttctctatttcttgcttgcatgttggacttacggcatttctgttccaagtggcctttttgtgccttctctgctgtgtggagctgcttttggacgtttagttgccaatgtcctaaaaagctacattggattgggccacatctattcggggacctttgccctgattggtgcagcggctttcttgggcggggtggtccgcatgaccatcagcctcacggtcatcctgatcgagtccaccaatgagatcacctacgggctccccatcatggtcacactgatggtggccaaatggacaggggactttttcaataagggcatttatgatatccacgtgggcctgcgaggcgtgccgcttctggaatgggagacagaggtggaaatggacaagctgagagccagcgacatcatggagcccaacctgacctacgtctacccgcacacccgcatccagtctctggtgagcatcctgcgcaccacggtccaccatgccttcccggtggtcacagagaaccgcggtaacgagaaggagttcatgaagggcaaccagctcatcagcaacaacatcaagttcaagaaatccagcatcctcacccgggctggcgagcagcgcaaacggagccagtccatgaagtcctacccatccagcgagctacggaacatgtgtgatgagcacatcgcctctgaggagccagccgagaaggaggacctcctgcagcagatgctggaaaggagatacactccctaccccaacctataccctgaccagtccccaagtgaagactggaccatggaggagcggttccgccctctgaccttccacggcctgatccttcggtcgcagcttgtcaccctgcttgtccgaggagtttgttactctgaaagccagtcgagcgccagccagccgcgcctctcctatgccgagatggccgaggactacccgcggtaccccgacatccacgacctggacctgacgctgctcaacccgcgcatgatcgtggatgtcaccccatacatgaacccttcgcctttcaccgtctcgcccaacacccacgtctcccaagtcttcaacctgttcagaacgatgggcctgcgccacctgcccgtggtgaacgctgtgggagagatcgtggggatcatcacacggcacaacctcacctatgaatttctgcaggcccggctgaggcagcactaccagaccatctgacagcccagcccaccctctcctggtgctgcctggggaggcaaatcatgctcactccggcgggcacagctggctggggctgttccggggcatggaagattcccagttacccactcactcagaaagccgggagtcatcggacaccttgctggtcagaggccctgggggtggttttgaaccatcagagcttggacttttctgacttccccagcaaggatcttcccacttcctgctccctgtgttcccaccctccagtgttggcacaggcccacccctggctccaccagagccagaagcagaggtagaatcaggcgggccccgggctgcactccgagcagtgttcctggccatctttgctactttcctagagaacccggctgttgccttaaatgtgtgagagggacttggccaaggcaaaagctggggagatgccagtgacaacatacagttcatgactaggtttaggaattgggcactgagaaaattctcaatatttcagagagtccttcccttatttgggactcctaacacggtatcctcgctagtttgttttaagggaaacactctgctcctgggtgtgagcagaggctctggtcttgccctgtggtttgactctccttagaaccaccgcccaccagaaacataaaggattaaaatcacactaataacccctggatggtcaatctgataataggatcagatttacgtctaccctaattcttaacattgcagctttctctccatctgcagattattcccagtctcccagtaacacgtttctacccagatcctttttcatttccttaagttttgatctccgtcttcctgatgaagcaggcagagctcagaggatcttggcatcacccaccaaagttagctgaaagcagggcactcctggataaagcagcttcactcaactctggggaatgctaccattttttttccaaagtagaaaggaagcacttctgagccagtgaccactgaaagcttggtgttccatggcccctaggcgaggtgatcagggagtggggccaatgggcccccggccctggctttgggaccttgtgctgagggatgatttgctcctgaccttgattaacttaacagttcccagctggaagggacactttcaggacccagtccactgtatggcatttgtgatgcagaattatgcactgacatgaccctgggtgacaggaaagcctttcgagaggcccaaggtggcctcgccagccctgcagtattgatgtgcagtattgcaccacagctctgcggaccttggccattgccgcagtcgcagcttccttttttctgtttgcactgtttgtttgtatgatgttagctaattccactgtgtatataaattgtattttttttaatttgtaaaatgctatttttatttgaacctttggaacttgggagttctcattgtaaccctaacatgtgagaataaaatgtcttctgtctcaaaaaaaaaaaacaagaaaagaacaacagcgggggccaccaaaagatatacccaggaggagcaccacaggactacccactaacacgactgtgaccagagagggacccaaataagagcaaataatagagcaaggacacgcgacgacacacaacacagacggacgtggaaacgcgacacggccacatgacaagaacatcaagggggagacaaaggagcgcaacaccaaaaaaacataaagagcagggcacaaacaccacaggcaaccgggcgcaccacggccataagcagacgaaaacaaacaacgcacagcgaagacaataagaggatgccacagaagaaagagacacgatcgccagaagccagaacaacgaccgagaccaagccaacgagaacagcagagaaagatacagagaaaaagaaagcaaccagcacgacaagctgaacccgcagagtccagctctacaaggaaaaaagaccagcagagagaggacgaaacgcagaacagcaaaacgacgacgaacacacagccaaagacacaacaacaacaaagcgt

SEQ ID NO: 353405 - DNA, 579 bp, Homo sapiens
cggcgtctctaagctaggtaattactgggcgcgtcggtccatacatgggaccagcgtgggcgggcgggcgcgttctaggcccgggctgccaaagctccatcctcccttctcgtccttcagcgaggcccaggagggactccagaagttcaaggtggtgagagctggtgtccacgccccagaggaggtggggcctcgcgaagcaggtgagccccctcttccttctgcagaaccccttcccagtgtcaaagacaaaatgcaaattatggagatgatttaaattaggtttttgcgataagagagagcatcccagagcagaagaacagaatgtttttgtagggtggttttgccttagacttttataggaagtagagaaattgttggtgagttgctttacactgggaatagatttacaatcacatacatttcagtcagctgaacagaaaatatttatctgtgtgtctagctagtttcagagggacaaacttctaatcccagttaatcatcctgagacaaagaatggggagttggaacgtctatgtctggtctgttggcatgttcaggtacaatgggtaagatcag

SEQ ID NO: 353406 - DNA, 2234 bp, Homo sapiens
ccgccgtgcagaatgcagttttcagatgacgaaccgctaaaacaatcataattagcggctggaaacagttcaactgtaaaaaccgcacaccgactgaaggttgcttgccggctcctttccaaattaactttaaaaccactcttccctcaaccaaaatggtttctgtagagcttcgccttcttccatcgccacaacagtggcgcgacttctaagattcggcagcttccggaaggactcagaaccacctataaccctagccgacagttcagcaggctgatccacttgggggctaattggagaaaccagttgattggttgcttccgtgctgcttctctaagggcgcttgcccttaaagaagctgacccagaggccttggtgctgccggcgtggggatccccagatgggaacgccccttgatggaggatctcgtgtgcctattggctgtcctgccaaactgcggagggtgacaaggaagaaggtggctccagatctggaggtgtgtccatggcggcgcttgacctgcgagcggagctggattcgctggtcctgcagctgcttggggacctggaggagctggaggggaaacgaacggtgttgaacgcccgggtggaggagggctggctctcgctcgccaaggctcgctacgcgatgggcgccaagtcggtagggcccctgcagtatgcttcccacatggagccccaggtctgcctccacgccagcgaggcccaggagggactccagaagttcaaggtggtgagagctggtgtccacgccccagaggaggtggggcctcgcgaagcaggtctgcggaggcgcaagggccccactaagaccccagaaccggagtcctctgaggcccctcaggaccccctgaactggtttggaatcctagttcctcacagtctacgtcaggctcaagcaagcttccgggatggcctgcagctggccgcagacatagccagcctccagaaccgcattgactggggtcgaagccagctccggggactccaagagaaactcaagcagctggagcctggggctgcctgacatgcgcgcaaagaggcagggcagcgagcacagctgttctccgacatggctacgtgatctcaggccttcttccttcacaattagctcttgcccctaccccacgccagctaatgccccttctgtgtccctgctctgcatgtttccattttccttaggtgtgaagtttgaagaggcaaacagtaattttgaaagccactactttgaaaccattctaaggcctgagttcccataggacacactcacataggcaggtacacgttagtcaacaattggaactgcctcttggatcactcagctgtgctttcatggctggatgatggaacactgtgcgaagagagatgggggccaggaagtagcgcttcatgcttagtacatcctccaaattgtctttgctggaggagaaaaccgtactcagccaaaagatcaggacaatatgacttgagtccacaaggacacaaacacctgagtagctgggcagcccttggcagggtctaagccaggaagtaaaaatgatctggcctagatatttaagggaactctaggaagaggcctaggtttttaaaatcctgtctctttgtcttaccataagaggctgagcctctcttcatttttttgaagggccacttgtgttttctgttctgggaacttcattcatttttctactgggttgttgatctttgcagtaatttctaggagctgtttatgtttggaggtaattggtcctttgtccatatatatgagatgtaagtcttattttccagtttatctttttgcttattttttttgactttttattgtaaaataaaacatcaaactgcacagaacagttgaatagcttaatgaataactacagtaaaagctatggtaaccactacccaacttttgtgttttttgatcattatttgtacgtacagttgaatgtatccagctgtcacatgattctgaatttgggtttgtaactgataaggcaatcagggaattctccagcattttcaagaacctctgtggtttcagttgaaatgtccagtgagtcatgtccagcttttccaccatcctcccacgtgctgtatgtcggttaatgctgcccttttgttttgctaactcccagtgtaaacctaatgtaatttgggggttttcattctgtttcgtggacattactgtcaatacaccagtaccacattgtttta

SEQ ID NO: 353407 - DNA, 1866 bp, Homo sapiens
ccgccgtgcagaatgcagttttcagatgacgaaccgctaaaacaatcataattagcggctggaaacagttcaactgtaaaaaccgcacaccgactgaaggttgcttgccggctcctttccaaattaactttaaaaccactcttccctcaaccaaaatggtttctgtagagcttcgccttcttccatcgccacaacagtggcgcgacttctaagattcggcagcttccggaaggactcagaaccacctataaccctagccgacagttcagcaggctgatccacttgggggctaattggagaaaccagttgattggttgcttccgtgctgcttctctaagggcgcttgcccttaaagaagctgacccagaggccttggtgctgccggcgtggggatccccagatgggaacgccccttgatggaggatctcgtgtgcctattggctgtcctgccaaactgcggagggtgacaaggaagaaggtggctccagatctggaggtgtgtccatggcggcgcttgacctgcgagcggagctggattcgctggtcctgcagctgcttggggacctggaggagctggaggggaaacgaacggtgttgaacgcccgggtggaggagggctggctctcgctcgccaaggctcgctacgcgatgggcgccaagtcggtagggcccctgcagtatgcttcccacatggagccccaggtctgcctccacgccagcgaggcccaggagggactccagaagttcaaggtggtgagagctggtgtccacgccccagaggaggtggggcctcgcgaagcaggtctgcggaggcgcaagggccccactaagaccccagaaccggagtcctctgaggcccctcaggaccccctgaactggtttggaatcctagttcctcacagtctacgtcaggctcaagcaagcttccgggatggcctgcagctggccgcagacatagccagcctccagaaccgcattgactggggtcgaagccagctccggggactccaagagaaactcaagcagctggagcctggggctgcctgacatgcgcgcaaagaggcagggcagcgagcacagctgttctccgacatggctacgtgatctcaggccttcttccttcacaattagctcttgcccctaccccacgccagctaatgccccttctgtgtccctgctctgcatgtttccattttccttaggtgtgaagtttgaagaggcaaacagtaattttgaaagccactactttgaaaccattctaaggcctgagttcccataggacacactcacataggcaggtacacgttagtcaacaattggaactgcctcttggatcactcagctgtgctttcatggctggatgatggaacactgtgcgaagagagatgggggccaggaagtagcgcttcatgcttagtacatcctccaaattgtctttgctggaggagaaaaccgtactcagccaaaagatcaggacaatatgacttgagtccacaaggacacaaacacctgagtagctgggcagcccttggcagggtctaagccaggaagtaaaaatgatctggcctagatatttaagggaactctaggaagaggcctaggtttttaaaatcctgtctctttgtcttaccataagaggctgagcctctcttcatttttttgaagggccacttgtgttttctgttctgggaacttcattcatttttctactgggttgttgatctttgcagtaatttctaggagctgtttatgtttggaggtaattggtcctttgtccatatatatgagatgtaagtcttattttccagtttatctttttgcttattttttttgactttttattgtaaaataaaacatcaaactgca

SEQ ID NO: 353408 - DNA, 1897 bp, Homo sapiens
ccgccgtgcagaatgcagttttcagatgacgaaccgctaaaacaatcataattagcggctggaaacagttcaactgtaaaaaccgcacaccgactgaaggttgcttgccggctcctttccaaattaactttaaaaccactcttccctcaaccaaaatggtttctgtagagcttcgccttcttccatcgccacaacagtggcgcgacttctaagattcggcagcttccggaaggactcagaaccacctataaccctagccgacagttcagcaggctgatccacttgggggctaattggagaaaccagttgattggttgcttccgtgctgcttctctaagggcgcttgcccttaaagaagctgacccagaggccttggtgctgccggcgtggggatccccagatgggaacgccccttgatggaggatctcgtgtgcctattggctgtcctgccaaactgcggagggtgacaaggaagaaggtggctccagatctggaggtgtgtccatggcggcgcttgacctgcgagcggagctggattcgctggtcctgcagctgcttggggacctggaggagctggaggggaaacgaacgggctggctctcgctcgccaaggctcgctacgcgatgggcgccaagtcggtagggcccctgcagtatgcttcccacatggagccccaggtctgcctccacgccagcgaggcccaggagggactccagaagttcaaggtggtgagagctggtgtccacgccccagaggaggtggggcctcgcgaagcaggtctgcggaggcgcaagggccccactaagaccccagaaccggagtcctctgaggcccctcaggaccccctgaactggtttggaatcctagttcctcacagtctacgtcaggctcaagcaagcttccgggatggcctgcagctggccgcagacatagccagcctccagaaccgcattgactggggtcgaagccagctccggggactccaagagaaactcaagcagctggagcctggggctgcctgacatgcgcgcaaagaggcagggcagcgagcacagctgttctccgacatggctacgtgatctcaggccttcttccttcacaattagctcttgcccctaccccacgccagctaatgccccttctgtgtccctgctctgcatgtttccattttccttaggtgtgaagtttgaagaggcaaacagtaattttgaaagccactactttgaaaccattctaaggcctgagttcccataggacacactcacataggcaggtacacgttagtcaacaattggaactgcctcttggatcactcagctgtgctttcatggctggatgatggaacactgtgcgaagagagatgggggccaggaagtagcgcttcatgcttagtacatcctccaaattgtctttgctggaggagaaaaccgtactcagccaaaagatcaggacaatatgacttgagtccacaaggacacaaacacctgagtagctgggcagcccttggcagggtctaagccaggaagtaaaaatgatctggcctagatatttaagggaactctaggaagaggcctaggtttttaaaatcctgtctctttgtcttaccataagaggctgagcctctcttcatttttttgaagggccacttgtgttttctgttctgggaacttcattcatttttctactgggttgttgatctttgcagtaatttctaggagctgtttatgtttggaggtaattggtcctttgtccatatatatgagatgtaagtcttattttccagtttatctttttgcttattttttttgactttttattgtaaaataaaacatcaaactgcacagaacagttgaatagcttaatgaataactacagtaaaagctatggtaaccacta

SEQ ID NO: 353409 - DNA, 2124 bp, Homo sapiens
ccgccgtgcagaatgcagttttcagatgacgaaccgctaaaacaatcataattagcggctggaaacagttcaactgtaaaaaccgcacaccgactgaaggttgcttgccggctcctttccaaattaactttaaaaccactcttccctcaaccaaaatggtttctgtagagcttcgccttcttccatcgccacaacagtggcgcgacttctaagattcggcagcttccggaaggactcagaaccacctataaccctagccgacagttcagcaggctgatccacttgggggctaattggagaaaccagttgattggttgcttccgtgctgcttctctaagggcgcttgcccttaaagaagctgacccagaggccttggtgctgccggcgtggggatccccagatgggaacgccccttgatggaggatctcgtgtgcctattggctgtcctgccaaactgcggagggtgacaaggaagaaggtggctccagatctggaggtgtgtccatggcggcgcttgacctgcgagcggagctggattcgctggtcctgcagctgcttggggacctggaggagctggaggggaaacgaacggtgttgaacgcccgggtggaggagggctggctctcgctcgccaaggctcgctacgcgatgggcgccaagtcggtagggcccctgcagtatgcttcccacatggagccccaggtctgcctccacgccagcgaggcccaggagggactccagaagttcaaggtggtgagagctggtgtccacgccccagaggaggtggggcctcgcgaagcaggtctgcggaggcgcaagggccccactaagaccccagaaccggagtcctctgaggcccctcaggaccccctgaactggtttggaatcctagttcctcacagtctacgtcaggctcaagcaagcttccgggatggtgtcctggaggccaagaagagaaagtgtttcctggagcgagtgatccaatgtgtggtcagccctgctgctgaacaggaggccgaagacgagagctgcccggaggactgggcagcagctgttccagcagagacatcagcaaaagccatctagaggtggatccagagtgtggactaacagagaaaagaagtggagggagagcaggcctgcagctggccgcagacatagccagcctccagaaccgcattgactggggtcgaagccagctccggggactccaagagaaactcaagcagctggagcctggggctgcctgacatgcgcgcaaagaggcagggcagcgagcacagctgttctccgacatggctacgtgatctcaggccttcttccttcacaattagctcttgcccctaccccacgccagctaatgccccttctgtgtccctgctctgcatgtttccattttccttaggtgtgaagtttgaagaggcaaacagtaattttgaaagccactactttgaaaccattctaaggcctgagttcccataggacacactcacataggcaggtacacgttagtcaacaattggaactgcctcttggatcactcagctgtgctttcatggctggatgatggaacactgtgcgaagagagatgggggccaggaagtagcgcttcatgcttagtacatcctccaaattgtctttgctggaggagaaaaccgtactcagccaaaagatcaggacaatatgacttgagtccacaaggacacaaacacctgagtagctgggcagcccttggcagggtctaagccaggaagtaaaaatgatctggcctagatatttaagggaactctaggaagaggcctaggtttttaaaatcctgtctctttgtcttaccataagaggctgagcctctcttcatttttttgaagggccacttgtgttttctgttctgggaacttcattcatttttctactgggttgttgatctttgcagtaatttctaggagctgtttatgtttggaggtaattggtcctttgtccatatatatgagatgtaagtcttattttccagtttatctttttgcttattttttttgactttttattgtaaaataaaacatcaaactgcacagaacagttgaatagcttaatgaataactacagtaaaagctatggtaaccacta

SEQ ID NO: 353410 - DNA, 1805 bp, Homo sapiens
ccgccgtgcagaatgcagttttcagatgacgaaccgctaaaacaatcataattagcggctggaaacagttcaactgtaaaaaccgcacaccgactgaaggttgcttgccggctcctttccaaattaactttaaaaccactcttccctcaaccaaaatggtttctgtagagcttcgccttcttccatcgccacaacagtggcgcgacttctaagattcggcagcttccggaaggactcagaaccacctataaccctagccgacagttcagcaggctgatccacttgggggctaattggagaaaccagttgattggttgcttccgtgctgcttctctaagggcgcttgcccttaaagaagctgacccagaggccttggtgctgccggcgtggggatccccagatgggaacgccccttgatggaggatctcgtgtgcctattggctgtcctgccaaactgcggagggtgacaaggaagaaggtggctccagatctggaggtgtgtccatggcggcgcttgacctgcgagcggagctggattcgctggtcctgcagctgcttggggacctggaggagctggaggggaaacgaacggtgttgaacgcccgggtggaggagggctggctctcgctcgccaaggctcgctacgcgatgggcgccaagtcggtagggcccctgcagtatgcttcccacatggagccccaggtctgcctccacgccagcgaggcccaggagggactccagaagttcaaggtggtgagagctggtgtccacgccccagaggaggtggggcctcgcgaagcaggtctgcggaggcgcaagggccccactaagaccccagaaccggagtcctctgaggcccctcaggaccccctgaactggtttggaatcctagttcctcacagtctacgtcaggctcaagcaagcttccgggatggcctgcagctggccgcagacatagccagcctccagaaccgcattgactggggtcgaagccagctccggggactccaagagaaactcaagcagctggagcctggggctgcctgacatgcgcgcaaagaggcagggcagcgagcacagctgttctccgacatggctacgtggcaaacagtaattttgaaagccactactttgaaaccattctaaggcctgagttcccataggacacactcacataggcaggtacacgttagtcaacaattggaactgcctcttggatcactcagctgtgctttcatggctggatgatggaacactgtgcgaagagagatgggggccaggaagtagcgcttcatgcttagtacatcctccaaattgtctttgctggaggagaaaaccgtactcagccaaaagatcaggacaatatgacttgagtccacaaggacacaaacacctgagtagctgggcagcccttggcagggtctaagccaggaagtaaaaatgatctggcctagatatttaagggaactctaggaagaggcctaggtttttaaaatcctgtctctttgtcttaccataagaggctgagcctctcttcatttttttgaagggccacttgtgttttctgttctgggaacttcattcatttttctactgggttgttgatctttgcagtaatttctaggagctgtttatgtttggaggtaattggtcctttgtccatatatatgagatgtaagtcttattttccagtttatctttttgcttattttttttgactttttattgtaaaataaaacatcaaactgcacagaacagttgaatagcttaatgaataactacagtaaaagctatggtaaccacta

SEQ ID NO: 353411 - DNA, 1124 bp, Homo sapiens
ccgccgtgcagaatgcagttttcagatgacgaaccgctaaaacaatcataattagcggctggaaacagttcaactgtaaaaaccgcacaccgactgaaggttgcttgccggctcctttccaaattaactttaaaaccactcttccctcaaccaaaatggtttctgtagagcttcgccttcttccatcgccacaacagtggcgcgacttctaagattcggcagcttccggaaggactcagaaccacctataaccctagccgacagttcagcaggctgatccacttgggggctaattggagaaaccagttgattggttgcttccgtgctgcttctctaagggcgcttgcccttaaagaagctgacccagaggccttggtgctgccggcgtggggatccccagatgggaacgccccttgatggaggatctcgtgtgcctattggctgtcctgccaaactgcggagggtgacaaggaagaaggtggctccagatctggagggctggctctcgctcgccaaggctcgctacgcgatgggcgccaagtcggtagggcccctgcagtatgcttcccacatggagccccaggtctgcctccacgccagcgaggcccaggagggactccagaagttcaaggtggtgagagctggtgtccacgccccagaggaggtggggcctcgcgaagcaggtctgcggaggcgcaagggccccactaagaccccagaaccggagtcctctgaggcccctcaggaccccctgaactggtttggaatcctagatatttaagggaactctaggaagaggcctaggtttttaaaatcctgtctctttgtcttaccataagaggctgagcctctcttcatttttttgaagggccacttgtgttttctgttctgggaacttcattcatttttctactgggttgttgatctttgcagtaatttctaggagctgtttatgtttggaggtaattggtcctttgtccatatatatgagatgtaagtcttattttccagtttatctttttgcttattttttttgactttttattgtaaaataaaacatcaaactgcacagaacagttgaatagcttaatgaataactacagtaaaagctatggtaaccacta

SEQ ID NO: 353412 - DNA, 1921 bp, Homo sapiens
ccgccgtgcagaatgcagttttcagatgacgaaccgctaaaacaatcataattagcggctggaaacagttcaactgtaaaaaccgcacaccgactgaaggttgcttgccggctcctttccaaattaactttaaaaccactcttccctcaaccaaaatggtttctgtagagcttcgccttcttccatcgccacaacagtggcgcgacttctaagattcggcagcttccggaaggactcagaaccacctataaccctagccgacagttcagcaggctgatccacttgggggctaattggagaaaccagttgattggttgcttccgtgctgcttctctaagggcgcttgcccttaaagaagctgacccagaggccttggtgctgccggcgtggggatccccagatgggaacgccccttgatggaggatctcgtgtgcctattggctgtcctgccaaactgcggagggtgacaaggaagaaggtggctccagatctggaggtgtgtccatggcggcgcttgacctgcgagcggagctggattcgctggtcctgcagctgcttggggacctggaggagctggaggggaaacgaacggtgttgaacgcccgggtggaggagggctggctctcgctcgccaaggctcgctacgcgatgggcgccaagtcggtagggcccctgcagtatgcttcccacatggagccccaggtctgcctccacgccagcgaggcccaggagggactccagaagttcaaggtggtgagagctggtgtccacgccccagaggaggtggggcctcgcgaagcaggtctgcggaggcgcaagggccccactaagaccccagaaccggagtcctctgaggcccctcaggaccccctgaactggtttggaatcctagttcctcacagtctacgtcaggctcaagcaagcttccgggatggcctgcagctggccgcagacatagccagcctccagaaccgcattgactggggtcgaagccagctccggggactccaagagaaactcaagcagctggagcctggggctgcctgacatgcgcgcaaagaggcagggcagcgagcacagctgttctccgacatggctacgtgatctcaggccttcttccttcacaattagctcttgcccctaccccacgccagctaatgccccttctgtgtccctgctctgcatgtttccattttccttaggtgtgaagtttgaagaggcaaacagtaattttgaaagccactactttgaaaccattctaaggcctgagttcccataggacacactcacataggcaggtacacgttagtcaacaattggaactgcctcttggatcactcagctgtgctttcatggctggatgatggaacactgtgcgaagagagatgggggccaggaagtagcgcttcatgcttagtacatcctccaaattgtctttgctggaggagaaaaccgtactcagccaaaagatcaggacaatatgacttgagtccacaaggacacaaacacctgagtagctgggcagcccttggcagggtctaagccaggaagtaaaaatgatctggcctagatatttaagggaactctaggaagaggcctaggtttttaaaatcctgtctctttgtcttaccataagaggctgagcctctcttcatttttttgaagggccacttgtgttttctgttctgggaacttcattcatttttctactgggttgttgatctttgcagtaatttctaggagctgtttatgtttggaggtaattggtcctttgtccatatatatgagatgtaagtcttattttccagtttatctttttgcttattttttttgactttttattgtaaaataaaacatcaaactgcacagaacagttgaatagcttaatgaataactacagtaaaagctatggtaaccacta

SEQ ID NO: 353413 - DNA, 1802 bp, Homo sapiens
ccgccgtgcagaatgcagttttcagatgacgaaccgctaaaacaatcataattagcggctggaaacagttcaactgtaaaaaccgcacaccgactgaaggttgcttgccggctcctttccaaattaactttaaaaccactcttccctcaaccaaaatggtttctgtagagcttcgccttcttccatcgccacaacagtggcgcgacttctaagattcggcagcttccggaaggactcagaaccacctataaccctagccgacagttcagcaggctgatccacttgggggctaattggagaaaccagttgattggttgcttccgtgctgcttctctaagggcgcttgcccttaaagaagctgacccagaggccttggtgctgccggcgtggggatccccagatgggaacgccccttgatggaggatctcgtgtgcctattggctgtcctgccaaactgcggagggtgacaaggaagaaggtggctccagatctggagggctggctctcgctcgccaaggctcgctacgcgatgggcgccaagtcggtagggcccctgcagtatgcttcccacatggagccccaggtctgcctccacgccagcgaggcccaggagggactccagaagttcaaggtggtgagagctggtgtccacgccccagaggaggtggggcctcgcgaagcaggtctgcggaggcgcaagggccccactaagaccccagaaccggagtcctctgaggcccctcaggaccccctgaactggtttggaatcctagttcctcacagtctacgtcaggctcaagcaagcttccgggatggcctgcagctggccgcagacatagccagcctccagaaccgcattgactggggtcgaagccagctccggggactccaagagaaactcaagcagctggagcctggggctgcctgacatgcgcgcaaagaggcagggcagcgagcacagctgttctccgacatggctacgtgatctcaggccttcttccttcacaattagctcttgcccctaccccacgccagctaatgccccttctgtgtccctgctctgcatgtttccattttccttaggtgtgaagtttgaagaggcaaacagtaattttgaaagccactactttgaaaccattctaaggcctgagttcccataggacacactcacataggcaggtacacgttagtcaacaattggaactgcctcttggatcactcagctgtgctttcatggctggatgatggaacactgtgcgaagagagatgggggccaggaagtagcgcttcatgcttagtacatcctccaaattgtctttgctggaggagaaaaccgtactcagccaaaagatcaggacaatatgacttgagtccacaaggacacaaacacctgagtagctgggcagcccttggcagggtctaagccaggaagtaaaaatgatctggcctagatatttaagggaactctaggaagaggcctaggtttttaaaatcctgtctctttgtcttaccataagaggctgagcctctcttcatttttttgaagggccacttgtgttttctgttctgggaacttcattcatttttctactgggttgttgatctttgcagtaatttctaggagctgtttatgtttggaggtaattggtcctttgtccatatatatgagatgtaagtcttattttccagtttatctttttgcttattttttttgactttttattgtaaaataaaacatcaaactgcacagaacagttgaatagcttaatgaataactacagtaaaagctatggtaaccacta

SEQ ID NO: 353414 - DNA, 1944 bp, Homo sapiens
ccgccgtgcagaatgcagttttcagatgacgaaccgctaaaacaatcataattagcggctggaaacagttcaactgtaaaaaccgcacaccgactgaaggttgcttgccggctcctttccaaattaactttaaaaccactcttccctcaaccaaaatggtttctgtagagcttcgccttcttccatcgccacaacagtggcgcgacttctaagattcggcagcttccggaaggactcagaaccacctataaccctagccgacagttcagcaggctgatccacttgggggctaattggagaaaccagttgattggttgcttccgtgctgcttctctaagggcgcttgcccttaaagaagctgacccagaggccttggtgctgccggcgtggggatccccagatgggaacgccccttgatggaggatctcgtgtgcctattggctgtcctgccaaactgcggagggtgacaaggaagaaggtggctccagatctggagggctggctctcgctcgccaaggctcgctacgcgatgggcgccaagtcggtagggcccctgcagtatgcttcccacatggagccccaggtctgcctccacgccagcgaggcccaggagggactccagaagttcaaggtggtgagagctggtgtccacgccccagaggaggtggggcctcgcgaagcaggtctgcggaggcgcaagggccccactaagaccccagaaccggagtcctctgaggcccctcaggaccccctgaactggtttggaatcctagttcctcacagtctacgtcaggctcaagcaagcttccgggatgccctgctgctgaacaggaggccgaagacgagagctgcccggaggactgggcagcagctgttccagcagagacatcagcaaaagccatctagaggtggatccagagtgtggactaacagagaaaagaagtggagggagagcaggcctgcagctggccgcagacatagccagcctccagaaccgcattgactggggtcgaagccagctccggggactccaagagaaactcaagcagctggagcctggggctgcctgacatgcgcgcaaagaggcagggcagcgagcacagctgttctccgacatggctacgtgatctcaggccttcttccttcacaattagctcttgcccctaccccacgccagctaatgccccttctgtgtccctgctctgcatgtttccattttccttaggtgtgaagtttgaagaggcaaacagtaattttgaaagccactactttgaaaccattctaaggcctgagttcccataggacacactcacataggcaggtacacgttagtcaacaattggaactgcctcttggatcactcagctgtgctttcatggctggatgatggaacactgtgcgaagagagatgggggccaggaagtagcgcttcatgcttagtacatcctccaaattgtctttgctggaggagaaaaccgtactcagccaaaagatcaggacaatatgacttgagtccacaaggacacaaacacctgagtagctgggcagcccttggcagggtctaagccaggaagtaaaaatgatctggcctagatatttaagggaactctaggaagaggcctaggtttttaaaatcctgtctctttgtcttaccataagaggctgagcctctcttcatttttttgaagggccacttgtgttttctgttctgggaacttcattcatttttctactgggttgttgatctttgcagtaatttctaggagctgtttatgtttggaggtaattggtcctttgtccatatatatgagatgtaagtcttattttccagtttatctttttgcttattttttttgactttttattgtaaaataaaacatcaaactgcacagaacagttgaatagcttaatgaataactacagtaaaagctatggtaaccacta

SEQ ID NO: 353415 - DNA, 2005 bp, Homo sapiens
ccgccgtgcagaatgcagttttcagatgacgaaccgctaaaacaatcataattagcggctggaaacagttcaactgtaaaaaccgcacaccgactgaaggttgcttgccggctcctttccaaattaactttaaaaccactcttccctcaaccaaaatggtttctgtagagcttcgccttcttccatcgccacaacagtggcgcgacttctaagattcggcagcttccggaaggactcagaaccacctataaccctagccgacagttcagcaggctgatccacttgggggctaattggagaaaccagttgattggttgcttccgtgctgcttctctaagggcgcttgcccttaaagaagctgacccagaggccttggtgctgccggcgtggggatccccagatgggaacgccccttgatggaggatctcgtgtgcctattggctgtcctgccaaactgcggagggtgacaaggaagaaggtggctccagatctggagggctggctctcgctcgccaaggctcgctacgcgatgggcgccaagtcggtagggcccctgcagtatgcttcccacatggagccccaggtctgcctccacgccagcgaggcccaggagggactccagaagttcaaggtggtgagagctggtgtccacgccccagaggaggtggggcctcgcgaagcaggtctgcggaggcgcaagggccccactaagaccccagaaccggagtcctctgaggcccctcaggaccccctgaactggtttggaatcctagttcctcacagtctacgtcaggctcaagcaagcttccgggatggtgtcctggaggccaagaagagaaagtgtttcctggagcgagtgatccaatgtgtggtcagccctgctgctgaacaggaggccgaagacgagagctgcccggaggactgggcagcagctgttccagcagagacatcagcaaaagccatctagaggtggatccagagtgtggactaacagagaaaagaagtggagggagagcaggcctgcagctggccgcagacatagccagcctccagaaccgcattgactggggtcgaagccagctccggggactccaagagaaactcaagcagctggagcctggggctgcctgacatgcgcgcaaagaggcagggcagcgagcacagctgttctccgacatggctacgtgatctcaggccttcttccttcacaattagctcttgcccctaccccacgccagctaatgccccttctgtgtccctgctctgcatgtttccattttccttaggtgtgaagtttgaagaggcaaacagtaattttgaaagccactactttgaaaccattctaaggcctgagttcccataggacacactcacataggcaggtacacgttagtcaacaattggaactgcctcttggatcactcagctgtgctttcatggctggatgatggaacactgtgcgaagagagatgggggccaggaagtagcgcttcatgcttagtacatcctccaaattgtctttgctggaggagaaaaccgtactcagccaaaagatcaggacaatatgacttgagtccacaaggacacaaacacctgagtagctgggcagcccttggcagggtctaagccaggaagtaaaaatgatctggcctagatatttaagggaactctaggaagaggcctaggtttttaaaatcctgtctctttgtcttaccataagaggctgagcctctcttcatttttttgaagggccacttgtgttttctgttctgggaacttcattcatttttctactgggttgttgatctttgcagtaatttctaggagctgtttatgtttggaggtaattggtcctttgtccatatatatgagatgtaagtcttattttccagtttatctttttgcttattttttttgactttttattgtaaaataaaacatcaaactgcacagaacagttgaatagcttaatgaataactacagtaaaagctatggtaaccacta

SEQ ID NO: 353416 - DNA, 1243 bp, Homo sapiens
ccgccgtgcagaatgcagttttcagatgacgaaccgctaaaacaatcataattagcggctggaaacagttcaactgtaaaaaccgcacaccgactgaaggttgcttgccggctcctttccaaattaactttaaaaccactcttccctcaaccaaaatggtttctgtagagcttcgccttcttccatcgccacaacagtggcgcgacttctaagattcggcagcttccggaaggactcagaaccacctataaccctagccgacagttcagcaggctgatccacttgggggctaattggagaaaccagttgattggttgcttccgtgctgcttctctaagggcgcttgcccttaaagaagctgacccagaggccttggtgctgccggcgtggggatccccagatgggaacgccccttgatggaggatctcgtgtgcctattggctgtcctgccaaactgcggagggtgacaaggaagaaggtggctccagatctggaggtgtgtccatggcggcgcttgacctgcgagcggagctggattcgctggtcctgcagctgcttggggacctggaggagctggaggggaaacgaacggtgttgaacgcccgggtggaggagggctggctctcgctcgccaaggctcgctacgcgatgggcgccaagtcggtagggcccctgcagtatgcttcccacatggagccccaggtctgcctccacgccagcgaggcccaggagggactccagaagttcaaggtggtgagagctggtgtccacgccccagaggaggtggggcctcgcgaagcaggtctgcggaggcgcaagggccccactaagaccccagaaccggagtcctctgaggcccctcaggaccccctgaactggtttggaatcctagatatttaagggaactctaggaagaggcctaggtttttaaaatcctgtctctttgtcttaccataagaggctgagcctctcttcatttttttgaagggccacttgtgttttctgttctgggaacttcattcatttttctactgggttgttgatctttgcagtaatttctaggagctgtttatgtttggaggtaattggtcctttgtccatatatatgagatgtaagtcttattttccagtttatctttttgcttattttttttgactttttattgtaaaataaaacatcaaactgcacagaacagttgaatagcttaatgaataactacagtaaaagctatggtaaccacta

SEQ ID NO: 353417 - DNA, 1556 bp, Homo sapiens
ccgccgtgcagaatgcagttttcagatgacgaaccgctaaaacaatcataattagcggctggaaacagttcaactgtaaaaaccgcacaccgactgaaggttgcttgccggctcctttccaaattaactttaaaaccactcttccctcaaccaaaatggtttctgtagagcttcgccttcttccatcgccacaacagtggcgcgacttctaagattcggcagcttccggaaggactcagaaccacctataaccctagccgacagttcagcaggctgatccacttgggggctaattggagaaaccagttgattggttgcttccgtgctgcttctctaagggcgcttgcccttaaagaagctgacccagaggccttggtgctgccggcgtggggatccccagatgggaacgccccttgatggaggatctcgtgtgcctattggctgtcctgccaaactgcggagggtgacaaggaagaaggtggctccagatctggaggtgtgtccatggcggcgcttgacctgcgagcggagctggattcgctggtcctgcagctgcttggggacctggaggagctggaggggaaacgaacggtgttgaacgcccgggtggaggagggctggctctcgctcgccaaggctcgctacgcgatgggcgccaagtcggtagggcccctgcagtatgcttcccacatggagccccaggtctgcctccacgccagcgaggcccaggagggactccagaagttcaaggtggtgagagctggtgtccacgccccagaggaggtggggcctcgcgaagcaggtctgcggaggcgcaagggccccactaagaccccagaaccggagtcctctgaggcccctcaggaccccctgaactggtttggaatcctagatatttaagggaactctaggaagaggcctaggtttttaaaatcctgtctctttgtcttaccataagaggctgagcctctcttcatttttttgaagggccacttgtgttttctgttctgggaacttcattcatttttctactgggttgttgatctttgcagtaatttctaggagctgtttatgtttggaggtaattggtcctttgtccatatatatgagatgtaagtcttattttccagtttatctttttgcttattttttttgactttttattgtaaaataaaacatcaaactgcacagaacagttgaatagcttaatgaataactacagtaaaagctatggtaaccactacccaacttttgtgttttttgatcattatttgtacgtacagttgaatgtatccagctgtcacatgattctgaatttgggtttgtaactgataaggcaatcagggaattctccagcattttcaagaacctctgtggtttcagttgaaatgtccagtgagtcatgtccagcttttccaccatcctcccacgtgctgtatgtcggttaatgctgcccttttgttttgctaactcccagtgtaaacctaatgtaatttgggggttttcattctgtttcgtggacattactgtcaatacaccagtaccacattgtttta

SEQ ID NO: 353418 - DNA, 1269 bp, Homo sapiens
ccgccgtgcagaatgcagttttcagatgacgaaccgctaaaacaatcataattagcggctggaaacagttcaactgtaaaaaccgcacaccgactgaaggttgcttgccggctcctttccaaattaactttaaaaccactcttccctcaaccaaaatggtttctgtagagcttcgccttcttccatcgccacaacagtggcgcgacttctaagattcggcagcttccggaaggactcagaaccacctataaccctagccgacagttcagcaggctgatccacttgggggctaattggagaaaccagttgattggttgcttccgtgctgcttctctaagggcgcttgcccttaaagaagctgacccagaggccttggtgctgccggcgtggggatccccagatgggaacgccccttgatggaggatctcgtgtgcctattggctgtcctgccaaactgcggagggtgacaaggaagaaggtggctccagatctggaggtgtgtccatggcggcgcttgacctgcgagcggagctggattcgctggtcctgcagctgcttggggacctggaggagctggaggggaaacgaacggtgttgaacgcccgggtggaggagggctggctctcgctcgccaaggctcgctacgcgatgggcgccaagtcggtagggcccctgcagtatgcttcccacatggagccccaggtctgcctccacgccaggtgaggaagcttccatgctgggctgggtgggcgggcgggcgcgttctaggcccgggctgccaaagctccatcctcccttctcgtccttcagcgaggcccaggagggactccagaagttcaaggtggtgagagctggtgtccacgccccagaggaggtggggcctcgcgaagcaggtgagccccctcttccttctgcagaaccccttcccagtgtcaaagacaaaatgcaaattatggagatgatttaaattaggtttttgcgataagagagagcatcccagagcagaagaacagaatgtttttgtagggtggttttgccttagacttttataggaagtagagaaattgttggtgagttgctttacactgggaatagatttacaatcacatacatttcagtcagctgaacagaaaatatttatctgtgtgtctagctagtttcagagggacaaacttctaatcccagttaatcatcctgagacaaagaatggggagttggaacgtctatgtctggtctgttggcatgttcaggtacaatgggtaagatcag

SEQ ID NO: 353419 - DNA, 445 bp, Homo sapiens
tttttcccctggatttttcaaggtacttccttgaaaatgattcccactgcacatctcttagaataaaataaaccttcaagataattttttaagaaaactgagcccagtaactgttctttcctaaaggggaggggcaactagtgtgaaaatactagtaacaatttctttttcctgaatgcccatttctataaatgttacaagcacatctatagaaacacattctccctttctcttttcactctcattcttaaaacaatcctaaaacagacattataatccacgttgtactgggaaaatggagtgctggcaagggcaaacagctaggaagtgaaggaggcgggatctgggccccagctgctaccactccagcttctccctgttctgctctgcagactgcatctcatgccacatctgtgccatgcagtttggatgtaaatattaggaa

SEQ ID NO: 353420 - DNA, 815 bp, Homo sapiens
gaacaacgtggcaaaatcctttaatccaaaaatgtaacattaactaaacattaaattatagatacaagactgtttggtcaactcttgatgtgacaaaaactgagaagggaaaactcatttttctgattttttattttcatttctcttctagactacttacgaaatgttttgttttaactggtcttaggtaaggcacagacattaatatcttttaaaaggtacctaagtgattgtggtgaactgttagtgttgaaacccagtggtgtggaaccagccttccctgtgtccatcaacagaatcactgggcccccagtcacccagcctcggctccagcctcatccatgtccccatccatgaccccatccgggctgctgctggactgctgcaatagtctactcataattggggctttcctagtccatcctacctgttataaaagtgtgactaaagaaatgatcattgaaaacaataaaccaacacaggcaaactatacatttatataaatgtttttcttttaaagggagaaccatttaaccccattcaggggctagtggcttgctttaaatatattgccacgtatcttcagaacttttctgtggaagccagatctctctgcatgacttgagttttggtgactgactcctgtgagaatgagccatttccaagttcactgtcatttgcagccaacagatctactggatgagtcggagtgagcaaaaaatcattacaaagcaagtgtggcatgagatctgtacttagtgtagtacctgaaagacttccaaataattaccttccagattcttaaaaaatttaaa

SEQ ID NO: 353421 - DNA, 1623 bp, Homo sapiens
atcgcgggccagaggcggagccgccgccctgccgcgactttcagactccgaccatggcctcgcgctggtggcggtggcggcgcggctgctcctggaagccggcggcgcggagccccgggcccggctcccccggccgtgcgggaccgttggggccgagcgccgctgccgaagtccgcgcgcaggttcataggcggaagggacttgacttgtctcagataccctatattaatcttgtgaagcatttaacatctgcctgtccaaatgtatgtcgtatatcacggtttcatcacacaaccccagacagtaaaacacacagtggtgaaaaatacaccgatcctttcaaactcggttggagagacttgaaaggtctgtatgaggacattagaaaggaactgcttatatcaacatcagaacttaaggaaatgtctgagtactactttgatgggaaagggaaagcctttcgaccaattattgtggcgctaatggcccgagcatgcaatattcatcataacaactcccgacatgtgcaagccagccagcgcgccatagccttaattgcagaaatgatccacactgctagtctggttcacgatgacgttattgacgatgcaagttctcgaagaggaaaacacacagttaataagatctggggtgaaaagaaggctgttcttgctggagatttaattctttctgcagcatctatagctctggcacgaattggaaatacaactgttatatctattttaacccaagttattgaagatttggtgcgtggtgaatttcttcagctcgggtcaaaagaaaatgagaatgaaagatttgcacactaccttgagaagacattcaagaagaccgccagcctgatagccaacagttgtaaagcagtctctgttctaggatgtcccgacccagtggtgcatgagatcgcctatcagtacggaaaaaatgtaggaatagcttttcagctaatagatgatgtattggacttcacctcgtgttctgaccagatgggcaaaccaacatcagctgatctgaagctcgggttagccactggtcctgtcctgtttgcctgtcagcagttcccagaaatgaatgctatgatcatgcgacggttcagtttgcctggagatgtagacagagctcgacagtatgtactacagagtgatggtgtgcaacaaacaacctacctcgcccagcagtactgccatgaagcaataagagagatcagtaaacttcgaccatccccagaaagagatgccctcattcagctttcagaaattgtactcacaagagataaatgacaactctttctgttctttctggcagctatcttaccagactgtgcctaaagaattttgtggaatacactttgtttgcttcatgtgcagataaccaaaaatcattttaaaagatatcaaacttattgatgggcaatttatttttttttattgcaaaagttttttcagaaaactttttaaatgtaattaataaaccacctgaatctgtcattctagtcctataaattataatcaaggtatcttgatggttatatgtggtattgtttacactgttaatatccacatgtaaggccattacacaaataaataaccaatgttaaaattc

SEQ ID NO: 353422 - DNA, 812 bp, Homo sapiens
tatctgtgtctgaagcaggaggcttgagatgatttttatggacacaccaagaaataactgcattcagaaacaggtctctgttctaggatgtcccgacccagtggtgcatgagatcgcctatcagtacggaaaaaatgtaggaatagcttttcagctaatagatgatgtattggacttcacctcgtgttctgaccagatgggcaaaccaacatcagctgatctgaagctcgggttagccactggtcctgtcctgtttgcctgtcagcagttcccagaaatgaatgctatgatcatgcgacggttcagtttgcctggagatgtagacagagctcgacagtatgtactacagagtgatggtgtgcaacaaacaacctacctcgcccagcagtactgccatgaagcaataagagagatcagtaaacttcgaccatccccagaaagagatgccctcattcagctttcagaaattgtactcacaagagataaatgacaactctttctgttctttctggcagctatcttaccagactgtgcctaaagaattttgtggaatacactttgtttgcttcatgtgcagataaccaaaaatcattttaaaagatatcaaacttattgatgggcaatttatttttttttattgcaaaagttttttcagaaaactttttaaatgtaattaataaaccacctgaatctgtcattctagtcctataaattataatcaaggtatcttgatggttatatgtggtattgtttacactgttaatatccacatgtaaggccattacacaaataaataaccaatgttaaaattc

SEQ ID NO: 353423 - DNA, 1659 bp, Homo sapiens
atcgcgggccagaggcggagccgccgccctgccgcgactttcagactccgaccatggcctcgcgctggtggcggtggcggcgcggctgctcctggaagccggcggcgcggagccccgggcccggctcccccggccgtgcgggaccgttggggccgagcgccgctgccgaagtccgcgcgcaggttcataggcggaagggacttgacttgtctcagataccctatattaatcttgtgaagcatttaacatctgcctgtccaaatgtatgtcgtatatcacggtttcatcacacaaccccagacagtaaaacacacagtggtgaaaaatacaccgatcctttcaaactcggttggagagacttgaaaggtctgtatgaggacattagaaaggaactgcttatatcaacatcagaacttaaggaaatgtctgagtactactttgatgggaaagggaaagcctttcgaccaattattgtggcgctaatggcccgagcatgcaatattcatcataacaactcccgacatgtgcaagccagccagcgcgccatagccttaattgcagaaatgatccacactgctagtctggttcacgatgacgttattgacgatgcaagttctcgaagaggaaaacacacagttaataagatctggggtgaaaagaaggctgttcttgctggagatttaattctttctgcagcatctatagctctggcacgaattggaaatacaactgttatatctattttaacccaagttattgaagatttggtgcgtggtgaatttcttcagctcgggtcaaaagaaaatgagaatgaaagatttgcacactaccttgagaagacattcaagaagaccgccagcctgatagccaacagttgtaaagcagtctctgttctaggatgtcccgacccagtggtgcatgagatcgcctatcagtacggaaaaaatgtaggaatagcttttcagctaatagatgatgtattggacttcacctcgtgttctgaccagatgggcaaaccaacatcagctgatctgaagctcgggttagccactggtcctgtcctgtttgcctgtcagcagttcccagaaatgaatgctatgatcatgcgacggttcagtttgcctggagatgtagacagagctcgacagtatgtactacagactacttacgaaatgttttgttttaactggtcttagagtgatggtgtgcaacaaacaacctacctcgcccagcagtactgccatgaagcaataagagagatcagtaaacttcgaccatccccagaaagagatgccctcattcagctttcagaaattgtactcacaagagataaatgacaactctttctgttctttctggcagctatcttaccagactgtgcctaaagaattttgtggaatacactttgtttgcttcatgtgcagataaccaaaaatcattttaaaagatatcaaacttattgatgggcaatttatttttttttattgcaaaagttttttcagaaaactttttaaatgtaattaataaaccacctgaatctgtcattctagtcctataaattataatcaaggtatcttgatggttatatgtggtattgtttacactgttaatatccacatgtaaggccattacacaaataaataaccaatgttaaaattc

SEQ ID NO: 353424 - DNA, 508 bp, Homo sapiens
tcagtgacaggcatctgttctgttttgttctgtatcttatagagtagtgatggtgtgcaacaaacaacctacctcgcccagcagtactgccatgaagcaataagagagatcagtaaacttcgaccatccccagaaagagatgccctcattcagctttcagaaattgtactcacaagagataaatgacaactctttctgttctttctggcagctatcttaccagactgtgcctaaagaattttgtggaatacactttgtttgcttcatgtgcagataaccaaaaatcattttaaaagatatcaaacttattgatgggcaatttatttttttttattgcaaaagttttttcagaaaactttttaaatgtaattaataaaccacctgaatctgtcattctagtcctataaattataatcaaggtatcttgatggttatatgtggtattgtttacactgttaatatccacatgtaaggccattacacaaataaataaccaatgttaaaattc

SEQ ID NO: 353425 - DNA, 381 bp, Homo sapiens
acaccaagaaataactgcattcagaaacaggtgaaattcccaacgatgatgaaaagaaaggactacagatgggaaaattgtgtgtgattacattagtatctcttcctgaaatgagggatacattgatagagatgattaaagccaacagtaatcgggctagcttgccgagtgctagaagtcagtatttcacagatgggggtccgtttcttttgcatgtcaagaaggtttacttagcatgttaccagcagaactagtccagttgtagctcagtttttcctaagcagtgggaaaggctgcttatcctgtctgaaagcaggggttggagaaggagaattttcttagaatttaacaacacaatctgagactgaaattcttgactgg

SEQ ID NO: 353426 - DNA, 174 bp, Homo sapiens
aagtttgcaatctacctgtaaatgggtgattagaagataaagattataattatgggggttttatcatccaatgttacagtttttcaggaatattcttacaagtttcttgacatttttatttatagataccctatattaatcttgtgaagcatttaacatctgcctgtccaaatg

SEQ ID NO: 353427 - DNA, 268 bp, Homo sapiens
tcacgatgacgttattgacgatgcaagttctcgaagaggaaaacacacagttaataagatctggggtgaaaagaaggtatggttttttggtttttttaaaatctctcttactgaatcacacacttttcggaccgcatttgtttctcagatttgtctcattaaaaatatgcttgctcaaatgtaatgtggtcttctgaatttcaaaaaagtattcatgtcttgtccaaatacagatatttgataaataaataataaaaaataccatgga

SEQ ID NO: 353428 - DNA, 1773 bp, Homo sapiens
atcgcgggccagaggcggagccgccgccctgccgcgactttcagactccgaccatggcctcgcgctggtggcggtggcggcgcggctgctcctggaagccggcggcgcggagccccgggcccggctcccccggccgtgcgggaccgttggggccgagcgccgctgccgaagtccgcgcgcaggttcataggcggaagggacttgacttgtctcagataccctatattaatcttgtgaagcatttaacatctgcctgtccaaatgtatgtcgtatatcacggtttcatcacacaaccccagacagtaaaacacacagtggtgaaaaatacaccgatcctttcaaactcggttggagagacttgaaaggtctgtatgaggacattagaaaggaactgcttatatcaacatcagaacttaaggaaatgtctgagtactactttgatgggaaagggaaagcctttcgaccaattattgtggcgctaatggcccgagcatgcaatattcatcataacaactcccgacatgtgcaagccagccagcgcgccatagccttaattgcagaaatgatccacactgctagtctggttcacgatgacgttattgacgatgcaagttctcgaagaggaaaacacacagttaataagatctggggtgaaaagaaggctgttcttgctggagatttaattctttctgcagcatctatagctctggcacgaattggaaatacaactgttatatctattttaacccaagttattgaagatttggtgcgtggtgaatttcttcagctcgggtcaaaagaaaatgagaatgaaagatttgcacactaccttgagaagacattcaagaagaccgccagcctgatagccaacagttgtaaagcagtctctgttctaggatgtcccgacccagtggtgcatgagatcgcctatcagtacggaaaaaatgtaggaatagcttttcagctaatagatgatgtattggacttcacctcgtgttctgaccagatgggcaaaccaacatcagctgatctgaagctcgggttagccactggtcctgtcctgtttgcctgtcagcagttcccagaaatgaatgctatgatcatgcgacggttcagtttgcctggagatgtagacagagctcgacagtatgtactacagagtgatggtgtgcaacaaacaacctacctcgcccagcagtactgccatgaagcaataagagagatcagtaaacttcgaccatccccagaaagagatgccctcattcagctttcagaaattgtactcacaagagataaatgacaactctttctgttctttctggcagctatcttaccagactgtgcctaaagaattttgtggaatacactttgtttgcttcatgtgcagataaccaaaaatcattttaaaagatatcaaacttattgatgggcaatttatttttttttattgcaaaagttttttcagaaaactttttaaatgtaattaataaaccacctgaatctgtcattctagtcctataaattataatcaaggtatcttgatggttatatgtggtattgtttacactgttaatatccacatgtaaggccattacacaaataaataaccaatgttaaaattcaaatggtttgtcttgatttaccgtaggagtaaaggtcagaaaaatgtgaagtctgcattgaagtccacatgagttatattttaacagtatccaaaatttcatataggagaatggtttattataaaagactgtacataaaatttagacaac

SEQ ID NO: 353429 - DNA, 1706 bp, Homo sapiens
atcgcgggccagaggcggagccgccgccctgccgcgactttcagactccgaccatggcctcgcgctggtggcggtggcggcgcggctgctcctggaagccggcggcgcggagccccgggcccggctcccccggccgtgcgggaccgttggggccgagcgccgctgccgaagtccgcgcgcaggttcataggcggaagggacttgacttgtctcagataccctatattaatcttgtgaagcatttaacatctgcctgtccaaatgtatgtcgtatatcacggtttcatcacacaaccccagacagtaaaacacacagtggtgaaaaatacaccgatcctttcaaactcggttggagagacttgaaaggtctgtatgaggacattagaaaggaactgcttatatcaacatcagaacttaaggaaatgtctgagtactactttgatgggaaagggaaagcctttcgaccaattattgtggcgctaatggcccgagcatgcaatattcatcataacaactcccgatccgatgtccagttttcacaagctgattgctgagaaggttctaggcggcgtctgttaaaaagcattgctttctgttaattagacatgtgcaagccagccagcgcgccatagccttaattgcagaaatgatccacactgctagtctggttcacgatgacgttattgacgatgcaagttctcgaagaggaaaacacacagttaataagatctggggtgaaaagaaggctgttcttgctggagatttaattctttctgcagcatctatagctctggcacgaattggaaatacaactgttatatctattttaacccaagttattgaagatttggtgcgtggtgaatttcttcagctcgggtcaaaagaaaatgagaatgaaagatttgcacactaccttgagaagacattcaagaagaccgccagcctgatagccaacagttgtaaagcagtctctgttctaggatgtcccgacccagtggtgcatgagatcgcctatcagtacggaaaaaatgtaggaatagcttttcagctaatagatgatgtattggacttcacctcgtgttctgaccagatgggcaaaccaacatcagctgatctgaagctcgggttagccactggtcctgtcctgtttgcctgtcagcagttcccagaaatgaatgctatgatcatgcgacggttcagtttgcctggagatgtagacagagctcgacagtatgtactacagagtgatggtgtgcaacaaacaacctacctcgcccagcagtactgccatgaagcaataagagagatcagtaaacttcgaccatccccagaaagagatgccctcattcagctttcagaaattgtactcacaagagataaatgacaactctttctgttctttctggcagctatcttaccagactgtgcctaaagaattttgtggaatacactttgtttgcttcatgtgcagataaccaaaaatcattttaaaagatatcaaacttattgatgggcaatttatttttttttattgcaaaagttttttcagaaaactttttaaatgtaattaataaaccacctgaatctgtcattctagtcctataaattataatcaaggtatcttgatggttatatgtggtattgtttacactgttaatatccacatgtaaggccattacacaaataaataaccaatgttaaaattc

SEQ ID NO: 353430 - DNA, 1824 bp, Homo sapiens
atcgcgggccagaggcggagccgccgccctgccgcgactttcagactccgaccatggcctcgcgctggtggcggtggcggcgcggctgctcctggaagccggcggcgcggagccccgggcccggctcccccggccgtgcgggaccgttggggccgagcgccgctgccgaagtccgcgcgcaggttcataggcggaagggacttgacttgtctcagataccctatattaatcttgtgaagcatttaacatctgcctgtccaaatgtatgtcgtatatcacggtttcatcacacaaccccagacagtaaaacacacagtggtgaaaaatacaccgatcctttcaaactcggttggagagacttgaaaggtctgtatgaggacattagaaaggaactgcttatatcaacatcagaacttaaggaaatgtctgagtactactttgatgggaaagggaaagcctttcgaccaattattgtggcgctaatggcccgagcatgcaatattcatcataacaactcccgacatgtgcaagccagccagcgcgccatagccttaattgcagaaatgatccacactgctagtctggttcacgatgacgttattgacgatgcaagttctcgaagaggaaaacacacagttaataagatctggggtgaaaagaaggctgttcttgctggagatttaattctttctgcagcatctatagctctggcacgaattggaaatacaactgttatatctattttaacccaagttattgaagatttggtgcgtggtgaatttcttcagctcgggtcaaaagaaaatgagaatgaaagatttgcacactaccttgagaagacattcaagaagaccgccagcctgatagccaacagttgtaaagcagtctctgttctaggatgtcccgacccagtggtgcatgagatcgcctatcagtacggaaaaaatgtaggaatagcttttcagctaatagatgatgtattggacttcacctcgtgttctgaccagatgggcaaaccaacatcagctgatctgaagctcgggttagccactggtcctgtcctgtttgcctgtcagcagttcccagaaatgaatgctatgatcatgcgacggttcagtttgcctggagatgtagacagagctcgacagtatgtactacagactacttacgaaatgttttgttttaactggtcttaggtaaggcacagacattaatatcttttaaaaggtacctaagtgattgtggtgaactgttagtgttgaaacccagtggtgtggaaccagccttccctgtgtccatcaacagaatcactgggcccccagtcacccagcctcggctccagcctcatccatgtccccatccatgaccccatccgggctgctgctggactgctgcaatagtctactcataattggggctttcctagtccatcctacctgttataaaagtgtgactaaagaaatgatcattgaaaacaataaaccaacacaggcaaactatacatttatataaatgtttttcttttaaagggagaaccatttaaccccattcaggggctagtggcttgctttaaatatattgccacgtatcttcagaacttttctgtggaagccagatctctctgcatgacttgagttttggtgactgactcctgtgagaatgagccatttccaagttcactgtcatttgcagccaacagatctactggatgagtcggagtgagcaaaaaatcattacaaagcaagtgtggcatgagatctgtacttagtgtagtacctgaaagacttccaaataattaccttccagattcttaaaaaatttaaa

SEQ ID NO: 353431 - DNA, 1306 bp, Homo sapiens
  misc_feature (127)..(129): n is a, c, g, or t
tatgaattcggaagaacaagaatggcgacaatgagaaaaaggagagagcagaagaggaaacaaacctcagggaagaatgtctgcatgacgaactctagaatgcgcccttggagggtatgtaagatannnagttcattctctttctcctctctccaccgctccatctctccagggtctctaccttgcctgtcaggctccactttcctttgctcctgccttttgcatctgttcctctctgcattctcccctcatctcctctcttccgtgcacctcattttcctgctcccctcctgcctctgtccctcatcttcttttcagagacttaaaaccagccagtggccactggcttttcagtgtctcctcctcctccttgaactacctcttccttctagtgcttctgtccttccctcctcctgacctccagtgaacaataattatttgtaacgtaatgacaaattatcgttacgttacaaagaccagaggttagaggtggtgattggccttgtaaactgtaggtcagcgatgagtaatttaagaaaactaaatttaattggtttactcatgagtcagttaggaattctatttggcagctagaacagaaatagcagtggcttaaaccagtagaaattttttctattgtgaaaagaaatctagggggacagtctagggcttgtctctccgctctgccatccttagtgcagggcgtccaaccccaaggttgtatcatggtctaagatggctgcgggagccccaaccatcatgtcaggttctaggaagaaagcaggaagaagagaggaaaggcaaaaagaacacatgctccatcttaaggagctttcctgcaagtcccaccaaatagcttcagcttctcctccttgcctccattagttgcaagggaggctgagacatcatttagctgagcacattgctacctgaggtagaattgggattctgtcaccaagaaagaaggggagaatggatattgtgtaaacaattagcaaggtctgccgccattcattcaacattaatttagcacctacaatctactagttatgaagaacagtcaaggtgccccattccagagggaagacatagataagtaaacaagtacagtacacaggatggggcccacattccgcttcctgatgagcctggttaaccaagtaccgaaaatagttcccgatgactttgagaccatgctcaacagcaacatcaatgaccttttgatggtgacctacctgggcaacctcacacagtcacagattgcactcaatgaaaaacttgtaaacctgtgaatgggcccaacatt

SEQ ID NO: 353432 - DNA, 359 bp, Homo sapiens
gcggccgcactggagcgcagctttcccgctagaactatgagttccgggaaaactgcggactcaatgaccacggcgatttcgtaacgcccccgttccgaaagtgttcttctgggcagtgcaaccccgacggcgcggagctatgtagcccctgcggcggcggagccgtgacccctactcccgccgcgggcgggggcagaaccccgtggcgctgcagagaggtgcagatgggactcccggcagggcaagggcgtgctggaggtggggggcctagatgtagggagccggcgtagccccacgtaaggggtggggccgtggtttcaggaggtggctggcctgcaggggtcgggaggtcctaggtt

SEQ ID NO: 353433 - DNA, 2700 bp, Homo sapiens
gtaagagcagccagacctggagggcttgggtaaaaatggctgaatatttagcttcgatattcgggactgagaaggacaaggttaactgctctttttactttaagatcggggtctgccggcacggggaccggtgctcccggcttcacaacaagccgacattcagccaggtgagacccggcacggagcctcgggggttaacggctccctggcccttccccttctggggccgtcgtcaccatgtcccgcctattccgggttcctgagtccctccccaccgcccggctttttttctcattggacctttctgcaggctcctcccaccggtcttcgtgccgttttcccgggaacttggtcgcgcccccatgcgtacaggctacacacggcggctgttcatctttgccagtcccttccatcccgctgttcatccttgccagtcccctccatcccttttctggtttcttaggggcaaaggatcgccgatgcactcatgatgcttaggctggggtgtaaggttccacccccaaccttcatgcctcactctctgttcatgcagccctgccctctgagctcaggccccgccccttttaaattctgtgcagaccatagtgctgctcaacctgtaccggaatccacagaacacagcccaaactgcagacggatcacactgtgagtaagggaccaggcctgggggcaaggtgaacagcccccagtaggctacactctgattccaccctgcccgcccccaccccaggtcatgtgagtgacgtggaggtgcaggagcactatgatagcttcttcgaggtgagggttggtaggggcagatggggtttcttgtgggagctcagctgagttcctccccgtcttccacaggaggtgttcacagaactgcaggagaagtatggggagattgaagagatgaatgtgtgcgacaaccttggggaccacctcgtgggcaacgtctatgtcaagttccggagggaggaggatggagagcgggccgtggctgaactcagtaaccgctggttcaacgggcaggctgtgcacgggaatgtacccgaggtggcttctgcaacttcatgcatctgcggcccatttcccagaacctccagaggcagctctatgggcggggacccaggcgcaggtcacccccgaggttccatactggccaccatccccgagagaggaaccatcggtgttcccctgatcactggcatggccgcttctgaggccctggcccccttacccttcacccccaacagggacagatgttcctggcaggacctctcctcaaagcccccttcactctcctgccccatccttcccaggctcccgggctccataatgtaatctgttcagcatggagaccttcttctaccgcccctgtcttaataaagctgcgtgtttcacttcggcatcaaaacttgcttttgctgtggtttggcatttccctccacccacacatgtgacgaaaaggggaaacaagactgggtcctggccacaacttcagctgaggaacttggcacggccagcttgggacccaggaccctaacgcagaggcgctgtgtttggaagtcccgctatcacggccccccagatggggcctggacgatgcctcctgacggccttgttgcttctggccctggcgccaccgccggaagcctcccagtactgcggccgccttgaatactggaacccagacaacaagtgctgcagcagctgcctgcaacgcttcgggccgcccccctgcccggactatgagttccgggaaaactgcggactcaatgaccacggcgatttcgtaacgcccccgttccgaaagtgttcttctgggcagtgcaaccccgacggcgcggagctatgtagcccctgcggcggcggagccgtgacccctactcccgccgcgggcgggggcagaaccccgtggcgctgcagagagaggccggtccctgccaaggggcactgccccctcacacctggaaacccaggcgcccctagctcccaggagcgcagctcaccagcaagttccattgcctggaggacccctgagcctgtccctcagcaggcctggccgaatttccttccgctcgtggtgctggtcctgctcctgaccttggcggtgatagcgatcctcctgtttattctgctctggcatctctgctggcccaaggagaaagccgacccctatccctatcctggcttggtctgcggagtccccaacacccacaccccttcctcctcgcatctgtcctccccaggcgccctggagacaggggacacatggaaggaggcctcactacttccactcctgagcagggaactgtccagtctggcgtcacaacccctgtctcgcctcctggatgagctggaggtgctggaagagctgattgtactgctggaccctgagcctgggccaggtgggggtatggcccatggcactactcgacacctggccgcaagatatgggctgcctgctgcctggtccacctttgcctattcgctgaggccgagtcgctcgccgctgcgggctctgattgagatggtggtggcaagggagccctctgcctccctgggccagcttggcacacacctcgcccagctagggcgggcagatgcattgcgggtgctgtccaagcttggctcatctggggtttgctgggcttaacacccaataaagaactttgctgactactaagcccagta

SEQ ID NO: 353434 - DNA, 2532 bp, Homo sapiens
gtaagagcagccagacctggagggcttgggtaaaaatggctgaatatttagcttcgatattcgggactgagaaggacaaatcggggtctgccggcacggggaccggtgctcccggcttcacaacaagccgacattcagccaggctcctcccaccggtcttcgtgccgttttcccgggaacttggtcgcgcccccatgcgtacaggctacacacggcggctgttcatctttgccagtcccttccatcccgctgttcatccttgccagtcccctccatcccttttctggtttcttaggggcaaaggatcgccgatgcactcatgatgcttaggctggggtgtaaggttccacccccaaccttcatgcctcactctctgttcatgcagccctgccctctgagctcaggccccgccccttttaaattctgtgcagaccatagtgctgctcaacctgtaccggaatccacagaacacagcccaaactgcagacggatcacactgtgagtaagggaccaggcctgggggcaaggtgaacagcccccagtaggctacactctgattccaccctgcccgcccccaccccaggtcatgtgagtgacgtggaggtgcaggagcactatgatagcttcttcgaggtgagggttggtaggggcagatggggtttcttgtgggagctcagctgagttcctccccgtcttccacaggaggtgttcacagaactgcaggagaagtatggggagattgaagagatgaatgtgtgcgacaaccttggggaccacctcgtgggcaacgtctatgtcaagttccggagggaggaggatggagagcgggccgtggctgaactcagtaaccgctggttcaacgggcaggctgtgcacgggaatgtacccgaggtggcttctgcaacttcatgcatctgcggcccatttcccagaacctccagaggcagctctatgggcggggacccaggcgcaggtcacccccgaggttccatactggccaccatccccgagagaggaaccatcggtgttcccctgatcactggcatggccgcttctgaggccctggcccccttacccttcacccccaacagggacagatgttcctggcaggacctctcctcaaagcccccttcactctcctgccccatccttcccaggctcccgggctccataatgtaatctgttcagcatggagaccttcttctaccgcccctgtcttaataaagctgcgtgtttcacttcggcatcaaaacttgcttttgctgtggtttggcatttccctccacccacacatgtgacgaaaaggggaaacaagactgggtcctggccacaacttcagctgaggaacttggcacggccagcttgggacccaggaccctaacgcagaggcgctgtgtttggaagtcccgctatcacggccccccagatggggcctggacgatgcctcctgacggccttgttgcttctggccctggcgccaccgccggaagcctcccagtactgcggccgccttgaatactggaacccagacaacaagtgctgcagcagctgcctgcaacgcttcgggccgcccccctgcccggactatgagttccgggaaaactgcggactcaatgaccacggcgatttcgtaacgcccccgttccgaaagtgttcttctgggcagtgcaaccccgacggcgcggagctatgtagcccctgcggcggcggagccgtgacccctactcccgccgcgggcgggggcagaaccccgtggcgctgcagagagaggccggtccctgccaaggggcactgccccctcacacctggaaacccaggcgcccctagctcccaggagcgcagctcaccagcaagttccattgcctggaggacccctgagcctgtccctcagcaggcctggccgaatttccttccgctcgtggtgctggtcctgctcctgaccttggcggtgatagcgatcctcctgtttattctgctctggcatctctgctggcccaaggagaaagccgacccctatccctatcctggcttggtctgcggagtccccaacacccacaccccttcctcctcgcatctgtcctccccaggcgccctggagacaggggacacatggaaggaggcctcactacttccactcctgagcagggaactgtccagtctggcgtcacaacccctgtctcgcctcctggatgagctggaggtgctggaagagctgattgtactgctggaccctgagcctgggccaggtgggggtatggcccatggcactactcgacacctggccgcaagatatgggctgcctgctgcctggtccacctttgcctattcgctgaggccgagtcgctcgccgctgcgggctctgattgagatggtggtggcaagggagccctctgcctccctgggccagcttggcacacacctcgcccagctagggcgggcagatgcattgcgggtgctgtccaagcttggctcatctggggtttgctgggcttaacacccaataaagaactttgctgactactaagcccagta

SEQ ID NO: 353435 - DNA, 2039 bp, Homo sapiens
gtaagagcagccagacctggagggcttgggtaaaaatggctgaatatttagcttcgatattcgggactgagaaggacaaatcggggtctgccggcacggggaccggtgctcccggcttcacaacaagccgacattcagccagaccatagtgctgctcaacctgtaccggaatccacagaacacagcccaaactgcagacggatcacactgaggtgttcacagaactgcaggagaagtatggggagattgaagagatgaatgtgtgcgacaaccttggggaccacctcgtgggcaacgtctatgtcaagttccggagggaggaggatggagagcgggccgtggctgaactcagtaaccgctggttcaacgggcaggctgtgcacgggaatgtacccgaggtggcttctgcaacttcatgcatctgcggcccatttcccagaacctccagaggcagctctatgggcggggacccaggcgcaggtcacccccgaggttccatactggccaccatccccgagagaggaaccatcggtgttcccctgatcactggcatggccgcttctgaggccctggcccccttacccttcacccccaacagggacagatgttcctggcaggacctctcctcaaagcccccttcactctcctgccccatccttcccaggctcccgggctccataatgtaatctgttcagcatggagaccttcttctaccgcccctgtcttaataaagctgcgtgtttcacttcggcatcaaaacttgcttttgctgtggtttggcatttccctccacccacacatgtgacgaaaaggggaaacaagactgggtcctggccacaacttcagctgaggaacttggcacggccagcttgggacccaggaccctaacgcagaggcgctgtgtttggaagtcccgctatcacggccccccagatggggcctggacgatgcctcctgacggccttgttgcttctggccctggcgccaccgccggaagcctcccagtactgcggccgccttgaatactggaacccagacaacaagtgctgcagcagctgcctgcaacgcttcgggccgcccccctgcccggactatgagttccgggaaaactgcggactcaatgaccacggcgatttcgtaacgcccccgttccgaaagtgttcttctgggcagtgcaaccccgacggcgcggagctatgtagcccctgcggcggcggagccgtgacccctactcccgccgcgggcgggggcagaaccccgtggcgctgcagagagaggccggtccctgccaaggggcactgccccctcacacctggaaacccaggcgcccctagctcccaggagcgcagctcaccagcaagttccattgcctggaggacccctgagcctgtccctcagcaggcctggccgaatttccttccgctcgtggtgctggtcctgctcctgaccttggcggtgatagcgatcctcctgtttattctgctctggcatctctgctggcccaaggagaaagccgacccctatccctatcctggcttggtctgcggagtccccaacacccacaccccttcctcctcgcatctgtcctccccaggcgccctggagacaggggacacatggaaggaggcctcactacttccactcctgagcagggaactgtccagtctggcgtcacaacccctgtctcgcctcctggatgagctggaggtgctggaagagctgattgtactgctggaccctgagcctgggccaggtgggggtatggcccatggcactactcgacacctggccgcaagatatgggctgcctgctgcctggtccacctttgcctattcgctgaggccgagtcgctcgccgctgcgggctctgattgagatggtggtggcaagggagccctctgcctccctgggccagcttggcacacacctcgcccagctagggcgggcagatgcattgcgggtgctgtccaagcttggctcatctggggtttgctgggcttaacacccaataaagaactttgctgactactaagcccagta

SEQ ID NO: 353436 - DNA, 2085 bp, Homo sapiens
gtaagagcagccagacctggagggcttgggtaaaaatggctgaatatttagcttcgatattcgggactgagaaggacaaatcggggtctgccggcacggggaccggtgctcccggcttcacaacaagccgacattcagccagccctgccctctgagctcaggccccgccccttttaaattctgtgcagaccatagtgctgctcaacctgtaccggaatccacagaacacagcccaaactgcagacggatcacactgaggtgttcacagaactgcaggagaagtatggggagattgaagagatgaatgtgtgcgacaaccttggggaccacctcgtgggcaacgtctatgtcaagttccggagggaggaggatggagagcgggccgtggctgaactcagtaaccgctggttcaacgggcaggctgtgcacgggaatgtacccgaggtggcttctgcaacttcatgcatctgcggcccatttcccagaacctccagaggcagctctatgggcggggacccaggcgcaggtcacccccgaggttccatactggccaccatccccgagagaggaaccatcggtgttcccctgatcactggcatggccgcttctgaggccctggcccccttacccttcacccccaacagggacagatgttcctggcaggacctctcctcaaagcccccttcactctcctgccccatccttcccaggctcccgggctccataatgtaatctgttcagcatggagaccttcttctaccgcccctgtcttaataaagctgcgtgtttcacttcggcatcaaaacttgcttttgctgtggtttggcatttccctccacccacacatgtgacgaaaaggggaaacaagactgggtcctggccacaacttcagctgaggaacttggcacggccagcttgggacccaggaccctaacgcagaggcgctgtgtttggaagtcccgctatcacggccccccagatggggcctggacgatgcctcctgacggccttgttgcttctggccctggcgccaccgccggaagcctcccagtactgcggccgccttgaatactggaacccagacaacaagtgctgcagcagctgcctgcaacgcttcgggccgcccccctgcccggactatgagttccgggaaaactgcggactcaatgaccacggcgatttcgtaacgcccccgttccgaaagtgttcttctgggcagtgcaaccccgacggcgcggagctatgtagcccctgcggcggcggagccgtgacccctactcccgccgcgggcgggggcagaaccccgtggcgctgcagagagaggccggtccctgccaaggggcactgccccctcacacctggaaacccaggcgcccctagctcccaggagcgcagctcaccagcaagttccattgcctggaggacccctgagcctgtccctcagcaggcctggccgaatttccttccgctcgtggtgctggtcctgctcctgaccttggcggtgatagcgatcctcctgtttattctgctctggcatctctgctggcccaaggagaaagccgacccctatccctatcctggcttggtctgcggagtccccaacacccacaccccttcctcctcgcatctgtcctccccaggcgccctggagacaggggacacatggaaggaggcctcactacttccactcctgagcagggaactgtccagtctggcgtcacaacccctgtctcgcctcctggatgagctggaggtgctggaagagctgattgtactgctggaccctgagcctgggccaggtgggggtatggcccatggcactactcgacacctggccgcaagatatgggctgcctgctgcctggtccacctttgcctattcgctgaggccgagtcgctcgccgctgcgggctctgattgagatggtggtggcaagggagccctctgcctccctgggccagcttggcacacacctcgcccagctagggcgggcagatgcattgcgggtgctgtccaagcttggctcatctggggtttgctgggcttaacacccaataaagaactttgctgactactaagcccagta

SEQ ID NO: 353437 - DNA, 2022 bp, Homo sapiens
gtaagagcagccagacctggagggcttgggtaaaaatggctgaatatttagcttcgatattcgggactgagaaggacaaccctgccctctgagctcaggccccgccccttttaaattctgtgcagaccatagtgctgctcaacctgtaccggaatccacagaacacagcccaaactgcagacggatcacactgaggtgttcacagaactgcaggagaagtatggggagattgaagagatgaatgtgtgcgacaaccttggggaccacctcgtgggcaacgtctatgtcaagttccggagggaggaggatggagagcgggccgtggctgaactcagtaaccgctggttcaacgggcaggctgtgcacgggaatgtacccgaggtggcttctgcaacttcatgcatctgcggcccatttcccagaacctccagaggcagctctatgggcggggacccaggcgcaggtcacccccgaggttccatactggccaccatccccgagagaggaaccatcggtgttcccctgatcactggcatggccgcttctgaggccctggcccccttacccttcacccccaacagggacagatgttcctggcaggacctctcctcaaagcccccttcactctcctgccccatccttcccaggctcccgggctccataatgtaatctgttcagcatggagaccttcttctaccgcccctgtcttaataaagctgcgtgtttcacttcggcatcaaaacttgcttttgctgtggtttggcatttccctccacccacacatgtgacgaaaaggggaaacaagactgggtcctggccacaacttcagctgaggaacttggcacggccagcttgggacccaggaccctaacgcagaggcgctgtgtttggaagtcccgctatcacggccccccagatggggcctggacgatgcctcctgacggccttgttgcttctggccctggcgccaccgccggaagcctcccagtactgcggccgccttgaatactggaacccagacaacaagtgctgcagcagctgcctgcaacgcttcgggccgcccccctgcccggactatgagttccgggaaaactgcggactcaatgaccacggcgatttcgtaacgcccccgttccgaaagtgttcttctgggcagtgcaaccccgacggcgcggagctatgtagcccctgcggcggcggagccgtgacccctactcccgccgcgggcgggggcagaaccccgtggcgctgcagagagaggccggtccctgccaaggggcactgccccctcacacctggaaacccaggcgcccctagctcccaggagcgcagctcaccagcaagttccattgcctggaggacccctgagcctgtccctcagcaggcctggccgaatttccttccgctcgtggtgctggtcctgctcctgaccttggcggtgatagcgatcctcctgtttattctgctctggcatctctgctggcccaaggagaaagccgacccctatccctatcctggcttggtctgcggagtccccaacacccacaccccttcctcctcgcatctgtcctccccaggcgccctggagacaggggacacatggaaggaggcctcactacttccactcctgagcagggaactgtccagtctggcgtcacaacccctgtctcgcctcctggatgagctggaggtgctggaagagctgattgtactgctggaccctgagcctgggccaggtgggggtatggcccatggcactactcgacacctggccgcaagatatgggctgcctgctgcctggtccacctttgcctattcgctgaggccgagtcgctcgccgctgcgggctctgattgagatggtggtggcaagggagccctctgcctccctgggccagcttggcacacacctcgcccagctagggcgggcagatgcattgcgggtgctgtccaagcttggctcatctggggtttgctgggcttaacacccaataaagaactttgctgactactaagcccagta

SEQ ID NO: 353438 - DNA, 2262 bp, Homo sapiens
gtaagagcagccagacctggagggcttgggtaaaaatggctgaatatttagcttcgatattcgggactgagaaggacaaatcggggtctgccggcacggggaccggtgctcccggcttcacaacaagccgacattcagccagccctgccctctgagctcaggccccgccccttttaaattctgtgcagaccatagtgctgctcaacctgtaccggaatccacagaacacagcccaaactgcagacggatcacactgaggtgttcacagaactgcaggagaagtatggggagattgaagagatgaatgtgtgcgacaaccttggggaccacctcgtgggcaacgtctatgtcaaggtgcttgctgccccccacttagggcccagaagtggaggcgtttcaatgcctgatggtggccactgtaggctctcagcttgaatttcatcactaaatccagtccagccccagagcgggtagtgagtcccctgaagatctctgagttctcctgctgaccctgactgacatttcctgcagttccggagggaggaggatggagagcgggccgtggctgaactcagtaaccgctggttcaacgggcaggctgtgcacgggaatgtacccgaggtggcttctgcaacttcatgcatctgcggcccatttcccagaacctccagaggcagctctatgggcggggacccaggcgcaggtcacccccgaggttccatactggccaccatccccgagagaggaaccatcggtgttcccctgatcactggcatggccgcttctgaggccctggcccccttacccttcacccccaacagggacagatgttcctggcaggacctctcctcaaagcccccttcactctcctgccccatccttcccaggctcccgggctccataatgtaatctgttcagcatggagaccttcttctaccgcccctgtcttaataaagctgcgtgtttcacttcggcatcaaaacttgcttttgctgtggtttggcatttccctccacccacacatgtgacgaaaaggggaaacaagactgggtcctggccacaacttcagctgaggaacttggcacggccagcttgggacccaggaccctaacgcagaggcgctgtgtttggaagtcccgctatcacggccccccagatggggcctggacgatgcctcctgacggccttgttgcttctggccctggcgccaccgccggaagcctcccagtactgcggccgccttgaatactggaacccagacaacaagtgctgcagcagctgcctgcaacgcttcgggccgcccccctgcccggactatgagttccgggaaaactgcggactcaatgaccacggcgatttcgtaacgcccccgttccgaaagtgttcttctgggcagtgcaaccccgacggcgcggagctatgtagcccctgcggcggcggagccgtgacccctactcccgccgcgggcgggggcagaaccccgtggcgctgcagagagaggccggtccctgccaaggggcactgccccctcacacctggaaacccaggcgcccctagctcccaggagcgcagctcaccagcaagttccattgcctggaggacccctgagcctgtccctcagcaggcctggccgaatttccttccgctcgtggtgctggtcctgctcctgaccttggcggtgatagcgatcctcctgtttattctgctctggcatctctgctggcccaaggagaaagccgacccctatccctatcctggcttggtctgcggagtccccaacacccacaccccttcctcctcgcatctgtcctccccaggcgccctggagacaggggacacatggaaggaggcctcactacttccactcctgagcagggaactgtccagtctggcgtcacaacccctgtctcgcctcctggatgagctggaggtgctggaagagctgattgtactgctggaccctgagcctgggccaggtgggggtatggcccatggcactactcgacacctggccgcaagatatgggctgcctgctgcctggtccacctttgcctattcgctgaggccgagtcgctcgccgctgcgggctctgattgagatggtggtggcaagggagccctctgcctccctgggccagcttggcacacacctcgcccagctagggcgggcagatgcattgcgggtgctgtccaagcttggctcatctggggtttgctgggcttaacacccaataaagaactttgctgactactaagcccagta

SEQ ID NO: 353439 - DNA, 2490 bp, Homo sapiens
gtaagagcagccagacctggagggcttgggtaaaaatggctgaatatttagcttcgatattcgggactgagaaggacaaatcggggtctgccggcacggggaccggtgctcccggcttcacaacaagccgacattcagccaggtgagacccggcacggagcctcgggggttaacggctccctggcccttccccttctggggccgtcgtcaccatgtcccgcctattccgggttcctgagtccctccccaccgcccggctttttttctcattggacctttctgcaggctcctcccaccggtcttcgtgccgttttcccgggaacttggtcgcgcccccatgcgtacaggctacacacggcggctgttcatctttgccagtcccttccatcccgctgttcatccttgccagtcccctccatcccttttctggtttcttaggggcaaaggatcgccgatgcactcatgatgcttaggctggggtgtaaggttccacccccaaccttcatgcctcactctctgttcatgcagccctgccctctgagctcaggccccgccccttttaaattctgtgcagaccatagtgctgctcaacctgtaccggaatccacagaacacagcccaaactgcagacggatcacactgtgagtaagggaccaggcctgggggcaaggtgaacagcccccagtaggctacactctgattccaccctgcccgcccccaccccaggtcatgtgagtgacgtggaggtgcaggagcactatgatagcttcttcgaggtgagggttggtaggggcagatggggtttcttgtgggagctcagctgagttcctccccgtcttccacaggaggtgttcacagaactgcaggagaagtatggggagattgaagagatgaatgtgtgcgacaaccttggggaccacctcgtgggcaacgtctatgtcaagttccggagggaggaggatggagagcgggccgtggctgaactcagtaaccgctggttcaacgggcaggctgtgcacgggaatgtacccgaggtggcttctgcaacttcatgcatctgcggcccatttcccagaacctccagaggcagctctatgggcggggacccaggcgcaggtcacccccgaggttccatactggccaccatccccgagagaggaaccatcggtgttcccctgatcactggcatggccgcttctgaggccctggcccccttacccttcacccccaacagggacagatgttcctggcaggacctctcctcaaagcccccttcactctcctgccccatccttcccaggctcccgggctccataatgtaatctgttcagcatggagaccttcttctaccgcccctgtcttaataaagctgcgtgtttcacttcggcatcaaaacttgcttttgctgtggtttggcatttccctccacccacacatgtgacgaaaaggggaaacaagactgggtcctggccacaacttcagctgaggaacttggcacggccagcttgggacccaggaccctaacgcagaggcgctgtgtttggaagtcccgctatcacggccccccagatggggcctggacgatgcctcctgacggccttgttgcttctggccctggcgccaccgccggaagcctcccagtactgcggccgccttgaatactggaacccagacaacaagtgctgcagcagctgcctgcaacgcttcgggccgcccccctgcccggaggccggtccctgccaaggggcactgccccctcacacctggaaacccaggcgcccctagctcccaggagcgcagctcaccagcaagttccattgcctggaggacccctgagcctgtccctcagcaggcctggccgaatttccttccgctcgtggtgctggtcctgctcctgaccttggcggtgatagcgatcctcctgtttattctgctctggcatctctgctggcccaaggagaaagccgacccctatccctatcctggcttggtctgcggagtccccaacacccacaccccttcctcctcgcatctgtcctccccaggcgccctggagacaggggacacatggaaggaggcctcactacttccactcctgagcagggaactgtccagtctggcgtcacaacccctgtctcgcctcctggatgagctggaggtgctggaagagctgattgtactgctggaccctgagcctgggccaggtgggggtatggcccatggcactactcgacacctggccgcaagatatgggctgcctgctgcctggtccacctttgcctattcgctgaggccgagtcgctcgccgctgcgggctctgattgagatggtggtggcaagggagccctctgcctccctgggccagcttggcacacacctcgcccagctagggcgggcagatgcattgcgggtgctgtccaagcttggctcatctggggtttgctgggcttaacacccaataaagaactttgctgactactaagcccagta

SEQ ID NO: 353440 - DNA, 2532 bp, Homo sapiens
gtaagagcagccagacctggagggcttgggtaaaaatggctgaatatttagcttcgatattcgggactgagaaggacaaatcggggtctgccggcacggggaccggtgctcccggcttcacaacaagccgacattcagccaggtgagacccggcacggagcctcgggggttaacggctccctggcccttccccttctggggccgtcgtcaccatgtcccgcctattccgggttcctgagtccctccccaccgcccggctttttttctcattggacctttctgcaggctcctcccaccggtcttcgtgccgttttcccgggaacttggtcgcgcccccatgcgtacaggctacacacggcggctgttcatctttgccagtcccttccatcccgctgttcatccttgccagtcccctccatcccttttctggtttcttaggggcaaaggatcgccgatgcactcatgatgcttaggctggggtgtaaggttccacccccaaccttcatgcctcactctctgttcatgcagccctgccctctgagctcaggccccgccccttttaaattctgtgcagaccatagtgctgctcaacctgtaccggaatccacagaacacagcccaaactgcagacggatcacactgtgagtaagggaccaggcctgggggcaaggtgaacagcccccagtaggctacactctgattccaccctgcccgcccccaccccaggtcatgtgagtgacgtggaggtgcaggagcactatgatagcttcttcgaggtgagggttggtaggggcagatggggtttcttgtgggagctcagctgagttcctccccgtcttccacaggaggtgttcacagaactgcaggagaagtatggggagattgaagagatgaatgtgtgcgacaaccttggggaccacctcgtgggcaacgtctatgtcaagttccggagggaggaggatggagagcgggccgtggctgaactcagtaaccgctggttcaacgggcaggctgtgcacgggaatgtacccgaggtggcttctgcaacttcatgcatctgcggcccatttcccagaacctccagaggcagctctatgggcggggacccaggcgcaggtcacccccgaggttccatactggccaccatccccgagagaggaaccatcggtgttcccctgatcactggcatggccgcttctgaggccctggcccccttacccttcacccccaacagggacagatgttcctggcaggacctctcctcaaagcccccttcactctcctgccccatccttcccaggctcccgggctccataatgtaatctgttcagcatggagaccttcttctaccgcccctgtcttaataaagctgcgtgtttcacttcggcatcaaaacttgcttttgctgtggtttggcatttccctccacccacacatgtgacgaaaaggggaaacaagactgggtcctggccacaacttcagctgaggaacttggcacggccagcttgggacccaggaccctaacgcagaggcgctgtgtttggaagtcccgctatcacggccccccagatggggcctggacgatgcctcctgacggccttgttgcttctggccctggcgccaccgccggaagcctcccagtactgcggccgccttgaatactggaacccagacaacaagtgctgcagcagctgcctgcaacgcttcgggccgcccccctgcccgggtgagaatccgagaccgagccttgcttgggcggagcttgcagaggccggtccctgccaaggggcactgccccctcacacctggaaacccaggcgcccctagctcccaggagcgcagctcaccagcaagttccattgcctggaggacccctgagcctgtccctcagcaggcctggccgaatttccttccgctcgtggtgctggtcctgctcctgaccttggcggtgatagcgatcctcctgtttattctgctctggcatctctgctggcccaaggagaaagccgacccctatccctatcctggcttggtctgcggagtccccaacacccacaccccttcctcctcgcatctgtcctccccaggcgccctggagacaggggacacatggaaggaggcctcactacttccactcctgagcagggaactgtccagtctggcgtcacaacccctgtctcgcctcctggatgagctggaggtgctggaagagctgattgtactgctggaccctgagcctgggccaggtgggggtatggcccatggcactactcgacacctggccgcaagatatgggctgcctgctgcctggtccacctttgcctattcgctgaggccgagtcgctcgccgctgcgggctctgattgagatggtggtggcaagggagccctctgcctccctgggccagcttggcacacacctcgcccagctagggcgggcagatgcattgcgggtgctgtccaagcttggctcatctggggtttgctgggcttaacacccaataaagaactttgctgactactaagcccagta

SEQ ID NO: 353441 - DNA, 2241 bp, Homo sapiens
gtaagagcagccagacctggagggcttgggtaaaaatggctgaatatttagcttcgatattcgggactgagaaggacaaggttaactgctctttttactttaagatcggggtctgccggcacggggaccggtgctcccggcttcacaacaagccgacattcagccagaccatagtgctgctcaacctgtaccggaatccacagaacacagcccaaactgcagacggatcacactgaggtgttcacagaactgcaggagaagtatggggagattgaagagatgaatgtgtgcgacaaccttggggaccacctcgtgggcaacgtctatgtcaaggtgcttgctgccccccacttagggcccagaagtggaggcgtttcaatgcctgatggtggccactgtaggctctcagcttgaatttcatcactaaatccagtccagccccagagcgggtagtgagtcccctgaagatctctgagttctcctgctgaccctgactgacatttcctgcagttccggagggaggaggatggagagcgggccgtggctgaactcagtaaccgctggttcaacgggcaggctgtgcacgggaatgtacccgaggtggcttctgcaacttcatgcatctgcggcccatttcccagaacctccagaggcagctctatgggcggggacccaggcgcaggtcacccccgaggttccatactggccaccatccccgagagaggaaccatcggtgttcccctgatcactggcatggccgcttctgaggccctggcccccttacccttcacccccaacagggacagatgttcctggcaggacctctcctcaaagcccccttcactctcctgccccatccttcccaggctcccgggctccataatgtaatctgttcagcatggagaccttcttctaccgcccctgtcttaataaagctgcgtgtttcacttcggcatcaaaacttgcttttgctgtggtttggcatttccctccacccacacatgtgacgaaaaggggaaacaagactgggtcctggccacaacttcagctgaggaacttggcacggccagcttgggacccaggaccctaacgcagaggcgctgtgtttggaagtcccgctatcacggccccccagatggggcctggacgatgcctcctgacggccttgttgcttctggccctggcgccaccgccggaagcctcccagtactgcggccgccttgaatactggaacccagacaacaagtgctgcagcagctgcctgcaacgcttcgggccgcccccctgcccggactatgagttccgggaaaactgcggactcaatgaccacggcgatttcgtaacgcccccgttccgaaagtgttcttctgggcagtgcaaccccgacggcgcggagctatgtagcccctgcggcggcggagccgtgacccctactcccgccgcgggcgggggcagaaccccgtggcgctgcagagagaggccggtccctgccaaggggcactgccccctcacacctggaaacccaggcgcccctagctcccaggagcgcagctcaccagcaagttccattgcctggaggacccctgagcctgtccctcagcaggcctggccgaatttccttccgctcgtggtgctggtcctgctcctgaccttggcggtgatagcgatcctcctgtttattctgctctggcatctctgctggcccaaggagaaagccgacccctatccctatcctggcttggtctgcggagtccccaacacccacaccccttcctcctcgcatctgtcctccccaggcgccctggagacaggggacacatggaaggaggcctcactacttccactcctgagcagggaactgtccagtctggcgtcacaacccctgtctcgcctcctggatgagctggaggtgctggaagagctgattgtactgctggaccctgagcctgggccaggtgggggtatggcccatggcactactcgacacctggccgcaagatatgggctgcctgctgcctggtccacctttgcctattcgctgaggccgagtcgctcgccgctgcgggctctgattgagatggtggtggcaagggagccctctgcctccctgggccagcttggcacacacctcgcccagctagggcgggcagatgcattgcgggtgctgtccaagcttggctcatctggggtttgctgggcttaacacccaataaagaactttgctgactactaagcccagta

SEQ ID NO: 353442 - DNA, 2111 bp, Homo sapiens
gtaagagcagccagacctggagggcttgggtaaaaatggctgaatatttagcttcgatattcgggactgagaaggacaaatcggggtctgccggcacggggaccggtgctcccggcttcacaacaagccgacattcagccaggtgagacccggcacggagcctcgggggttaacggctccctggcccttccccttctggggccgtcgtcaccatgtcccgcctattccgggttcctgagtccctccccaccgcccggctttttttctcattggacctttctgcaggctcctcccaccggtcttcgtgccgttttcccgggaacttggtcgcgcccccatgcgtacaggctacacacggcggctgttcatctttgccagtcccttccatcccgctgttcatccttgccagtcccctccatcccttttctggtttcttaggggcaaaggatcgccgatgcactcatgatgcttaggctggggtgtaaggttccacccccaaccttcatgcctcactctctgttcatgcagccctgccctctgagctcaggccccgccccttttaaattctgtgcagaccatagtgctgctcaacctgtaccggaatccacagaacacagcccaaactgcagacggatcacactgtgagtaagggaccaggcctgggggcaaggtgaacagcccccagtaggctacactctgattccaccctgcccgcccccaccccaggtcatgtgagtgacgtggaggtgcaggagcactatgatagcttcttcgaggtgagggttggtaggggcagatggggtttcttgtgggagctcagctgagttcctccccgtcttccacaggaggtgttcacagaactgcaggagaagtatggggagattgaagagatgaatgtgtgcgacaaccttggggaccacctcgtgggcaacgtctatgtcaagttccggagggaggaggatggagagcgggccgtggctgaactcagtaaccgctggttcaacgggcaggctgtgcacgggaatgtacccgaggtggcttctgcaacttcatgcatctgcggcccatttcccagaacctccagaggcagctctatgggcggggacccaggcgcaggtcacccccgaggttccatactggccaccatccccgagagaggaaccatcggtgttcccctgatcactggcatggccgcttctgaggccctggcccccttacccttcacccccaacagggacagatgttcctggcaggacctctcctcaaagcccccttcactctcctgccccatccttcccaggctcccgggctccataatgtaatctgttcagcatggagaccttcttctaccgcccctgtcttaataaagctgcgtgtttcacttcggcatcaaaacttgcttttgctgtggtttggcatttccctccacccacacatgtgacgaaaaggggaaacaagactgggtcctggccacaacttcagctgaggaacttggcacggccagcttgggacccaggaccctaacgcagaggcgctgtgtttggaagtcccgctatcacggccccccagatggggcctggacgatgcctcctgacggccttgttgcttctggccctggcgccaccgccggaagcctcccagtactgcggccgccttgaatactggaacccagacaacaagtgctgcagcagctgcctgcaacgcttcgggccgcccccctgcccggaactgtccagtctggcgtcacaacccctgtctcgcctcctggatgagctggaggtgctggaagagctgattgtactgctggaccctgagcctgggccaggtgggggtatggcccatggcactactcgacacctggccgcaagatatgggctgcctgctgcctggtccacctttgcctattcgctgaggccgagtcgctcgccgctgcgggctctgattgagatggtggtggcaagggagccctctgcctccctgggccagcttggcacacacctcgcccagctagggcgggcagatgcattgcgggtgctgtccaagcttggctcatctggggtttgctgggcttaacacccaataaagaactttgctgactactaagcccagta

SEQ ID NO: 353443 - DNA, 2676 bp, Homo sapiens
gtaagagcagccagacctggagggcttgggtaaaaatggctgaatatttagcttcgatattcgggactgagaaggacaaatcggggtctgccggcacggggaccggtgctcccggcttcacaacaagccgacattcagccaggtgagacccggcacggagcctcgggggttaacggctccctggcccttccccttctggggccgtcgtcaccatgtcccgcctattccgggttcctgagtccctccccaccgcccggctttttttctcattggacctttctgcaggctcctcccaccggtcttcgtgccgttttcccgggaacttggtcgcgcccccatgcgtacaggctacacacggcggctgttcatctttgccagtcccttccatcccgctgttcatccttgccagtcccctccatcccttttctggtttcttaggggcaaaggatcgccgatgcactcatgatgcttaggctggggtgtaaggttccacccccaaccttcatgcctcactctctgttcatgcagccctgccctctgagctcaggccccgccccttttaaattctgtgcagaccatagtgctgctcaacctgtaccggaatccacagaacacagcccaaactgcagacggatcacactgtgagtaagggaccaggcctgggggcaaggtgaacagcccccagtaggctacactctgattccaccctgcccgcccccaccccaggtcatgtgagtgacgtggaggtgcaggagcactatgatagcttcttcgaggtgagggttggtaggggcagatggggtttcttgtgggagctcagctgagttcctccccgtcttccacaggaggtgttcacagaactgcaggagaagtatggggagattgaagagatgaatgtgtgcgacaaccttggggaccacctcgtgggcaacgtctatgtcaagttccggagggaggaggatggagagcgggccgtggctgaactcagtaaccgctggttcaacgggcaggctgtgcacgggaatgtacccgaggtggcttctgcaacttcatgcatctgcggcccatttcccagaacctccagaggcagctctatgggcggggacccaggcgcaggtcacccccgaggttccatactggccaccatccccgagagaggaaccatcggtgttcccctgatcactggcatggccgcttctgaggccctggcccccttacccttcacccccaacagggacagatgttcctggcaggacctctcctcaaagcccccttcactctcctgccccatccttcccaggctcccgggctccataatgtaatctgttcagcatggagaccttcttctaccgcccctgtcttaataaagctgcgtgtttcacttcggcatcaaaacttgcttttgctgtggtttggcatttccctccacccacacatgtgacgaaaaggggaaacaagactgggtcctggccacaacttcagctgaggaacttggcacggccagcttgggacccaggaccctaacgcagaggcgctgtgtttggaagtcccgctatcacggccccccagatggggcctggacgatgcctcctgacggccttgttgcttctggccctggcgccaccgccggaagcctcccagtactgcggccgccttgaatactggaacccagacaacaagtgctgcagcagctgcctgcaacgcttcgggccgcccccctgcccggaggccggtccctgccaaggggcactgccccctcacacctggaaacccaggcgcccctagctcccaggagcgcagctcaccagcaagttccattgcctggaggacccctgagcctgtccctcagcaggcctggccgaatttccttccgctcgtggtgctggtcctgctcctgaccttggcggtgatagcgatcctcctgtttattctgctctggcatctctgctggcccaaggagaaagccgacccctatccctatcctggcttggtctgcggagtccccaacacccacaccccttcctcctcgcatctgtcctccccaggcgccctggagacaggggacacatggaaggaggcctcactacttccactcctgagcagggaactgtccagtctggcgtcacaacccctgtctcgcctcctggatgagctggaggtgctggaagagctgattgtactgctggaccctgagcctgggccaggtgggggtatggcccatggcactactcgacacctggccgcaagatatgggctgcctgctgcctggtccacctttgcctattcgctgaggccgagtcgctcgccgctgcgggctctgattgagatggtggtggcaagggagccctctgcctccctgggccagcttggcacacacctcgcccagctagggcgggcagatgcattgcgggtgctgtccaagcttggctcatctggggtttgctgggcttaacacccaataaagaactttgctgactactaagcccagtatacaattagcactgaagtacttcttgaagtacaatcctaattgggcaaagacccaacagatagcctcactgctcttcgccctagaagggcctattccaacatacacacagggccacatgtgggagggctgaccccaggtgcctctgggccaccagaatcccctctgggaaacaaccctgctacaga

SEQ ID NO: 353444 - DNA, 2356 bp, Homo sapiens
gtaagagcagccagacctggagggcttgggtaaaaatggctgaatatttagcttcgatattcgggactgagaaggacaaatcggggtctgccggcacggggaccggtgctcccggcttcacaacaagccgacattcagccaggtgagacccggcacggagcctcgggggttaacggctccctggcccttccccttctggggccgtcgtcaccatgtcccgcctattccgggttcctgagtccctccccaccgcccggctttttttctcattggacctttctgcaggctcctcccaccggtcttcgtgccgttttcccgggaacttggtcgcgcccccatgcgtacaggctacacacggcggctgttcatctttgccagtcccttccatcccgctgttcatccttgccagtcccctccatcccttttctggtttcttaggggcaaaggatcgccgatgcactcatgatgcttaggctggggtgtaaggttccacccccaaccttcatgcctcactctctgttcatgcagccctgccctctgagctcaggccccgccccttttaaattctgtgcagaccatagtgctgctcaacctgtaccggaatccacagaacacagcccaaactgcagacggatcacactgtgagtaagggaccaggcctgggggcaaggtgaacagcccccagtaggctacactctgattccaccctgcccgcccccaccccaggtcatgtgagtgacgtggaggtgcaggagcactatgatagcttcttcgaggtgagggttggtaggggcagatggggtttcttgtgggagctcagctgagttcctccccgtcttccacaggaggtgttcacagaactgcaggagaagtatggggagattgaagagatgaatgtgtgcgacaaccttggggaccacctcgtgggcaacgtctatgtcaagttccggagggaggaggatggagagcgggccgtggctgaactcagtaaccgctggttcaacgggcaggctgtgcacgggaatgtacccgaggtggcttctgcaacttcatgcatctgcggcccatttcccagaacctccagaggcagctctatgggcggggacccaggcgcaggtcacccccgaggttccatactggccaccatccccgagagaggaaccatcggtgttcccctgatcactggcatggccgcttctgaggccctggcccccttacccttcacccccaacagggacagatgttcctggcaggacctctcctcaaagcccccttcactctcctgccccatccttcccaggctcccgggctccataatgtaatctgttcagcatggagaccttcttctaccgcccctgtcttaataaagctgcgtgtttcacttcggcatcaaaacttgcttttgctgtggtttggcatttccctccacccacacatgtgacgaaaaggggaaacaagactgggtcctggccacaacttcagctgaggaacttggcacggccagcttgggacccaggaccctaacgcagaggcgctgtgtttggaagtcccgctatcacggccccccagatggggcctggacgatgcctcctgacggccttgttgcttctggccctggcgccaccgccggaagcctcccagtactgcggccgccttgaatactggaacccagacaacaagtgctgcagcagctgcctgcaacgcttcgggccgcccccctgcccggactatgagttccgggaaaactgcggactcaatgaccacggcgatttcgtaacgcccccgttccgaaagtgttcttctgggcagtgcaaccccgacggcgcggagctatgtagcccctgcggcggcggagccgtgacccctactcccgccgcgggcgggggcagaaccccgtggcgctgcagagaggcgccctggagacaggggacacatggaaggaggcctcactacttccactcctgagcagggaactgtccagtctggcgtcacaacccctgtctcgcctcctggatgagctggaggtgctggaagagctgattgtactgctggaccctgagcctgggccaggtgggggtatggcccatggcactactcgacacctggccgcaagatatgggctgcctgctgcctggtccacctttgcctattcgctgaggccgagtcgctcgccgctgcgggctctgattgagatggtggtggcaagggagccctctgcctccctgggccagcttggcacacacctcgcccagctagggcgggcagatgcattgcgggtgctgtccaagcttggctcatctggggtttgctgggcttaacacccaataaagaactttgctgactactaagcccagta

SEQ ID NO: 353445 - DNA, 2171 bp, Homo sapiens
gtaagagcagccagacctggagggcttgggtaaaaatggctgaatatttagcttcgatattcgggactgagaaggacaaatcggggtctgccggcacggggaccggtgctcccggcttcacaacaagccgacattcagccaggtgagacccggcacggagcctcgggggttaacggctccctggcccttccccttctggggccgtcgtcaccatgtcccgcctattccgggttcctgagtccctccccaccgcccggctttttttctcattggacctttctgcaggctcctcccaccggtcttcgtgccgttttcccgggaacttggtcgcgcccccatgcgtacaggctacacacggcggctgttcatctttgccagtcccttccatcccgctgttcatccttgccagtcccctccatcccttttctggtttcttaggggcaaaggatcgccgatgcactcatgatgcttaggctggggtgtaaggttccacccccaaccttcatgcctcactctctgttcatgcagccctgccctctgagctcaggccccgccccttttaaattctgtgcagaccatagtgctgctcaacctgtaccggaatccacagaacacagcccaaactgcagacggatcacactgtgagtaagggaccaggcctgggggcaaggtgaacagcccccagtaggctacactctgattccaccctgcccgcccccaccccaggtcatgtgagtgacgtggaggtgcaggagcactatgatagcttcttcgaggtgagggttggtaggggcagatggggtttcttgtgggagctcagctgagttcctccccgtcttccacaggaggtgttcacagaactgcaggagaagtatggggagattgaagagatgaatgtgtgcgacaaccttggggaccacctcgtgggcaacgtctatgtcaagttccggagggaggaggatggagagcgggccgtggctgaactcagtaaccgctggttcaacgggcaggctgtgcacgggaatgtacccgaggtggcttctgcaacttcatgcatctgcggcccatttcccagaacctccagaggcagctctatgggcggggacccaggcgcaggtcacccccgaggttccatactggccaccatccccgagagaggaaccatcggtgttcccctgatcactggcatggccgcttctgaggccctggcccccttacccttcacccccaacagggacagatgttcctggcaggacctctcctcaaagcccccttcactctcctgccccatccttcccaggctcccgggctccataatgtaatctgttcagcatggagaccttcttctaccgcccctgtcttaataaagctgcgtgtttcacttcggcatcaaaacttgcttttgctgtggtttggcatttccctccacccacacatgtgacgaaaaggggaaacaagactgggtcctggccacaacttcagctgaggaacttggcacggccagcttgggacccaggaccctaacgcagaggcgctgtgtttggaagtcccgctatcacggccccccagatggggcctggacgatgcctcctgacggccttgttgcttctggccctggcgccaccgccggaagcctcccagtactgcggccgccttgaatactggaacccagacaacaagtgctgcagcagctgcctgcaacgcttcgggccgcccccctgcccgggcgccctggagacaggggacacatggaaggaggcctcactacttccactcctgagcagggaactgtccagtctggcgtcacaacccctgtctcgcctcctggatgagctggaggtgctggaagagctgattgtactgctggaccctgagcctgggccaggtgggggtatggcccatggcactactcgacacctggccgcaagatatgggctgcctgctgcctggtccacctttgcctattcgctgaggccgagtcgctcgccgctgcgggctctgattgagatggtggtggcaagggagccctctgcctccctgggccagcttggcacacacctcgcccagctagggcgggcagatgcattgcgggtgctgtccaagcttggctcatctggggtttgctgggcttaacacccaataaagaactttgctgactactaagcccagta

SEQ ID NO: 353446 - DNA, 2963 bp, Homo sapiens
gtaagagcagccagacctggagggcttgggtaaaaatggctgaatatttagcttcgatattcgggactgagaaggacaaatcggggtctgccggcacggggaccggtgctcccggcttcacaacaagccgacattcagccaggtgagacccggcacggagcctcgggggttaacggctccctggcccttccccttctggggccgtcgtcaccatgtcccgcctattccgggttcctgagtccctccccaccgcccggctttttttctcattggacctttctgcaggctcctcccaccggtcttcgtgccgttttcccgggaacttggtcgcgcccccatgcgtacaggctacacacggcggctgttcatctttgccagtcccttccatcccgctgttcatccttgccagtcccctccatcccttttctggtttcttaggggcaaaggatcgccgatgcactcatgatgcttaggctggggtgtaaggttccacccccaaccttcatgcctcactctctgttcatgcagccctgccctctgagctcaggccccgccccttttaaattctgtgcagaccatagtgctgctcaacctgtaccggaatccacagaacacagcccaaactgcagacggatcacactgtgagtaagggaccaggcctgggggcaaggtgaacagcccccagtaggctacactctgattccaccctgcccgcccccaccccaggtcatgtgagtgacgtggaggtgcaggagcactatgatagcttcttcgaggtgagggttggtaggggcagatggggtttcttgtgggagctcagctgagttcctccccgtcttccacaggaggtgttcacagaactgcaggagaagtatggggagattgaagagatgaatgtgtgcgacaaccttggggaccacctcgtgggcaacgtctatgtcaaggtgcttgctgccccccacttagggcccagaagtggaggcgtttcaatgcctgatggtggccactgtaggctctcagcttgaatttcatcactaaatccagtccagccccagagcgggtagtgagtcccctgaagatctctgagttctcctgctgaccctgactgacatttcctgcagttccggagggaggaggatggagagcgggccgtggctgaactcagtaaccgctggttcaacgggcaggctgtgcacggtgagctgtctcctgtcactgacttccgggagtcatgctgtcgccagtatgagatgggggaatgtacccgaggtggcttctgcaacttcatgcatctgcggcccatttcccagaacctccagaggcagctctatgggcggggacccaggcgcagagagatggggtttcaccacgttggccagcctggtctcgaactccggacctcaggtcacccccgaggttccatactggccaccatccccgagagaggaaccatcggtgttcccctgatcactggcatggccgcttctgaggccctggcccccttacccttcacccccaacagggacagatgttcctggcaggacctctcctcaaagcccccttcactctcctgccccatccttcccaggctcccgggctccataatgtaatctgttcagcatggagaccttcttctaccgcccctgtcttaataaagctgcgtgtttcacttcggcatcaaaacttgcttttgctgtggtttggcatttccctccacccacacatgtgacgaaaaggggaaacaagactgggtcctggccacaacttcagctgaggaacttggcacggccagcttgggacccaggaccctaacgcagaggcgctgtgtttggaagtcccgctatcacggccccccagatggggcctggacgatgcctcctgacggccttgttgcttctggccctggcgccaccgccggaagcctcccagtactgcggccgccttgaatactggaacccagacaacaagtgctgcagcagctgcctgcaacgcttcgggccgcccccctgcccggactatgagttccgggaaaactgcggactcaatgaccacggcgatttcgtaacgcccccgttccgaaagtgttcttctgggcagtgcaaccccgacggcgcggagctatgtagcccctgcggcggcggagccgtgacccctactcccgccgcgggcgggggcagaaccccgtggcgctgcagagagaggccggtccctgccaaggggcactgccccctcacacctggaaacccaggcgcccctagctcccaggagcgcagctcaccagcaagttccattgcctggaggacccctgagcctgtccctcagcaggcctggccgaatttccttccgctcgtggtgctggtcctgctcctgaccttggcggtgatagcgatcctcctgtttattctgctctggcatctctgctggcccaaggagaaagccgacccctatccctatcctggcttggtctgcggagtccccaacacccacaccccttcctcctcgcatctgtcctccccaggcgccctggagacaggggacacatggaaggaggcctcactacttccactcctgagcagggaactgtccagtctggcgtcacaacccctgtctcgcctcctggatgagctggaggtgctggaagagctgattgtactgctggaccctgagcctgggccaggtgggggtatggcccatggcactactcgacacctggccgcaagatatgggctgcctgctgcctggtccacctttgcctattcgctgaggccgagtcgctcgccgctgcgggctctgattgagatggtggtggcaagggagccctctgcctccctgggccagcttggcacacacctcgcccagctagggcgggcagatgcattgcgggtgctgtccaagcttggctcatctggggtttgctgggcttaacacccaataaagaactttgctgactactaagcccagta

SEQ ID NO: 353447 - DNA, 2482 bp, Homo sapiens
gtaagagcagccagacctggagggcttgggtaaaaatggctgaatatttagcttcgatattcgggactgagaaggacaaatcggggtctgccggcacggggaccggtgctcccggcttcacaacaagccgacattcagccaggtgagacccggcacggagcctcgggggttaacggctccctggcccttccccttctggggccgtcgtcaccatgtcccgcctattccgggttcctgagtccctccccaccgcccggctttttttctcattggacctttctgcaggctcctcccaccggtcttcgtgccgttttcccgggaacttggtcgcgcccccatgcgtacaggctacacacggcggctgttcatctttgccagtcccttccatcccgctgttcatccttgccagtcccctccatcccttttctggtttcttaggggcaaaggatcgccgatgcactcatgatgcttaggctggggtgtaaggttccacccccaaccttcatgcctcactctctgttcatgcagccctgccctctgagctcaggccccgccccttttaaattctgtgcagaccatagtgctgctcaacctgtaccggaatccacagaacacagcccaaactgcagacggatcacactgtgagtaagggaccaggcctgggggcaaggtgaacagcccccagtaggctacactctgattccaccctgcccgcccccaccccaggtcatgtgagtgacgtggaggtgcaggagcactatgatagcttcttcgaggtgagggttggtaggggcagatggggtttcttgtgggagctcagctgagttcctccccgtcttccacaggaggtgttcacagaactgcaggagaagtatggggagattgaagagatgaatgtgtgcgacaaccttggggaccacctcgtgggcaacgtctatgtcaagttccggagggaggaggatggagagcgggccgtggctgaactcagtaaccgctggttcaacgggcaggctgtgcacgggaatgtacccgaggtggcttctgcaacttcatgcatctgcggcccatttcccagaacctccagaggcagctctatgggcggggacccaggcgcaggtcacccccgaggttccatactggccaccatccccgagagaggaaccatcggtgttcccctgatcactggcatggccgcttctgaggccctggcccccttacccttcacccccaacagggacagatgttcctggcaggacctctcctcaaagcccccttcactctcctgccccatccttcccaggctcccgggctccataatgtaatctgttcagcatggagaccttcttctaccgcccctgtcttaataaagctgcgtgtttcacttcggcatcaaaacttgcttttgctgtggtttggcatttccctccacccacacatgtgacgaaaaggggaaacaagactgggtcctggccacaacttcagctgaggaacttggcacggccagcttgggacccaggaccctaacgcagaggcgctgtgtttggaagtcccgctatcacggccccccagatggggcctggacgatgcctcctgacggccttgttgcttctggccctggcgccaccgccggaagcctcccagtactgcggccgccttgaatactggaacccagacaacaagtgctgcagcagctgcctgcaacgcttcgggccgcccccctgcccggactatgagttccgggaaaactgcggactcaatgaccacggcgatttcgtaacgcccccgttccgaaagtgttcttctgggcagtgcaaccccgacggcgcggagctatgtagcccctgcggcggcggagccgtgacccctactcccgccgcgggcgggggcagaaccccgtggcgctgcagagagaactgtccagtctggcgtcacaacccctgtctcgcctcctggatgagctggaggtgctggaagagctgattgtactgctggaccctgagcctgggccaggtgggggtatggcccatggcactactcgacacctggccgcaagatatgggctgcctgctgcctggtccacctttgcctattcgctgaggccgagtcgctcgccgctgcgggctctgattgagatggtggtggcaagggagccctctgcctccctgggccagcttggcacacacctcgcccagctagggcgggcagatgcattgcgggtgctgtccaagcttggctcatctggggtttgctgggcttaacacccaataaagaactttgctgactactaagcccagtatacaattagcactgaagtacttcttgaagtacaatcctaattgggcaaagacccaacagatagcctcactgctcttcgccctagaagggcctattccaacatacacacagggccacatgtgggagggctgaccccaggtgcctctgggccaccagaatcccctctgggaaacaaccctgctacaga

SEQ ID NO: 353448 - DNA, 2668 bp, Homo sapiens
gtaagagcagccagacctggagggcttgggtaaaaatggctgaatatttagcttcgatattcgggactgagaaggacaaatcggggtctgccggcacggggaccggtgctcccggcttcacaacaagccgacattcagccaggtgagacccggcacggagcctcgggggttaacggctccctggcccttccccttctggggccgtcgtcaccatgtcccgcctattccgggttcctgagtccctccccaccgcccggctttttttctcattggacctttctgcaggctcctcccaccggtcttcgtgccgttttcccgggaacttggtcgcgcccccatgcgtacaggctacacacggcggctgttcatctttgccagtcccttccatcccgctgttcatccttgccagtcccctccatcccttttctggtttcttaggggcaaaggatcgccgatgcactcatgatgcttaggctggggtgtaaggttccacccccaaccttcatgcctcactctctgttcatgcagccctgccctctgagctcaggccccgccccttttaaattctgtgcagaccatagtgctgctcaacctgtaccggaatccacagaacacagcccaaactgcagacggatcacactgtgagtaagggaccaggcctgggggcaaggtgaacagcccccagtaggctacactctgattccaccctgcccgcccccaccccaggtcatgtgagtgacgtggaggtgcaggagcactatgatagcttcttcgaggtgagggttggtaggggcagatggggtttcttgtgggagctcagctgagttcctccccgtcttccacaggaggtgttcacagaactgcaggagaagtatggggagattgaagagatgaatgtgtgcgacaaccttggggaccacctcgtgggcaacgtctatgtcaaggtgcttgctgccccccacttagggcccagaagtggaggcgtttcaatgcctgatggtggccactgtaggctctcagcttgaatttcatcactaaatccagtccagccccagagcgggtagtgagtcccctgaagatctctgagttctcctgctgaccctgactgacatttcctgcagttccggagggaggaggatggagagcgggccgtggctgaactcagtaaccgctggttcaacgggcaggctgtgcacgggaatgtacccgaggtggcttctgcaacttcatgcatctgcggcccatttcccagaacctccagaggcagctctatgggcggggacccaggcgcaggctcccgggctccataatgtaatctgttcagcatggagaccttcttctaccgcccctgtcttaataaagctgcgtgtttcacttcggcatcaaaacttgcttttgctgtggtttggcatttccctccacccacacatgtgacgaaaaggggaaacaagactgggtcctggccacaacttcagctgaggaacttggcacggccagcttgggacccaggaccctaacgcagaggcgctgtgtttggaagtcccgctatcacggccccccagatggggcctggacgatgcctcctgacggccttgttgcttctggccctggcgccaccgccggaagcctcccagtactgcggccgccttgaatactggaacccagacaacaagtgctgcagcagctgcctgcaacgcttcgggccgcccccctgcccggactatgagttccgggaaaactgcggactcaatgaccacggcgatttcgtaacgcccccgttccgaaagtgttcttctgggcagtgcaaccccgacggcgcggagctatgtagcccctgcggcggcggagccgtgacccctactcccgccgcgggcgggggcagaaccccgtggcgctgcagagagaggccggtccctgccaaggggcactgccccctcacacctggaaacccaggcgcccctagctcccaggagcgcagctcaccagcaagttccattgcctggaggacccctgagcctgtccctcagcaggcctggccgaatttccttccgctcgtggtgctggtcctgctcctgaccttggcggtgatagcgatcctcctgtttattctgctctggcatctctgctggcccaaggagaaagccgacccctatccctatcctggcttggtctgcggagtccccaacacccacaccccttcctcctcgcatctgtcctccccaggcgccctggagacaggggacacatggaaggaggcctcactacttccactcctgagcagggaactgtccagtctggcgtcacaacccctgtctcgcctcctggatgagctggaggtgctggaagagctgattgtactgctggaccctgagcctgggccaggtgggggtatggcccatggcactactcgacacctggccgcaagatatgggctgcctgctgcctggtccacctttgcctattcgctgaggccgagtcgctcgccgctgcgggctctgattgagatggtggtggcaagggagccctctgcctccctgggccagcttggcacacacctcgcccagctagggcgggcagatgcattgcgggtgctgtccaagcttggctcatctggggtttgctgggcttaacacccaataaagaactttgctgactactaagcccagta

SEQ ID NO: 353449 - DNA, 2052 bp, Homo sapiens
gtaagagcagccagacctggagggcttgggtaaaaatggctgaatatttagcttcgatattcgggactgagaaggacaaatcggggtctgccggcacggggaccggtgctcccggcttcacaacaagccgacattcagccaggtgagacccggcacggagcctcgggggttaacggctccctggcccttccccttctggggccgtcgtcaccatgtcccgcctattccgggttcctgagtccctccccaccgcccggctttttttctcattggacctttctgcaggctcctcccaccggtcttcgtgccgttttcccgggaacttggtcgcgcccccatgcgtacaggctacacacggcggctgttcatctttgccagtcccttccatcccgctgttcatccttgccagtcccctccatcccttttctggtttcttaggggcaaaggatcgccgatgcactcatgatgcttaggctggggtgtaaggttccacccccaaccttcatgcctcactctctgttcatgcagccctgccctctgagctcaggccccgccccttttaaattctgtgcagaccatagtgctgctcaacctgtaccggaatccacagaacacagcccaaactgcagacggatcacactgtgagtaagggaccaggcctgggggcaaggtgaacagcccccagtaggctacactctgattccaccctgcccgcccccaccccaggtcatgtgagtgacgtggaggtgcaggagcactatgatagcttcttcgaggtgagggttggtaggggcagatggggtttcttgtgggagctcagctgagttcctccccgtcttccacaggaggtgttcacagaactgcaggagaagtatggggagattgaagagatgaatgtgtgcgacaaccttggggaccacctcgtgggcaacgtctatgtcaagttccggagggaggaggatggagagcgggccgtggctgaactcagtaaccgctggttcaacgggcaggctgtgcacgggaatgtacccgaggtggcttctgcaacttcatgcatctgcggcccatttcccagaacctccagaggcagctctatgggcggggacccaggcgcaggtcacccccgaggttccatactggccaccatccccgagagaggaaccatcggtgttcccctgatcactggcatggccgcttctgaggccctggcccccttacccttcacccccaacagggacagatgttcctggcaggacctctcctcaaagcccccttcactctcctgccccatccttcccaggctcccgggctccataatgtaatctgttcagcatggagaccttcttctaccgcccctgtcttaataaagctgcgtgtttcacttcggcatcaaaacttgcttttgctgtggtttggcatttccctccacccacacatgtgacgaaaaggggaaacaagactgggtcctggccacaacttcagctgaggaacttggcacggccagcttgggacccaggaccctaacgcagaggcgctgtgtttggaagtcccgctatcacggccccccagatggggcctggacgatgcctcctgacggccttgttgcttctggccctggcgccaccgccggaagcctcccagtactgcggccgccttgaatactggaacccagacaacaagtgctgcagcagctgcctgcaacgcttcgggccgcccccctgcccggactatgagttccgggaaaactgcggactcaatgaccacggcgatttcgtaacgcccccgttccgaaagtgttcttctgggcagtgcaaccccgacggcgcggagctatgtagcccctgcggcggcggagccgtgacccctactcccgccgcgggcgggggcagaaccccgtggcgctgcagagaggtgcagatgggactcccggcagggcaagggcgtgctggaggtggggggcctagatgtagggagccggcgtagccccacgtaaggggtggggccgtggtttcaggaggtggctggcctgcaggggtcgggaggtcctaggtt

SEQ ID NO: 353450 - DNA, 2059 bp, Homo sapiens
gtaagagcagccagacctggagggcttgggtaaaaatggctgaatatttagcttcgatattcgggactgagaaggacaaatcggggtctgccggcacggggaccggtgctcccggcttcacaacaagccgacattcagccaggtgagacccggcacggagcctcgggggttaacggctccctggcccttccccttctggggccgtcgtcaccatgtcccgcctattccgggttcctgagtccctccccaccgcccggctttttttctcattggacctttctgcaggctcctcccaccggtcttcgtgccgttttcccgggaacttggtcgcgcccccatgcgtacaggctacacacggcggctgttcatctttgccagtcccttccatcccgctgttcatccttgccagtcccctccatcccttttctggtttcttaggggcaaaggatcgccgatgcactcatgatgcttaggctggggtgtaaggttccacccccaaccttcatgcctcactctctgttcatgcagccctgccctctgagctcaggccccgccccttttaaattctgtgcagaccatagtgctgctcaacctgtaccggaatccacagaacacagcccaaactgcagacggatcacactgtgagtaagggaccaggcctgggggcaaggtgaacagcccccagtaggctacactctgattccaccctgcccgcccccaccccaggtcatgtgagtgacgtggaggtgcaggagcactatgatagcttcttcgaggtgagggttggtaggggcagatggggtttcttgtgggagctcagctgagttcctccccgtcttccacaggaggtgttcacagaactgcaggagaagtatggggagattgaagagatgaatgtgtgcgacaaccttggggaccacctcgtgggcaacgtctatgtcaagttccggagggaggaggatggagagcgggccgtggctgaactcagtaaccgctggttcaacgggcaggctgtgcacgggaatgtacccgaggtggcttctgcaacttcatgcatctgcggcccatttcccagaacctccagaggcagctctatgggcggggacccaggcgcaggtcacccccgaggttccatactggccaccatccccgagagaggaaccatcggtgttcccctgatcactggcatggccgcttctgaggccctggcccccttacccttcacccccaacagggacagatgttcctggcaggacctctcctcaaagcccccttcactctcctgccccatccttcccaggctcccgggctccataatgtaatctgttcagcatggagaccttcttctaccgcccctgtcttaataaagctgcgtgtttcacttcggcatcaaaacttgcttttgctgtggtttggcatttccctccacccacacatgtgacgaaaaggggaaacaagactgggtcctggccacaacttcagctgaggaacttggcacggccagcttgggacccaggaccctaacgcagaggcgctgtgtttggaagtcccgctatcacggccccccagatggggcctggacgatgcctcctgacggccttgttgcttctggccctggcgccaccgccggaagcctcccagtactgcggccgccttgaatactggaacccagacaacaagtgctgcagcagctgcctgcaacgcttcgggccgcccccctgcccgggtgagaatccgagaccgagccttgcttgggcggagcttgcaggtgatagggagcggggaaggggcgaggtctgtgggctacgggccagagaggcttgcttaggggtctaagcggtgggccttatgcagatcagacagggatggcaggcagagcctgtgcagatagtgcgggctaccgtagggcaacagcgaatggatatggctggagaggcgggataggggccgcgtggaaagggtgggctttatgtagagaagccgggagtgggcggagcttcgtgcggagcaggctggaggggggtgaaaaggcgagcccggagaaaagtgacaagaccgg

SEQ ID NO: 353451 - DNA, 1901 bp, Homo sapiens
gtaagagcagccagacctggagggcttgggtaaaaatggctgaatatttagcttcgatattcgggactgagaaggacaaatcggggtctgccggcacggggaccggtgctcccggcttcacaacaagccgacattcagccagccctgccctctgagctcaggccccgccccttttaaattctgtgcagaccatagtgctgctcaacctgtaccggaatccacagaacacagcccaaactgcagacggatcacactgaggtgttcacagaactgcaggagaagtatggggagattgaagagatgaatgtgtgcgacaaccttggggaccacctcgtgggcaacgtctatgtcaagttccggagggaggaggatggagagcgggccgtggctgaactcagtaaccgctggttcaacgggcaggctgtgcacgggaatgtacccgaggtggcttctgcaacttcatgcatctgcggcccatttcccagaacctccagaggcagctctatgggcggggacccaggcgcaggctcccgggctccataatgtaatctgttcagcatggagaccttcttctaccgcccctgtcttaataaagctgcgtgtttcacttcggcatcaaaacttgcttttgctgtggtttggcatttccctccacccacacatgtgacgaaaaggggaaacaagactgggtcctggccacaacttcagctgaggaacttggcacggccagcttgggacccaggaccctaacgcagaggcgctgtgtttggaagtcccgctatcacggccccccagatggggcctggacgatgcctcctgacggccttgttgcttctggccctggcgccaccgccggaagcctcccagtactgcggccgccttgaatactggaacccagacaacaagtgctgcagcagctgcctgcaacgcttcgggccgcccccctgcccggactatgagttccgggaaaactgcggactcaatgaccacggcgatttcgtaacgcccccgttccgaaagtgttcttctgggcagtgcaaccccgacggcgcggagctatgtagcccctgcggcggcggagccgtgacccctactcccgccgcgggcgggggcagaaccccgtggcgctgcagagagaggccggtccctgccaaggggcactgccccctcacacctggaaacccaggcgcccctagctcccaggagcgcagctcaccagcaagttccattgcctggaggacccctgagcctgtccctcagcaggcctggccgaatttccttccgctcgtggtgctggtcctgctcctgaccttggcggtgatagcgatcctcctgtttattctgctctggcatctctgctggcccaaggagaaagccgacccctatccctatcctggcttggtctgcggagtccccaacacccacaccccttcctcctcgcatctgtcctccccaggcgccctggagacaggggacacatggaaggaggcctcactacttccactcctgagcagggaactgtccagtctggcgtcacaacccctgtctcgcctcctggatgagctggaggtgctggaagagctgattgtactgctggaccctgagcctgggccaggtgggggtatggcccatggcactactcgacacctggccgcaagatatgggctgcctgctgcctggtccacctttgcctattcgctgaggccgagtcgctcgccgctgcgggctctgattgagatggtggtggcaagggagccctctgcctccctgggccagcttggcacacacctcgcccagctagggcgggcagatgcattgcgggtgctgtccaagcttggctcatctggggtttgctgggcttaacacccaataaagaactttgctgactactaagcccagta

SEQ ID NO: 353452 - DNA, 1776 bp, Homo sapiens
cccaaaccagcctgaacccctaatccacgaccagcctggattgccacccctgatactggccactgagttcccctgatactggccactgaggtcgtgtcttagaactctagttatttcagcaccctcctgcctcatcccagagcagagaggcaggcctgcaggatctctgcaccactcctcagggttctaacagaactctcaacgctcctattcccaggtcacccccgaggttccatactggccaccatccccgagagaggaaccatcggtgttcccctgatcactggcatggccgcttctgaggccctggcccccttacccttcacccccaacagggacagatgttcctggcaggacctctcctcaaagcccccttcactctcctgccccatccttcccaggctcccgggctccataatgtaatctgttcagcatggagaccttcttctaccgcccctgtcttaataaagctgcgtgtttcacttcggcatcaaaacttgcttttgctgtggtttggcatttccctccacccacacatgtgacgaaaaggggaaacaagactgggtcctggccacaacttcagctgaggaacttggcacggccagcttgggacccaggaccctaacgcagaggcgctgtgtttggaagtcccgctatcacggccccccagatggggcctggacgatgcctcctgacggccttgttgcttctggccctggcgccaccgccggaagcctcccagtactgcggccgccttgaatactggaacccagacaacaagtgctgcagcagctgcctgcaacgcttcgggccgcccccctgcccggactatgagttccgggaaaactgcggactcaatgaccacggcgatttcgtaacgcccccgttccgaaagtgttcttctgggcagtgcaaccccgacggcgcggagctatgtagcccctgcggcggcggagccgtgacccctactcccgccgcgggcgggggcagaaccccgtggcgctgcagagagaggccggtccctgccaaggggcactgccccctcacacctggaaacccaggcgcccctagctcccaggagcgcagctcaccagcaagttccattgcctggaggacccctgagcctgtccctcagcaggcctggccgaatttccttccgctcgtggtgctggtcctgctcctgaccttggcggtgatagcgatcctcctgtttattctgctctggcatctctgctggcccaaggagaaagccgacccctatccctatcctggcttggtctgcggagtccccaacacccacaccccttcctcctcgcatctgtcctccccaggcgccctggagacaggggacacatggaaggaggcctcactacttccactcctgagcagggaactgtccagtctggcgtcacaacccctgtctcgcctcctggatgagctggaggtgctggaagagctgattgtactgctggaccctgagcctgggccaggtgggggtatggcccatggcactactcgacacctggccgcaagatatgggctgcctgctgcctggtccacctttgcctattcgctgaggccgagtcgctcgccgctgcgggctctgattgagatggtggtggcaagggagccctctgcctccctgggccagcttggcacacacctcgcccagctagggcgggcagatgcattgcgggtgctgtccaagcttggctcatctggggtttgctgggcttaacacccaataaagaactttgctgactactaagcccagta

SEQ ID NO: 353453 - DNA, 1591 bp, Homo sapiens
tggacttctggcccccagaactgtaagacaatacatttctgtggtttaagccacacagtttgtggtgctctgacttcgtgagcttttctgcccatctgatagcgcctgcctgccttccgccctggcccccttacccttcacccccaacagggacagatgttcctggcaggacctctcctcaaagcccccttcactctcctgccccatccttcccaggctcccgggctccataatgtaatctgttcagcatggagaccttcttctaccgcccctgtcttaataaagctgcgtgtttcacttcggcatcaaaacttgcttttgctgtggtttggcatttccctccacccacacatgtgacgaaaaggggaaacaagactgggtcctggccacaacttcagctgaggaacttggcacggccagcttgggacccaggaccctaacgcagaggcgctgtgtttggaagtcccgctatcacggccccccagatggggcctggacgatgcctcctgacggccttgttgcttctggccctggcgccaccgccggaagcctcccagtactgcggccgccttgaatactggaacccagacaacaagtgctgcagcagctgcctgcaacgcttcgggccgcccccctgcccggactatgagttccgggaaaactgcggactcaatgaccacggcgatttcgtaacgcccccgttccgaaagtgttcttctgggcagtgcaaccccgacggcgcggagctatgtagcccctgcggcggcggagccgtgacccctactcccgccgcgggcgggggcagaaccccgtggcgctgcagagagaggccggtccctgccaaggggcactgccccctcacacctggaaacccaggcgcccctagctcccaggagcgcagctcaccagcaagttccattgcctggaggacccctgagcctgtccctcagcaggcctggccgaatttccttccgctcgtggtgctggtcctgctcctgaccttggcggtgatagcgatcctcctgtttattctgctctggcatctctgctggcccaaggagaaagccgacccctatccctatcctggcttggtctgcggagtccccaacacccacaccccttcctcctcgcatctgtcctccccaggcgccctggagacaggggacacatggaaggaggcctcactacttccactcctgagcagggaactgtccagtctggcgtcacaacccctgtctcgcctcctggatgagctggaggtgctggaagagctgattgtactgctggaccctgagcctgggccaggtgggggtatggcccatggcactactcgacacctggccgcaagatatgggctgcctgctgcctggtccacctttgcctattcgctgaggccgagtcgctcgccgctgcgggctctgattgagatggtggtggcaagggagccctctgcctccctgggccagcttggcacacacctcgcccagctagggcgggcagatgcattgcgggtgctgtccaagcttggctcatctggggtttgctgggcttaacacccaataaagaactttgctgactactaagcccagta

SEQ ID NO: 353454 - DNA, 1348 bp, Homo sapiens
ggctcaagtgatcctcctgtcttggcctcccaaagtgttgggattacaggcatgagccaccacacccagcccctgctttacttctaatgacggttctaattctccacaataaccctatgagacaggtgctatcattgtcttattttagggatggaaaagggagggtgggtgggtgaggacacggcagaggtgggatatgcattcttgcaatctagatccgcagccctgttagtcccctagtggccttgtgggcttctctgataaccggctcagttgggggatgagggctcgggggtagattcccggcttccgaagaggcgtgagaattctgttcccccacatcaccgcgtcctttcttctgcccgatttccccggaaagtgtagcagaggcgctgtgtttggaagtcccgctatcacggccccccagatggggcctggacgatgcctcctgacggccttgttgcttctggccctggcgccaccgccggaagcctcccagtactgcggccgccttgaatactggaacccagacaacaagtgctgcagcagctgcctgcaacgcttcgggccgcccccctgcccggaggccggtccctgccaaggggcactgccccctcacacctggaaacccaggcgcccctagctcccaggagcgcagctcaccagcaagttccattgcctggaggacccctgagcctgtccctcagcaggcctggccgaatttccttccgctcgtggtgctggtcctgctcctgaccttggcggtgatagcgatcctcctgtttattctgctctggcatctctgctggcccaaggagaaagccgacccctatccctatcctggcttggtctgcggagtccccaacacccacaccccttcctcctcgcatctgtcctccccaggcgccctggagacaggggacacatggaaggaggcctcactacttccactcctgagcagggaactgtccagtctggcgtcacaacccctgtctcgcctcctggatgagctggaggtgctggaagagctgattgtactgctggaccctgagcctgggccaggtgggggtatggcccatggcactactcgacacctggccgcaagatatgggctgcctgctgcctggtccacctttgcctattcgctgaggccgagtcgctcgccgctgcgggctctgattgagatggtggtggcaagggagccctctgcctccctgggccagcttggcacacacctcgcccagctagggcgggcagatgcattgcgggtgctgtccaagcttggctcatctggggtttgctgggcttaacacccaataaagaactttgctgactactaagcccagta

SEQ ID NO: 353455 - DNA, 1089 bp, Homo sapiens
ggctcaagtgatcctcctgtcttggcctcccaaagtgttgggattacaggcatgagccaccacacccagcccctgctttacttctaatgacggttctaattctccacaataaccctatgagacagcagaggcgctgtgtttggaagtcccgctatcacggccccccagatggggcctggacgatgcctcctgacggccttgttgcttctggccctggcgccaccgccggaagcctcccagtactgcggccgccttgaatactggaacccagacaacaagtgctgcagcagctgcctgcaacgcttcgggccgcccccctgcccggaggccggtccctgccaaggggcactgccccctcacacctggaaacccaggcgcccctagctcccaggagcgcagctcaccagcaagttccattgcctggaggacccctgagcctgtccctcagcaggcctggccgaatttccttccgctcgtggtgctggtcctgctcctgaccttggcggtgatagcgatcctcctgtttattctgctctggcatctctgctggcccaaggagaaagccgacccctatccctatcctggcttggtctgcggagtccccaacacccacaccccttcctcctcgcatctgtcctccccaggcgccctggagacaggggacacatggaaggaggcctcactacttccactcctgagcagggaactgtccagtctggcgtcacaacccctgtctcgcctcctggatgagctggaggtgctggaagagctgattgtactgctggaccctgagcctgggccaggtgggggtatggcccatggcactactcgacacctggccgcaagatatgggctgcctgctgcctggtccacctttgcctattcgctgaggccgagtcgctcgccgctgcgggctctgattgagatggtggtggcaagggagccctctgcctccctgggccagcttggcacacacctcgcccagctagggcgggcagatgcattgcgggtgctgtccaagcttggctcatctggggtttgctgggcttaacacccaataaagaactttgctgactactaagcccagta

SEQ ID NO: 353456 - DNA, 1722 bp, Homo sapiens
gtaagagcagccagacctggagggcttgggtaaaaatggctgaatatttagcttcgatattcgggactgagaaggacaaatcggggtctgccggcacggggaccggtgctcccggcttcacaacaagccgacattcagccaggtgagacccggcacggagcctcgggggttaacggctccctggcccttccccttctggggccgtcgtcaccatgtcccgcctattccgggttcctgagtccctccccaccgcccggctttttttctcattggacctttctgcaggctcctcccaccggtcttcgtgccgttttcccgggaacttggtcgcgcccccatgcgtacaggctacacacggcggctgttcatctttgccagtcccttccatcccgctgttcatccttgccagtcccctccatcccttttctggtttcttaggggcaaaggatcgccgatgcactcatgatgcttaggctggggtgtaaggttccacccccaaccttcatgcctcactctctgttcatgcagccctgccctctgagctcaggccccgccccttttaaattctgtgcagaccatagtgctgctcaacctgtaccggaatccacagaacacagcccaaactgcagacggatcacactgtgagtaagggaccaggcctgggggcaaggtgaacagcccccagtaggctacactctgattccaccctgcccgcccccaccccaggtcatgtgagtgacgtggaggtgcaggagcactatgatagcttcttcgaggtgagggttggtaggggcagatggggtttcttgtgggagctcagctgagttcctccccgtcttccacaggaggtgttcacagaactgcaggagaagtatggggagattgaagagatgaatgtgtgcgacaaccttggggaccacctcgtgggcaacgtctatgtcaaggtgcttgctgccccccacttagggcccagaagtggaggcgtttcaatgcctgatggtggccactgtaggctctcagcttgaatttcatcactaaatccagtccagccccagagcgggtagtgagtcccctgaagatctctgagttctcctgctgaccctgactgacatttcctgcagttccggagggaggaggatggagagcgggccgtggctgaactcagtaaccgctggttcaacgggcaggctgtgcacgggaatgtacccgaggtggcttctgcaacttcatgcatctgcggcccatttcccagaacctccagaggcagctctatgggcggggacccaggcgcaggctggagtgcaaaggcgcagtcttggctcagtgcaacctctgcctcccagagagatggggtttcaccacgttggccagcctggtctcgaactccggacctcaggtcacccccgaggttccatactggccaccatccccgagagaggaaccatcggtgttcccctgatcactggcatggccgcttctgaggccctggcccccttacccttcacccccaacagggacagatgttcctggcaggacctctcctcaaagcccccttcactctcctgccccatccttcccaggctcccgggctccataatgtaatctgttcagcatggagaccttcttctaccgcccctgtcttaataatgtaatctgttcagcatggagaccttcttctaccgcccctgttttaataaagctgggtgtttcccttcggcatca

SEQ ID NO: 353457 - DNA, 1425 bp, Homo sapiens
gtaagagcagccagacctggagggcttgggtaaaaatggctgaatatttagcttcgatattcgggactgagaaggacaaatcggggtctgccggcacggggaccggtgctcccggcttcacaacaagccgacattcagccaggtgagacccggcacggagcctcgggggttaacggctccctggcccttccccttctggggccgtcgtcaccatgtcccgcctattccgggttcctgagtccctccccaccgcccggctttttttctcattggacctttctgcaggctcctcccaccggtcttcgtgccgttttcccgggaacttggtcgcgcccccatgcgtacaggctacacacggcggctgttcatctttgccagtcccttccatcccgctgttcatccttgccagtcccctccatcccttttctggtttcttaggggcaaaggatcgccgatgcactcatgatgcttaggctggggtgtaaggttccacccccaaccttcatgcctcactctctgttcatgcagccctgccctctgagctcaggccccgccccttttaaattctgtgcagaccatagtgctgctcaacctgtaccggaatccacagaacacagcccaaactgcagacggatcacactgtgagtaagggaccaggcctgggggcaaggtgaacagcccccagtaggctacactctgattccaccctgcccgcccccaccccaggtcatgtgagtgacgtggaggtgcaggagcactatgatagcttcttcgaggtgagggttggtaggggcagatggggtttcttgtgggagctcagctgagttcctccccgtcttccacaggaggtgttcacagaactgcaggagaagtatggggagattgaagagatgaatgtgtgcgacaaccttggggaccacctcgtgggcaacgtctatgtcaaggtgcttgctgccccccacttagggcccagaagtggaggcgtttcaatgcctgatggtggccactgtaggctctcagcttgaatttcatcactaaatccagtccagccccagagcgggtagtgagtcccctgaagatctctgagttctcctgctgaccctgactgacatttcctgcagttccggagggaggaggatggagagcgggccgtggctgaactcagtaaccgctggttcaacgggcaggctgtgcacgggaatgtacccgaggtggcttctgcaacttcatgcatctgcggcccatttcccagaacctccagaggcagctctatgggcggggacccaggcgcaggtacctcaggaccagcctgctatgtctcctcatgtcctaaggcccctatatcctcagatgagcctaaccctaagccccagtaaccacgttcccaagaatcttttttttttttttttttttttgagatggagc

SEQ ID NO: 353458 - DNA, 1346 bp, Homo sapiens
gtaagagcagccagacctggagggcttgggtaaaaatggctgaatatttagcttcgatattcgggactgagaaggacaaatcggggtctgccggcacggggaccggtgctcccggcttcacaacaagccgacattcagccaggtgagacccggcacggagcctcgggggttaacggctccctggcccttccccttctggggccgtcgtcaccatgtcccgcctattccgggttcctgagtccctccccaccgcccggctttttttctcattggacctttctgcaggctcctcccaccggtcttcgtgccgttttcccgggaacttggtcgcgcccccatgcgtacaggctacacacggcggctgttcatctttgccagtcccttccatcccgctgttcatccttgccagtcccctccatcccttttctggtttcttaggggcaaaggatcgccgatgcactcatgatgcttaggctggggtgtaaggttccacccccaaccttcatgcctcactctctgttcatgcagccctgccctctgagctcaggccccgccccttttaaattctgtgcagaccatagtgctgctcaacctgtaccggaatccacagaacacagcccaaactgcagacggatcacactgtgagtaagggaccaggcctgggggcaaggtgaacagcccccagtaggctacactctgattccaccctgcccgcccccaccccaggtcatgtgagtgacgtggaggtgcaggagcactatgatagcttcttcgaggtgagggttggtaggggcagatggggtttcttgtgggagctcagctgagttcctccccgtcttccacaggaggtgttcacagaactgcaggagaagtatggggagattgaagagatgaatgtgtgcgacaaccttggggaccacctcgtgggcaacgtctatgtcaagttccggagggaggaggatggagagcgggccgtggctgaactcagtaaccgctggttcaacgggcaggctgtgcacgggaatgtacccgaggtggcttctgcaacttcatgcatctgcggcccatttcccagaacctccagaggcagctctatgggcggggacccaggcgcaggctggagtgcaaaggcgcagtcttggctcagtgcaacctctgcctcccagagagatggggtttcaccacgttggccagcctggtctcgaactccggacctcaggtaatccacccatctcggcctcccaaagtgtggggattacaggcgtgaaccactgcgcccggtcattcccaagactcttataccctaagagtagttctgagctccatctggagaccagtacctaagt

SEQ ID NO: 353459 - DNA, 982 bp, Homo sapiens
gcggccgcactggagcgcagctttcccgctagaactatgagttccgggaaaactgcggactcaatgaccacggcgatttcgtaacgcccccgttccgaaagtgttcttctgggcagtgcaaccccgacggcgcggagctatgtagcccctgcggcggcggagccgtgacccctactcccgccgcgggcgggggcagaaccccgtggcgctgcagagagaggccggtccctgccaaggggcactgccccctcacacctggaaacccaggcgcccctagctcccaggagcgcagctcaccagcaagttccattgcctggaggacccctgagcctgtccctcagcaggcctggccgaatttccttccgctcgtggtgctggtcctgctcctgaccttggcggtgatagcgatcctcctgtttattctgctctggcatctctgctggcccaaggagaaagccgacccctatccctatcctggcttggtctgcggagtccccaacacccacaccccttcctcctcgcatctgtcctccccaggcgccctggagacaggggacacatggaaggaggcctcactacttccactcctgagcagggaactgtccagtctggcgtcacaacccctgtctcgcctcctggatgagctggaggtgctggaagagctgattgtactgctggaccctgagcctgggccaggtgggggtatggcccatggcactactcgacacctggccgcaagatatgggctgcctgctgcctggtccacctttgcctattcgctgaggccgagtcgctcgccgctgcgggctctgattgagatggtggtggcaagggagccctctgcctccctgggccagcttggcacacacctcgcccagctagggcgggcagatgcattgcgggtgctgtccaagcttggctcatctggggtttgctgggcttaacacccaataaagaactttgctgactactaagcccagta

SEQ ID NO: 353460 - DNA, 214 bp, Homo sapiens
cggggtactggggtcctgggtggtggggcggtgtttctggggtgcccagcttccccggccctcggttcacctttgtctttgcaccttttccagggttaactgctctttttactttaagatcggggtctgccggcacggggaccggtgctcccggcttcacaacaagccgacattcagccaggtgagacccggcacggagcctcgggggttaacg

SEQ ID NO: 353461 - DNA, 2675 bp, Homo sapiens
gtaagagcagccagacctggagggcttgggtaaaaatggctgaatatttagcttcgatattcgggactgagaaggacaaatcggggtctgccggcacggggaccggtgctcccggcttcacaacaagccgacattcagccaggtgagacccggcacggagcctcgggggttaacggctccctggcccttccccttctggggccgtcgtcaccatgtcccgcctattccgggttcctgagtccctccccaccgcccggctttttttctcattggacctttctgcaggctcctcccaccggtcttcgtgccgttttcccgggaacttggtcgcgcccccatgcgtacaggctacacacggcggctgttcatctttgccagtcccttccatcccgctgttcatccttgccagtcccctccatcccttttctggtttcttaggggcaaaggatcgccgatgcactcatgatgcttaggctggggtgtaaggttccacccccaaccttcatgcctcactctctgttcatgcagccctgccctctgagctcaggccccgccccttttaaattctgtgcagaccatagtgctgctcaacctgtaccggaatccacagaacacagcccaaactgcagacggatcacactgtgagtaagggaccaggcctgggggcaaggtgaacagcccccagtaggctacactctgattccaccctgcccgcccccaccccaggtcatgtgagtgacgtggaggtgcaggagcactatgatagcttcttcgaggtgagggttggtaggggcagatggggtttcttgtgggagctcagctgagttcctccccgtcttccacaggaggtgttcacagaactgcaggagaagtatggggagattgaagagatgaatgtgtgcgacaaccttggggaccacctcgtgggcaacgtctatgtcaagttccggagggaggaggatggagagcgggccgtggctgaactcagtaaccgctggttcaacgggcaggctgtgcacgggaatgtacccgaggtggcttctgcaacttcatgcatctgcggcccatttcccagaacctccagaggcagctctatgggcggggacccaggcgcaggtcacccccgaggttccatactggccaccatccccgagagaggaaccatcggtgttcccctgatcactggcatggccgcttctgaggccctggcccccttacccttcacccccaacagggacagatgttcctggcaggacctctcctcaaagcccccttcactctcctgccccatccttcccaggctcccgggctccataatgtaatctgttcagcatggagaccttcttctaccgcccctgtcttaataaagctgcgtgtttcacttcggcatcaaaacttgcttttgctgtggtttggcatttccctccacccacacatgtgacgaaaaggggaaacaagactgggtcctggccacaacttcagctgaggaacttggcacggccagcttgggacccaggaccctaacgcagaggcgctgtgtttggaagtcccgctatcacggccccccagatggggcctggacgatgcctcctgacggccttgttgcttctggccctggcgccaccgccggaagcctcccagtactgcggccgccttgaatactggaacccagacaacaagtgctgcagcagctgcctgcaacgcttcgggccgcccccctgcccggactatgagttccgggaaaactgcggactcaatgaccacggcgatttcgtaacgcccccgttccgaaagtgttcttctgggcagtgcaaccccgacggcgcggagctatgtagcccctgcggcggcggagccgtgacccctactcccgccgcgggcgggggcagaaccccgtggcgctgcagagagaggccggtccctgccaaggggcactgccccctcacacctggaaacccaggcgcccctagctcccaggagcgcagctcaccagcaagttccattgcctggaggacccctgagcctgtccctcagcaggcctggccgaatttccttccgctcgtggtgctggtcctgctcctgaccttggcggtgatagcgatcctcctgtttattctgctctggcatctctgctggcccaaggagaaagccgacccctatccctatcctggcttggtctgcggagtccccaacacccacaccccttcctcctcgcatctgtcctccccaggcgccctggagacaggggacacatggaaggaggcctcactacttccactcctgagcagggaactgtccagtctggcgtcacaacccctgtctcgcctcctggatgagctggaggtgctggaagagctgattgtactgctggaccctgagcctgggccaggtgggggtatggcccatggcactactcgacacctggccgcaagatatgggctgcctgctgcctggtccacctttgcctattcgctgaggccgagtcgctcgccgctgcgggctctgattgagatggtggtggcaagggagccctctgcctccctgggccagcttggcacacacctcgcccagctagggcgggcagatgcattgcgggtgctgtccaagcttggctcatctggggtttgctgggcttaacacccaataaagaactttgctgactactaagcccagta

SEQ ID NO: 353462 - DNA, 1997 bp, Homo sapiens
gtaagagcagccagacctggagggcttgggtaaaaatggctgaatatttagcttcgatattcgggactgagaaggacaaggttaactgctctttttactttaagatcggggtctgccggcacggggaccggtgctcccggcttcacaacaagccgacattcagccaggaggtgttcacagaactgcaggagaagtatggggagattgaagagatgaatgtgtgcgacaaccttggggaccacctcgtgggcaacgtctatgtcaagttccggagggaggaggatggagagcgggccgtggctgaactcagtaaccgctggttcaacgggcaggctgtgcacgggaatgtacccgaggtggcttctgcaacttcatgcatctgcggcccatttcccagaacctccagaggcagctctatgggcggggacccaggcgcaggtcacccccgaggttccatactggccaccatccccgagagaggaaccatcggtgttcccctgatcactggcatggccgcttctgaggccctggcccccttacccttcacccccaacagggacagatgttcctggcaggacctctcctcaaagcccccttcactctcctgccccatccttcccaggctcccgggctccataatgtaatctgttcagcatggagaccttcttctaccgcccctgtcttaataaagctgcgtgtttcacttcggcatcaaaacttgcttttgctgtggtttggcatttccctccacccacacatgtgacgaaaaggggaaacaagactgggtcctggccacaacttcagctgaggaacttggcacggccagcttgggacccaggaccctaacgcagaggcgctgtgtttggaagtcccgctatcacggccccccagatggggcctggacgatgcctcctgacggccttgttgcttctggccctggcgccaccgccggaagcctcccagtactgcggccgccttgaatactggaacccagacaacaagtgctgcagcagctgcctgcaacgcttcgggccgcccccctgcccggactatgagttccgggaaaactgcggactcaatgaccacggcgatttcgtaacgcccccgttccgaaagtgttcttctgggcagtgcaaccccgacggcgcggagctatgtagcccctgcggcggcggagccgtgacccctactcccgccgcgggcgggggcagaaccccgtggcgctgcagagagaggccggtccctgccaaggggcactgccccctcacacctggaaacccaggcgcccctagctcccaggagcgcagctcaccagcaagttccattgcctggaggacccctgagcctgtccctcagcaggcctggccgaatttccttccgctcgtggtgctggtcctgctcctgaccttggcggtgatagcgatcctcctgtttattctgctctggcatctctgctggcccaaggagaaagccgacccctatccctatcctggcttggtctgcggagtccccaacacccacaccccttcctcctcgcatctgtcctccccaggcgccctggagacaggggacacatggaaggaggcctcactacttccactcctgagcagggaactgtccagtctggcgtcacaacccctgtctcgcctcctggatgagctggaggtgctggaagagctgattgtactgctggaccctgagcctgggccaggtgggggtatggcccatggcactactcgacacctggccgcaagatatgggctgcctgctgcctggtccacctttgcctattcgctgaggccgagtcgctcgccgctgcgggctctgattgagatggtggtggcaagggagccctctgcctccctgggccagcttggcacacacctcgcccagctagggcgggcagatgcattgcgggtgctgtccaagcttggctcatctggggtttgctgggcttaacacccaataaagaactttgctgactactaagcccagta

SEQ ID NO: 353463 - DNA, 2852 bp, Homo sapiens
gtaagagcagccagacctggagggcttgggtaaaaatggctgaatatttagcttcgatattcgggactgagaaggacaaatcggggtctgccggcacggggaccggtgctcccggcttcacaacaagccgacattcagccaggtgagacccggcacggagcctcgggggttaacggctccctggcccttccccttctggggccgtcgtcaccatgtcccgcctattccgggttcctgagtccctccccaccgcccggctttttttctcattggacctttctgcaggctcctcccaccggtcttcgtgccgttttcccgggaacttggtcgcgcccccatgcgtacaggctacacacggcggctgttcatctttgccagtcccttccatcccgctgttcatccttgccagtcccctccatcccttttctggtttcttaggggcaaaggatcgccgatgcactcatgatgcttaggctggggtgtaaggttccacccccaaccttcatgcctcactctctgttcatgcagccctgccctctgagctcaggccccgccccttttaaattctgtgcagaccatagtgctgctcaacctgtaccggaatccacagaacacagcccaaactgcagacggatcacactgtgagtaagggaccaggcctgggggcaaggtgaacagcccccagtaggctacactctgattccaccctgcccgcccccaccccaggtcatgtgagtgacgtggaggtgcaggagcactatgatagcttcttcgaggtgagggttggtaggggcagatggggtttcttgtgggagctcagctgagttcctccccgtcttccacaggaggtgttcacagaactgcaggagaagtatggggagattgaagagatgaatgtgtgcgacaaccttggggaccacctcgtgggcaacgtctatgtcaaggtgcttgctgccccccacttagggcccagaagtggaggcgtttcaatgcctgatggtggccactgtaggctctcagcttgaatttcatcactaaatccagtccagccccagagcgggtagtgagtcccctgaagatctctgagttctcctgctgaccctgactgacatttcctgcagttccggagggaggaggatggagagcgggccgtggctgaactcagtaaccgctggttcaacgggcaggctgtgcacgggaatgtacccgaggtggcttctgcaacttcatgcatctgcggcccatttcccagaacctccagaggcagctctatgggcggggacccaggcgcaggtcacccccgaggttccatactggccaccatccccgagagaggaaccatcggtgttcccctgatcactggcatggccgcttctgaggccctggcccccttacccttcacccccaacagggacagatgttcctggcaggacctctcctcaaagcccccttcactctcctgccccatccttcccaggctcccgggctccataatgtaatctgttcagcatggagaccttcttctaccgcccctgtcttaataaagctgcgtgtttcacttcggcatcaaaacttgcttttgctgtggtttggcatttccctccacccacacatgtgacgaaaaggggaaacaagactgggtcctggccacaacttcagctgaggaacttggcacggccagcttgggacccaggaccctaacgcagaggcgctgtgtttggaagtcccgctatcacggccccccagatggggcctggacgatgcctcctgacggccttgttgcttctggccctggcgccaccgccggaagcctcccagtactgcggccgccttgaatactggaacccagacaacaagtgctgcagcagctgcctgcaacgcttcgggccgcccccctgcccggactatgagttccgggaaaactgcggactcaatgaccacggcgatttcgtaacgcccccgttccgaaagtgttcttctgggcagtgcaaccccgacggcgcggagctatgtagcccctgcggcggcggagccgtgacccctactcccgccgcgggcgggggcagaaccccgtggcgctgcagagagaggccggtccctgccaaggggcactgccccctcacacctggaaacccaggcgcccctagctcccaggagcgcagctcaccagcaagttccattgcctggaggacccctgagcctgtccctcagcaggcctggccgaatttccttccgctcgtggtgctggtcctgctcctgaccttggcggtgatagcgatcctcctgtttattctgctctggcatctctgctggcccaaggagaaagccgacccctatccctatcctggcttggtctgcggagtccccaacacccacaccccttcctcctcgcatctgtcctccccaggcgccctggagacaggggacacatggaaggaggcctcactacttccactcctgagcagggaactgtccagtctggcgtcacaacccctgtctcgcctcctggatgagctggaggtgctggaagagctgattgtactgctggaccctgagcctgggccaggtgggggtatggcccatggcactactcgacacctggccgcaagatatgggctgcctgctgcctggtccacctttgcctattcgctgaggccgagtcgctcgccgctgcgggctctgattgagatggtggtggcaagggagccctctgcctccctgggccagcttggcacacacctcgcccagctagggcgggcagatgcattgcgggtgctgtccaagcttggctcatctggggtttgctgggcttaacacccaataaagaactttgctgactactaagcccagta

SEQ ID NO: 353464 - DNA, 2955 bp, Homo sapiens
gtaagagcagccagacctggagggcttgggtaaaaatggctgaatatttagcttcgatattcgggactgagaaggacaaatcggggtctgccggcacggggaccggtgctcccggcttcacaacaagccgacattcagccaggtgagacccggcacggagcctcgggggttaacggctccctggcccttccccttctggggccgtcgtcaccatgtcccgcctattccgggttcctgagtccctccccaccgcccggctttttttctcattggacctttctgcaggctcctcccaccggtcttcgtgccgttttcccgggaacttggtcgcgcccccatgcgtacaggctacacacggcggctgttcatctttgccagtcccttccatcccgctgttcatccttgccagtcccctccatcccttttctggtttcttaggggcaaaggatcgccgatgcactcatgatgcttaggctggggtgtaaggttccacccccaaccttcatgcctcactctctgttcatgcagccctgccctctgagctcaggccccgccccttttaaattctgtgcagaccatagtgctgctcaacctgtaccggaatccacagaacacagcccaaactgcagacggatcacactgtgagtaagggaccaggcctgggggcaaggtgaacagcccccagtaggctacactctgattccaccctgcccgcccccaccccaggtcatgtgagtgacgtggaggtgcaggagcactatgatagcttcttcgaggtgagggttggtaggggcagatggggtttcttgtgggagctcagctgagttcctccccgtcttccacaggaggtgttcacagaactgcaggagaagtatggggagattgaagagatgaatgtgtgcgacaaccttggggaccacctcgtgggcaacgtctatgtcaaggtgcttgctgccccccacttagggcccagaagtggaggcgtttcaatgcctgatggtggccactgtaggctctcagcttgaatttcatcactaaatccagtccagccccagagcgggtagtgagtcccctgaagatctctgagttctcctgctgaccctgactgacatttcctgcagttccggagggaggaggatggagagcgggccgtggctgaactcagtaaccgctggttcaacgggcaggctgtgcacgggaatgtacccgaggtggcttctgcaacttcatgcatctgcggcccatttcccagaacctccagaggcagctctatgggcggggacccaggcgcaggctggagtgcaaaggcgcagtcttggctcagtgcaacctctgcctcccagagagatggggtttcaccacgttggccagcctggtctcgaactccggacctcaggtcacccccgaggttccatactggccaccatccccgagagaggaaccatcggtgttcccctgatcactggcatggccgcttctgaggccctggcccccttacccttcacccccaacagggacagatgttcctggcaggacctctcctcaaagcccccttcactctcctgccccatccttcccaggctcccgggctccataatgtaatctgttcagcatggagaccttcttctaccgcccctgtcttaataaagctgcgtgtttcacttcggcatcaaaacttgcttttgctgtggtttggcatttccctccacccacacatgtgacgaaaaggggaaacaagactgggtcctggccacaacttcagctgaggaacttggcacggccagcttgggacccaggaccctaacgcagaggcgctgtgtttggaagtcccgctatcacggccccccagatggggcctggacgatgcctcctgacggccttgttgcttctggccctggcgccaccgccggaagcctcccagtactgcggccgccttgaatactggaacccagacaacaagtgctgcagcagctgcctgcaacgcttcgggccgcccccctgcccggactatgagttccgggaaaactgcggactcaatgaccacggcgatttcgtaacgcccccgttccgaaagtgttcttctgggcagtgcaaccccgacggcgcggagctatgtagcccctgcggcggcggagccgtgacccctactcccgccgcgggcgggggcagaaccccgtggcgctgcagagagaggccggtccctgccaaggggcactgccccctcacacctggaaacccaggcgcccctagctcccaggagcgcagctcaccagcaagttccattgcctggaggacccctgagcctgtccctcagcaggcctggccgaatttccttccgctcgtggtgctggtcctgctcctgaccttggcggtgatagcgatcctcctgtttattctgctctggcatctctgctggcccaaggagaaagccgacccctatccctatcctggcttggtctgcggagtccccaacacccacaccccttcctcctcgcatctgtcctccccaggcgccctggagacaggggacacatggaaggaggcctcactacttccactcctgagcagggaactgtccagtctggcgtcacaacccctgtctcgcctcctggatgagctggaggtgctggaagagctgattgtactgctggaccctgagcctgggccaggtgggggtatggcccatggcactactcgacacctggccgcaagatatgggctgcctgctgcctggtccacctttgcctattcgctgaggccgagtcgctcgccgctgcgggctctgattgagatggtggtggcaagggagccctctgcctccctgggccagcttggcacacacctcgcccagctagggcgggcagatgcattgcgggtgctgtccaagcttggctcatctggggtttgctgggcttaacacccaataaagaactttgctgactactaagcccagta

SEQ ID NO: 353465 - DNA, 2491 bp, Homo sapiens
gtaagagcagccagacctggagggcttgggtaaaaatggctgaatatttagcttcgatattcgggactgagaaggacaaatcggggtctgccggcacggggaccggtgctcccggcttcacaacaagccgacattcagccaggtgagacccggcacggagcctcgggggttaacggctccctggcccttccccttctggggccgtcgtcaccatgtcccgcctattccgggttcctgagtccctccccaccgcccggctttttttctcattggacctttctgcaggctcctcccaccggtcttcgtgccgttttcccgggaacttggtcgcgcccccatgcgtacaggctacacacggcggctgttcatctttgccagtcccttccatcccgctgttcatccttgccagtcccctccatcccttttctggtttcttaggggcaaaggatcgccgatgcactcatgatgcttaggctggggtgtaaggttccacccccaaccttcatgcctcactctctgttcatgcagccctgccctctgagctcaggccccgccccttttaaattctgtgcagaccatagtgctgctcaacctgtaccggaatccacagaacacagcccaaactgcagacggatcacactgtgagtaagggaccaggcctgggggcaaggtgaacagcccccagtaggctacactctgattccaccctgcccgcccccaccccaggtcatgtgagtgacgtggaggtgcaggagcactatgatagcttcttcgaggtgagggttggtaggggcagatggggtttcttgtgggagctcagctgagttcctccccgtcttccacaggaggtgttcacagaactgcaggagaagtatggggagattgaagagatgaatgtgtgcgacaaccttggggaccacctcgtgggcaacgtctatgtcaagttccggagggaggaggatggagagcgggccgtggctgaactcagtaaccgctggttcaacgggcaggctgtgcacgggaatgtacccgaggtggcttctgcaacttcatgcatctgcggcccatttcccagaacctccagaggcagctctatgggcggggacccaggcgcaggctcccgggctccataatgtaatctgttcagcatggagaccttcttctaccgcccctgtcttaataaagctgcgtgtttcacttcggcatcaaaacttgcttttgctgtggtttggcatttccctccacccacacatgtgacgaaaaggggaaacaagactgggtcctggccacaacttcagctgaggaacttggcacggccagcttgggacccaggaccctaacgcagaggcgctgtgtttggaagtcccgctatcacggccccccagatggggcctggacgatgcctcctgacggccttgttgcttctggccctggcgccaccgccggaagcctcccagtactgcggccgccttgaatactggaacccagacaacaagtgctgcagcagctgcctgcaacgcttcgggccgcccccctgcccggactatgagttccgggaaaactgcggactcaatgaccacggcgatttcgtaacgcccccgttccgaaagtgttcttctgggcagtgcaaccccgacggcgcggagctatgtagcccctgcggcggcggagccgtgacccctactcccgccgcgggcgggggcagaaccccgtggcgctgcagagagaggccggtccctgccaaggggcactgccccctcacacctggaaacccaggcgcccctagctcccaggagcgcagctcaccagcaagttccattgcctggaggacccctgagcctgtccctcagcaggcctggccgaatttccttccgctcgtggtgctggtcctgctcctgaccttggcggtgatagcgatcctcctgtttattctgctctggcatctctgctggcccaaggagaaagccgacccctatccctatcctggcttggtctgcggagtccccaacacccacaccccttcctcctcgcatctgtcctccccaggcgccctggagacaggggacacatggaaggaggcctcactacttccactcctgagcagggaactgtccagtctggcgtcacaacccctgtctcgcctcctggatgagctggaggtgctggaagagctgattgtactgctggaccctgagcctgggccaggtgggggtatggcccatggcactactcgacacctggccgcaagatatgggctgcctgctgcctggtccacctttgcctattcgctgaggccgagtcgctcgccgctgcgggctctgattgagatggtggtggcaagggagccctctgcctccctgggccagcttggcacacacctcgcccagctagggcgggcagatgcattgcgggtgctgtccaagcttggctcatctggggtttgctgggcttaacacccaataaagaactttgctgactactaagcccagta

SEQ ID NO: 353466 - DNA, 2296 bp, Homo sapiens
gtaagagcagccagacctggagggcttgggtaaaaatggctgaatatttagcttcgatattcgggactgagaaggacaaatcggggtctgccggcacggggaccggtgctcccggcttcacaacaagccgacattcagccaggtgagacccggcacggagcctcgggggttaacggctccctggcccttccccttctggggccgtcgtcaccatgtcccgcctattccgggttcctgagtccctccccaccgcccggctttttttctcattggacctttctgcaggctcctcccaccggtcttcgtgccgttttcccgggaacttggtcgcgcccccatgcgtacaggctacacacggcggctgttcatctttgccagtcccttccatcccgctgttcatccttgccagtcccctccatcccttttctggtttcttaggggcaaaggatcgccgatgcactcatgatgcttaggctggggtgtaaggttccacccccaaccttcatgcctcactctctgttcatgcagccctgccctctgagctcaggccccgccccttttaaattctgtgcagaccatagtgctgctcaacctgtaccggaatccacagaacacagcccaaactgcagacggatcacactgtgagtaagggaccaggcctgggggcaaggtgaacagcccccagtaggctacactctgattccaccctgcccgcccccaccccaggtcatgtgagtgacgtggaggtgcaggagcactatgatagcttcttcgaggtgagggttggtaggggcagatggggtttcttgtgggagctcagctgagttcctccccgtcttccacaggaggtgttcacagaactgcaggagaagtatggggagattgaagagatgaatgtgtgcgacaaccttggggaccacctcgtgggcaacgtctatgtcaagttccggagggaggaggatggagagcgggccgtggctgaactcagtaaccgctggttcaacgggcaggctgtgcacgggaatgtacccgaggtggcttctgcaacttcatgcatctgcggcccatttcccagaacctccagaggcagctctatgggcggggacccaggcgcaggtcacccccgaggttccatactggccaccatccccgagagaggaaccatcggtgttcccctgatcactggcatggccgcttctgaggccctggcccccttacccttcacccccaacagggacagatgttcctggcaggacctctcctcaaagcccccttcactctcctgccccatccttcccaggctcccgggctccataatgtaatctgttcagcatggagaccttcttctaccgcccctgtcttaataaagctgcgtgtttcacttcggcatcaaaacttgcttttgctgtggtttggcatttccctccacccacacatgtgacgaaaaggggaaacaagactgggtcctggccacaacttcagctgaggaacttggcacggccagcttgggacccaggaccctaacgcagaggcgctgtgtttggaagtcccgctatcacggccccccagatggggcctggacgatgcctcctgacggccttgttgcttctggccctggcgccaccgccggaagcctcccagtactgcggccgccttgaatactggaacccagacaacaagtgctgcagcagctgcctgcaacgcttcgggccgcccccctgcccggactatgagttccgggaaaactgcggactcaatgaccacggcgatttcgtaacgcccccgttccgaaagtgttcttctgggcagtgcaaccccgacggcgcggagctatgtagcccctgcggcggcggagccgtgacccctactcccgccgcgggcgggggcagaaccccgtggcgctgcagagagaactgtccagtctggcgtcacaacccctgtctcgcctcctggatgagctggaggtgctggaagagctgattgtactgctggaccctgagcctgggccaggtgggggtatggcccatggcactactcgacacctggccgcaagatatgggctgcctgctgcctggtccacctttgcctattcgctgaggccgagtcgctcgccgctgcgggctctgattgagatggtggtggcaagggagccctctgcctccctgggccagcttggcacacacctcgcccagctagggcgggcagatgcattgcgggtgctgtccaagcttggctcatctggggtttgctgggcttaacacccaataaagaactttgctgactactaagcccagta

SEQ ID NO: 353467 - DNA, 2910 bp, Homo sapiens
gtaagagcagccagacctggagggcttgggtaaaaatggctgaatatttagcttcgatattcgggactgagaaggacaaatcggggtctgccggcacggggaccggtgctcccggcttcacaacaagccgacattcagccaggtgagacccggcacggagcctcgggggttaacggctccctggcccttccccttctggggccgtcgtcaccatgtcccgcctattccgggttcctgagtccctccccaccgcccggctttttttctcattggacctttctgcaggctcctcccaccggtcttcgtgccgttttcccgggaacttggtcgcgcccccatgcgtacaggctacacacggcggctgttcatctttgccagtcccttccatcccgctgttcatccttgccagtcccctccatcccttttctggtttcttaggggcaaaggatcgccgatgcactcatgatgcttaggctggggtgtaaggttccacccccaaccttcatgcctcactctctgttcatgcagccctgccctctgagctcaggccccgccccttttaaattctgtgcagaccatagtgctgctcaacctgtaccggaatccacagaacacagcccaaactgcagacggatcacactgtgagtaagggaccaggcctgggggcaaggtgaacagcccccagtaggctacactctgattccaccctgcccgcccccaccccaggtcatgtgagtgacgtggaggtgcaggagcactatgatagcttcttcgaggtgagggttggtaggggcagatggggtttcttgtgggagctcagctgagttcctccccgtcttccacaggaggtgttcacagaactgcaggagaagtatggggagattgaagagatgaatgtgtgcgacaaccttggggaccacctcgtgggcaacgtctatgtcaaggtgcttgctgccccccacttagggcccagaagtggaggcgtttcaatgcctgatggtggccactgtaggctctcagcttgaatttcatcactaaatccagtccagccccagagcgggtagtgagtcccctgaagatctctgagttctcctgctgaccctgactgacatttcctgcagttccggagggaggaggatggagagcgggccgtggctgaactcagtaaccgctggttcaacgggcaggctgtgcacggtgagctgtctcctgtcactgacttccgggagtcatgctgtcgccagtatgagatgggggaatgtacccgaggtggcttctgcaacttcatgcatctgcggcccatttcccagaacctccagaggcagctctatgggcggggacccaggcgcaggtcacccccgaggttccatactggccaccatccccgagagaggaaccatcggtgttcccctgatcactggcatggccgcttctgaggccctggcccccttacccttcacccccaacagggacagatgttcctggcaggacctctcctcaaagcccccttcactctcctgccccatccttcccaggctcccgggctccataatgtaatctgttcagcatggagaccttcttctaccgcccctgtcttaataaagctgcgtgtttcacttcggcatcaaaacttgcttttgctgtggtttggcatttccctccacccacacatgtgacgaaaaggggaaacaagactgggtcctggccacaacttcagctgaggaacttggcacggccagcttgggacccaggaccctaacgcagaggcgctgtgtttggaagtcccgctatcacggccccccagatggggcctggacgatgcctcctgacggccttgttgcttctggccctggcgccaccgccggaagcctcccagtactgcggccgccttgaatactggaacccagacaacaagtgctgcagcagctgcctgcaacgcttcgggccgcccccctgcccggactatgagttccgggaaaactgcggactcaatgaccacggcgatttcgtaacgcccccgttccgaaagtgttcttctgggcagtgcaaccccgacggcgcggagctatgtagcccctgcggcggcggagccgtgacccctactcccgccgcgggcgggggcagaaccccgtggcgctgcagagagaggccggtccctgccaaggggcactgccccctcacacctggaaacccaggcgcccctagctcccaggagcgcagctcaccagcaagttccattgcctggaggacccctgagcctgtccctcagcaggcctggccgaatttccttccgctcgtggtgctggtcctgctcctgaccttggcggtgatagcgatcctcctgtttattctgctctggcatctctgctggcccaaggagaaagccgacccctatccctatcctggcttggtctgcggagtccccaacacccacaccccttcctcctcgcatctgtcctccccaggcgccctggagacaggggacacatggaaggaggcctcactacttccactcctgagcagggaactgtccagtctggcgtcacaacccctgtctcgcctcctggatgagctggaggtgctggaagagctgattgtactgctggaccctgagcctgggccaggtgggggtatggcccatggcactactcgacacctggccgcaagatatgggctgcctgctgcctggtccacctttgcctattcgctgaggccgagtcgctcgccgctgcgggctctgattgagatggtggtggcaagggagccctctgcctccctgggccagcttggcacacacctcgcccagctagggcgggcagatgcattgcgggtgctgtccaagcttggctcatctggggtttgctgggcttaacacccaataaagaactttgctgactactaagcccagta

SEQ ID NO: 353468 - DNA, 2357 bp, Homo sapiens
gtaagagcagccagacctggagggcttgggtaaaaatggctgaatatttagcttcgatattcgggactgagaaggacaaatcggggtctgccggcacggggaccggtgctcccggcttcacaacaagccgacattcagccaggtgagacccggcacggagcctcgggggttaacggctccctggcccttccccttctggggccgtcgtcaccatgtcccgcctattccgggttcctgagtccctccccaccgcccggctttttttctcattggacctttctgcaggctcctcccaccggtcttcgtgccgttttcccgggaacttggtcgcgcccccatgcgtacaggctacacacggcggctgttcatctttgccagtcccttccatcccgctgttcatccttgccagtcccctccatcccttttctggtttcttaggggcaaaggatcgccgatgcactcatgatgcttaggctggggtgtaaggttccacccccaaccttcatgcctcactctctgttcatgcagccctgccctctgagctcaggccccgccccttttaaattctgtgcagaccatagtgctgctcaacctgtaccggaatccacagaacacagcccaaactgcagacggatcacactgtgagtaagggaccaggcctgggggcaaggtgaacagcccccagtaggctacactctgattccaccctgcccgcccccaccccaggtcatgtgagtgacgtggaggtgcaggagcactatgatagcttcttcgaggtgagggttggtaggggcagatggggtttcttgtgggagctcagctgagttcctccccgtcttccacaggaggtgttcacagaactgcaggagaagtatggggagattgaagagatgaatgtgtgcgacaaccttggggaccacctcgtgggcaacgtctatgtcaagttccggagggaggaggatggagagcgggccgtggctgaactcagtaaccgctggttcaacgggcaggctgtgcacgggaatgtacccgaggtggcttctgcaacttcatgcatctgcggcccatttcccagaacctccagaggcagctctatgggcggggacccaggcgcaggtcacccccgaggttccatactggccaccatccccgagagaggaaccatcggtgttcccctgatcactggcatggccgcttctgaggccctggcccccttacccttcacccccaacagggacagatgttcctggcaggacctctcctcaaagcccccttcactctcctgccccatccttcccaggctcccgggctccataatgtaatctgttcagcatggagaccttcttctaccgcccctgtcttaataaagctgcgtgtttcacttcggcatcaaaacttgcttttgctgtggtttggcatttccctccacccacacatgtgacgaaaaggggaaacaagactgggtcctggccacaacttcagctgaggaacttggcacggccagcttgggacccaggaccctaacgcagaggcgctgtgtttggaagtcccgctatcacggccccccagatggggcctggacgatgcctcctgacggccttgttgcttctggccctggcgccaccgccggaagcctcccagtactgcggccgccttgaatactggaacccagacaacaagtgctgcagcagctgcctgcaacgcttcgggccgcccccctgcccgggcgccctggagacaggggacacatggaaggaggcctcactacttccactcctgagcagggaactgtccagtctggcgtcacaacccctgtctcgcctcctggatgagctggaggtgctggaagagctgattgtactgctggaccctgagcctgggccaggtgggggtatggcccatggcactactcgacacctggccgcaagatatgggctgcctgctgcctggtccacctttgcctattcgctgaggccgagtcgctcgccgctgcgggctctgattgagatggtggtggcaagggagccctctgcctccctgggccagcttggcacacacctcgcccagctagggcgggcagatgcattgcgggtgctgtccaagcttggctcatctggggtttgctgggcttaacacccaataaagaactttgctgactactaagcccagtatacaattagcactgaagtacttcttgaagtacaatcctaattgggcaaagacccaacagatagcctcactgctcttcgccctagaagggcctattccaacatacacacagggccacatgtgggagggctgaccccaggtgcctctgggccaccagaatcccctctgggaaacaaccctgctacaga

SEQ ID NO: 353469 - DNA, 2297 bp, Homo sapiens
gtaagagcagccagacctggagggcttgggtaaaaatggctgaatatttagcttcgatattcgggactgagaaggacaaatcggggtctgccggcacggggaccggtgctcccggcttcacaacaagccgacattcagccaggtgagacccggcacggagcctcgggggttaacggctccctggcccttccccttctggggccgtcgtcaccatgtcccgcctattccgggttcctgagtccctccccaccgcccggctttttttctcattggacctttctgcaggctcctcccaccggtcttcgtgccgttttcccgggaacttggtcgcgcccccatgcgtacaggctacacacggcggctgttcatctttgccagtcccttccatcccgctgttcatccttgccagtcccctccatcccttttctggtttcttaggggcaaaggatcgccgatgcactcatgatgcttaggctggggtgtaaggttccacccccaaccttcatgcctcactctctgttcatgcagccctgccctctgagctcaggccccgccccttttaaattctgtgcagaccatagtgctgctcaacctgtaccggaatccacagaacacagcccaaactgcagacggatcacactgtgagtaagggaccaggcctgggggcaaggtgaacagcccccagtaggctacactctgattccaccctgcccgcccccaccccaggtcatgtgagtgacgtggaggtgcaggagcactatgatagcttcttcgaggtgagggttggtaggggcagatggggtttcttgtgggagctcagctgagttcctccccgtcttccacaggaggtgttcacagaactgcaggagaagtatggggagattgaagagatgaatgtgtgcgacaaccttggggaccacctcgtgggcaacgtctatgtcaagttccggagggaggaggatggagagcgggccgtggctgaactcagtaaccgctggttcaacgggcaggctgtgcacgggaatgtacccgaggtggcttctgcaacttcatgcatctgcggcccatttcccagaacctccagaggcagctctatgggcggggacccaggcgcaggtcacccccgaggttccatactggccaccatccccgagagaggaaccatcggtgttcccctgatcactggcatggccgcttctgaggccctggcccccttacccttcacccccaacagggacagatgttcctggcaggacctctcctcaaagcccccttcactctcctgccccatccttcccaggctcccgggctccataatgtaatctgttcagcatggagaccttcttctaccgcccctgtcttaataaagctgcgtgtttcacttcggcatcaaaacttgcttttgctgtggtttggcatttccctccacccacacatgtgacgaaaaggggaaacaagactgggtcctggccacaacttcagctgaggaacttggcacggccagcttgggacccaggaccctaacgcagaggcgctgtgtttggaagtcccgctatcacggccccccagatggggcctggacgatgcctcctgacggccttgttgcttctggccctggcgccaccgccggaagcctcccagtactgcggccgccttgaatactggaacccagacaacaagtgctgcagcagctgcctgcaacgcttcgggccgcccccctgcccggaactgtccagtctggcgtcacaacccctgtctcgcctcctggatgagctggaggtgctggaagagctgattgtactgctggaccctgagcctgggccaggtgggggtatggcccatggcactactcgacacctggccgcaagatatgggctgcctgctgcctggtccacctttgcctattcgctgaggccgagtcgctcgccgctgcgggctctgattgagatggtggtggcaagggagccctctgcctccctgggccagcttggcacacacctcgcccagctagggcgggcagatgcattgcgggtgctgtccaagcttggctcatctggggtttgctgggcttaacacccaataaagaactttgctgactactaagcccagtatacaattagcactgaagtacttcttgaagtacaatcctaattgggcaaagacccaacagatagcctcactgctcttcgccctagaagggcctattccaacatacacacagggccacatgtgggagggctgaccccaggtgcctctgggccaccagaatcccctctgggaaacaaccctgctacaga

SEQ ID NO: 353470 - DNA, 2461 bp, Homo sapiens
gtaagagcagccagacctggagggcttgggtaaaaatggctgaatatttagcttcgatattcgggactgagaaggacaaatcggggtctgccggcacggggaccggtgctcccggcttcacaacaagccgacattcagccaggtgagacccggcacggagcctcgggggttaacggctccctggcccttccccttctggggccgtcgtcaccatgtcccgcctattccgggttcctgagtccctccccaccgcccggctttttttctcattggacctttctgcaggctcctcccaccggtcttcgtgccgttttcccgggaacttggtcgcgcccccatgcgtacaggctacacacggcggctgttcatctttgccagtcccttccatcccgctgttcatccttgccagtcccctccatcccttttctggtttcttaggggcaaaggatcgccgatgcactcatgatgcttaggctggggtgtaaggttccacccccaaccttcatgcctcactctctgttcatgcagccctgccctctgagctcaggccccgccccttttaaattctgtgcagaccatagtgctgctcaacctgtaccggaatccacagaacacagcccaaactgcagacggatcacactgtgagtaagggaccaggcctgggggcaaggtgaacagcccccagtaggctacactctgattccaccctgcccgcccccaccccaggtcatgtgagtgacgtggaggtgcaggagcactatgatagcttcttcgaggtgagggttggtaggggcagatggggtttcttgtgggagctcagctgagttcctccccgtcttccacaggaggtgttcacagaactgcaggagaagtatggggagattgaagagatgaatgtgtgcgacaaccttggggaccacctcgtgggcaacgtctatgtcaagttccggagggaggaggatggagagcgggccgtggctgaactcagtaaccgctggttcaacgggcaggctgtgcacgggaatgtacccgaggtggcttctgcaacttcatgcatctgcggcccatttcccagaacctccagaggcagctctatgggcggggacccaggcgcaggtcacccccgaggttccatactggccaccatccccgagagaggaaccatcggtgttcccctgatcactggcatggccgcttctgaggccctggcccccttacccttcacccccaacagggacagatgttcctggcaggacctctcctcaaagcccccttcactctcctgccccatccttcccaggctcccgggctccataatgtaatctgttcagcatggagaccttcttctaccgcccctgtcttaataaagctgcgtgtttcacttcggcatcaaaacttgcttttgctgtggtttggcatttccctccacccacacatgtgacgaaaaggggaaacaagactgggtcctggccacaacttcagctgaggaacttggcacggccagcttgggacccaggaccctaacgcagaggcgctgtgtttggaagtcccgctatcacggccccccagatggggcctggacgatgcctcctgacggccttgttgcttctggccctggcgccaccgccggaagcctcccagtactgcggccgccttgaatactggaacccagacaacaagtgctgcagcagctgcctgcaacgcttcgggccgcccccctgcccggactatgagttccgggaaaactgcggactcaatgaccacggcgatttcgtaacgcccccgttccgaaagtgttcttctgggcagtgcaaccccgacggcgcggagctatgtagcccctgcggcggcggagccgtgacccctactcccgccgcgggcgggggcagaaccccgtggcgctgcagagagaactgtccagtctggcgtcacaacccctgtctcgcctcctggatgagctggaggtgctggaagagctgattgtactgctggaccctgagcctgggccaggtgggggtatggcccatggcactactcgacacctggccgcaagatatgggctgcctgctgcctggtccacctttgcctattcgctgaggccgagtcgctcgccgctgcgggctctgattgagatggtggtggcaagggagccctctgcctccctgggccagcttggcacacacctcgcccagctagggcgggcagatgcattgcgggtgctgtccaagcttggctcatctggggtttgctgggcttaacacccaataaagaactttgctgactactaagcccagtaaaaaaaacaaaaaaaaacaaacaaaaaaaaaaaaaaaaaaaaccccggggtttttttctggggggggggaaaaagggggttaaaaggggcggggcaagtgtttcccggccccccttttttgtcacacagggggaaaatcgggggggccccccatagaggggcgga

SEQ ID NO: 353471 - DNA, 2287 bp, Homo sapiens
gtaagagcagccagacctggagggcttgggtaaaaatggctgaatatttagcttcgatattcgggactgagaaggacaaatcggggtctgccggcacggggaccggtgctcccggcttcacaacaagccgacattcagccaggtgagacccggcacggagcctcgggggttaacggctccctggcccttccccttctggggccgtcgtcaccatgtcccgcctattccgggttcctgagtccctccccaccgcccggctttttttctcattggacctttctgcaggctcctcccaccggtcttcgtgccgttttcccgggaacttggtcgcgcccccatgcgtacaggctacacacggcggctgttcatctttgccagtcccttccatcccgctgttcatccttgccagtcccctccatcccttttctggtttcttaggggcaaaggatcgccgatgcactcatgatgcttaggctggggtgtaaggttccacccccaaccttcatgcctcactctctgttcatgcagccctgccctctgagctcaggccccgccccttttaaattctgtgcagaccatagtgctgctcaacctgtaccggaatccacagaacacagcccaaactgcagacggatcacactgaggtgttcacagaactgcaggagaagtatggggagattgaagagatgaatgtgtgcgacaaccttggggaccacctcgtgggcaacgtctatgtcaagttccggagggaggaggatggagagcgggccgtggctgaactcagtaaccgctggttcaacgggcaggctgtgcacgggaatgtacccgaggtggcttctgcaacttcatgcatctgcggcccatttcccagaacctccagaggcagctctatgggcggggacccaggcgcaggctcccgggctccataatgtaatctgttcagcatggagaccttcttctaccgcccctgtcttaataaagctgcgtgtttcacttcggcatcaaaacttgcttttgctgtggtttggcatttccctccacccacacatgtgacgaaaaggggaaacaagactgggtcctggccacaacttcagctgaggaacttggcacggccagcttgggacccaggaccctaacgcagaggcgctgtgtttggaagtcccgctatcacggccccccagatggggcctggacgatgcctcctgacggccttgttgcttctggccctggcgccaccgccggaagcctcccagtactgcggccgccttgaatactggaacccagacaacaagtgctgcagcagctgcctgcaacgcttcgggccgcccccctgcccggactatgagttccgggaaaactgcggactcaatgaccacggcgatttcgtaacgcccccgttccgaaagtgttcttctgggcagtgcaaccccgacggcgcggagctatgtagcccctgcggcggcggagccgtgacccctactcccgccgcgggcgggggcagaaccccgtggcgctgcagagagaggccggtccctgccaaggggcactgccccctcacacctggaaacccaggcgcccctagctcccaggagcgcagctcaccagcaagttccattgcctggaggacccctgagcctgtccctcagcaggcctggccgaatttccttccgctcgtggtgctggtcctgctcctgaccttggcggtgatagcgatcctcctgtttattctgctctggcatctctgctggcccaaggagaaagccgacccctatccctatcctggcttggtctgcggagtccccaacacccacaccccttcctcctcgcatctgtcctccccaggcgccctggagacaggggacacatggaaggaggcctcactacttccactcctgagcagggaactgtccagtctggcgtcacaacccctgtctcgcctcctggatgagctggaggtgctggaagagctgattgtactgctggaccctgagcctgggccaggtgggggtatggcccatggcactactcgacacctggccgcaagatatgggctgcctgctgcctggtccacctttgcctattcgctgaggccgagtcgctcgccgctgcgggctctgattgagatggtggtggcaagggagccctctgcctccctgggccagcttggcacacacctcgcccagctagggcgggcagatgcattgcgggtgctgtccaagcttggctcatctggggtttgctgggcttaacacccaataaagaactttgctgactactaagcccagta

SEQ ID NO: 353472 - DNA, 2055 bp, Homo sapiens
gtaagagcagccagacctggagggcttgggtaaaaatggctgaatatttagcttcgatattcgggactgagaaggacaaggttaactgctctttttactttaagatcggggtctgccggcacggggaccggtgctcccggcttcacaacaagccgacattcagccaggaggtgttcacagaactgcaggagaagtatggggagattgaagagatgaatgtgtgcgacaaccttggggaccacctcgtgggcaacgtctatgtcaagttccggagggaggaggatggagagcgggccgtggctgaactcagtaaccgctggttcaacgggcaggctgtgcacggtgagctgtctcctgtcactgacttccgggagtcatgctgtcgccagtatgagatgggggaatgtacccgaggtggcttctgcaacttcatgcatctgcggcccatttcccagaacctccagaggcagctctatgggcggggacccaggcgcaggtcacccccgaggttccatactggccaccatccccgagagaggaaccatcggtgttcccctgatcactggcatggccgcttctgaggccctggcccccttacccttcacccccaacagggacagatgttcctggcaggacctctcctcaaagcccccttcactctcctgccccatccttcccaggctcccgggctccataatgtaatctgttcagcatggagaccttcttctaccgcccctgtcttaataaagctgcgtgtttcacttcggcatcaaaacttgcttttgctgtggtttggcatttccctccacccacacatgtgacgaaaaggggaaacaagactgggtcctggccacaacttcagctgaggaacttggcacggccagcttgggacccaggaccctaacgcagaggcgctgtgtttggaagtcccgctatcacggccccccagatggggcctggacgatgcctcctgacggccttgttgcttctggccctggcgccaccgccggaagcctcccagtactgcggccgccttgaatactggaacccagacaacaagtgctgcagcagctgcctgcaacgcttcgggccgcccccctgcccggactatgagttccgggaaaactgcggactcaatgaccacggcgatttcgtaacgcccccgttccgaaagtgttcttctgggcagtgcaaccccgacggcgcggagctatgtagcccctgcggcggcggagccgtgacccctactcccgccgcgggcgggggcagaaccccgtggcgctgcagagagaggccggtccctgccaaggggcactgccccctcacacctggaaacccaggcgcccctagctcccaggagcgcagctcaccagcaagttccattgcctggaggacccctgagcctgtccctcagcaggcctggccgaatttccttccgctcgtggtgctggtcctgctcctgaccttggcggtgatagcgatcctcctgtttattctgctctggcatctctgctggcccaaggagaaagccgacccctatccctatcctggcttggtctgcggagtccccaacacccacaccccttcctcctcgcatctgtcctccccaggcgccctggagacaggggacacatggaaggaggcctcactacttccactcctgagcagggaactgtccagtctggcgtcacaacccctgtctcgcctcctggatgagctggaggtgctggaagagctgattgtactgctggaccctgagcctgggccaggtgggggtatggcccatggcactactcgacacctggccgcaagatatgggctgcctgctgcctggtccacctttgcctattcgctgaggccgagtcgctcgccgctgcgggctctgattgagatggtggtggcaagggagccctctgcctccctgggccagcttggcacacacctcgcccagctagggcgggcagatgcattgcgggtgctgtccaagcttggctcatctggggtttgctgggcttaacacccaataaagaactttgctgactactaagcccagta

SEQ ID NO: 353473 - DNA, 1634 bp, Homo sapiens
gtaagagcagccagacctggagggcttgggtaaaaatggctgaatatttagcttcgatattcgggactgagaaggacaaatcggggtctgccggcacggggaccggtgctcccggcttcacaacaagccgacattcagccagaccatagtgctgctcaacctgtaccggaatccacagaacacagcccaaaagggacagatgttcctggcaggacctctcctcaaagcccccttcactctcctgccccatccttcccaggctcccgggctccataatgtaatctgttcagcatggagaccttcttctaccgcccctgtcttaataaagctgcgtgtttcacttcggcatcaaaacttgcttttgctgtggtttggcatttccctccacccacacatgtgacgaaaaggggaaacaagactgggtcctggccacaacttcagctgaggaacttggcacggccagcttgggacccaggaccctaacgcagaggcgctgtgtttggaagtcccgctatcacggccccccagatggggcctggacgatgcctcctgacggccttgttgcttctggccctggcgccaccgccggaagcctcccagtactgcggccgccttgaatactggaacccagacaacaagtgctgcagcagctgcctgcaacgcttcgggccgcccccctgcccggactatgagttccgggaaaactgcggactcaatgaccacggcgatttcgtaacgcccccgttccgaaagtgttcttctgggcagtgcaaccccgacggcgcggagctatgtagcccctgcggcggcggagccgtgacccctactcccgccgcgggcgggggcagaaccccgtggcgctgcagagagaggccggtccctgccaaggggcactgccccctcacacctggaaacccaggcgcccctagctcccaggagcgcagctcaccagcaagttccattgcctggaggacccctgagcctgtccctcagcaggcctggccgaatttccttccgctcgtggtgctggtcctgctcctgaccttggcggtgatagcgatcctcctgtttattctgctctggcatctctgctggcccaaggagaaagccgacccctatccctatcctggcttggtctgcggagtccccaacacccacaccccttcctcctcgcatctgtcctccccaggcgccctggagacaggggacacatggaaggaggcctcactacttccactcctgagcagggaactgtccagtctggcgtcacaacccctgtctcgcctcctggatgagctggaggtgctggaagagctgattgtactgctggaccctgagcctgggccaggtgggggtatggcccatggcactactcgacacctggccgcaagatatgggctgcctgctgcctggtccacctttgcctattcgctgaggccgagtcgctcgccgctgcgggctctgattgagatggtggtggcaagggagccctctgcctccctgggccagcttggcacacacctcgcccagctagggcgggcagatgcattgcgggtgctgtccaagcttggctcatctggggtttgctgggcttaacacccaataaagaactttgctgactactaagcccagta

SEQ ID NO: 353474 - DNA, 969 bp, Homo sapiens
ggctcaagtgatcctcctgtcttggcctcccaaagtgttgggattacaggcatgagccaccacacccagcccctgctttacttctaatgacggttctaattctccacaataaccctatgagacaggtgctatcattgtcttattttagggatggaaaagggagggtgggtgggtgaggacacggcagaggtgggatatgcattcttgcaatctagatccgcagccctgttagtcccctagtggccttgtgggcttctctgataaccggctcagttgggggatgagggctcgggggtagattcccggcttccgaagaggcgtgagaattctgttcccccacatcaccgcgtcctttcttctgcccgatttccccggaaagtgtagcagaggcgctgtgtttggaagtcccgctatcacggccccccagatggggcctggacgatgcctcctgacggccttgttgcttctggccctggcgccaccgccggaagcctcccagtactgcggccgccttgaatactggaacccagacaacaagtgctgcagcagctgcctgcaacgcttcgggccgcccccctgcccggaactgtccagtctggcgtcacaacccctgtctcgcctcctggatgagctggaggtgctggaagagctgattgtactgctggaccctgagcctgggccaggtgggggtatggcccatggcactactcgacacctggccgcaagatatgggctgcctgctgcctggtccacctttgcctattcgctgaggccgagtcgctcgccgctgcgggctctgattgagatggtggtggcaagggagccctctgcctccctgggccagcttggcacacacctcgcccagctagggcgggcagatgcattgcgggtgctgtccaagcttggctcatctggggtttgctgggcttaacacccaataaagaactttgctgactactaagcccagta

SEQ ID NO: 353475 - DNA, 1209 bp, Homo sapiens
gtaagagcagccagacctggagggcttgggtaaaaatggctgaatatttagcttcgatattcgggactgagaaggacaaatcggggtctgccggcacggggaccggtgctcccggcttcacaacaagccgacattcagccaggtgagacccggcacggagcctcgggggttaacggctccctggcccttccccttctggggccgtcgtcaccatgtcccgcctattccgggttcctgagtccctccccaccgcccggctttttttctcattggacctttctgcaggctcctcccaccggtcttcgtgccgttttcccgggaacttggtcgcgcccccatgcgtacaggctacacacggcggctgttcatctttgccagtcccttccatcccgctgttcatccttgccagtcccctccatcccttttctggtttcttaggggcaaaggatcgccgatgcactcatgatgcttaggctggggtgtaaggttccacccccaaccttcatgcctcactctctgttcatgcagccctgccctctgagctcaggccccgccccttttaaattctgtgcagaccatagtgctgctcaacctgtaccggaatccacagaacacagcccaaactgcagacggatcacactgtgagtaagggaccaggcctgggggcaaggtgaacagcccccagtaggctacactctgattccaccctgcccgcccccaccccaggtcatgtgagtgacgtggaggtgcaggagcactatgatagcttcttcgaggtgagggttggtaggggcagatggggtttcttgtgggagctcagctgagttcctccccgtcttccacaggaggtgttcacagaactgcaggagaagtatggggagattgaagagatgaatgtgtgcgacaaccttggggaccacctcgtgggcaacgtctatgtcaagttccggagggaggaggatggagagcgggccgtggctgaactcagtaaccgctggttcaacgggcaggctgtgcacgggaatgtacccgaggtggcttctgcaacttcatgcatctgcggcccatttcccagaacctccagaggcagctctatgggcggggacccaggcgcaggctggagtgcaaaggcgcagtcttggctcagtgcaacctctgcctcccaggttcaagcaattctcctttctcagcctcccaagtagctgggat

SEQ ID NO: 353476 - DNA, 373 bp, Homo sapiens
gtaagagcagccagacctggagggcttgggtaaaaatggctgaatatttagcttcgatattcgggactgagaaggacaaggttaactgctctttttactttaagatcggggtctgccggcacggggaccggtgctcccggcttcacaacaagccgacattcagccagaccatagtgctgctcaacctgtaccggaatccacagaacacagcccaaactgcagacggatcacactgaggtgttcacagaactgcaggagaagtatggggagattgaagagatgaatgtgtgcgacaaccttggggaccacctcgtgcagttcagtctgctgccccccacttagggccgtagccactgtagctctcagcttgaat

SEQ ID NO: 353477 - DNA, 3137 bp, Homo sapiens
cgagagccgggtgcacgcgccggggaggtagccaacagccgttgggacgcgacgctggttcccaggggagagccagccgctgccgcggcactggttcagacggccaggccctagggacccaccatggatcctgaacacgccaaacctgagtcatccgaggcaccttcagggaacttgaaacaaccggagactgccgcagccctggcaagtagcggcagcgtagtgagttctgtacccaaggcacagcgcaacatctcagcgaagaccgcaccccggaagcaccccgcagtctcaattcgcagtgcgcagtccgcagccgccgcacgtccccaaggcagtgagggcaccgcaccctcaaggaaagccaccacacgcccacccccaaagcccacactcccaccccccaggcgggctggggctgagcccggggccggggcgggggctccggggggaccatgcccggaggccggccggcagcagcatggctcacgggcccggcgcgctgatgctcaagtgcgtggtggtcggcgacggggcggtgggcaagacgtgcctactcatgagctatgccaacgacgccttcccggaggagtacgtgcccaccgtcttcgaccactacgcagtcagcgtcaccgtggggggcaagcagtacctcctaggactctatgacacggccggacaggaagactatgaccgtctgaggcctttatcttacccaatgaccgatgtcttccttatatgcttctcggtggtaaatccagcctcatttcaaaatgtgaaagaggagtgggtaccggaacttaaggaatacgcaccaaatgtaccctttttattaataggaactcagattgatctccgagatgaccccaaaactttagcaagactgaatgatatgaaagaaaaacctatatgtgtggaacaaggacagaaactagcaaaagagataggagcatgctgctatgtggaatgttcagctttaacccagaagggattgaagactgtttttgatgaggctatcatagccattttaactccaaagaaacacactgtaaaaaaaagaataggatcaagatgtataaactgttgtttaattacgtgagaaacatcttcagtggccaaggaaactgtccatttctctcagaaagcaaatgaaatgctacagctatacccagaccttttataggtaatgaagcagttcaaaacttgaaagaaaacaaaacctgtcctcagaattctataaagtgtattaagaatgttccttaaaggtttaagaagcagtaagcagcatctgaagccacaatctattataaatactttatttcaactagaaggtacaatctctcaggggtttcatagtttaaaaagctacaatcacatcatgttgtaactacgtaaaaaacagagctgtaaatggaactgcttggctttgaccatacacatttctgcccagcccttacagaatctgcacaaagaaatatctccctttgctccagttaattgttcttgtatgtaagttgctttctattccagtatatccagagtggtgaaataacaaggccagccacgtagccaaaggtcgctccaagcgtacaggagatgggccatacctgaggagagaatgtatgagatcaaaaaagaacaaatgttttattattacttgagcacaagtgtaacctaaatatttctatattaaagcttaatgtgctttcttaaagaatgccaaaagtgtaataaggtcataactgcatttatcatgaacactaaaaatgtacacattttagttaatgtgcattaaactgtaacaaggcttctggcaattgtagatttagtttgacgctccccaaagtgcatgagacacatgctaaaattacaaattaaaattttgggtcagactttgccataatgatagactcaatttagctctctgaactagttggtaattttttttttttaattcccactttggctgtgtacatcaaatgaaatgagaagtgtgtatgctgaccaaaccacaagaaactttctttaagttgtgttaaagaggaaagacctagaatccaagcgtgttacatgaaaattgtaacagagcagctgcttccacctttcagatatagatgttggaaccacagcagaagttatagagcgacaacttatatacacacctagaatgtaagttaaacaaaataccggcttccagagaccccttttctccagccatattacatcaggctagaagtaattaatgttgatttatttcatctacaagcagttggtccctaagtgaaaggctctgcttgaaaaaaaaaagaaaaaaaagttggaggaaaattttcatgttcttctgtgaagcttatttggtacactggagccatttctaatctttctctggggggaacaggccacagaactgtgttagaggtgaaccatcttaattactagttctattacctaattcagcttccttgtttggtctgctgtggatctgccttattgcatatgccatgcatcagataatggatgcatcagataatggtgttagacaaagcttcattgtgaacaacctaatgcattttagagaaacaatctcatcacattttttctagcctttcctacatttaaacttgctgttgcccaaattataattttttaaatgtctttggtgggcttctgttaattcacatgacttgagcttatagctatgtctactgcacagattgggtaatggaacactaaacttttatacttgaaaatgacagccttaaatgctcatatcagtcacaaatctaggatgtactgtcttgttgtatgtgagctttgtagagatttttaaaaatataagcatcaccttcccattgaagagtggagagagtctactggatgactggccaggaactttctctctgaatcggacatttggatgtcttctttcttccaagaaatggtggttcacattaaagtatcatggccttatgtatgctcaaatggaatcttatgtaactttcttatttaattttggtctgcttatttttagataaaattgaaaggaattgtataaatcaattaacatattagctgagttgtccaacacatggtataaacgaattacaacagtaaactattacacatttccaacttgc

SEQ ID NO: 353478 - DNA, 1004 bp, Homo sapiens
taccttcgtaagaaataagcatcctagccgagacttgattatttggttcaaatatttttaaagattgtagcactgaagtccatagtttaaaggcatgtgtggatttgttagggacaaaatcattgcatattagctttaaatattctcctacaaataaattacggcctaaaatacagacaccaccacaacggtcaaggcatgtaatgaaaacaatgtggggaaagaaatgaaatataataagtaatttagctattccaaagagacctaagctatgaccattttttaaaaagaaaagctatgttttagtttccagcaatgaaaagaatcatggtgtagtggggctctcatgtgaatcttaagtctccctcttcccacctgagtaatgctaagcaagatgtgtactcctcccctctcacacttggactttctagtgtataaaatgggagtaaaacctaccttgcactacggttgtcaggattaagttactcatttcacagtaccaagccccctgcagggtacatggagagatctataagtgctacgttttctttctactgtcatctgaaatgtcagacaggattgaaaattatgtgaaatccaaataccctaaattggcataactaaataccagagaaatagataaattaacagtccactctaccaactgaaagactgctgggcagaaaaaataaaacaacaaactgagacaattaacatattctctaatatatgagaactcaaataaatcatggaatttgcattttttgaaggctaaaaatatagtcattaaactatgtcttttctaggtcacaaatgcctgtaacattaattaagtaataaccatgtgtcaggtgctgagctaggtattttagagggattttattatttcatcctcactagcaagtgacaaagccaggatttcaacccagtaatctgatgccagaactcctaatcatcatgttacctgcctacccattaataaaacgtgagtttaaaaacctcat

SEQ ID NO: 353479 - DNA, 1019 bp, Homo sapiens
gaattgagcgggagttatgaggtgtgccgttcctgtaaaacatggaggctcagaacctaaaaatagcgtaaatgcctatttgactagttctagcagctgacacgcactgaagcattggatagcgctctcgtagttggcattatatggaccctatgtccagcatttccggatacctactcggtctcggtctattatactgcttggatgactctatgtaatcattggcaaagtatgagtccctatactctgttaaaaaaagctcactgttaaagtatagggagaatagtaatccctcatgaatcccagctagattccaatttgggttactaaattgtattttaatcattttgtaatttcagtatggctctttgttctcaaacacatacataccaccacgcacattcttttaaacagctgccacacctcacctccaacagaatgccaaaaatgaaatgttaaaaaattttgtctaatgaagggttacggcttggaacacttggttattcatgttatgtaaatcaagaagtgcatgccatcagcaaattaaaatgtggactggctttgaagactgttaatgatgggtcaggctttgtacttacaagagtacctccttggctttcctgaaataagcatttcttaatcgtaaccctgtcatttttttaaaagagaatttctttaagggccgttttcatgatttttgaagatcaaaatagattatcaaaatagggaacagcaaaaggagggaggctgcccactaagaactattcctcaagcaagtttcctactgattttcttataattattctaaaaatttttaaactacactatggcaacagaattcatttgtaaatcctagcttaatcaggtattttcataattagatcctaaggttttcctttaaaactatttccttatctcacatacagacatgtttctattcaacgttcttcatgccacaaataggattttttaaaaaagtgatatctattaaatacataattcagctgcactgctataaa

SEQ ID NO: 353480 - DNA, 5148 bp, Homo sapiens
cgagagccgggtgcacgcgccggggaggtagccaacagccgttgggacgcgacgctggttcccaggggagagccagccgctgccgcggcactggttcagacggccaggccctagggacccaccatggatcctgaacacgccaaacctgagtcatccgaggcaccttcagggaacttgaaacaaccggagactgccgcagccctggcaagtagcggcagcgtagtgagttctgtacccaaggcacagcgcaacatctcagcgaagaccgcaccccggaagcaccccgcagtctcaattcgcagtgcgcagtccgcagccgccgcacgtccccaaggcagtgagggcaccgcaccctcaaggaaagccaccacacgcccacccccaaagcccacactcccaccccccaggcgggctggggctgagcccggggccggggcgggggctccggggggaccatgcccggaggccggccggcagcagcatggctcacgggcccggcgcgctgatgctcaagtgcgtggtggtcggcgacggggcggtgggcaagacgtgcctactcatgagctatgccaacgacgccttcccggaggagtacgtgcccaccgtcttcgaccactacgcagtcagcgtcaccgtggggggcaagcagtacctcctaggactctatgacacggccggacaggaagactatgaccgtctgaggcctttatcttacccaatgaccgatgtcttccttatatgcttctcggtggtaaatccagcctcatttcaaaatgtgaaagaggagtgggtaccggaacttaaggaatacgcaccaaatgtaccctttttattaataggaactcagattgatctccgagatgaccccaaaactttagcaagactgaatgatatgaaagaaaaacctatatgtgtggaacaaggacagaaactagcaaaagagataggagcatgctgctatgtggaatgttcagctttaacccagaagggattgaagactgtttttgatgaggctatcatagccattttaactccaaagaaacacactgtaaaaaaaagaataggatcaagatgtataaactgttgtttaattacgtgagaaacatcttcagtggccaaggaaactgtccatttctctcagaaagcaaatgaaatgctacagctatacccagaccttttataggtaatgaagcagttcaaaacttgaaagaaaacaaaacctgtcctcagaattctataaagtgtattaagaatgttccttaaaggtttaagaagcagtaagcagcatctgaagccacaatctattataaatactttatttcaactagaaggtacaatctctcaggggtttcatagtttaaaaagctacaatcacatcatgttgtaactacgtaaaaaacagagctgtaaatggaactgcttggctttgaccatacacatttctgcccagcccttacagaatctgcacaaagaaatatctccctttgctccagttaattgttcttgtatgtaagttgctttctattccagtatatccagagtggtgaaataacaaggccagccacgtagccaaaggtcgctccaagcgtacaggagatgggccatacctgaggagagaatgtatgagatcaaaaaagaacaaatgttttattattacttgagcacaagtgtaacctaaatatttctatattaaagcttaatgtgctttcttaaagaatgccaaaagtgtaataaggtcataactgcatttatcatgaacactaaaaatgtacacattttagttaatgtgcattaaactgtaacaaggcttctggcaattgtagatttagtttgacgctccccaaagtgcatgagacacatgctaaaattacaaattaaaattttgggtcagactttgccataatgatagactcaatttagctctctgaactagttggtaattttttttttttaattcccactttggctgtgtacatcaaatgaaatgagaagtgtgtatgctgaccaaaccacaagaaactttctttaagttgtgttaaagaggaaagacctagaatccaagcgtgttacatgaaaattgtaacagagcagctgcttccacctttcagatatagatgttggaaccacagcagaagttatagagcgacaacttatatacacacctagaatgtaagttaaacaaaataccggcttccagagaccccttttctccagccatattacatcaggctagaagtaattaatgttgatttatttcatctacaagcagttggtccctaagtgaaaggctctgcttgaaaaaaaaaagaaaaaaaagttggaggaaaattttcatgttcttctgtgaagcttatttggtacactggagccatttctaatctttctctggggggaacaggccacagaactgtgttagaggtgaaccatcttaattactagttctattacctaattcagcttccttgtttggtctgctgtggatctgccttattgcatatgccatgcatcagataatggatgcatcagataatggtgttagacaaagcttcattgtgaacaacctaatgcattttagagaaacaatctcatcacattttttctagcctttcctacatttaaacttgctgttgcccaaattataattttttaaatgtctttggtgggcttctgttaattcacatgacttgagcttatagctatgtctactgcacagattgggtaatggaacactaaacttttatacttgaaaatgacagccttaaatgctcatatcagtcacaaatctaggatgtactgtcttgttgtatgtgagctttgtagagatttttaaaaatataagcatcaccttcccattgaagagtggagagagtctactggatgactggccaggaactttctctctgaatcggacatttggatgtcttctttcttccaagaaatggtggttcacattaaagtatcatggccttatgtatgctcaaatggaatcttatgtaactttcttatttaattttggtctgcttatttttagataaaattgaaaggaattgtataaatcaattaacatattagctgagttgtccaacacatggtataaacgaattacaacagtaaactattacacatttccaacttgcctttggggatttatgaggattttttttggtggggggagggggctccaattcatatctctgaaacccttcacacttggtttactaattcaaagttagaagtctagaatttgccctgccctaacagaaacagattaggaatttgtctacacaaactggtgtcacctgtttcttgactgggatttggtttcctcattataaatatgggaggtagaacagagatctccaacgtctctcccatttatcacagtaattttcttattcacagtaatcattgttggatgttaccttttcagcttcacattctcaagatggtaaaaatcatgtatatagattatcagaactctaagcaaagatgactgtcacatctgaagctgaggtgccttaggtactctactgaccttgatgggtttggagttccccattgcttatcaagagctttttaattgctttggttctttagtttttctttttgcaaaaatccttcctgtcactttaactaaaaaccaaagatttgttttctattgataagcagactagagaaaaactgccttattttcagaagcatgtcttcattcaaagcttaggcttcaatagaaattcagactaatcactgaaatgactatttcaaactagtgaaatatctgggaaataaactgcttcaaaaatattttactgacatgaattttgctagtgaatacaaatacactgcctcaaataaggccatgtatgaatgaacttacaagatatttgagttaatcagtgtttgcatatagagaattagttctaaagttcttaaaaataaatttaggggctccctgaaattttatttaatactttgctaacttacactcttgttttatctccacaggtacattttaggttagctcatggtgaattctatttacaataagtggagcttggattaatgggttttgttatgaattatcttagtgactttagacactgtttccatttgatttttaactatttaaaataccaaattaaataccagtttgttggttgttacttttaaatgattgttactttaacagtgtcccttcttaacacatggggttacaaataaaatactatgcatagtttactatctacgtaaagcactgaactttttaccttagtagtttttatttattaccctatgtaaacatttaggataatactctttcctctatttatgctgagagtctactaatcattggcaaagtatgagtccctatactctgttaaaaaaagctcactgttaaagtatagggagaatagtaatccctcatgaatcccagctagattccaatttgggttactaaattgtattttaatcattttgtaatttcagtatggctctttgttctcaaacacatacataccaccacgcacattcttttaaacagctgccacacctcacctccaacagaatgccaaaaatgaaatgttaaaaaattttgtctaatgaagggttacggcttggaacacttggttattcatgttatgtaaatcaagaagtgcatgccatcagcaaattaaaatgtggactggctttgaagactgttaatgatgggtcaggctttgtacttacaagagtacctccttggctttcctgaaataagcatttcttaatcgtaaccctgtcatttttttaaaagagaatttctttaagggccgttttcatgatttttgaagatcaaaatagattatcaaaatagggaacagcaaaaggagggaggctgcccactaagaactattcctcaagcaagtttcctactgattttcttataattattctaaaaatttttaaactacactatggcaacagaattcatttgtaaatcctagcttaatcaggtattttcataattagatcctaaggttttcctttaaaactatttccttatctcacatacagacatgtttctattcaacgttcttcatgccacaaataggattttttaaaaaagtgatatctattaaatacataattcagctgcactgctataaa

SEQ ID NO: 353481 - DNA, 3078 bp, Homo sapiens
cgagagccgggtgcacgcgccggggaggtagccaacagccgttgggacgcgacgctggttcccaggggagagccagccgctgccgcggcactggttcagacggccaggccctagggacccaccatggatcctgaacacgccaaacctgagtcatccgaggcaccttcagggaacttgaaacaaccggagactgccgcagccctggcaagtagcggcagcgtagtgagttctgtacccaaggcacagcgcaacatctcagcgaagaccgcaccccggaagcaccccgcagtctcaattcgcagtgcgcagtccgcagccgccgcacgtccccaaggcagtgagggcaccgcaccctcaaggaaagccaccacacgcccacccccaaagcccacactcccaccccccaggcgggctggggctgagcccggggccggggcgggggctccggggggaccatgcccggaggccggccggcagcagcatggctcacgggcccggcgcgctgatgctcaagtgcgtggtggtcggcgacggggcggtgggcaagacgtgcctactcatgagctatgccaacgacgccttcccggaggagtacgtgcccaccgtcttcgaccactacgcaggaagactatgaccgtctgaggcctttatcttacccaatgaccgatgtcttccttatatgcttctcggtggtaaatccagcctcatttcaaaatgtgaaagaggagtgggtaccggaacttaaggaatacgcaccaaatgtaccctttttattaataggaactcagattgatctccgagatgaccccaaaactttagcaagactgaatgatatgaaagaaaaacctatatgtgtggaacaaggacagaaactagcaaaagagataggagcatgctgctatgtggaatgttcagctttaacccagaagggattgaagactgtttttgatgaggctatcatagccattttaactccaaagaaacacactgtaaaaaaaagaataggatcaagatgtataaactgttgtttaattacgtgagaaacatcttcagtggccaaggaaactgtccatttctctcagaaagcaaatgaaatgctacagctatacccagaccttttataggtaatgaagcagttcaaaacttgaaagaaaacaaaacctgtcctcagaattctataaagtgtattaagaatgttccttaaaggtttaagaagcagtaagcagcatctgaagccacaatctattataaatactttatttcaactagaaggtacaatctctcaggggtttcatagtttaaaaagctacaatcacatcatgttgtaactacgtaaaaaacagagctgtaaatggaactgcttggctttgaccatacacatttctgcccagcccttacagaatctgcacaaagaaatatctccctttgctccagttaattgttcttgtatgtaagttgctttctattccagtatatccagagtggtgaaataacaaggccagccacgtagccaaaggtcgctccaagcgtacaggagatgggccatacctgaggagagaatgtatgagatcaaaaaagaacaaatgttttattattacttgagcacaagtgtaacctaaatatttctatattaaagcttaatgtgctttcttaaagaatgccaaaagtgtaataaggtcataactgcatttatcatgaacactaaaaatgtacacattttagttaatgtgcattaaactgtaacaaggcttctggcaattgtagatttagtttgacgctccccaaagtgcatgagacacatgctaaaattacaaattaaaattttgggtcagactttgccataatgatagactcaatttagctctctgaactagttggtaattttttttttttaattcccactttggctgtgtacatcaaatgaaatgagaagtgtgtatgctgaccaaaccacaagaaactttctttaagttgtgttaaagaggaaagacctagaatccaagcgtgttacatgaaaattgtaacagagcagctgcttccacctttcagatatagatgttggaaccacagcagaagttatagagcgacaacttatatacacacctagaatgtaagttaaacaaaataccggcttccagagaccccttttctccagccatattacatcaggctagaagtaattaatgttgatttatttcatctacaagcagttggtccctaagtgaaaggctctgcttgaaaaaaaaaagaaaaaaaagttggaggaaaattttcatgttcttctgtgaagcttatttggtacactggagccatttctaatctttctctggggggaacaggccacagaactgtgttagaggtgaaccatcttaattactagttctattacctaattcagcttccttgtttggtctgctgtggatctgccttattgcatatgccatgcatcagataatggatgcatcagataatggtgttagacaaagcttcattgtgaacaacctaatgcattttagagaaacaatctcatcacattttttctagcctttcctacatttaaacttgctgttgcccaaattataattttttaaatgtctttggtgggcttctgttaattcacatgacttgagcttatagctatgtctactgcacagattgggtaatggaacactaaacttttatacttgaaaatgacagccttaaatgctcatatcagtcacaaatctaggatgtactgtcttgttgtatgtgagctttgtagagatttttaaaaatataagcatcaccttcccattgaagagtggagagagtctactggatgactggccaggaactttctctctgaatcggacatttggatgtcttctttcttccaagaaatggtggttcacattaaagtatcatggccttatgtatgctcaaatggaatcttatgtaactttcttatttaattttggtctgcttatttttagataaaattgaaaggaattgtataaatcaattaacatattagctgagttgtccaacacatggtataaacgaattacaacagtaaactattacacatttccaacttgc

SEQ ID NO: 353482 - DNA, 3691 bp, Homo sapiens
cgagagccgggtgcacgcgccggggaggtagccaacagccgttgggacgcgacgctggttcccaggggagagccagccgctgccgcggcactggttcagacggccaggccctagggacccaccatggatcctgaacacgccaaacctgagtcatccgaggcaccttcagggaacttgaaacaaccggagactgccgcagccctggcaagtagcggcagcgtagtgagttctgtacccaaggcacagcgcaacatctcagcgaagaccgcaccccggaagcaccccgcagtctcaattcgcagtgcgcagtccgcagccgccgcacgtccccaaggcagtgagggcaccgcaccctcaaggaaagccaccacacgcccacccccaaagcccacactcccaccccccaggcgggctggggctgagcccggggccggggcgggggctccggggggaccatgcccggaggccggccggcagcagcatggctcacgggcccggcgcgctgatgctcaagtgcgtggtggtcggcgacggggcggtgggcaagacgtgcctactcatgagctatgccaacgacgccttcccggaggagtacgtgcccaccgtcttcgaccactacgcagtcagcgtcaccgtggggggcaagcagtacctcctaggactctatgacacggccggacaggaagactatgaccgtctgaggcctttatcttacccaatgaccgatgtcttccttatatgcttctcggtggtaaatccagcctcatttcaaaatgtgaaagaggagtgggtaccggaacttaaggaatacgcaccaaatgtaccctttttattaataggaactcagattgatctccgagatgaccccaaaactttagcaagactgaatgatatgaaagaaaaacctatatgtgtggaacaaggacagaaactagcaaaagagataggagcatgctgctatgtggaatgttcagctttaacccagaagggattgaagactgtttttgatgaggctatcatagccattttaactccaaagaaacacactgtaaaaaaaagaataggatcaagatgtataaactgttgtttaattacgtgagaaacatcttcagtggccaaggaaactgtccatttctctcagaaagcaaatgaaatgctacagctatacccagaccttttataggtaatgaagcagttcaaaacttgaaagaaaacaaaacctgtcctcagaattctataaagtgtattaagaatgttccttaaaggtttaagaagcagtaagcagcatctgaagccacaatctattataaatactttatttcaactagaaggtacaatctctcaggggtttcatagtttaaaaagctacaatcacatcatgttgtaactacgtaaaaaacagagctgtaaatggaactgcttggctttgaccatacacatttctgcccagcccttacagaatctgcacaaagaaatatctccctttgctccagttaattgttcttgtatgtaagttgctttctattccagtatatccagagtggtgaaataacaaggccagccacgtagccaaaggtcgctccaagcgtacaggagatgggccatacctgaggagagaatgtatgagatcaaaaaagaacaaatgttttattattacttgagcacaagtgtaacctaaatatttctatattaaagcttaatgtgctttcttaaagaatgccaaaagtgtaataaggtcataactgcatttatcatgaacactaaaaatgtacacattttagttaatgtgcattaaactgtaacaaggcttctggcaattgtagatttagtttgacgctccccaaagtgcatgagacacatgctaaaattacaaattaaaattttgggtcagactttgccataatgatagactcaatttagctctctgaactagttggtaattttttttttttaattcccactttggctgtgtacatcaaatgaaatgagaagtgtgtatgctgaccaaaccacaagaaactttctttaagttgtgttaaagaggaaagacctagaatccaagcgtgttacatgaaaattgtaacagagcagctgcttccacctttcagatatagatgttggaaccacagcagaagttatagagcgacaacttatatacacacctagaatgtaagttaaacaaaataccggcttccagagaccccttttctccagccatattacatcaggctagaagtaattaatgttgatttatttcatctacaagcagttggtccctaagtgaaaggctctgcttgaaaaaaaaaagaaaaaaaagttggaggaaaattttcatgttcttctgtgaagcttatttggtacactggagccatttctaatctttctctggggggaacaggccacagaactgtgttagaggtgaaccatcttaattactagttctattacctaattcagcttccttgtttggtctgctgtggatctgccttattgcatatgccatgcatcagataatggatgcatcagataatggtgttagacaaagcttcattgtgaacaacctaatgcattttagagaaacaatctcatcacattttttctagcctttcctacatttaaacttgctgttgcccaaattataattttttaaatgtctttggtgggcttctgttaattcacatgacttgagcttatagctatgtctactgcacagattgggtaatggaacactaaacttttatacttgaaaatgacagccttaaatgctcatatcagtcacaaatctaggatgtactgtcttgttgtatgtgagctttgtagagatttttaaaaatataagcatcaccttcccattgaagagtggagagagtctactggatgactggccaggaactttctctctgaatcggacatttggatgtcttctttcttccaagaaatggtggttcacattaaagtatcatggccttatgtatgctcaaatggaatcttatgtaactttcttatttaattttggtctgcttatttttagataaaattgaaaggaattgtataaatcaattaacatattagctgagttgtccaacacatggtataaacgaattacaacagtaaactattacacatttccaacttgcaaaaaaaaaaagaaacaaaaaaaaataacaacaaaaagagaacaaacaataaataataaaacaataaaaaaacaaaaacaagaaaaagaagaaggggcggggcgcgggcataataaaagaatacctcccggagggaggccgccatattagtaggcgcaacaccacagttttttgttagaaaaaaggggggcgccccacatagggagggaggcttaattataaaacacgagcagacggcgcgggccgggttaaaaaaacaccgtggcgagcggggagaaagacaaacctgtgtagcgcggagatcacttctgggagagaaagcgacccccaactctgtggaggcggggagagccaaactatggtggggcggcaaccccctcctcaaggagagaattattagcccgccgaggcgggggaaacaaaatacacttgacagtgcggtgtgtctgggggggttcaacccaaccaccgtcgatattgcattgaggctgtgtaaagagaactatgttggtgcaccagagaattccttgctacaggaataattatacaacggg

SEQ ID NO: 353483 - DNA, 3078 bp, Homo sapiens
cgagagccgggtgcacgcgccggggaggtagccaacagccgttgggacgcgacgctggttcccaggggagagccagccgctgccgcggcactggttcagacggccaggccctagggacccaccatggatcctgaacacgccaaacctgagtcatccgaggcaccttcagggaacttgaaacaaccggagactgccgcagccctggcaagtagcggcagcgtagtgagttctgtacccaaggcacagcgcaacatctcagcgaagaccgcaccccggaagcaccccgcagtctcaattcgcagtgcgcagtccgcagccgccgcacgtccccaaggcagtgagggcaccgcaccctcaaggaaagccaccacacgcccacccccaaagcccacactcccaccccccaggcgggctggggctgagcccggggccggggcgggggctccggggggaccatgcccggaggccggccggcagcagcatggctcacgggcccggcgcgctgatgctcaagtgcgtggtggtcggcgacggggcggtgggcaagacgtgcctactcatgagctatgccaacgacgccttcccggaggagtacgtgcccaccgtcttcgaccactacgcagtcagcgtcaccgtggggggcaagcagtacctcctaggactctatgacacggccggacaggaagactatgaccgtctgaggcctttatcttacccaatgaccgatgtcttccttatatgcttctcggtggtaaatccagcctcatttcaaaatgtgaaagaggagtgggtaccggaacttaaggaatacgcaccaaatgtaccctttttattaataggaactcagattgatctccgagatgaccccaaaactttagcaagactgaatgatatgaaagaaaaacctatatgtgtggaacaaggacagaaactagcaaaagagataggagcatgctgctatgtggaatgttcagctttaacccagaagggattgaagactgtttttgatgaggctatcatagccattttaactccaaagaaacacactgtaaaaaaaagaataggatcaagatgtataaactgttgtttaattacgtgagaaacatcttcagtggccaaggaaactgtccatttctctcagaaagcaaatgaaatgctacagctatacccagaccttttataggtaatgaagcagttcaaaacttgaaagaaaacaaaacctgtcctcagaattctataaagtgtattaagaatgttccttaaaggtttaagaagcagtaagcagcatctgaagccacaatctattataaatactttatttcaactagaaggtacaatctctcaggggtttcatagtttaaaaagctacaatcacatcatgttgtaactacgtaaaaaacagagctgtaaatggaactgcttggctttgaccatacacatttctgcccagcccttacagaatctgcacaaagaaatatctccctttgctccagttaattgttcttgtatgtaagttgctttctattccagtatatccagagtggtgaaataacaaggccagccacgtagccaaaggtcgctccaagcgtacaggagatgggccatacctgaggagagaatgtatgagatcaaaaaagaacaaatgttttattattacttgagcacaagtgtaacctaaatatttctatattaaagcttaatgtgctttcttaaagaatgccaaaagtgtaataaggtcataactgcatttatcatgaacactaaaaatgtacacattttagttaatgtgcattaaactgtaacaaggcttctggcaattgtagatttagtttgacgctccccaaagtgcatgagacacatgctaaaattacaaattaaaattttgggtcagactttgccataatgatagactcaatttagctctctgaactagttggtaattttttttttttaattcccactttggctgtgtacatcaaatgaaatgagaagtgtgtatgctgaccaaaccacaagaaactttctttaagttgtgttaaagaggaaagacctagaatccaagcgtgttacatgaaaattgtaacagagcagctgcttccacctttcagatatagatgttggaaccacagcagaagttatagagcgacaacttatatacacacctagaatgtaagttaaacaaaataccggcttccagagaccccttttctccagccatattacatcaggctagaagtaattaatgttgatttatttcatctacaagcagttggtccctaagtgaaaggctctgcttgaaaaaaaaaagaccatttctaatctttctctggggggaacaggccacagaactgtgttagaggtgaaccatcttaattactagttctattacctaattcagcttccttgtttggtctgctgtggatctgccttattgcatatgccatgcatcagataatggatgcatcagataatggtgttagacaaagcttcattgtgaacaacctaatgcattttagagaaacaatctcatcacattttttctagcctttcctacatttaaacttgctgttgcccaaattataattttttaaatgtctttggtgggcttctgttaattcacatgacttgagcttatagctatgtctactgcacagattgggtaatggaacactaaacttttatacttgaaaatgacagccttaaatgctcatatcagtcacaaatctaggatgtactgtcttgttgtatgtgagctttgtagagatttttaaaaatataagcatcaccttcccattgaagagtggagagagtctactggatgactggccaggaactttctctctgaatcggacatttggatgtcttctttcttccaagaaatggtggttcacattaaagtatcatggccttatgtatgctcaaatggaatcttatgtaactttcttatttaattttggtctgcttatttttagataaaattgaaaggaattgtataaatcaattaacatattagctgagttgtccaacacatggtataaacgaattacaacagtaaactattacacatttccaacttgc

SEQ ID NO: 353484 - DNA, 2768 bp, Homo sapiens
tctctgctcaaataccacatcctcagtgtgatcttgttccttgactgctccaggcatgctcctgcatcaggatctatctgcctggagctcttcccctaggtatccctcactgctcaaacttccccattgagaagcctccccggacccccactaccattgtcctcagcactccccgcctccctcactctgctttttccccacagcatttgcaaccatctgctctgtattccctcccctgtgcctcttacccagcagatgtcagcacatgtggacgccacacagcagggactctgctctttcgttcagttcactgacatatccccaggacctaaacagtgcttgacatatagtagatacccagtaaatatgtggtgagtgaaataatttttcatagaaagtctggaaggacatatactagtattttaaaatcccctctggggttatgaacatggatgatgaatgtattctttttgcatagctgtattttataattttctttataatgatgtgtttatgtcatgccaattgtataaacatgatcttatatatttgtgattttttttctccctcccagataggagcatgctgctatgtggaatgttcagctttaacccagaagggattgaagactgtttttgatgaggctatcatagccattttaactccaaagaaacacactgtaaaaaaaagaataggatcaagatgtataaactgttgtttaattacgtgagaaacatcttcagtggccaaggaaactgtccatttctctcagaaagcaaatgaaatgctacagctatacccagaccttttataggtaatgaagcagttcaaaacttgaaagaaaacaaaacctgtcctcagaattctataaagtgtattaagaatgttccttaaaggtttaagaagcagtaagcagcatctgaagccacaatctattataaatactttatttcaactagaaggtacaatctctcaggggtttcatagtttaaaaagctacaatcacatcatgttgtaactacgtaaaaaacagagctgtaaatggaactgcttggctttgaccatacacatttctgcccagcccttacagaatctgcacaaagaaatatctccctttgctccagttaattgttcttgtatgtaagttgctttctattccagtatatccagagtggtgaaataacaaggccagccacgtagccaaaggtcgctccaagcgtacaggagatgggccatacctgaggagagaatgtatgagatcaaaaaagaacaaatgttttattattacttgagcacaagtgtaacctaaatatttctatattaaagcttaatgtgctttcttaaagaatgccaaaagtgtaataaggtcataactgcatttatcatgaacactaaaaatgtacacattttagttaatgtgcattaaactgtaacaaggcttctggcaattgtagatttagtttgacgctccccaaagtgcatgagacacatgctaaaattacaaattaaaattttgggtcagactttgccataatgatagactcaatttagctctctgaactagttggtaattttttttttttaattcccactttggctgtgtacatcaaatgaaatgagaagtgtgtatgctgaccaaaccacaagaaactttctttaagttgtgttaaagaggaaagacctagaatccaagcgtgttacatgaaaattgtaacagagcagctgcttccacctttcagatatagatgttggaaccacagcagaagttatagagcgacaacttatatacacacctagaatgtaagttaaacaaaataccggcttccagagaccccttttctccagccatattacatcaggctagaagtaattaatgttgatttatttcatctacaagcagttggtccctaagtgaaaggctctgcttgaaaaaaaaaagaaaaaaaagttggaggaaaattttcatgttcttctgtgaagcttatttggtacactggagccatttctaatctttctctggggggaacaggccacagaactgtgttagaggtgaaccatcttaattactagttctattacctaattcagcttccttgtttggtctgctgtggatctgccttattgcatatgccatgcatcagataatggatgcatcagataatggtgttagacaaagcttcattgtgaacaacctaatgcattttagagaaacaatctcatcacattttttctagcctttcctacatttaaacttgctgttgcccaaattataattttttaaatgtctttggtgggcttctgttaattcacatgacttgagcttatagctatgtctactgcacagattgggtaatggaacactaaacttttatacttgaaaatgacagccttaaatgctcatatcagtcacaaatctaggatgtactgtcttgttgtatgtgagctttgtagagatttttaaaaatataagcatcaccttcccattgaagagtggagagagtctactggatgactggccaggaactttctctctgaatcggacatttggatgtcttctttcttccaagaaatggtggttcacattaaagtatcatggccttatgtatgctcaaatggaatcttatgtaactttcttatttaattttggtctgcttatttttagataaaattgaaaggaattgtataaatcaattaacatattagctgagttgtccaacacatggtataaacgaattacaacagtaaactattacacatttccaacttgc

SEQ ID NO: 353485 - DNA, 3082 bp, Homo sapiens
cgagagccgggtgcacgcgccggggaggtagccaacagccgttgggacgcgacgctggttcccaggggagagccagccgctgccgcggcactggttcagacggccaggccctagggacccaccatggatcctgaacacgccaaacctgagtcatccgaggcaccttcagggaacttgaaacaaccggagactgccgcagccctggcaagtagcggcagcgtagtgagttctgtacccaaggcacagcgcaacatctcagcgaagaccgcaccccggaagcaccccgcagtctcaattcgcagtgcgcagtccgcagccgccgcacgtccccaaggcagtgagggcaccgcaccctcaaggaaagccaccacacgcccacccccaaagcccacactcccaccccccaggcgggctggggctgagcccggggccggggcgggggctccggggggaccatgcccggaggccggccggcagcagcatggctcacgggcccggcgcgctgatgctcaagtgcgtggtggtcggcgacggggcggtgggcaagacgtgcctactcatgagctatgccaacgacgccttcccggaggagtacgtgcccaccgtcttcgaccactacgcagtcagcgtcaccgtggggggcaagcagtacctcctaggactctatgacacggccggacaggaagactatgaccgtctgaggcctttatcttacccaatgaccgatgtcttccttatatgcttctcggtggtaaatccagcctcatttcaaaatgtgaaagaggagtgggtaccggaacttaaggaatacgcaccaaatgtaccctttttattaataggaactcagattgatctccgagatgaccccaaaactttagcaagactgaatgatatgaaagaaaaacctatatgtgtggaacaaggacagaaactagcaaaagagataggagcatgctgctatgtggaatgttcagctttaacccagaagggattgaagactgtttttgatgaggctatcatagccattttaactccaaagaaacacactgtaaaaaaaagaataggatcaagatgtataaactgttgtttaattacgtgagaaacatcttcagtggccaaggaaactgtccatttctctcagaaagcaaatgaaatgctacagctatacccagaccttttataggtaatgaagcagttcaaaacttgaaagaaaacaaaacctgtcctcagaattctataaagtgtattaagaatgttccttaaaggtttaagaagcagtaagcagcatctgaagccacaatctattataaatactttatttcaactagaaggtacaatctctcaggggtttcatagtttaaaaagctacaatcacatcatgttgtaactacgtaaaaaacagagctgtaaatggaactgcttggctttgaccatacacatttctgcccagcccttacagaatctgcacaaagaaatatctccctttgctccagttaattgttcttgtatgtaagttgctttctattccagtatatccagagtggtgaaataacaaggccagccacgtagccaaaggtcgctccaagcgtacaggagatgggccatacctgaggagagaatgtatgagatcaaaaaagaacaaatgttttattattacttgagcacaagtgtaacctaaatatttctatattaaagcttaatgtgctttcttaaagaatgccaaaagtgtaataaggtcataactgcatttatcatgaacactaaaaatgtacacattttagttaatgtgcattaaactgtaacaaggcttctggcaattgtagatttagtttgacgctccccaaagtgcatgagacacatgctaaaattacaaattaaaattttgggtcagactttgccataatgatagactcaatttagctctctgaactagttggtaattttttttttttaattcccactttggctgtgtacatcaaatgaaatgagaagtgtgtatgctgaccaaaccacaagaaactttctttaagttgtgttaaagaggaaagacctagaatccaagcgtgttacatgaaaattgtaacagagcagctgcttccacctttcagatatagatgttggaaccacagcagaagttatagagcgacaacttatatacacacctagaatgtaagttaaacaaaataccggcttccagagaccccttttctccagccatattacatcaggctagaagtaattaatgttgatttatttcatctacaagcagttggtccctaagtgaaaggctctgcttgaaaaaaaaaagaaaaaaaagttggaggaaaattttcatgttcttctgtgaagcttatttggtacactggagccatttctaatctttctctggggggaacaggccacagaactgtgttagaggtgaaccatcttaattactagttctattacctaattcagcttccttgtttggtctgctgtggatctgccttattgcatatgccatgcatcagataatggatgcatcagataatggtgttagacaaagcttcattgtgaacaacctaatgcattttagagaaacaatctcatcacattttttctagcctttcctacatttaaacttgctgttgcccaaattataattttttaaatgtctttggtgggcttctgttaattcacatgacttgagcttatagctatgtctactgcacagattgggtaatggaacactaaacttttatacttgaaaatgacagccttaaatgctcatatcagtcacaaatctaggatgtactgtcttgttgtatgtgagctttgtagagatttttaaaaatataagcatcaccttcccattgaagagtggagagagtctactggatgactggccaggaactttctctctgaatcggacatttggatgtcttctttcttccaagaaatggtggttcacattaaagtatcatggccttatgtatgctcaaatggaatcttatgtaactttcttatttaattttggtctgcttatttttagatatggtataaacgaattacaacagtaaactattacacatttccaacttgc

SEQ ID NO: 353486 - DNA, 2565 bp, Homo sapiens
tctctgctcaaataccacatcctcagtgtgatcttgttccttgactgctccaggcatgctcctgcatcaggatctatctgcctggagctcttcccctaggtatccctcactgctcaaacttccccattgagaagcctccccggacccccactaccattgtcctcagcactccccgcctccctcactctgctttttccccacagcatttgcaaccatctgctctgtattccctcccctgtgcctcttacccagcagatgtcagcacatgtggacgccacacagcagggactctgctctttcgttcagttcactgacatatccccaggacctaaacagtgcttgacatatagtagatacccagtaaatatgtgataggagcatgctgctatgtggaatgttcagctttaacccagaagggattgaagactgtttttgatgaggctatcatagccattttaactccaaagaaacacactgtaaaaaaaagaataggatcaagatgtataaactgttgtttaattacgtgagaaacatcttcagtggccaaggaaactgtccatttctctcagaaagcaaatgaaatgctacagctatacccagaccttttataggtaatgaagcagttcaaaacttgaaagaaaacaaaacctgtcctcagaattctataaagtgtattaagaatgttccttaaaggtttaagaagcagtaagcagcatctgaagccacaatctattataaatactttatttcaactagaaggtacaatctctcaggggtttcatagtttaaaaagctacaatcacatcatgttgtaactacgtaaaaaacagagctgtaaatggaactgcttggctttgaccatacacatttctgcccagcccttacagaatctgcacaaagaaatatctccctttgctccagttaattgttcttgtatgtaagttgctttctattccagtatatccagagtggtgaaataacaaggccagccacgtagccaaaggtcgctccaagcgtacaggagatgggccatacctgaggagagaatgtatgagatcaaaaaagaacaaatgttttattattacttgagcacaagtgtaacctaaatatttctatattaaagcttaatgtgctttcttaaagaatgccaaaagtgtaataaggtcataactgcatttatcatgaacactaaaaatgtacacattttagttaatgtgcattaaactgtaacaaggcttctggcaattgtagatttagtttgacgctccccaaagtgcatgagacacatgctaaaattacaaattaaaattttgggtcagactttgccataatgatagactcaatttagctctctgaactagttggtaattttttttttttaattcccactttggctgtgtacatcaaatgaaatgagaagtgtgtatgctgaccaaaccacaagaaactttctttaagttgtgttaaagaggaaagacctagaatccaagcgtgttacatgaaaattgtaacagagcagctgcttccacctttcagatatagatgttggaaccacagcagaagttatagagcgacaacttatatacacacctagaatgtaagttaaacaaaataccggcttccagagaccccttttctccagccatattacatcaggctagaagtaattaatgttgatttatttcatctacaagcagttggtccctaagtgaaaggctctgcttgaaaaaaaaaagaaaaaaaagttggaggaaaattttcatgttcttctgtgaagcttatttggtacactggagccatttctaatctttctctggggggaacaggccacagaactgtgttagaggtgaaccatcttaattactagttctattacctaattcagcttccttgtttggtctgctgtggatctgccttattgcatatgccatgcatcagataatggatgcatcagataatggtgttagacaaagcttcattgtgaacaacctaatgcattttagagaaacaatctcatcacattttttctagcctttcctacatttaaacttgctgttgcccaaattataattttttaaatgtctttggtgggcttctgttaattcacatgacttgagcttatagctatgtctactgcacagattgggtaatggaacactaaacttttatacttgaaaatgacagccttaaatgctcatatcagtcacaaatctaggatgtactgtcttgttgtatgtgagctttgtagagatttttaaaaatataagcatcaccttcccattgaagagtggagagagtctactggatgactggccaggaactttctctctgaatcggacatttggatgtcttctttcttccaagaaatggtggttcacattaaagtatcatggccttatgtatgctcaaatggaatcttatgtaactttcttatttaattttggtctgcttatttttagataaaattgaaaggaattgtataaatcaattaacatattagctgagttgtccaacacatggtataaacgaattacaacagtaaactattacacatttccaacttgc

SEQ ID NO: 353487 - DNA, 2980 bp, Homo sapiens
cgagagccgggtgcacgcgccggggaggtagccaacagccgttgggacgcgacgctggttcccaggggagagccagccgctgccgcggcactggttcagacggccaggccctagggacccaccatggatcctgaacacgccaaacctgagtcatccgaggcaccttcagggaacttgaaacaaccggagactgccgcagccctggcaagtagcggcagcgtagtgagttctgtacccaaggcacagcgcaacatctcagcgaagaccgcaccccggaagcaccccgcagtctcaattcgcagtgcgcagtccgcagccgccgcacgtccccaaggcagtgagggcaccgcaccctcaaggaaagccaccacacgcccacccccaaagcccacactcccaccccccaggcgggctggggctgagcccggggccggggcgggggctccggggggaccatgcccggaggccggccggcagcagcatggctcacgggcccggcgcgctgatgctcaagtgcgtggtggtcggcgacggggcggtgggcaagacgtgcctactcatgagctatgccaacgacgccttcccggaggagtacgtgcccaccgtcttcgaccactacgcagtcagcgtcaccgtggggggcaagcagtacctcctaggactctatgacacggccggacaggaagactatgaccgtctgaggcctttatcttacccaatgaccgatgtcttccttatatgcttctcggtggtaaatccagcctcatttcaaaatgtgaaagaggagtgggtaccggaacttaaggaatacgcaccaaatgtaccctttttattaataggaactcagattgatctccgagatgaccccaaaactttagcaagactgaatgatatgaaagaaaaacctatatgtgtggaacaaggacagaaactagcaaaagagataggagcatgctgctatgtggaatgttcagctttaacccagaagggattgaagactgtttttgatgaggctatcatagccattttaactccaaagaaacacactgtaaaaaaaagaataggatcaagatgtataaactgttgtttaattacgtgagaaacatcttcagtggccaaggaaactgtccatttctctcagaaagcaaatgaaatgctacagctatacccagaccttttataggtaatgaagcagttcaaaacttgaaagaaaacaaaacctgtcctcagaattctataaagtgtattaagaatgttccttaaaggtttaagaagcagtaagcagcatctgaagccacaatctattataaatactttatttcaactagaaggtacaatctctcaggggtttcatagtttaaaaagctacaatcacatcatgttgtaactacgtaaaaaacagagctgtaaatggaactgcttggctttgaccatacacatttctgcccagcccttacagaatctgcacaaagaaatatctccctttgctccagttaattgttcttgtatgtaagttgctttctattccagtatatccagagtggtgaaataacaaggccagccacgtagccaaaggtcgctccaagcgtacaggagatgggccatacctgaggagagaatgtatgagatcaaaaaagaacaaatgttttattattacttgagcacaagtgtaacctaaatatttctatattaaagcttaatgtgctttcttaaagaatgccaaaagtgtaataaggtcataactgcatttatcatgaacactaaaaatgtacacattttagttaatgtgcattaaactgtaacaaggcttctggcaattgtagatttagtttgacgctccccaaagtgcatgagacacatgctaaaattacaaattaaaattttgggtcagactttgccataatgatagactcaatttagctctctgaactagttggtaattttttttttttaattcccactttggctgtgtacatcaaatgaaatgagaagtgtgtatgctgaccaaaccacaagaaactttctttaagttgtgttaaagaggaaagacctagaatccaagcgtgttacatgaaaattgtaacagagcagctgcttccacctttcagatatagatgttggaaccacagcagaagttatagagcgacaacttatatacacacctagaatgtaagttaaacaaaataccggcttccagagaccccttttctccagccatattacatcaggctagaagtaattaatgttgatttatttcatctacaagcagttggtccctaagtgaaaggctctgcttgaaaaaaaaaagaaaaaaaagttggaggaaaattttcatgttcttctgtgaagcttatttggtacactggagccatttctaatctttctctggggggaacaggccacagaactgtgttagaggtgaaccatcttaattactagttctattacctaattcagcttccttgtttggtctgctgtggatctgccttattgcatatgccatgcatcagataatggatgcatcagataatggtgttagacaaagcttcattgtgaacaacctaatgcattttagagaaacaatctcatcacattttttctagcctttcctacatttaaacttgctgttgcccaaattataattttttaaatgtctttggtgggcttctgttaattcacatgacttgagcttatagctatgtctactgcacagattgggtaatggaacactaaacttttatacttgaaaatgacagccttaaatgctcatatcagtcacaaatctaggatgtactgtcttgttgtatgtgagctttgtagagatttttaaaaatataagcatcaccttcccattgaagagtggagagagtctactggatgactggccaggaactttctctctgaatcggacatttggatgtcttctttcttccaagaaatggtggttcacattaaagtatcatggccttatgtatgctca

SEQ ID NO: 353488 - DNA, 2626 bp, Homo sapiens
cgagagccgggtgcacgcgccggggaggtagccaacagccgttgggacgcgacgctggttcccaggggagagccagccgctgccgcggcactggttcagacggccaggccctagggacccaccatggatcctgaacacgccaaacctgagtcatccgaggcaccttcagggaacttgaaacaaccggagactgccgcagccctggcaagtagcggcagcgtagtgagttctgtacccaaggcacagcgcaacatctcagcgaagaccgcaccccggaagcaccccgcagtctcaattcgcagtgcgcagtccgcagccgccgcacgtccccaaggcagtgagggcaccgcaccctcaaggaaagccaccacacgcccacccccaaagcccacactcccaccccccaggcgggctggggctgagcccggggccggggcgggggctccggggggaccatgcccggaggccggccggcagcagcatggctcacgggcccggcgcgctgatgctcaagtgcgtggtggtcggcgacggggcggtgggcaagacgtgcctactcatgagctatgccaacgacgccttcccggaggagtacgtgcccaccgtcttcgaccactacgcagtcagcgtcaccgtggggggcaagcagtacctcctaggactctatgacacggccggacaggaagactatgaccgtctgaggcctttatcttacccaatgaccgatgtcttccttatatgcttctcggtggtaaatccagcctcatttcaaaatgtgaaagaggagtgggtaccggaacttaaggaatacgcaccaaatgtaccctttttattaataggaactcagattgatctccgagatgaccccaaaactttagcaagactgaatgatatgaaagaaaaacctatatgtgtggaacaaggacagaaactagcaaaagagataggagcatgctgctatgtggaatgttcagctttaacccagaagggattgaagactgtttttgatgaggctatcatagccattttaactccaaagaaacacactgtaaaaaaaagaataggatcaagatgtataaactgttgtttaattacgtgagaaacatcttcagtggccaaggaaactgtccatttctctcagaaagcaaatgaaatgctacagctatacccagaccttttataggtaatgaagcagttcaaaacttgaaagaaaacaaaacctgtcctcagaattctataaagtgtattaagaatgttccttaaaggtttaagaagcagtaagcagcatctgaagccacaatctattataaatactttatttcaactagaaggtacaatctctcaggggtttcatagtttaaaaagctacaatcacatcatgttgtaactacgtaaaaaacagagctgtaaatggaactgcttggctttgaccatacacatttctgcccagcccttacagaatctgcacaaagaaatatctccctttgctccagttaattgttcttgtatgtaagttgctttctattccagtatatccagagtggtgaaataacaaggccagccacgtagccaaaggtcgctccaagcgtacaggagatgggccatacctgaggagagaatgtatgagatcaaaaaagaacaaatgttttattattacttgagcacaagtgtaacctaaatatttctatattaaagcttaatgtgctttcttaaagaatgccaaaagtgtaataaggtcataactgcatttatcatgaacactaaaaatgtacacattttagttaatgtgcattaaactgtaacaaggcttctggcaattgtagatttagtttgacgctccccaaagtgcatgagacacatgctaaaattacaaattaaaattttgggtcagactttgccataatgatagactcaatttagctctctgaactagttggtaattttttttttttaattcccactttggctgtgtacatcaaatgaaatgagaagtgtgtatgctgaccaaaccacaagaaactttctttaagttgtgttaaagaggaaagacctagaatccaagcgtgttacatgaaaattgtaacagagcagctgcttccacctttcagatatagatgttggaaccacagcagaagttatagagcgacaacttatatacacacctagaatgtaagttaaacaaaataccggcttccagagaccccttttctccagccatattacatcaggctagaagtaattaatgttgatttatttcatctacaagcagttggtccctaagtgaaaggctctgcttgaaaaaaaaaagaaaaaaaagttggaggaaaattttcatgttcttctgtgaagcttatttggtacactggagccatttctaatctttctctggggggaacaggccacagaactgtgttagaggtgaaccatcttaattactagttctattacctaattcagcttccttgtttggtctacctggccaggtagacctaacccaggtaacctacataaacgcagcaagaaacttaagacataaaaaccatgggaaagctcactgtaaaaatattatcaaaatatttctacataagaattttgctttcatttttagttagtctaccaggggtac

SEQ ID NO: 353489 - DNA, 2155 bp, Homo sapiens
cgagagccgggtgcacgcgccggggaggtagccaacagccgttgggacgcgacgctggttcccaggggagagccagccgctgccgcggcactggttcagacggccaggccctagggacccaccatggatcctgaacacgccaaacctgagtcatccgaggcaccttcagggaacttgaaacaaccggagactgccgcagccctggcaagtagcggcagcgtagtgagttctgtacccaaggcacagcgcaacatctcagcgaagaccgcaccccggaagcaccccgcagtctcaattcgcagtgcgcagtccgcagccgccgcacgtccccaaggcagtgagggcaccgcaccctcaaggaaagccaccacacgcccacccccaaagcccacactcccaccccccaggcgggctggggctgagcccggggccggggcgggggctccggggggaccatgcccggaggccggccggcagcagcatggctcacgggcccggcgcgctgatgctcaagtgcgtggtggtcggcgacggggcggtgggcaagacgtgcctactcatgagctatgccaacgacgccttcccggaggagtacgtgcccaccgtcttcgaccactacgcagtcagcgtcaccgtggggggcaagcagtacctcctaggactctatgacacggccggacaggaagactatgaccgtctgaggcctttatcttacccaatgaccgatgtcttccttatatgcttctcggtggtaaatccagcctcatttcaaaatgtgaaagaggagtgggtaccggaacttaaggaatacgcaccaaatgtaccctttttattaataggaactcagattgatctccgagatgaccccaaaactttagcaagactgaatgatatgaaagaaaaacctatatgtgtggaacaaggacagaaactagcaaaagagataggagcatgctgctatgtggaatgttcagctttaacccagaagggattgaagactgtttttgatgaggctatcatagccattttaactccaaagaaacacactgtaaaaaaaagaataggatcaagatgtataaactgttgtttaattacgtgagaaacatcttcagtggccaaggaaactgtccatttctctcagaaagcaaatgaaatgctacagctatacccagaccttttataggtaatgaagcagttcaaaacttgaaagaaaacaaaacctgtcctcagaattctataaagtgtattaagaatgttccttaaaggtttaagaagcagtaagcagcatctgaagccacaatctattataaatactttatttcaactagaaggtacaatctctcaggggtttcatagtttaaaaagctacaatcacatcatgttgtaactacgtaaaaaacagagctgtaaatggaactgcttggctttgaccatacacatttctgcccagcccttacagaatctgcacaaagaaatatctccctttgctccagttaattgttcttgtatgtaagttgctttctattccagtatatccagagtggtgaaataacaaggccagccacgtagccaaaggtcgctccaagcgtacaggagatgggccataccttgcactacggttgtcaggattaagttactcatttcacagtaccaagccccctgcagggtacatggagagatctataagtgctacgttttctttctactgtcatctgaaatgtcagacaggattgaaaattatgtgaaatccaaataccctaaattggcataactaaataccagagaaatagataaattaacagtccactctaccaactgaaagactgctgggcagaaaaaataaaacaacaaactgagacaattaacatattctctaatatatgagaactcaaataaatcatggaatttgcattttttgaaggctaaaaatatagtcattaaactatgtcttttctaggtcacaaatgcctgtaacattaattaagtaataaccatgtgtcaggtgctgagctaggtattttagagggattttattatttcatcctcactagcaagtgacaaagccaggatttcaacccagtaatctgatgccagaactcctaatcatcatgttacctgcctacccattaataaaacgtgagtttaaaaacctcat

SEQ ID NO: 353490 - DNA, 1079 bp, Homo sapiens
cgagagccgggtgcacgcgccggggaggtagccaacagccgttgggacgcgacgctggttcccaggggagagccagccgctgccgcggcactggttcagacggccaggccctagggacccaccatggatcctgaacacgccaaacctgagtcatccgaggcaccttcagggaacttgaaacaaccggagactgccgcagccctggcaagtagcggcagcgtagtgagttctgtacccaaggcacagcgcaacatctcagcgaagaccgcaccccggaagcaccccgcagtctcaattcgcagtgcgcagtccgcagccgccgcacgtccccaaggcagtgagggcaccgcaccctcaaggaaagccaccacacgcccacccccaaagcccacactcccaccccccaggcgggctggggctgagcccggggccggggcgggggctccggggggaccatgcccggaggccggccggcagcagcatggctcacgggcccggcgcgctgatgctcaagtgcgtggtggtcggcgacggggcggtgggcaagacgtgcctactcatgagctatgccaacgacgccttcccggaggagtacgtgcccaccgtcttcgaccactacgcagtcagcgtcaccgtggggggcaagcagtacctcctaggactctatgacacggccggacaggaagactatgaccgtctgaggcctttatcttacccaatgaccgatgtcttccttatatgcttctcggtggtaaatccagcctcatttcaaaatgtgaaagaggagtgggtaccggaacttaaggaatacgcaccaaatgtaccctttttattaataggaactcagatggatctccgagatgaccccaaaacttagcaaggcctgaagtgcgactatgagcactgaccaagacgctactagtgtgtggaaacaagggcacacgagaaacttagctcaacacgagcataacggagccatgctggctatgttgcgcactggtcccagtcttaaacccaaaacagggcattgcacacactgtgagtagaatgaggccatcatcataagccatttaaactcc

SEQ ID NO: 353491 - DNA, 709 bp, Homo sapiens
gtgtggtgcgtcgggcgacaggtacgtaaggtgaagatggtgcactagcctctgtgatccctagtgacaatcgatggctcattgcacgtaagtgagttggatgtcctcgaccgatctaaatcaaaacagctaggcggtcagcgatcacgcttcgtgaggcgaaatccagaatgcgtcgcttagtgagtcttatgaacatgggatcgtaatcaggcaggagtatcaagcgagtgtcgggtcattcaattttaagcccaatgaccgatgtcttccttatatgcttctcggtggtaaatccagcctcatttcaaaatgtgaaagaggagtgggtaccggaacttaaggaatacgcaccaaatgtaccctttttattaataggaactcagattgatctccgagatgaccccaaaactttagcaagactgaatgatatgaaagaaaaacctatatgtgtggaacaaggacagaaactagcaaaagaggtaatggaacactcacagaatttaagcatgaatgtaaaagatgctaagataacaatagaagctaattttattgtgtatttactgtgtgccaggtggagtgctttacatgcattatctcatttaatccttgcatgaactcagtgaggtacgtctgtttcccctgttacacagaagagacagtggaggctgggagatgtcagataattcgcccaagatcctgcaggtaa

SEQ ID NO: 353492 - DNA, 2872 bp, Homo sapiens
agcgggctcctgctcccggcacttcctacccctcggcgccctgggccgtcctccttgaccttcccacatcccctttcctactgccccaaggccccgggggaaatattcgaggggaccgagcgagacgtggctacgggacttgggagaagggggtggacggctggggaccacatcacaccccggccctttgccggttcacagtgagctggccgcacgggaaaagggggtgacatctcgcggggagcgcccccacgcctctagctgggttgggagaggagggtccgggtggggagcgaaattgccccagagcccaggtcactgtgagcttctctccccgcccccacttctgtccttgcagtcagcgtcaccgtggggggcaagcagtacctcctaggactctatgacacggccggacaggaagactatgaccgtctgaggcctttatcttacccaatgaccgatgtcttccttatatgcttctcggtggtaaatccagcctcatttcaaaatgtgaaagaggagtgggtaccggaacttaaggaatacgcaccaaatgtaccctttttattaataggaactcagattgatctccgagatgaccccaaaactttagcaagactgaatgatatgaaagaaaaacctatatgtgtggaacaaggacagaaactagcaaaagagataggagcatgctgctatgtggaatgttcagctttaacccagaagggattgaagactgtttttgatgaggctatcatagccattttaactccaaagaaacacactgtaaaaaaaagaataggatcaagatgtataaactgttgtttaattacgtgagaaacatcttcagtggccaaggaaactgtccatttctctcagaaagcaaatgaaatgctacagctatacccagaccttttataggtaatgaagcagttcaaaacttgaaagaaaacaaaacctgtcctcagaattctataaagtgtattaagaatgttccttaaaggtttaagaagcagtaagcagcatctgaagccacaatctattataaatactttatttcaactagaaggtacaatctctcaggggtttcatagtttaaaaagctacaatcacatcatgttgtaactacgtaaaaaacagagctgtaaatggaactgcttggctttgaccatacacatttctgcccagcccttacagaatctgcacaaagaaatatctccctttgctccagttaattgttcttgtatgtaagttgctttctattccagtatatccagagtggtgaaataacaaggccagccacgtagccaaaggtcgctccaagcgtacaggagatgggccatacctgaggagagaatgtatgagatcaaaaaagaacaaatgttttattattacttgagcacaagtgtaacctaaatatttctatattaaagcttaatgtgctttcttaaagaatgccaaaagtgtaataaggtcataactgcatttatcatgaacactaaaaatgtacacattttagttaatgtgcattaaactgtaacaaggcttctggcaattgtagatttagtttgacgctccccaaagtgcatgagacacatgctaaaattacaaattaaaattttgggtcagactttgccataatgatagactcaatttagctctctgaactagttggtaattttttttttttaattcccactttggctgtgtacatcaaatgaaatgagaagtgtgtatgctgaccaaaccacaagaaactttctttaagttgtgttaaagaggaaagacctagaatccaagcgtgttacatgaaaattgtaacagagcagctgcttccacctttcagatatagatgttggaaccacagcagaagttatagagcgacaacttatatacacacctagaatgtaagttaaacaaaataccggcttccagagaccccttttctccagccatattacatcaggctagaagtaattaatgttgatttatttcatctacaagcagttggtccctaagtgaaaggctctgcttgaaaaaaaaaagaaaaaaaagttggaggaaaattttcatgttcttctgtgaagcttatttggtacactggagccatttctaatctttctctggggggaacaggccacagaactgtgttagaggtgaaccatcttaattactagttctattacctaattcagcttccttgtttggtctgctgtggatctgccttattgcatatgccatgcatcagataatggatgcatcagataatggtgttagacaaagcttcattgtgaacaacctaatgcattttagagaaacaatctcatcacattttttctagcctttcctacatttaaacttgctgttgcccaaattataattttttaaatgtctttggtgggcttctgttaattcacatgacttgagcttatagctatgtctactgcacagattgggtaatggaacactaaacttttatacttgaaaatgacagccttaaatgctcatatcagtcacaaatctaggatgtactgtcttgttgtatgtgagctttgtagagatttttaaaaatataagcatcaccttcccattgaagagtggagagagtctactggatgactggccaggaactttctctctgaatcggacatttggatgtcttctttcttccaagaaatggtggttcacattaaagtatcatggccttatgtatgctcaaatggaatcttatgtaactttcttatttaattttggtctgcttatttttagataaaattgaaaggaattgtataaatcaattaacatattagctgagttgtccaacacatggtataaacgaattacaacagtaaactattacacatttccaacttgc

SEQ ID NO: 353493 - DNA, 2876 bp, Homo sapiens
cgagagccgggtgcacgcgccggggaggtagccaacagccgttgggacgcgacgctggttcccaggggagagccagccgctgccgcggcactggttcagacggccaggccctagggacccaccatggatcctgaacacgccaaacctgagtcatccgaggcaccttcagggaacttgaaacaaccggagactgccgcagccctggcaagtagcggcagcgtagtgagttctgtacccaaggcacagcgcaacatctcagcgaagaccgcaccccggaagcaccccgcagtctcaattcgcagtgcgcagtccgcagccgccgcacgtccccaaggcagtgagggcaccgcaccctcaaggaaagccaccacacgcccacccccaaagcccacactcccaccccccaggcgggctggggctgagcccggggccggggcgggggctccggggggaccatgcccggaggccggccggcagcagcatggctcacgggcccggcgcgctgatgctcaagtgcgtggtggtcggcgacggggcggtgggcaagacgtgcctactcatgagctatgccaacgacgccttcccggaggagtacgtgcccaccgtcttcgaccactacgcagtcagcgtcaccgtggggggcaagcagtacctcctaggactctatgacacggccggacagataggagcatgctgctatgtggaatgttcagctttaacccagaagggattgaagactgtttttgatgaggctatcatagccattttaactccaaagaaacacactgtaaaaaaaagaataggatcaagatgtataaactgttgtttaattacgtgagaaacatcttcagtggccaaggaaactgtccatttctctcagaaagcaaatgaaatgctacagctatacccagaccttttataggtaatgaagcagttcaaaacttgaaagaaaacaaaacctgtcctcagaattctataaagtgtattaagaatgttccttaaaggtttaagaagcagtaagcagcatctgaagccacaatctattataaatactttatttcaactagaaggtacaatctctcaggggtttcatagtttaaaaagctacaatcacatcatgttgtaactacgtaaaaaacagagctgtaaatggaactgcttggctttgaccatacacatttctgcccagcccttacagaatctgcacaaagaaatatctccctttgctccagttaattgttcttgtatgtaagttgctttctattccagtatatccagagtggtgaaataacaaggccagccacgtagccaaaggtcgctccaagcgtacaggagatgggccatacctgaggagagaatgtatgagatcaaaaaagaacaaatgttttattattacttgagcacaagtgtaacctaaatatttctatattaaagcttaatgtgctttcttaaagaatgccaaaagtgtaataaggtcataactgcatttatcatgaacactaaaaatgtacacattttagttaatgtgcattaaactgtaacaaggcttctggcaattgtagatttagtttgacgctccccaaagtgcatgagacacatgctaaaattacaaattaaaattttgggtcagactttgccataatgatagactcaatttagctctctgaactagttggtaattttttttttttaattcccactttggctgtgtacatcaaatgaaatgagaagtgtgtatgctgaccaaaccacaagaaactttctttaagttgtgttaaagaggaaagacctagaatccaagcgtgttacatgaaaattgtaacagagcagctgcttccacctttcagatatagatgttggaaccacagcagaagttatagagcgacaacttatatacacacctagaatgtaagttaaacaaaataccggcttccagagaccccttttctccagccatattacatcaggctagaagtaattaatgttgatttatttcatctacaagcagttggtccctaagtgaaaggctctgcttgaaaaaaaaaagaaaaaaaagttggaggaaaattttcatgttcttctgtgaagcttatttggtacactggagccatttctaatctttctctggggggaacaggccacagaactgtgttagaggtgaaccatcttaattactagttctattacctaattcagcttccttgtttggtctgctgtggatctgccttattgcatatgccatgcatcagataatggatgcatcagataatggtgttagacaaagcttcattgtgaacaacctaatgcattttagagaaacaatctcatcacattttttctagcctttcctacatttaaacttgctgttgcccaaattataattttttaaatgtctttggtgggcttctgttaattcacatgacttgagcttatagctatgtctactgcacagattgggtaatggaacactaaacttttatacttgaaaatgacagccttaaatgctcatatcagtcacaaatctaggatgtactgtcttgttgtatgtgagctttgtagagatttttaaaaatataagcatcaccttcccattgaagagtggagagagtctactggatgactggccaggaactttctctctgaatcggacatttggatgtcttctttcttccaagaaatggtggttcacattaaagtatcatggccttatgtatgctcaaatggaatcttatgtaactttcttatttaattttggtctgcttatttttagataaaattgaaaggaattgtataaatcaattaacatattagctgagttgtccaacacatggtataaacgaattacaacagtaaactattacacatttccaacttgc

SEQ ID NO: 353494 - DNA, 3083 bp, Homo sapiens
cgagagccgggtgcacgcgccggggaggtagccaacagccgttgggacgcgacgctggttcccaggggagagccagccgctgccgcggcactggttcagacggccaggccctagggacccaccatggatcctgaacacgccaaacctgagtcatccgaggcaccttcagggaacttgaaacaaccggagactgccgcagccctggcaagtagcggcagcgtagtgagttctgtacccaaggcacagcgcaacatctcagcgaagaccgcaccccggaagcaccccgcagtctcaattcgcagtgcgcagtccgcagccgccgcacgtccccaaggcagtgagggcaccgcaccctcaaggaaagccaccacacgcccacccccaaagcccacactcccaccccccaggcgggctggggctgagcccggggccggggcgggggctccggggggaccatgcccggaggccggccggcagcagcatggctcacgggcccggcgcgctgatgctcaagtgcgtggtggtcggcgacggggcggtgggcaagacgtgcctactcatgagctatgccaacgacgccttcccggaggagtacgtgcccaccgtcttcgaccactacgcagtcagcgtcaccgtggggggcaagcagtacctcctaggactctatgacacggccggacaggaagactatgaccgtctgaggcctttatcttacccaatgaccgatgtcttccttatatgcttctcggtggtaaatccagcctcatttcaaaatgtgaaagaggagtgggtaccggaacttaaggaatacgcaccaaatgtaccctttttattaataggaactcagattgatctccgagatgaccccaaaactttagcaagactgaatgatatgaaagaaaaacctatatgtgtggaacaaggacagaaactagcaaaagagataggagcatgctgctatgtggaatgttcagctttaacccagaagggattgaagactgtttttgatgaggctatcatagccattttaactccaaagaaacacactgtaaaaaaaagaataggatcaagatgtataaactgttgtttaattacgtgagaaacatcttcagtggccaaggaaactgtccatttctctcagaaagcaaatgaaatgctacagctatacccagaccttttataggtaatgaagcagttcaaaacttgaaagaaaacaaaacctgtcctcagaattctataaagtgtattaagaatgttccttaaaggtttaagaagcagtaagcagcatctgaagccacaatctattataaatactttatttcaactagaaggtacaatctctcaggggtttcatagtttaaaaagctacaatcacatcatgttgtaactacgtaaacccttacagaatctgcacaaagaaatatctccctttgctccagttaattgttcttgtatgtaagttgctttctattccagtatatccagagtggtgaaataacaaggccagccacgtagccaaaggtcgctccaagcgtacaggagatgggccatacctgaggagagaatgtatgagatcaaaaaagaacaaatgttttattattacttgagcacaagtgtaacctaaatatttctatattaaagcttaatgtgctttcttaaagaatgccaaaagtgtaataaggtcataactgcatttatcatgaacactaaaaatgtacacattttagttaatgtgcattaaactgtaacaaggcttctggcaattgtagatttagtttgacgctccccaaagtgcatgagacacatgctaaaattacaaattaaaattttgggtcagactttgccataatgatagactcaatttagctctctgaactagttggtaattttttttttttaattcccactttggctgtgtacatcaaatgaaatgagaagtgtgtatgctgaccaaaccacaagaaactttctttaagttgtgttaaagaggaaagacctagaatccaagcgtgttacatgaaaattgtaacagagcagctgcttccacctttcagatatagatgttggaaccacagcagaagttatagagcgacaacttatatacacacctagaatgtaagttaaacaaaataccggcttccagagaccccttttctccagccatattacatcaggctagaagtaattaatgttgatttatttcatctacaagcagttggtccctaagtgaaaggctctgcttgaaaaaaaaaagaaaaaaaagttggaggaaaattttcatgttcttctgtgaagcttatttggtacactggagccatttctaatctttctctggggggaacaggccacagaactgtgttagaggtgaaccatcttaattactagttctattacctaattcagcttccttgtttggtctgctgtggatctgccttattgcatatgccatgcatcagataatggatgcatcagataatggtgttagacaaagcttcattgtgaacaacctaatgcattttagagaaacaatctcatcacattttttctagcctttcctacatttaaacttgctgttgcccaaattataattttttaaatgtctttggtgggcttctgttaattcacatgacttgagcttatagctatgtctactgcacagattgggtaatggaacactaaacttttatacttgaaaatgacagccttaaatgctcatatcagtcacaaatctaggatgtactgtcttgttgtatgtgagctttgtagagatttttaaaaatataagcatcaccttcccattgaagagtggagagagtctactggatgactggccaggaactttctctctgaatcggacatttggatgtcttctttcttccaagaaatggtggttcacattaaagtatcatggccttatgtatgctcaaatggaatcttatgtaactttcttatttaattttggtctgcttatttttagataaaattgaaaggaattgtataaatcaattaacatattagctgagttgtccaacacatggtataaacgaattacaacagtaaactattacacatttccaacttgc

SEQ ID NO: 353495 - DNA, 3020 bp, Homo sapiens
cgagagccgggtgcacgcgccggggaggtagccaacagccgttgggacgcgacgctggttcccaggggagagccagccgctgccgcggcactggttcagacggccaggccctagggacccaccatggatcctgaacacgccaaacctgagtcatccgaggcaccttcagggaacttgaaacaaccggagactgccgcagccctggcaagtagcggcagcgtagtgagttctgtacccaaggcacagcgcaacatctcagcgaagaccgcaccccggaagcaccccgcagtctcaattcgcagtgcgcagtccgcagccgccgcacgtccccaaggcagtgagggcaccgcaccctcaaggaaagccaccacacgcccacccccaaagcccacactcccaccccccaggcgggctggggctgagcccggggccggggcgggggctccggggggaccatgcccggaggccggccggcagcagcatggctcacgggcccggcgcgctgatgctcaagtgcgtggtggtcggcgacggggcggtgggcaagacgtgcctactcatgagctatgccaacgacgccttcccggaggagtacgtgcccaccgtcttcgaccactacgcaggaagactatgaccgtctgaggcctttatcttacccaatgaccgatgtcttccttatatgcttctcggtggtaaatccagcctcatttcaaaatgtgaaagaggagtgggtaccggaacttaaggaatacgcaccaaatgtaccctttttattaataggaactcagattgatctccgagatgaccccaaaactttagcaagactgaatgatatgaaagaaaaacctatatgtgtggaacaaggacagaaactagcaaaagagataggagcatgctgctatgtggaatgttcagctttaacccagaagggattgaagactgtttttgatgaggctatcatagccattttaactccaaagaaacacaatcttcagtggccaaggaaactgtccatttctctcagaaagcaaatgaaatgctacagctatacccagaccttttataggtaatgaagcagttcaaaacttgaaagaaaacaaaacctgtcctcagaattctataaagtgtattaagaatgttccttaaaggtttaagaagcagtaagcagcatctgaagccacaatctattataaatactttatttcaactagaaggtacaatctctcaggggtttcatagtttaaaaagctacaatcacatcatgttgtaactacgtaaaaaacagagctgtaaatggaactgcttggctttgaccatacacatttctgcccagcccttacagaatctgcacaaagaaatatctccctttgctccagttaattgttcttgtatgtaagttgctttctattccagtatatccagagtggtgaaataacaaggccagccacgtagccaaaggtcgctccaagcgtacaggagatgggccatacctgaggagagaatgtatgagatcaaaaaagaacaaatgttttattattacttgagcacaagtgtaacctaaatatttctatattaaagcttaatgtgctttcttaaagaatgccaaaagtgtaataaggtcataactgcatttatcatgaacactaaaaatgtacacattttagttaatgtgcattaaactgtaacaaggcttctggcaattgtagatttagtttgacgctccccaaagtgcatgagacacatgctaaaattacaaattaaaattttgggtcagactttgccataatgatagactcaatttagctctctgaactagttggtaattttttttttttaattcccactttggctgtgtacatcaaatgaaatgagaagtgtgtatgctgaccaaaccacaagaaactttctttaagttgtgttaaagaggaaagacctagaatccaagcgtgttacatgaaaattgtaacagagcagctgcttccacctttcagatatagatgttggaaccacagcagaagttatagagcgacaacttatatacacacctagaatgtaagttaaacaaaataccggcttccagagaccccttttctccagccatattacatcaggctagaagtaattaatgttgatttatttcatctacaagcagttggtccctaagtgaaaggctctgcttgaaaaaaaaaagaaaaaaaagttggaggaaaattttcatgttcttctgtgaagcttatttggtacactggagccatttctaatctttctctggggggaacaggccacagaactgtgttagaggtgaaccatcttaattactagttctattacctaattcagcttccttgtttggtctgctgtggatctgccttattgcatatgccatgcatcagataatggatgcatcagataatggtgttagacaaagcttcattgtgaacaacctaatgcattttagagaaacaatctcatcacattttttctagcctttcctacatttaaacttgctgttgcccaaattataattttttaaatgtctttggtgggcttctgttaattcacatgacttgagcttatagctatgtctactgcacagattgggtaatggaacactaaacttttatacttgaaaatgacagccttaaatgctcatatcagtcacaaatctaggatgtactgtcttgttgtatgtgagctttgtagagatttttaaaaatataagcatcaccttcccattgaagagtggagagagtctactggatgactggccaggaactttctctctgaatcggacatttggatgtcttctttcttccaagaaatggtggttcacattaaagtatcatggccttatgtatgctcaaatggaatcttatgtaactttcttatttaattttggtctgcttatttttagataaaattgaaaggaattgtataaatcaattaacatattagctgagttgtccaacacatggtataaacgaattacaacagtaaactattacacatttccaacttgc

SEQ ID NO: 353496 - DNA, 1720 bp, Homo sapiens
cgagagccgggtgcacgcgccggggaggtagccaacagccgttgggacgcgacgctggttcccaggggagagccagccgctgccgcggcactggttcagacggccaggccctagggacccaccatggatcctgaacacgccaaacctgagtcatccgaggcaccttcagggaacttgaaacaaccggagactgccgcagccctggcaagtagcggcagcgtagtgagttctgtacccaaggcacagcgcaacatctcagcgaagaccgcaccccggaagcaccccgcagtctcaattcgcagtgcgcagtccgcagccgccgcacgtccccaaggcagtgagggcaccgcaccctcaaggaaagccaccacacgcccacccccaaagcccacactcccaccccccaggcgggctggggctgagcccggggccggggcgggggctccggggggaccatgcccggaggccggccggcagcagcatggctcacgggcccggcgcgctgatgctcaagtgcgtggtggtcggcgacggggcggtgggcaagacgtgcctactcatgagctatgccaacgacgccttcccggaggagtacgtgcccaccgtcttcgaccactacgcagtcagcgtcaccgtggggggcaagcagtacctcctaggactctatgacacggccggacaggaagactatgaccgtctgaggcctttatcttacccaatgaccgatgtcttccttatatgcttctcggtggtaaatccagcctcatttcaaaatgtgaaagaggagtgggtaccggaacttaaggaatacgcaccaaatgtaccctttttattaataggaactcagattgatctccgagatgaccccaaaactttagcaagactgaatgatatgaaagaaaaacctatatgtgtggaacaaggacagaaactagcaaaagagataggagcatgctgctatgtggaatgttcagctttaacccagaagggattgaagactgtttttgatgaggctatcatagccattttaactccaaagaaacacactgtaaaaaaaagaataggatcaagatgtataaactgttgtttaattacgtgagaaacatcttcagtggccaaggaaactgtccatttctctcagaaagcaaatgaaatgctacagctatacccagaccttttataggtaatgaagcagttcaaaacttgaaagaaaacaaaacctgtcctcagaattctataaagtgtattaagaatgttccttaaaggtttaagaagcagtaagcagcatctgaagccacaatctattataaatactttatttcaactagaaggtacaatctctcaggggtttcatagtttaaaaagctacaatcacatcatgttgtaactacgtaaaaaacagagctgtaaatggaactgcttggctttgaccatacacatttctgcccagcccttacagaatctgcacaaagaaatatctccctttgctccagttaattgttcttgtatgtaagttgctttctattccagtatatccagagtggtgaaataacaaggccagccacgtagccaaaggtcgctccaagcgtacaggagatgggccatacctgaggagagaatgtatgagatcaaaaaagaacaaatgttttattattacttgagcacaagtgtaacctaaatatttctatattaaagcttaatgtgctttcttaaagaatgc

SEQ ID NO: 353497 - DNA, 1111 bp, Homo sapiens
cgagagccgggtgcacgcgccggggaggtagccaacagccgttgggacgcgacgctggttcccaggggagagccagccgctgccgcggcactggttcagacggccaggccctagggacccaccatggatcctgaacacgccaaacctgagtcatccgaggcaccttcagggaacttgaaacaaccggagactgccgcagccctggcaagtagcggcagcgtagtgagttctgtacccaaggcacagcgcaacatctcagcgaagaccgcaccccggaagcaccccgcagtctcaattcgcagtgcgcagtccgcagccgccgcacgtccccaaggcagtgagggcaccgcaccctcaaggaaagccaccacacgcccacccccaaagcccacactcccaccccccaggcgggctggggctgagcccggggccggggcgggggctccggggggaccatgcccggaggccggccggcagcagcatggctcacgggcccggcgcgctgatgctcaagtgcgtggtggtcggcgacggggcggtgggcaagacgtgcctactcatgagctatgccaacgacgccttcccggaggagtacgtgcccaccgtcttcgaccactacgcaggaagactatgaccgtctgaggcctttatcttacccaatgaccgatgtcttccttatatgcttctcggtggtaaatccagcctcatttcaaaatgtgaaagaggagtgggtaccggaacttaaggaatacgcaccaaatgtaccctttttattaataggaactcagattgatctccgagatgaccccaaaactttagcaagactgaatgatatgaaagaaaaacctatatgtgtggaacaaggacagaaactagcaaaagaggtaatggaacactcacagaatttaagcatgaatgtaaaagatgctaagataacaatagaagctaattttattgtgtatttactgtgtgccaggtggagtgctttacatgcattatctcatttaatccttgcatgaactcagtgaggtacgtctgtttcccctgttacacagaagagacagtggaggctgggagatgtcagataattcgcccaagatcctgcaggtaa

SEQ ID NO: 353498 - DNA, 539 bp, Homo sapiens
  misc_feature (205)..(205): n is a, c, g, or t
  misc_feature (211)..(211): n is a, c, g, or t
gcggctgctctatgaggatcccctcggtctacattgtcttgtgtgttggtctggagatctgtgtctcccggtcccaatactccggccctcctgctctatccatggcgcccggggctcgtcctcggactcgcggcgtcgttgtcgaacctcacgaactgggtgtcgtccacgtagcccactgcgatgaagcggggctccccgcgtnctgtgncgggacaatggcggtgtagaaatacctcatggagtgggagccggcccaggtctcggtcagggccactgccccccagagcagcaggaggagggttcggggcacctgtaatccgagctctcctggaggctgaggcaggagaatcgcttgaacctgggaggtggagtttacagctgggatatactgacttgatcatagctcactgcaacctttagctcctggactcaagcaatcctccagcatcagcctcctgagcagctgggactataggtgtgaattaccatgcctggctaacttttttattttttgtagagacagggtcttaccctat

SEQ ID NO: 353499 - DNA, 368 bp, Homo sapiens
gttggccaggctggtctcgaactcctgacctcaggtgatctgcccttctcggcctcccgaagtggtgggattataggcgtgagtcaccgagcctggccccaggcaataatataccagtgggcaagaaaatattcttgctctcatgggacttctgttgggggtcagggtatagggaggaaggcatagagatgaaaaccagtaaatatctttctggtttactagggtattcttcaaaaaaagagaaaagattaaagctgcacagacatgatgatgtaaaagctagtagcttctcaagctgtgaaaggtctgtggtgcagagaatagctccctgtgagctgaattttgtttgctgtgggtgcagcatgggt

SEQ ID NO: 353500 - DNA, 1429 bp, Homo sapiens
tggactctttattattttgtatttggattatttctttaaagagatcagagataaaaatatcattgttttgccagtttgctaccaccagcccacacccctcttcccgttgtccaaaaagggggtggttagagttttcttgagtgactgggctattatgattagcagattactaaagctgtgtgattttaacaagacgtaaacacatatgggaacccctccttccatatcttgctaatgtcaattagcaacatattaatcttgctaatgtcaatcctgtcacttcatacatttataaatattagggacatttaaaagagttgtcggactgtgcgggaccttggcacactgctgacggctgcacactcatcactgcggggctcatcacacattgacaccagcaccatattttgctgggtttcctgatctcggttgagtatttggatttgaatgggatggttttaatgttgctactgactactacagtgatccaaataaactttaaagctggggcctccacgccataggcaaattttcataccagttgcctttacctcagtagttttcagctggggcaattttgttccccaggagacatctggatacagtgttggttgtaacagctgggcagggggtacttctgtcatcatctcatgggcacagggcagggatgctgctagggcaacccctcaccctcccaaagaattatcaaaaacatcaacagtgccaaagctgagaagctcagctttaatgtgttcattgagcaactaaagaatagactcagatataggaaagtatttatttatttatttatttagagacagggtctggctctgttgtccagatcataactcactgtaaccttgatctcctgggctgaagcaatcttctcaccttagtctcccaacactttgggaggcagaggcgggcagatcacctgaggtcaggagttcgagaccagcctggccaacatggtgaaaccctatctctactaaaaatacaaaaattagccgggagtggtgatgggcacctgtaatccgagctctcctggaggctgaggcaggagaatcgcttgaacctgggaggtggagtttacagtgagctgagatcgtgccattgcactccagcctgggcgacaagagcgaaactctgtgtccaaaaaaaaaagaaaagaaaaaagaaaaaaagagtatctttaaatgaatggcaacccaatttgcaaatgtattttttttaatgttgccaattactttatgtgtttaaaaaatatctttctggtttactagggtattcttcaaaaaaagagaaaagattaaagctgcacagacatgatgatgtaaaagctagtagcttctcaagctgtgaaaggtctgtggtgcagagaatagctccctgtgagctgaattttgtttgctgtgggtgcagcatgggt

SEQ ID NO: 353501 - DNA, 484 bp, Homo sapiens
gtggcttatgcctgtaatcccagcactttgggaggcagaggcgggcagatcacctgaggtcaggagttcgagaccagcctggccaacatggtgaaaccctatctctactaaaaatacaaaaattagccgggagtggtgatgggcacctgtaatccgagctctcctggaggctgaggcaggagaatcgcttgaacctgggaggtggagtttacagtgagctgagatcgtgccattgcactccagcctgggcgacaagagcgaaactctgtgtccaaaaaaaaaagaaaagaaaaaagaaaaaaagagtatctttaaatgaatggcaacccaatttgcaaatgtattttttttaatgttgccaattactttatgtgtttaaaaaatatctttctggtttactagggtattcttcaaaaaaagagaaaagattaaagctgcacagacatgatgatgtaaaagctagtagcttctcaagctgtgaaag

SEQ ID NO: 353502 - DNA, 2624 bp, Homo sapiens
gtcatctcaccgccgtgcgcacccactcgtaactcgcacccgggtcctggctgcaccgcatcccctcctgcaccccctggatggcccttcagccaacgggggcctgggcgatggtcgaccacggagctgcgcaaggaaaagtcccgggatgcggcccgcagccggcgcagccaggagaccgaggtgctgtaccagctggctcacacgctgcccttcgcccgcggcgtcagcgcccacctggacaaggcctctatcatgcgcctcaccatcagctacctgcgcatgcaccgcctctgcgccgcaggggagtggaaccaggtgggagcagggggagaaccactggatgcctgctacctgaaggccctggagggcttcgtcatggtgctcaccgccgagggagacatggcttacctgtcggagaatgtcagcaaacacctgggcctcagtcagctggagctcattggacacagcatctttgatttcatccacccctgtgaccaagaggagcttcaggacgccctgaccccccagcagaccctgtccaggaggaaggtggaggcccccacggagcggtgcttctccttgcgcatgaagagtacgctcaccagccgcgggcgcaccctcaacctcaaggcggccacctggaaggtgctgaactgctctggacatatgagggcctacaagccacctgcgcagacttctccagctgggagccctgactcagagcccccgctgcagtgcctggtgctcatctgcgaagccatcccccacccaggcagcctggagcccccactgggccgaggggccttcctcagccgccacagcctggacatgaagttcacctactgtgacgacaggattgcagaagtggctggctatagtcccgatgacctgatcggctgttccgcctacgagtacatccacgcgctggactccgacgcggtcagcaagagcatccacaccttgctgagcaagggccaggcagtaacagggcagtatcgcttcctggcccggagtggtggctacctgtggacccagacccaggccacagtggtgtcagggggacggggcccccagtcggagagtatcgtctgtgtccattttttaatcagccaggtggaagagaccggagtggtgctgtccctggagcaaacggagcaacactctcgcagacccattcagcggggcgccccctctcagaaggacacccctaaccctggggacagccttgacacccctggcccccggatccttgccttcctgcacccgccttccctgagcgaggctgccctggccgctgacccccgccgtttctgcagccctgacctccgtcgcctcctgggacccatcctggatggggcttcagtagcagccactcccagcaccccgctggccacacggcacccccaaagtcctctttcggctgatctcccagatgaactacctgtgggcaccgagaatgtgcacagactcttcacctccgggaaagacactgaggcagtggagacagatttagatatagctcaggatgctgatgctctggatttggagatgctggccccctacatctccatggatgatgacttccagctcaacgccagcgagcagctacccagggcctaccacagacctctgggggctgtcccccggccccgtgctcggagcttccatggcctgtcacctccagcccttgagccctccctgctaccccgctgggggagtgacccccggctgagctgctccagcccttccagaggggacccctcagcatcctctcccatggctggggctcggaagaggaccctggcccagagctcagaggacgaggacgagggagtggagctgctgggagtgagacctcccaaaaggtcccccagcccagaacacgaaaactttctgctctttcctctcagcctgagtttccttctgacaggaggaccagccccagggagcctgcaggcccactgaacttacccaattccttctttcagtcttaagttttcccattctagacccctaccctctaggctgtgctgctcctggacttcatgcctctccattctcattgcctacaatctctgtgccccagaaccccctccacttcccaccccagccctccagacatgcacttaccttgactttaccccacatgtttggggcacctggggctccctcaccccttgggtggtttgcaatctgaagacttctccagccacacaggcacatgcacaggcacggtgctgtctgcatattgccaggtggggagagaagccaggacccctcagctgtctgccaccatctatgtgcctcccttaccccccagctttctttctacagatggtgctactcttggtctcccacaggaaaaggcctccccccttcttagccccatttaccccgtttgtggaaggcactgctcgctctgttttgtcagagagtggcctatccagattggtgctatgggggggtctgacccctccctcctccctctggaggtgatgtgggccctcaatggagggaattgtgctgggctagggaaaggggagggactagactggccacactggctctgaaactcaccaatctctatacaccataaagacctcaccttggtaggcaccaga

SEQ ID NO: 353503 - DNA, 2339 bp, Homo sapiens
gtcatctcaccgccgtgcgcacccactcgtaactcgcacccgggtcctggctgcaccgcatcccctcctgcaccccctggatggcccttcagccaacgggggcctgggcgatggtcgaccacggagctgcgcaaggaaaagtcccgggatgcggcccgcagccggcgcagccaggagaccgaggtgctgtaccagctggctcacacgctgcccttcgcccgcggcgtcagcgcccacctggacaaggcctctatcatgcgcctcaccatcagctacctgcgcatgcaccgcctctgcgccgcaggggagtggaaccaggtgggagcagggggagaaccactggatgcctgctacctgaaggccctggagggcttcgtcatggtgctcaccgccgagggagacatggcttacctgtcggagaatgtcagcaaacacctgggcctcagtcagctggagctcattggacacagcatctttgatttcatccacccctgtgaccaagaggagcttcaggacgccctgaccccccagcagaccctgtccaggaggaaggtggaggcccccacggagcggtgcttctccttgcgcatgaagagtacgctcaccagccgcgggcgcaccctcaacctcaaggcggccacctggaaggtgctgaactgctctggacatatgagggcctacaagccacctgcgcagacttctccagctgggagccctgactcagagcccccgctgcagtgcctggtgctcatctgcgaagccatcccccacccaggcagcctggagcccccactgggccgaggggccttcctcagccgccacagcctggacatgaagttcacctactgtgacgacaggattgcagaagtggctggctatagtcccgatgacctgatcggctgttccgcctacgagtacatccacgcgctggactccgacgcggtcagcaagagcatccacaccttgctgagcaagggccaggcagtaacagggcagtatcgcttcctggcccggagtggtggctacctgtggacccagacccaggccacagtggtgtcagggggacggggcccccagtcggagagtatcgtctgtgtccattttttaatcagccaggtggaagagaccggagtggtgctgtccctggagcaaacggagcaacactctcgcagacccattcagcggggcgccccctctcagaaggacacccctaaccctggggacagccttgacacccctggcccccggatccttgccttcctgcacccgccttccctgagcgaggctgccctggccgctgacccccgccgtttctgcagccctgacctccgtcgcctcctgggacccatcctggatggggcttcagtagcagccactcccagcaccccgctggccacacggcacccccaaagtcctctttcggctgatctcccagatgaactacctgtgggcaccgagaatgtgcacagactcttcacctccgggaaagacactgaggcagtggagacagatttagatatagctcaggatgctgatgctctggatttggagatgctggccccctacatctccatggatgatgacttccagctcaacgccagcgagcagctacccagggcctaccacagacctctgggggctgtcccccggccccgtgctcggagcttccatggcctgtcacctccagcccttgagccctccctgctaccccgctgggggagtgacccccggctgagctgctccagcccttccagaggggacccctcagcatcctctcccatggctggggctcggaagaggaccctggcccagagctcagaggacgaggacgagggagtggagctgctgggagtgagacctcccaaaaggtcccccagcccagaacacgaaaactttctgctctttcctctcagcctgagtttccttctgacaggaggaccagccccagggagcctgcaggaccccagcaccccactcctgaacctgaatgagcccctgggcctgggcccctcactgctctctccgtactcagacgaggacactacccagcccgggggccccttccagccaagggcaggctcagcccaggctgactgagccggctcctctccccatctgccttctcctcccccagaaaggacctcaaccacactccacgccggcagccaacgcacaggatgggggcgccaggagaggggcccctctctcctctatgtaccccctgcccacctcgggcctacctcagccctcacccctctgcctgctcccaatctgggggctctctggggtggtctcagctcagtgacctctgggaggtggtccctggccccctcctcctt

SEQ ID NO: 353504 - DNA, 2098 bp, Homo sapiens
agggctccggagcggcgactggcgagccatggcgctggggctgcagcgcgcaaggtcgaccacggagctgcgcaaggaaaagtcccgggatgcggcccgcagccggcgcagccaggagaccgaggtgctgtaccagctggctcacacgctgcccttcgcccgcggcgtcagcgcccacctggacaaggcctctatcatgcgcctcaccatcagctacctgcgcatgcaccgcctctgcgccgcaggggagtggaaccaggtgggagcagggggagaaccactggatgcctgctacctgaaggccctggagggcttcgtcatggtgctcaccgccgagggagacatggcttacctgtcggagaatgtcagcaaacacctgggcctcagtcagctggagctcattggacacagcatctttgatttcatccacccctgtgaccaagaggagcttcaggacgccctgaccccccagcagaccctgtccaggaggaaggtggaggcccccacggagcggtgcttctccttgcgcatgaagagtacgctcaccagccgcgggcgcaccctcaacctcaaggcggccacctggaaggtgctgaactgctctggacatatgagggcctacaagccacctgcgcagacttctccagctgggagccctgactcagagcccccgctgcagtgcctggtgctcatctgcgaagccatcccccacccaggcagcctggagcccccactgggccgaggggccttcctcagccgccacagcctggacatgaagttcacctactgtgacgacaggattgcagaagtggctggctatagtcccgatgacctgatcggctgttccgcctacgagtacatccacgcgctggactccgacgcggtcagcaagagcatccacaccttgctgagcaagggccaggcagtaacagggcagtatcgcttcctggcccggagtggtggctacctgtggacccagacccaggccacagtggtgtcagggggacggggcccccagtcggagagtatcgtctgtgtccattttttaatcagccaggtggaagagaccggagtggtgctgtccctggagcaaacggagcaacactctcgcagacccattcagcggggcgccccctctcagaaggacacccctaaccctggggacagccttgacacccctggcccccggatccttgccttcctgcacccgccttccctgagcgaggctgccctggccgctgacccccgccgtttctgcagccctgacctccgtcgcctcctgggacccatcctggatggggcttcagtagcagccactcccagcaccccgctggccacacggcacccccaaagtcctctttcggctgatctcccagatgaactacctgtgggcaccgagaatgtgcacagactcttcacctccgggaaagacactgaggcagtggagacagatttagatatagctcaggatgctgatgctctggatttggagatgctggccccctacatctccatggatgatgacttccagctcaacgccagcgagcagctacccagggcctaccacagacctctgggggctgtcccccggccccgtgctcggagcttccatggcctgtcacctccagcccttgagccctccctgctaccccgctgggggagtgacccccggctgagctgctccagcccttccagaggggacccctcagcatcctctcccatggctggggctcggaagaggaccctggcccagagctcagaggacgaggacgagggagtggagctgctgggagtgagacctcccaaaaggtcccccagcccagaacacgaaaactttctgctctttcctctcagcctggtgtgttgggggattaatgggattctctggccctcattacctagctggcttaaacctactgttttatagataggaaaccagagaggggcaggggctggttgagggtcatacagaaagtcagtgggccagctgagactaaagcctgatcttctagtttcactaatgggtattaaaaacctctgcagtgaactgagattgcgccactgcaccccagcatgagcgacagaatgggaccttgtc

SEQ ID NO: 353505 - DNA, 2172 bp, Homo sapiens
taaacaaatgaacaaaaaagagtgggagatgaaaataagtgtaacggggaaataatgcatgcaaggaaaaaggtttggagtagggggatttcagttttaaacagtatgatcagggtggtttcattgagaaggtgatagctgagcaaagacctggagtgtcccaggcagagagaacagcaagtgcaaaggcccttaggtggggactgtatctatcttttttggggtgtggggggacagggtgtgtcttgctctgttgcccaggctggagcacagtggtgcaatcacagctcactgcagccttgaactcctgggctcaagcgatcctcccatctcagtctcccaagtagctgggactacacttgtagctgggactacaagtgcgcttcattacgtctggctaattttttaatttctgtagagaaagaggtcttgctatgttgctcaggctggtctcaaactcctgggctcaagtgatcctcctgcctcagccttccaaagtgctgagattgtgcctggctgtctctgtcttctttggggaaaagcaaggccaatgtagctgaagcagagaggagagaaaggtgagggctgactgcatggagcctctgtggggcattgtgatggctttgaagtcaccttgcttgaggaggctgcctcagggcctttgcatatcctgatccttctgcctggcatacttttccctctgttctttgccatgttaccacatcctttagatctcaaaccaaatattactccttacacaaagccctgcctaacttcatacgctcatggtttataacactccataattacacaggcctttgtgtcataatttgatgactgtctgtcttctcctttgggtatgagaccttcaagggcaggggccagggctgtctgggtccctgctgttctcttctttgtgcacatgggtgggcggtggctaagcacagaggaagttctcagcacatatttgtgaatgaggagctaagattcacgcactcgcactgtgcctagctttgtgctaaatcctctatgcacctgatccaattggcgcttctcactggagtgtcggtcccataagggcagggagattcatccatcctggtcactgctgtgtctctagcacctggcacagtgcctgacacaaagtaggtgctcagtaaacatgttgggttttttgttgtttttgagataggttttcactttgtcacccagtctggagtgcagtggcacaaacacagctcaccgcagcctcgacctcctgggctcaagtgatcctcctacttcagctcccacaagtagctgggactgcagctatgtgccatcatgcctggctgatgtttatatgttttgtagagacgaggtttcaccatgttgcccaggctggtcttgaactcctgagttcaagcgatccacctgccttggcctcccaaagtgctgggattactggtatgaaccaccacgcccgacagtaaatatgttttgaatgaataaactctcataaatgaagtatgtgtgagtatcctggtttcccaagtaacaacagctgacttaactgctttctcaccagtactagttatggttcaaaacaccttccatggatttactcatttattcctcacaacagaggagtaaatcaagagggaggtgctgttattagcccgtcttacagatgagggaactgaggcacagagagatgaagccacctgccccaggtcacacagcaagtaaatagcaatgcctggattcaaactagggcagcatctgactctggactcgggttcttcaccgcagccctgaacaccccagagaggttcagagagcagaacgtgcccaagacgtcactgccgtttgaatccagacaggcttgcctcaccacccaggcttttaactgccaggaaggggagacgggttggtgtgggatatgatgaggtttctcttcaaataacccgatcaatcttttattctttaattgatagtaccccccacctttttcccttcttctcctcttttcctttttgcctttgttaaatgcccagacacgccacaataccaggcgttatcaataccagctcacattcctttccttatttaaaaaaaggactaactttctaactcatcacagacaccccttcccctttcctctctgctttcttttacgtgtccaccttatct

SEQ ID NO: 353506 - DNA, 890 bp, Homo sapiens
  misc_feature (857)..(857): n is a, c, g, or t
  misc_feature (885)..(885): n is a, c, g, or t
  misc_feature (890)..(890): n is a, c, g, or t
gtcatctcaccgccgtgcgcacccactcgtaactcgcacccgggtcctggctgcaccgcatcccctcctgcaccccctggatggcccttcagccaacgggggcctgggcgatggtcgaccacggagctgcgcaaggaaaagtcccgggatgcggcccgcagccggcgcagccaggagaccgaggtgctgtaccagctggctcacacgctgcccttcgcccgcggcgtcagcgcccacctggacaaggcctctatcatgcgcctcaccatcagctacctgcgcatgcaccgcctctgcgccgcagctggagctcattggacacagcatctttgatttcatccacccctgtgaccaagaggagcttcaggacgccctgaccccccagcagaccctgtccaggaggaaggtggaggcccccacggagcggtgcttctccttgcgcatgaagagtacgctcaccagccgcgggcgcaccctcaacctcaaggcggccacctggaaggtgctgaactgctctggacatatgagggcctacaagccacctgcgcagacttctccagctgggagccctgactcagagcccccgctgcagtgcctggtgctcatctgcgaagccatcccccacccaggcagcctggagcccccactgggccgaggggccttcctcagccgccacagcctggacatgaagttcacctactgtgacgacaggattgcagaagtggctggctatagtcccgatgacctgatcggctgttccgcctacgagtacatccacgcgctggactccgacgcggtcagcaagagcatccacaccttgctggagcaaaggggccaaggcagttaacaaggggcanattatcgcctttccttgggcccgggaanttggn

SEQ ID NO: 353507 - DNA, 762 bp, Homo sapiens
  misc_feature (706)..(706): n is a, c, g, or t
  misc_feature (723)..(723): n is a, c, g, or t
  misc_feature (758)..(758): n is a, c, g, or t
gtcatctcaccgccgtgcgcacccactcgtaactcgcacccgggtcctggctgcaccgcatcccctcctgcaccccctggatggcccttcagccaacgggggcctgggcgatggtcgaccacggagctgcgcaaggaaaagtcccgggatgcggcccgcagccggcgcagccaggagaccgaggtgctgtaccagctggctcacacgctgcccttcgcccgcggcgtcagcgcccacctggacaaggcctctatcatgcgcctcaccatcagctacctgcgcatgcaccgcctctgcgccgcagaggagcttcaggacgccctgaccccccagcagaccctgtccaggaggaaggtggaggcccccacggagcggtgcttctccttgcgcatgaagagtacgctcaccagccgcgggcgcaccctcaacctcaaggcggccacctggaaggtgctgaactgctctggacatatgagggcctacaagccacctgcgcagacttctccagctgggagccctgactcagagcccccgctgcagtgcctggtgctcatctgcgaagccatcccccacccaggcagcctggagggcttcgtcatggtgctcaccgccgagggagacatggcttacctgtcggagaatgtcagcaatcacctgggcctcagtcaagctggagctcattggacacagcatctttgatttcatncaccccttgtgaccaanaagagctttaaggacgcccttgaccccccaacttnaaca

SEQ ID NO: 353508 - DNA, 646 bp, Homo sapiens
cgaccaaaaggtgagaggactgcaagccggggcctgacccggaagagctgaaccgcagaaagggcattcaggacagttcaggtccccgggcaagtccagacattccttcggctcttgctcctttggcattgccctaggcagtcgtatgctcaggagaggaaagtctggagttcaggaaggatgtgggctggggatgtagcttgttgttttcccatctgctactgtgtgtgtggtttgtgtgtagtgtgtgcgtgttctgtgcatcattctgtgtgtgacattcttcattctgtgtggttttgtgtcctcacagcctctataggctccagctttctctgtggaagatgacagcaattatagcaggaccctgccaggctgtcgaaaagattccgcaataaaactttgccagtgggaagtacctagtgaaacggcctaagatgccacttcttctcatgtcccaggtgggggccctgccttgagccccagcttcactggtccctcttacccacagaggtgttgagcacgcccctgcctcctgcttcagcctcatccctcaccatttctctaaccctgatctctgctccagccaggccctcggtgggcccagcacatgccaagtttgtgccaatctctgtgcctttgccta

SEQ ID NO: 353509 - DNA, 2867 bp, Homo sapiens
tcagcttactgcagcctccgcgccctgggttcaagtgattctcctgcctcaacttcccaaatagccgggactacgggcatgtgccacattgcccggctaatttttgtatttttagtagagatggggtttcaccacgttgtccagtctggtctcgaactcctgacctcaagtgctccacctgcctcagccttccaaagtgctgggattacaggcgtgagccactgcacccggctagaactcactttctccaaatccctctgcttcgaatttcaccgtcttcagctctttctagttctgggcctcaccagcctctcattctgcctgttttcaaaccttacgatccccaaaaattgtctggttctgggcctctaactccctctggctctatagtctatgactaccagattcttttggttctagaattcactaacttcctctggttctagacctcttcctataaattaatccctcttgttttagatctcacaccctccaacgccctccggttccagatcttatattcagtgatttcctctggttctggaccccacaactccaagcttcctattggttccagttctcctgatcggtaatacatttggttccaaatccagacctcttaatctctctcttttttttttttttttttttgagacagagtcccactctgtcacccaggctggagtacagtggctcaatctcggctcactgcagcctccacctcctgggttcaagcaattcttgggcctcagcctcccaaatagctgggattacaggcatgtgccaccacgcccagctaagttttatatttttagtagagacagtgtttcaccatgttggccaggctggtcttgaactcccgacctcaactgatccacccgcctcagcctcccaaagtgctgaaattacaggagtgagcctggccagacttcttaatttctaaatcacttttgttttagaccttatgaggctcagcttattcttctgcagttctctataaccaagactcattttctctcatcaaaaacaagtacagagagtttgatgtgtttatctcttttttcttcctcttcttttttttttttttcttttttgagatggagtctctctctgttgcccaggctggagtataatggtgccatctaggctcactgcaacctccgcctcctgattcaagtgattctcctgcctcagcctcctaaattggtgggattacaggagcccaccaccacatccggctacctttgtgtattttttagtagagacggggttttgccaagttggaggggctggtcttgaactcttgacctcagatgatccacccgcctcagcctcccaaagtgctgggattacaggcataagccaccgtgcccgaccctgtccttatcttataataaccagttcttctagaaccagacgatgctctagttctcctagattctgaacctcatgacctgtaccactcactagttccagactacacaacttctagaaggtgccacctccagggtcctgattcaagatctggtgatctgctgtttctctggttctagaactgacttacaagtgccttctgattctagacctcattccgtaagttcccttggctctagacttcatcatttccagctcctcctcactcaagatctgactccaaattaccctgggtctagaattcagccttcaaatatcttctgattttagactttgccttatacatttctctggttttagatcttaccaccctcaactccttctgattctagatcttatggttcccaaatctctctggttctagaactcagattttaggcttttgtttttccttttttttgttaaaaaaaaaaaaatagagacggggtttcaccatgttgcccaggctggtcgcgaactactgagctcaagcaattctccctccttggcctcaccaaagtgctgggactacaggcatgagccactgagcccagccaggctttttctaattctatgctttattctataaattcctctgcttctaagcctcacagcttccaactgcctttgatttcagatccaaattcctctgattctataattcagcctccaaatgcttctgattctggaatctagacttttccctaaagattcctctggttctgaatcttataacctcaactccctaattccagaccccagcctcctaaatctattctgggcttcccaccccactgaacttacccaattccttctttcagtcttaagttttcccattctagacccctaccctctaggctgtgctgctcctggacttcatgcctctccattctcattgcctacaatctctgtgccccagaaccccctccacttcccaccccagccctccagacatgcacttaccttgactttaccccacatgtttggggcacctggggctccctcaccccttgggtggtttgcaatctgaagacttctccagccacacaggcacatgcacaggcacggtgctgtctgcatattgccaggtggggagagaagccaggacccctcagctgtctgccaccatctatgtgcctcccttaccccccagctttctttctacagatggtgctactcttggtctcccacaggaaaaggcctccccccttcttagccccatttaccccgtttgtggaaggcactgctcgctctgttttgtcagagagtggcctatccagattggtgctatgggggggtctgacccctccctcctccctctggaggtgatgtgggccctcaatggagggaattgtgctgggctagggaaaggggagggactagactggccacactggctctgaaactcaccaatctctatacaccataaagacctcaccttggtaggcaccaga

SEQ ID NO: 353510 - DNA, 2681 bp, Homo sapiens
tcagcttactgcagcctccgcgccctgggttcaagtgattctcctgcctcaacttcccaaatagccgggactacgggcatgtgccacattgcccggctaatttttgtatttttagtagagatggggtttcaccacgttgtccagtctggtctcgaactcctgacctcaagtgctccacctgcctcagccttccaaagtgctgggattacaggcgtgagccactgcacccggctagaactcactttctccaaatccctctgcttcgaatttcaccgtcttcagctctttctagttctgggcctcaccagcctctcattctgcctgttttcaaaccttacgatccccaaaaattgtctggttctgggcctctaactccctctggctctatagtctatgactaccagattcttttggttctagaattcactaacttcctctggttctagacctcttcctataaattaatccctcttgttttagatctcacaccctccaacgccctccggttccagatcttatattcagtgatttcctctggttctggaccccacaactccaagcttcctattggttccagttctcctgatcggtaatacatttggttccaaatccagacctcttaatctctctcttttttttttttttttttttgagacagagtcccactctgtcacccaggctggagtacagtggctcaatctcggctcactgcagcctccacctcctgggttcaagcaattcttgggcctcagcctcccaaatagctgggattacaggcatgtgccaccacgcccagctaagttttatatttttagtagagacagtgtttcaccatgttggccaggctggtcttgaactcccgacctcaactgatccacccgcctcagcctcccaaagtgctgaaattacaggagtgagcctggccagacttcttaatttctaaatcacttttgttttagaccttatgaggctcagcttattcttctgcagttctctataaccaagactcattttctctcatcaaaaacaagtacagagagtttgatgtgtttatctcttttttcttcctcttcttttttttttttttcttttttgagatggagtctctctctgttgcccaggctggagtataatggtgccatctaggctcactgcaacctccgcctcctgattcaagtgattctcctgcctcagcctcctaaattggtgggattacaggagcccaccaccacatccggctacctttgtgtattttttagtagagacggggttttgccaagttggaggggctggtcttgaactcttgacctcagatgatccacccgcctcagcctcccaaagtgctgggattacaggcataagccaccgtgcccgaccctgtccttatcttataataaccagttcttctagaaccagacgatgctctaacttcatcatttccagctcctcctcactcaagatctgactccaaattaccctgggtctagaattcagccttcaaatatcttctgattttagactttgccttatacatttctctggttttagatcttaccaccctcaactccttctgattctagatcttatggttcccaaatctctctggttctagaactcagattttaggcttttgtttttccttttttttgttaaaaaaaaaaaaatagagacggggtttcaccatgttgcccaggctggtcgcgaactactgagctcaagcaattctccctccttggcctcaccaaagtgctgggactacaggcatgagccactgagcccagccaggctttttctaattctatgctttattctataaattcctctgcttctaagcctcacagcttccaactgcctttgatttcagatccaaattcctctgattctataattcagcctccaaatgcttctgattctggaatctagacttttccctaaagattcctctggttctgaatcttataacctcaactccctaattccagaccccagcctcctaaatctattctgggcttcccaccccactgaacttacccaattccttctttcagtcttaagttttcccattctagacccctaccctctaggctgtgctgctcctggacttcatgcctctccattctcattgcctacaatctctgtgccccagaaccccctccacttcccaccccagccctccagacatgcacttaccttgactttaccccacatgtttggggcacctggggctccctcaccccttgggtggtttgcaatctgaagacttctccagccacacaggcacatgcacaggcacggtgctgtctgcatattgccaggtggggagagaagccaggacccctcagctgtctgccaccatctatgtgcctcccttaccccccagctttctttctacagatggtgctactcttggtctcccacaggaaaaggcctccccccttcttagccccatttaccccgtttgtggaaggcactgctcgctctgttttgtcagagagtggcctatccagattggtgctatgggggggtctgacccctccctcctccctctggaggtgatgtgggccctcaatggagggaattgtgctgggctagggaaaggggagggactagactggccacactggctctgaaactcaccaatctctatacaccataaagacctcaccttggtaggcaccaga

SEQ ID NO: 353511 - DNA, 1563 bp, Homo sapiens
gagccaaggaccctccctgactcccacctccctttctgccttgtaccccagccaggtggaagagaccggagtggtgctgtccctggagcaaacggagcaacactctcgcagacccattcagcggggcgccccctctcagaaggacacccctaaccctggggacagccttgacacccctggcccccggatccttgccttcctgcacccgccttccctgagcgaggctgccctggccgctgacccccgccgtttctgcagccctgacctccgtcgcctcctgggacccatcctggatggggcttcagtagcagccactcccagcaccccgctggccacacggcacccccaaagtcctctttcggctgatctcccagatgaactacctgtgggcaccgagaatgtgcacagactcttcacctccgggaaagacactgaggcagtggagacagatttagatatagctcaggatgctgatgctctggatttggagatgctggccccctacatctccatggatgatgacttccagctcaacgccagcgagcagctacccagggcctaccacagacctctgggggctgtcccccggccccgtgctcggagcttccatggcctgtcacctccagcccttgagccctccctgctaccccgctgggggagtgacccccggctgagctgctccagcccttccagaggggacccctcagcatcctctcccatggctggggctcggaagaggaccctggcccagagctcagaggacgaggacgagggagtggagctgctgggagtgagacctcccaaaaggtcccccagcccagaacacgaaaactttctgctctttcctctcagcctgagtttccttctgacaggaggaccagccccagggagcctgcaggcccactgaacttacccaattccttctttcagtcttaagttttcccattctagacccctaccctctaggctgtgctgctcctggacttcatgcctctccattctcattgcctacaatctctgtgccccagaaccccctccacttcccaccccagccctccagacatgcacttaccttgactttaccccacatgtttggggcacctggggctccctcaccccttgggtggtttgcaatctgaagacttctccagccacacaggcacatgcacaggcacggtgctgtctgcatattgccaggtggggagagaagccaggacccctcagctgtctgccaccatctatgtgcctcccttaccccccagctttctttctacagatggtgctactcttggtctcccacaggaaaaggcctccccccttcttagccccatttaccccgtttgtggaaggcactgctcgctctgttttgtcagagagtggcctatccagattggtgctatgggggggtctgacccctccctcctccctctggaggtgatgtgggccctcaatggagggaattgtgctgggctagggaaaggggagggactagactggccacactggctctgaaactcaccaatctctatacaccataaagacctcaccttggtaggcaccaga

SEQ ID NO: 353512 - DNA, 2283 bp, Homo sapiens
gtcatctcaccgccgtgcgcacccactcgtaactcgcacccgggtcctggctgcaccgcatcccctcctgcaccccctggatggcccttcagccaacgggggcctgggcgatggtcgaccacggagctgcgcaaggaaaagtcccgggatgcggcccgcagccggcgcagccaggagaccgaggtgctgtaccagctggctcacacgctgcccttcgcccgcggcgtcagcgcccacctggacaaggcctctatcatgcgcctcaccatcagctacctgcgcatgcaccgcctctgcgccgcaggggagtggaaccaggtgggagcagggggagaaccactggatgcctgctacctgaaggccctggagggcttcgtcatggtgctcaccgccgagggagacatggcttacctgtcggagaatgtcagcaaacacctgggcctcagtcagctggagctcattggacacagcatctttgatttcatccacccctgtgaccaagaggagcttcaggacgccctgaccccccagcagaccctgtccaggaggaaggtggaggcccccacggagcggtgcttctccttgcgcatgaagagtacgctcaccagccgcgggcgcaccctcaacctcaaggcggccacctggaaggtgctgaactgctctggacatatgagggcctacaagccacctgcgcagacttctccagctgggagccctgactcagagcccccgctgcagtgcctggtgctcatctgcgaagccatcccccacccaggcagcctggagcccccactgggccgaggggccttcctcagccgccacagcctggacatgaagttcacctactgtgacgacaggattgcagaagtggctggctatagtcccgatgacctgatcggctgttccgcctacgagtacatccacgcgctggactccgacgcggtcagcaagagcatccacaccttgctgagcaagggccaggcagtaacagggcagtatcgcttcctggcccggagtggtggctacctgtggacccagacccaggccacagtggtgtcagggggacggggcccccagtcggagagtatcgtctgtgtccattttttaatcagccaggtggaagagaccggagtggtgctgtccctggagcaaacggagcaacactctcgcagacccattcagcggggcgccccctctcagaaggacacccctaaccctggggacagccttgacacccctggcccccggatccttgccttcctgcacccgccttccctgagcgaggctgccctggccgctgacccccgccgtttctgcagccctgacctccgtcgcctcctgggacccatcctggatggggcttcagtagcagccactcccagcaccccgctggccacacggcacccccaaagtcctctttcggctgatctcccagatgaactacctgtgggcaccgagaatgtgcacagactcttcacctccgggaaagacactgaggcagtggagacagatttagatatagctcagatgaggaaactgaagctcagactgttgaccacaggcacagaactcagaagtgatggtgctgggacttcagccaaggtccacccaagtccaaggctcatcctcttacctccctcctgccctccgcaggatgctgatgctctggatttggagatgctggccccctacatctccatggatgatgacttccagctcaacgccagcgagcagctacccagggcctaccacagacctctgggggctgtcccccggccccgtgctcggagcttccatggcctgtcacctccagcccttgagccctccctgctaccccgctgggggagtgacccccggctgagctgctccagcccttccagaggggacccctcagcatcctctcccatggctggggctcggaagaggaccctggcccagagctcagaggacgaggacgagggagtggagctgctgggagtgagacctcccaaaaggtcccccagcccagaacacgaaaactttctgctctttcctctcagcctggtgtgttgggggattaatgggattctctggccctcattacctagctggcttaaacctactgttttatagataggaaaccagagaggggcaggggctggttgagggtcatacagaaagtcagtgggccagctgagactaaagcctgatcttctagtttcactaatgggtattaaaaacctctgcagtgaactgagattgcgccactgcaccccagcatgagcgacagaatgggaccttgtc

SEQ ID NO: 353513 - DNA, 1066 bp, Homo sapiens
gtcatctcaccgccgtgcgcacccactcgtaactcgcacccgggtcctggctgcaccgcatcccctcctgcaccccctggatggcccttcagccaacgggggcctgggcgatggtcgaccacggagctgcgcaaggaaaagtcccgggatgcggcccgcagccggcgcagccaggagaccgaggtgctgtaccagctggctcacacgctgcccttcgcccgcggcgtcagcgcccacctggacaaggcctctatcatgcgcctcaccatcagctacctgcgcatgcaccgcctctgcgccgcaggggagtggaaccaggtgggagcagggggagaaccactggatgcctgctacctgaaggccctggagggcttcgtcatggtgctcaccgccgagggagacatggcttacctgtcggagaatgtcagcaaacacctgggcctcagtcagctggagctcattggacacagcatctttgatttcatccacccctgtgaccaagaggagcttcaggacgccctgaccccccagcagaccctgtccaggaggaaggtggaggcccccacggagcggtgcttctccttgcgcatgaagagtacgctcaccagccgcgggcgcaccctcaacctcaaggcggccacctggaaggtgctgaactgctctggacatatgagggcctacaagccacctgcgcagacttctccagctgggagccctgactcagagcccccgctgcagtgcctggtgctcatctgcgaagccatcccccacccaggcagcctggagcccccactgggccgaggggccttcctcagccgccacagcctggacatgaagttcacctactgtgacgacagctcttcttcccctctccaccccttctcttcccttgtattagttccctgttgctgctgtaatatattaccacgaactcagtggctccaaacaacacaaactcactgtcttaccgttctggaggtcagaaatttgaaatgaggccaggcattgtggctcacgcctataaacctagcactttgggaggccaaggcaggaggatggcttgagg

SEQ ID NO: 353514 - DNA, 311 bp, Homo sapiens
ccagggcctaccacagacctctgggggctgtcccccggccccgtgctcggagcttccatggcctgtcacctccagcccttgagccctccctgctaccccgctgggggagtgacccccggctgagctgctccagcccttccagaggggacccctcagcatcctctcccatggctggggctcggaagaggtgagccacagtaaaggggggacatcaaggcagcatcccctcaccccgtcttgcccctgcctcctgcttcagcctcatccctcaccatttctctaaccctgatctctgctccagccaggccctc

SEQ ID NO: 353515 - DNA, 502 bp, Homo sapiens
ggggcttgcacctgtaatcccagctactcggaaggctgaggcaggagaatcgcttgaacctgggaggcggaggttgcagtgagccgagatcgcgccactgcactccagcctgggcgacagagtgagaccttgtcttaaaaaaataaaatgctgtcagaataaaaagcagtcaacagaaatgaaacccttataggagacaaataaatgtgggcaattattttctgcaaaatgccctccaagcccctgggcgccattgccttctgtaataggacatcacctgaacaggctttctgggctggagccaaggaccctccctgactcccacctccctttctgccttgtaccccagccaggtggaagagaccggagtggtgctgtccctggagcaaacggagcaacactctcgcagacccattcagcggggcgccccctctcagaaggacacccctaaccctggggacagccttggtatggggcagggctggggccgggaggggttgtg

SEQ ID NO: 353516 - DNA, 2400 bp, Homo sapiens
gtcatctcaccgccgtgcgcacccactcgtaactcgcacccgggtcctggctgcaccgcatcccctcctgcaccccctggatggcccttcagccaacgggggcctgggcgatggtcgaccacggagctgcgcaaggaaaagtcccgggatgcggcccgcagccggcgcagccaggagaccgaggtgctgtaccagctggctcacacgctgcccttcgcccgcggcgtcagcgcccacctggacaaggcctctatcatgcgcctcaccatcagctacctgcgcatgcaccgcctctgcgccgcagctggagctcattggacacagcatctttgatttcatccacccctgtgaccaagaggagcttcaggacgccctgaccccccagcagaccctgtccaggaggaaggtggaggcccccacggagcggtgcttctccttgcgcatgaagagtacgctcaccagccgcgggcgcaccctcaacctcaaggcggccacctggaaggtgctgaactgctctggacatatgagggcctacaagccacctgcgcagacttctccagctgggagccctgactcagagcccccgctgcagtgcctggtgctcatctgcgaagccatcccccacccaggcagcctggagcccccactgggccgaggggccttcctcagccgccacagcctggacatgaagttcacctactgtgacgacaggattgcagaagtggctggctatagtcccgatgacctgatcggctgttccgcctacgagtacatccacgcgctggactccgacgcggtcagcaagagcatccacaccttgctgagcaagggccaggcagtaacagggcagtatcgcttcctggcccggagtggtggctacctgtggacccagacccaggccacagtggtgtcagggggacggggcccccagtcggagagtatcgtctgtgtccattttttaatcagccaggtggaagagaccggagtggtgctgtccctggagcaaacggagcaacactctcgcagacccattcagcggggcgccccctctcagaaggacacccctaaccctggggacagccttgacacccctggcccccggatccttgccttcctgcacccgccttccctgagcgaggctgccctggccgctgacccccgccgtttctgcagccctgacctccgtcgcctcctgggacccatcctggatggggcttcagtagcagccactcccagcaccccgctggccacacggcacccccaaagtcctctttcggctgatctcccagatgaactacctgtgggcaccgagaatgtgcacagactcttcacctccgggaaagacactgaggcagtggagacagatttagatatagctcagaccccagcaccccactcctgaacctgaatgagcccctgggttttcactttgtcacccagtctggagtgcagtggcacaaacacagctcaccgcagcctcgacctcctgggctcaagtgatcctcctacttcagctcccacaagtagctgggactgcagctatgtgccatcatgcctggctgatgtttatatgttttgtagagacgaggtttcaccatgttgcccaggctggtcttgaactcctgagttcaagcgatccacctgccttggcctcccaaagtgctgggattactggtatgaaccaccacgcccgacagtaaatatgttttgaatgaataaactctcataaatgaagtatgtgtgagtatcctggtttcccaagtaacaacagctgacttaactgctttctcaccagtactagttatggttcaaaacaccttccatggatttactcatttattcctcacaacagaggagtaaatcaagagggaggtgctgttattagcccgtcttacagatgagggaactgaggcacagagagatgaagccacctgccccaggtcacacagcaagtaaatagcaatgcctggattcaaactagggcagcatctgactctggactcgggttcttcaccgcagccctgaacaccccagagaggttcagagagcagaacgtgcccaagacgtcactgccgtttgaatccagacaggcttgcctcaccacccaggcttttaactgccaggaaggggagacgggttggtgtgggatatgatgaggtttctcttcaaataacccgatcaatcttttattctttaattgatagtaccccccacctttttcccttcttctcctcttttcctttttgcctttgttaaatgcccagacacgccacaataccaggcgttatcaataccagctcacattcctttccttatttaaaaaaaggactaactttctaactcatcacagacaccccttcccctttcctctctgctttcttttacgtgtccaccttatct

SEQ ID NO: 353517 - DNA, 326 bp, Homo sapiens
cactgcctccccacctcaacaccagctccctgctccccaagccccaaggaactgtctccttccttgccccctcatacccagtccccagatatttctctccccatttgcccccttggtggccctgatccctcccgatccccctcctcagtgctgagcaagggccaggcagtaacagggcagtatcgcttcctggcccggagtggtggctacctgtggacccagacccaggccacagtggtgtcagggggacggggcccccagtcggagagtatcgtctgtgtccattttttaatcaggtaagcaggaggaggggctggggtggctgt

SEQ ID NO: 353518 - DNA, 3413 bp, Homo sapiens
tcagcttactgcagcctccgcgccctgggttcaagtgattctcctgcctcaacttcccaaatagccgggactacgggcatgtgccacattgcccggctaatttttgtatttttagtagagatggggtttcaccacgttgtccagtctggtctcgaactcctgacctcaagtgctccacctgcctcagccttccaaagtgctgggattacaggcgtgagccactgcacccggctagaactcactttctccaaatccctctgcttcgaatttcaccgtcttcagctctttctagttctgggcctcaccagcctctcattctgcctgttttcaaaccttacgatccccaaaaattgtctggttctgggcctctaactccctctggctctatagtctatgactaccagattcttttggttctagaattcactaacttcctctggttctagacctcttcctataaattaatccctcttgttttagatctcacaccctccaacgccctccggttccagatcttatattcagtgatttcctctggttctggaccccacaactccaagcttcctattggttccagttctcctgatcggtaatacatttggttccaaatccagacctcttaatctctctcttttttttttttttttttttgagacagagtcccactctgtcacccaggctggagtacagtggctcaatctcggctcactgcagcctccacctcctgggttcaagcaattcttgggcctcagcctcccaaatagctgggattacaggcatgtgccaccacgcccagctaagttttatatttttagtagagacagtgtttcaccatgttggccaggctggtcttgaactcccgacctcaactgatccacccgcctcagcctcccaaagtgctgaaattacaggagtgagcctggccagacttcttaatttctaaatcacttttgttttagaccttatgaggctcagcttattcttctgcagttctctataaccaagactcattttctctcatcaaaaacaagtacagagagtttgatgtgtttatctcttttttcttcctcttcttttttttttttttcttttttgagatggagtctctctctgttgcccaggctggagtataatggtgccatctaggctcactgcaacctccgcctcctgattcaagtgattctcctgcctcagcctcctaaattggtgggattacaggagcccaccaccacatccggctacctttgtgtattttttagtagagacggggttttgccaagttggaggggctggtcttgaactcttgacctcagatgatccacccgcctcagcctcccaaagtgctgggattacaggcataagccaccgtgcccgaccctgtccttatcttataataaccagttcttctagaaccagacgatgctctagttctcctagattctgaacctcatgacctgtaccactcactagttccagactacacaacttctagaaggtgccacctccagggtcctgattcaagatctggtgatctgctgtttctctggttctagaactgacttacaagtgccttctgattctagacctcattccgtaagttcccttggctctagacttcatcatttccagctcctcctcactcaagatctgactccaaattaccctgggtctagaattcagccttcaaatatcttctgattttagactttgccttatacatttctctggttttagatcttaccaccctcaactccttctgattctagatcttatggttcccaaatctctctggttctagaactcagattttaggcttttgtttttccttttttttgttaaaaaaaaaaaaatagagacggggtttcaccatgttgcccaggctggtcgcgaactactgagctcaagcaattctccctccttggcctcaccaaagtgctgggactacaggcatgagccactgagcccagccaggctttttctaattctatgctttattctataaattcctctgcttctaagcctcacagcttccaactgcctttgatttcagatccaaattcctctgattctataattcagcctccaaatgcttctgattctggaatctagacttttccctaaagattcctctggttctgaatcttataacctcaactccctaattccagaccccagcctcctaaatctattctgggcttcccaccccactgaacttacccaattccttctttcagtcttaagttttcccattctagacccctaccctctaggctgtgctgctcctggacttcatgcctctccattctcattgcctacaatctctgtgccccagaaccccctccacttcccaccccagccctccagacatgcacttaccttgactttaccccacatgtttggggcacctggggctccctcaccccttgggtggtttgcaatctgaagacttctccagccacacaggcacatgcacaggcacggtgctgtctgcatattgccaggtggggagagaagccaggacccctcagctgtctgccaccatctatgtgcctcccttaccccccagctttctttctacagatggtgctactcttggtctcccacaggaaaaggcctccccccttcttagccccatttaccccgtttgtggaaggcactgctcgctctgttttgtcagagagtggcctatccagattggtgctatgggggggtctgacccctccctcctccctctggaggtgatgtgggccctcaatggagggaattgtgctgggctagggaaaggggagggactagactggccacactggctctgaaactcaccaatctctatacaccataaagacctcaccttggtaggcaccagaaaaaagaagaacaaaacacatacaaacaaaaacaaaaaacacagagggggcgcgcgccgcgaccaaagatatatcccgcccgacgagggcccccaaacctcaaacgcgacaccaccaggctcttccgcacaacaaggggcgccccccaataagcgtgaccaccgacttctaacaacggcaaggaccctgcggcccgacgctattccaccacacctcgcgcaaaccgcggaacaacgcggcgacccgctggaaacaaccctcggaaaacagagaccctaacacccaggaggaggagtgacacaccatcatggcgcgcccaacccactcccccccacacagcgccttctcacaaggcccccacagagccgacacccctcagcaacaacatacacgcgacggatcacacgcgccggtccaaacaccgacgccgcgcccaatgcaccacagcgcgcaacgtgcacaaaacagctgaccgcaccaccgaaggaacacagcagccaccacgcaccaccaactttcacaccccggggaccccgacggcgccca

SEQ ID NO: 353519 - DNA, 2564 bp, Homo sapiens
cgccacagagaggagcgaggcgccagaggcaccatggactggcaagaccacaggtcgaccacggagctgcgcaaggaaaagtcccgggatgcggcccgcagccggcgcagccaggagaccgaggtgctgtaccagctggctcacacgctgcccttcgcccgcggcgtcagcgcccacctggacaaggcctctatcatgcgcctcaccatcagctacctgcgcatgcaccgcctctgcgccgcaggggagtggaaccaggtgggagcagggggagaaccactggatgcctgctacctgaaggccctggagggcttcgtcatggtgctcaccgccgagggagacatggcttacctgtcggagaatgtcagcaaacacctgggcctcagtcagctggagctcattggacacagcatctttgatttcatccacccctgtgaccaagaggagcttcaggacgccctgaccccccagcagaccctgtccaggaggaaggtggaggcccccacggagcggtgcttctccttgcgcatgaagagtacgctcaccagccgcgggcgcaccctcaacctcaaggcggccacctggaaggtgctgaactgctctggacatatgagggcctacaagccacctgcgcagacttctccagctgggagccctgactcagagcccccgctgcagtgcctggtgctcatctgcgaagccatcccccacccaggcagcctggagcccccactgggccgaggggccttcctcagccgccacagcctggacatgaagttcacctactgtgacgacaggattgcagaagtggctggctatagtcccgatgacctgatcggctgttccgcctacgagtacatccacgcgctggactccgacgcggtcagcaagagcatccacaccttgctgagcaagggccaggcagtaacagggcagtatcgcttcctggcccggagtggtggctacctgtggacccagacccaggccacagtggtgtcagggggacggggcccccagtcggagagtatcgtctgtgtccattttttaatcagccaggtggaagagaccggagtggtgctgtccctggagcaaacggagcaacactctcgcagacccattcagcggggcgccccctctcagaaggacacccctaaccctggggacagccttgacacccctggcccccggatccttgccttcctgcacccgccttccctgagcgaggctgccctggccgctgacccccgccgtttctgcagccctgacctccgtcgcctcctgggacccatcctggatggggcttcagtagcagccactcccagcaccccgctggccacacggcacccccaaagtcctctttcggctgatctcccagatgaactacctgtgggcaccgagaatgtgcacagactcttcacctccgggaaagacactgaggcagtggagacagatttagatatagctcaggatgctgatgctctggatttggagatgctggccccctacatctccatggatgatgacttccagctcaacgccagcgagcagctacccagggcctaccacagacctctgggggctgtcccccggccccgtgctcggagcttccatggcctgtcacctccagcccttgagccctccctgctaccccgctgggggagtgacccccggctgagctgctccagcccttccagaggggacccctcagcatcctctcccatggctggggctcggaagaggaccctggcccagagctcagaggacgaggacgagggagtggagctgctgggagtgagacctcccaaaaggtcccccagcccagaacacgaaaactttctgctctttcctctcagcctgagtttccttctgacaggaggaccagccccagggagcctgcaggcccactgaacttacccaattccttctttcagtcttaagttttcccattctagacccctaccctctaggctgtgctgctcctggacttcatgcctctccattctcattgcctacaatctctgtgccccagaaccccctccacttcccaccccagccctccagacatgcacttaccttgactttaccccacatgtttggggcacctggggctccctcaccccttgggtggtttgcaatctgaagacttctccagccacacaggcacatgcacaggcacggtgctgtctgcatattgccaggtggggagagaagccaggacccctcagctgtctgccaccatctatgtgcctcccttaccccccagctttctttctacagatggtgctactcttggtctcccacaggaaaaggcctccccccttcttagccccatttaccccgtttgtggaaggcactgctcgctctgttttgtcagagagtggcctatccagattggtgctatgggggggtctgacccctccctcctccctctggaggtgatgtgggccctcaatggagggaattgtgctgggctagggaaaggggagggactagactggccacactggctctgaaactcaccaatctctatacaccataaagacctcaccttggtaggcaccaga

SEQ ID NO: 353520 - DNA, 1040 bp, Homo sapiens
gtcatctcaccgccgtgcgcacccactcgtaactcgcacccgggtcctggctgcaccgcatcccctcctgcaccccctggatggcccttcagccaacgggggcctgggcgatggtcgaccacggagctgcgcaaggaaaagtcccgggatgcggcccgcagccggcgcagccaggagaccgaggtgctgtaccagctggctcacacgctgcccttcgcccgcggcgtcagcgcccacctggacaaggcctctatcatgcgcctcaccatcagctacctgcgcatgcaccgcctctgcgccgcaggggagtggaaccaggtgggagcagggggagaaccactggatgcctgctacctgaaggccctggagggcttcgtcatggtgctcaccgccgagggagacatggcttacctgtcggagaatgtcagcaaacacctgggcctcagtcagctggagctcattggacacagcatctttgatttcatccacccctgtgaccaagaggagcttcaggacgccctgaccccccagcagaccctgtccaggaggaaggtggaggcccccacggagcggtgcttctccttgcgcatgaagagtacgctcaccagccgcgggcgcaccctcaacctcaaggcggccacctggaaggtgctgaactgctctggacatatgagggcctacaagccacctgcgcagacttctccagctgggagccctgactcagagcccccgctgcagtgcctggtgctcatctgcgaagccatcccccacccaggcagcctggagcccccactgggccgaggggccttcctcagccgccacagcctggacatgaagttcacctactgtgacgacaggattgcagaagtggctggctatagtcccgatgacctgatcggctgttccgcctacgagtacatccacgcgctggactccgacgcggtcagcaagagcatccacacctgtatgtatcccatttccccaggtgcgaagccagctgccacatggcccccagctgacaccaggaccccccagctccc

SEQ ID NO: 353521 - DNA, 1064 bp, Homo sapiens
gcacgaggctactgtcacatttcagtgatgtcacagctgcaggtggtacagagccagcaccaccatctgatgcccagcctgagtgctggctgaactgagaggaacagggttggtgcctggcactggtgttgctccattcatctctgaggtctcacagccccagcatgagtccatcagcaaagaagaggcccaagaacagcagggtttccaagatgcaagatgagaaactgcgggacgagacagagcagcctgtgagcaaagtaattgagcggaaccgtctgagaacggtgttaaaaaacttgtcgctcttgaagctactcaagagctcaaaccgccggatccaagaactgcataagctggccaaaaggtgttggcattcactgctcagtgttccaaagattctccgcatctcctctggggaaaacagtgcctgcaataaaacaaaacaaaataatgaagagttccaggagatcgggtgctccgagaaggaactcaagtccaagaaattagagtccacaggggaccctaagaaaaaagagtacaaggagtggaagtcccaggtgcagtcagggatgaggaacaaggagaaaacgtcattggcggcaatgccacggaaagaaaagcatatagagcctgaggttccaaggacatcgagggatgatagcttgaaccctggagtccaggggaggcaaccactcaccgagggcccccgagtcatcttcattaagccctaccgcaatagaactcccatggggcacatgaagcagctggatgtagccgaccagtggatctggtttgaggggctgcccacacgaatccacctcccggcgcccagggtgatgtgcagatcctccaccctgcgttgggtcaagcgccgctgcacccgcttctgctccgcatcacttgaaatgcctatgtggcatccatacaaggttgatgtgacctggacgagagccagaggtgcgagcagagggtggagatcgcgccatcagctgaaggggaggaatgggtggcgaaattcacgagtctacaaataagatcttccatatggcacctaagacgaa

SEQ ID NO: 353522 - DNA, 325 bp, Homo sapiens
tttttttttttggtagagtcagggtttcaccatgttggccaggcatctcaaactcctgacctcaaatgagccacccacctcggcctcccaaagtgctgggattacagacatgaggcaccacacctggctgattcctctgggtttatgtctctcttatcctctgtccctcagatgcaagatgagaaactgcgggacgagacagagcagcctgtgagcaaagtaattgagcggaaccgtctgagaacggtgagacgccctgttttggccccagcttggggaagctcatatactcatgcagtactgcccctggttgccaggctgagtg

SEQ ID NO: 353523 - DNA, 1856 bp, Homo sapiens
taccatgcctccgagacaagttcaaaccgtttcctcataagtcacatgacagtattaagaaagctaacattgattggtgcctgctaagtaccatcctacagtgttaagcacttaagaattttcccatttagtttattcttcacaacaatcctgttaggtagacagaattatcctagttttacagataaggaagctaaggctctgagaggttaaatatcttgcccaaatcacacaggtggtaagaggcagaagcagaatctgagcccgtttgtctgaatccaacacctgtgctctgtaagccactctgtttcactgccttctacttcacagaaatagtaaggatcccaagttgtaagggtcccgagtctggcatagagcgaggactcaatcagcgggagccattattatcatcacagtattgccattatctgcagcccaaggcctcatctctctccacgcccttggctaggatggtgttgccactgggggtttgcagggggcccagtctgttacagacaccctttgggaaagtctcagcatttaatatttctgtcaaggccacctttctgggctcctctttctgatttggcctctagtcgcaggcaatcaggaaacatagagctagaaggatcaggatcatctagccccatcattttccaacttaaaaattttttttttgtatggagacagagtctcaccatgttgcccaggctggtcttgaacagttttccaactttattaaagcagtgaaacctctgttcaaatatctatttccaagccccaattgtgttgttatgagctggggagaggtatcctgccccagtgggtcaggggaggtgacattgagacacctcctcagaaccctaaggttcttggagcacaatttagaaaaactactggactgttcaccctcccagctgaagtccagagagacagaaccctaatctagtggcagatgatgtagacaatattcattcttaggggccttaactactagtcatggctttcaccttcccaatctctcacatccctctgctagtgctcatcacacctcctcacaccagcacaaggcctctgggcagtagagaagtttctttgcaggcccctctagcctttcttaacaggctcccctgagctggctacatagcaactgtctcgggaaccagggcctcggtcctgctgtgctgactgcctttcctctccctgccagggaaaacagtgcctgcaataaaacaaaacaaaataatgaagagttccaggagatcgggtgctccgagaaggaactcaagtccaagaaattagagtccacaggggaccctaagaaaaaagagtacaaggagtggaagtcccaggtgcagtcagggatgaggaacaaggagaaaacgtcattggcggcaatgccacggaaagaaaagcatatagagcctgaggttccaaggacatcgagggatgatagcttgaaccctggagtccaggggaggcaaccactcaccgagggcccccgagtcatcttcattaagccctaccgcaatagaactcccatggggcacatgaagcagctggatgtagccgaccagtggatctggtttgaggggctgcccacacgaatccacctcccggcgcccagggtgatgtgcagatcctccaccctgcgttgggtcaagcgccgctgcacccgcttctgctccgcatcacttgaaatgcctatgtggcatccatacaaggttgatgtgacctggacgagagccagaggtgcgagcagagggtggagatcgcgccatcagctgaaggggaggaatgggtggcgaaattcacgagtctacaaataagatcttccatatggcacctaagacgaa

SEQ ID NO: 353524 - DNA, 2326 bp, Homo sapiens
taccatgcctccgagacaagttcaaaccgtttcctcataagtcacatgacagtattaagaaagctaacattgattggtgcctgctaagtaccatcctacagtgttaagcacttaagaattttcccatttagtttattcttcacaacaatcctgttaggtagacagaattatcctagttttacagataaggaagctaaggctctgagaggttaaatatcttgcccaaatcacacaggtggtaagaggcagaagcagaatctgagcccgtttgtctgaatccaacacctgtgctctgtaagccactctgtttcactgccttctacttcacagaaatagtaaggatcccaagttgtaagggtcccgagtctggcatagagcgaggactcaatcagcgggagccattattatcatcacagtattgccattatctgcagcccaaggcctcatctctctccacgcccttggctaggatggtgttgccactgggggtttgcagggggcccagtctgttacagacaccctttgggaaagtctcagcatttaatatttctgtcaaggccacctttctgggctcctctttctgatttggcctctagtcgcaggcaatcaggaaacatagagctagaaggatcaggatcatctagccccatcattttccaacttaaaaattttttttttgtatggagacagagtctcaccatgttgcccaggctggtcttgaacagttttccaactttattaaagcagtgaaacctctgttcaaatatctatttccaagccccaattgtgttgttatgagctggggagaggtatcctgccccagtgggtcaggggaggtgacattgagacacctcctcagaaccctaaggttcttggagcacaatttagaaaaactactggactgttcaccctcccagctgaagtccagagagacagaaccctaatctagtggcagatgatgtagacaatattcattcttaggggccttaactactagtcatggctttcaccttcccaatctctcacatccctctgctagtgctcatcacacctcctcacaccagcacaaggcctctgggcagtagagaagtttctttgcaggcccctctagcctttcttaacaggctcccctgagctggctacatagcaactgtctcgggaaccagggcctcggtcctgctgtgctgactgcctttcctctccctgccagggaaaacagtgcctgcaataaaacaaaacaaaataatgaagagttccaggagatcgggtgctccgagaaggaactcaagtccaagaaattagagtccacaggggaccctaagaaaaaagagtacaaggagtggaagtcccaggtgcagtcagggatgaggaacaaggagaaaacgtcattggcggcaatgccacggaaagaaaagcatatagagcctgaggttccaaggacatcgagggatgatagcttgaaccctggagtccaggggaggcaaccactcaccgagggcccccgagtcatcttcattaagccctaccgcaatagaactcccatggggcacatgaagcagctggatgtagccgaccagtggatctggtttgaggggctgcccacacgaatccacctcccggcgcccagggtgatgtgcagatcctccaccctgcgttgggtcaagcgccgctgcacccgcttctgctccgcatcacttgaaatgcctatgtggcatccatacaaggtgggtgtgacaacaacactgccaggctaggtgagatgcaagccccaagccaggcccagagctgggccccagagtcagggttcaggatctggagtcttgagtggtgtgtggctggtagtgctgggaggctccgccttcatgtccagagagggggaagccttagaccaacatcatacagaagggtagtgactaggttgaggcgtctcaggatacagctaggagatgtgtggaaggaggggcactgaagtgagccatctcactgcctgaaggccttagcagaggtggaaactgctgtggctctgaatctcacagtcagaggcctacataagtgggtttaaggatttccaaatgtgggaggggggagatggtcaagtagggctttgctgcatcccattccctctaagatcaattcaactctctatttatgtttgattgattcatgcctcaaataagatttactctgaacaggctaggcatggtggctcacgcctgtaatcccagcaccttgggaggtcgaggcaggaagactgcttgaggccaggagttcaagaccatcctgggcaacataatgagacactgtctctacaaaaaatttaaaaatt

SEQ ID NO: 353525 - DNA, 2272 bp, Homo sapiens
agcaggccctctcgacgtcggcctgtggggagcgatgccgacaagcaggagcggtcccggcttcggaaagggcccaccctgaggaatggtccggccgggcctagcgaggatgtccctaccgcgatgctggttccgttacccagggtggacaggcgcggaagcgggacggggaagagcgatagtttcgcggcgtttgcccagcctcaacccctgggatgcgggtgagagacatggaggactggtcagaatttgcgcgtccctggggccgcacaaaaggctcccagccggcctcccgcaatgtcctcacctgtacctggcagccgaccccctggatccgcagcgccgccaggagaagtcctgcgcagcgctgggaaacgacaaaagaaggcagcctgacgggcagcgacagccacagcaacagcaacagccccactgccgccggggattccaggccccagcccttccgaatccgctacgggtgctgcaaggcctgggaagagtttcgatgtctctagggtggctagagcgtcctcccgcgctcagtcgcgctgcaggtgacggcgcccggaggctgtcgggaagtaggcggggtgacgtgtggttgacgagctcggcggcgggtttgctgagatctgtggccggcggcagctggtgcggggggcagctgagagcgagaggtggatcggggcggtgtgtggccagggccatgacgggcaatgccggggagtggtgcctcatggaaagcgaccccggggtcttcaccgagctcattaaaggattcggttgccgaggagcccaagtagaagaaatatggagtttagagcctgagaattttgaaaaattaaagccagttcatgggttaatttttcttttcaagtggcagccaggagaagaaccagcaggctctgtggttcaggactcccgacttgacacgatattttttgctaagcaggtaattaataatgcttgtgctactcaagccatagtgagtgtgttactgaactgtacccaccaggatgtccatttaggcgagacattatcagagtttaaagaattttcacaaagttttgatgcagctatgaaaggcttggcactgagcaattcagatgtgattcgacaagtacacaacagtttcgccagacagcaaatgtttgaatttgatacgaagacatcagcaaaagaagaagatgcttttcactttgtcagttatgttcctgttaatgggagactgtatgaattagatggattaagagaaggaccgattgatttaggtgcatgcaatcaagatgattggatcagtgcagtaaggcctgtcatagaaaaaaggatacaaaagtacagtgaaggtgaaattcgatttaatttaatggccattgtgtctgacagaaaaatgatatatgagcagaagatagcagagttacaaagacaacttgcagaggaacccatggatacagatcaaggtaatagtatgttaagtgctattcagtcagaagttgccaaaaatcagatgcttattgaagaagaagtacagaaattaaaaagatacaagattgagaatatcagaaggaagcataattatctgcctttcattatggaattgttaaagactttagcagaacaccagcagttaataccactagtagaaaaggcaaaagaaaaacagaacgcaaagaaagctcaggaaaccaaatgaagatgttttcagatatgtacacatttctgcttctgcacatattttcatggaaaccattatgtataaagaacttagagcaacatcctaattggctcagtgcacgtttggcaatagtgccagcctgtcttgtctttaatgcatggattcataaacttcttccctacctgcatcatgtgcatgtagtgcatattaaatgaaagtgatattaagaatgctttcccaaattccattatttgacattgagtctgacaactgttagttttctggttgtctaactaccatatgaagctagaaaatgcacaaacgatattccttatctgtaatttaaatacttaaaatttgcaattgtcagatcttgattaaactggttgtcttatttcttctcatcattaacggaaaaaaaatcagtatttctatctttgatatctaagtgttttgaggattttaaaactgaattttatctgctataccagttatttgagaaagtatgattttaatgtaaatcatttaaaaaggacaaaagtataatttccagtgattttcactgctgtcagtagaaaagtaataaacatctcaatt

SEQ ID NO: 353526 - DNA, 2561 bp, Homo sapiens
agcaggccctctcgacgtcggcctgtggggagcgatgccgacaagcaggagcggtcccggcttcggaaagggcccaccctgaggaatggtccggccgggcctagcgaggatgtccctaccgcgatgctggttccgttacccagggtggacaggcgcggaagcgggacggggaagagcgatagtttcgcggcgtttgcccagcctcaacccctgggatgcgggtgagagacatggaggactggtcagaatttgcgcgtccctggggccgcacaaaaggctcccagccggcctcccgcaatgtcctcacctgtacctggcagccgaccccctggatccgcagcgccgccaggagaagtcctgcgcagcgctgggaaacgacaaaagaaggcagcctgacgggcagcgacagccacagcaacagcaacagccccactgccgccggggattccaggccccagcccttccgaatccgctacgggtgctgcaaggcctgggaagagtttcgatgtctctagggtggctagagcgtcctcccgcgctcagtcgcgctgcaggtgacggcgcccggaggctgtcgggaagtaggcggggtgacgtgtggttgacgagctcggcggcgggtttgctgagatctgtggccggcggcagctggtgcggggggcagctgagagcgagaggtggatcggggcggtgtgtggccagggccatgacgggcaatgccggggagtggtgcctcatggaaagcgaccccggggtcttcaccgagctcattaaaggattcggttgccgaggagcccaagtagaagaaatatggagtttagagcctgagaattttgaaaaattaaagccagttcatgggttaatttttcttttcaagtggcagccaggagaagaaccagcaggctctgtggttcaggactcccgacttgacacgatattttttgctaagcaggtaattaataatgcttgtgctactcaagccatagtgagtgtgttactgaactgtacccaccaggatgtccatttaggcgagacattatcagagtttaaagaattttcacaaagttttgatgcagctatgaaaggcttggcactgagcaattcagatgtgattcgacaagtacacaacagtttcgccagacagcaaatgtttgaatttgatacgaagacatcagcaaaagaagaagatgcttttcactttgtcagttatgttcctgttaatgggagactgtatgaattagatggattaagagaaggaccgattgatttaggtgcatgcaatcaagatgattggatcagtgcagtaaggcctgtcatagaaaaaaggatacaaaagtacagtgaaggtgaaattcgatttaatttaatggccattgtgtctgacagaaaaatgatatatgagcagaagatagcagagttacaaagacaacttgcagaggaacccatggatacagatcaaggtaatagtatgttaagtgctattcagtcagaagttgccaaaaatcagatgcttattgaagaagaagtacagaaattaaaaagatacaagattgagaatatcagaaggaagcataattatctgcctttcattatggaattgttaaagactttagcagaacaccagcagttaataccactagtagaaaaggcaaaagaaaaacagaacgcaaagaaagctcaggaaaccaaatgaagatgttttcagatatgtacacatttctgcttctgcacatattttcatggaaaccattatgtataaagaacttagagcaacatcctaattggctcagtgcacgtttggcaatagtgccagcctgtcttgtctttaatgcatggattcataaacttcttccctacctgcatcatgtgcatgtagtgcatattaaatgaaagtgatattaagaatgctttcccaaattccattatttgacattgagtctgacaactgttagttttctggttgtctaactaccatatgaagctagaaaatgcacaaacgatattccttatctgtaatttaaatacttaaaatttgcaattgtcagatcttgattaaactggttgtcttatttcttctcatcattaacggaaaaaaaatcagtatttctatctttgatatctaagtgttttgaggattttaaaactgaattttatctgctataccagttatttgagaaagtatgattttaatgtaaatcatttaaaaaggacaaaagtataatttccagtgattttcactgctgtcagtagaaaagtaataaacatctcaattttattttagtaaattttcttcaagtgtttggggttatttgtttatgtattagagaattgtttcaggaaggtctgagtattatgcttcaaagcaaaatttcaggttaagaagaaattgtaaatcttaaagaatgttggtgttactctcaatggaatattgtttcaagcttgtaagctgtgtataaaaaaactggaggtctgacagttcatgttatctgcttttttaaaaagatggtagtggtgatgggggtctttctatgccaatttgaataaatttcgtacagcctgca

SEQ ID NO: 353527 - DNA, 3912 bp, Homo sapiens
agcaggccctctcgacgtcggcctgtggggagcgatgccgacaagcaggagcggtcccggcttcggaaagggcccaccctgaggaatggtccggccgggcctagcgaggatgtccctaccgcgatgctggttccgttacccagggtggacaggcgcggaagcgggacggggaagagcgatagtttcgcggcgtttgcccagcctcaacccctgggatgcgggtgagagacatggaggactggtcagaatttgcgcgtccctggggccgcacaaaaggctcccagccggcctcccgcaatgtcctcacctgtacctggcagccgaccccctggatccgcagcgccgccaggagaagtcctgcgcagcgctgggaaacgacaaaagaaggcagcctgacgggcagcgacagccacagcaacagcaacagccccactgccgccggggattccaggccccagcccttccgaatccgctacgggtgctgcaaggcctgggaagagtttcgatgtctctagggtggctagagcgtcctcccgcgctcagtcgcgctgcaggtgacggcgcccggaggctgtcgggaagtaggcggggtgacgtgtggttgacgagctcggcggcgggtttgctgagatctgtggccggcggcagctggtgcggggggcagctgagagcgagaggtggatcggggcggtgtgtggccagggccatgacgggcaatgccggggagtggtgcctcatggaaagcgaccccggggtcttcaccgagctcattaaaggattcggttgccgaggagcccaagtagaagaaatatggagtttagagcctgagaattttgaaaaattaaagccagttcatgggttaatttttcttttcaagtggcagccaggagaagaaccagcaggctctgtggttcaggactcccgacttgacacgatattttttgctaagcaggtaattaataatgcttgtgctactcaagccatagtgagtgtgttactgaactgtacccaccaggatgtccatttaggcgagacattatcagagtttaaagaattttcacaaagttttgatgcagctatgaaaggcttggcactgagcaattcagatgtgattcgacaagtacacaacagtttcgccagacagcaaatgtttgaatttgatacgaagacatcagcaaaagaagaagatgcttttcactttgtcagttatgttcctgttaatgggagactgtatgaattagatggattaagagaaggaccgattgatttaggtgcatgcaatcaagatgattggatcagtgcagtaaggcctgtcatagaaaaaaggatacaaaaagacgggttttcaccatgttgcccaggctggtctcagactcctgagctcaagccatccgcctgcctcgacctcccaaagtggtacagtgaaggtgaaattcgatttaatttaatggccattgtgtctgacagaaaaatgatatatgagcagaagatagcagagttacaaagacaacttgcagaggaacccatggatacagatcaaggtaatagtatgttaagtgctattcagtcagaagttgccaaaaatcagatgcttattgaagaagaagtacagaaattaaaaagatacaagattgagaatatcagaaggaagcataattatctgcctttcattatggaattgttaaagactttagcagaacaccagcagttaataccactagtagaaaaggcaaaagaaaaacagaacgcaaagaaagctcaggaaaccaaatgaagatgttttcagatatgtacacatttctgcttctgcacatattttcatggaaaccattatgtataaagaacttagagcaacatcctaattggctcagtgcacgtttggcaatagtgccagcctgtcttgtctttaatgcatggattcataaacttcttccctacctgcatcatgtgcatgtagtgcatattaaatgaaagtgatattaagaatgctttcccaaattccattatttgacattgagtctgacaactgttagttttctggttgtctaactaccatatgaagctagaaaatgcacaaacgatattccttatctgtaatttaaatacttaaaatttgcaattgtcagatcttgattaaactggttgtcttatttcttctcatcattaacggaaaaaaaatcagtatttctatctttgatatctaagtgttttgaggattttaaaactgaattttatctgctataccagttatttgagaaagtatgattttaatgtaaatcatttaaaaaggacaaaagtataatttccagtgattttcactgctgtcagtagaaaagtaataaacatctcaattttattttagtaaattttcttcaagtgtttggggttatttgtttatgtattagagaattgtttcaggaaggtctgagtattatgcttcaaagcaaaatttcaggttaagaagaaattgtaaatcttaaagaatgttggtgttactctcaatggaatattgtttcaagcttgtaagctgtgtataaaaaaactggaggtctgacagttcatgttatctgcttttttaaaaagatggtagtggtgatgggggtctttctatgccaatttgaataaatttcgtacagcctgcagttttcaagagccatatgtaatttgctcacaattgatttttaaaaattgatttgggagttgctttgtaataatcttctgcttctaatcttcctttgcaagtcagactttaaagaagactttataaagctttcttttttaaaggaagtaacctacttttttctttatcaagaatatttctgaggttgatacatgactttaacattttattatttattgtaaaatcaatttagcataatttattttattagggagaatgtgtacccatcttccagcttcagcacatttttaaggattgtttttaagcttagtaattgtggtattaaatgacttagaactaatggagaaaaacctgataggaaattgatagaaaaacgaatgaaatatttttcatacataatttcagttggaggtaatggaaaatatgtagtctctcagttatttgtgggtaaatatgttttgctgttgatacagtaataattatggagtgttttcaaagccatgatataatttttaaaaatagatttttaaggaaggctcatcttgatctcattcgtttatttcagcttaatttatatattctttcctattgaggcttaaattttgttaagcaatgtgaggattattgtggtaagttgtatttagtaatcaatacagtgtgatactggcactaggattgacaaataaagcaatggaacagaagagagagcctgaaaacagatcaacgtttatatgatcacttgatttcgacaaaggtggcaaaacaattcaacagagaaggaaagtcttttcaacaaatggagccagaatagaatagctgaatatccatatagaaaaaagtgaacaatgaccccctacctcacaaaaatgactttgagatgaatcatagacctaaatgtaatattttaaaagtatgaagctttttaactgaaaacagatgatatttttgtgacttggggggttagccaaaggtttcttaggtcacagaaagcagtaaccataaaagatccaaaattagagctcatcagaattgtcattgaaagtgttaacaaaagtaatatcaaatgacatttgaaaaatatccttgtaaaatgactatattaataggtataaggatttttcttattaatctaataaaattccttaataggaatttccatagcttaagagtggtttattttatctgcatcttctttggtgattgcaaatcccttgtgatacttcatgattacttctgtctgtgaataaagaagtgtgacttgtctgggtgct

SEQ ID NO: 353528 - DNA, 2068 bp, Homo sapiens
agcaggccctctcgacgtcggcctgtggggagcgatgccgacaagcaggagcggtcccggcttcggaaagggcccaccctgaggaatggtccggccgggcctagcgaggatgtccctaccgcgatgctggttccgttacccagggtggacaggcgcggaagcgggacggggaagagcgatagtttcgcggcgtttgcccagcctcaacccctgggatgcgggtgagagacatggaggactggtcagaatttgcgcgtccctggggccgcacaaaaggctcccagccggcctcccgcaatgtcctcacctgtacctggcagccgaccccctggatccgcagcgccgccaggagaagtcctgcgcagcgctgggaaacgacaaaagaaggcagcctgacgggcagcgacagccacagcaacagcaacagccccactgccgccggggattccaggccccagcccttccgaatccgctacgggtgctgcaaggcctgggaagagtttcgatgtctctagggtggctagagcgtcctcccgcgctcagtcgcgctgcaggtgacggcgcccggaggctgtcgggaagtaggcggggtgacgtgtggttgacgagctcggcggcgggtttgctgagatctgtggccggcggcagctggtgcggggggcagctgagagcgagaggtggatcggggcggtgtgtggccagggccatgacgggcaatgccggggagtggtgcctcatggaaagcgaccccggggtcttcaccgagctcattaaaggattcggttgccgaggagcccaagtagaagaaatatggagtttagagcctgagaattttgaaaaattaaagccagttcatgggttaatttttcttttcaagtggcagccaggagaagaaccagcaggctctgtggttcaggactcccgacttgacacgatattttttgctaagcaggtaattaataatgcttgtgctactcaagccatagtgagtgtgttactgaactgtacccaccaggatgtccatttaggcgagacattatcagagtttaaagaattttcacaaagttttgatgcagctatgaaaggcttggcactgagcaattcagatgtgattcgacaagtacacaacagtttcgccagacagcaaatgtttgaatttgatacgaagacatcagcaaaagaagaagatgcttttcactttgtcagttatgttcctgttaatgggagactgtatgaattagatggattaagagaaggaccgattgatttaggtgcatgcaatcaagatgattggatcagtgcagtaaggcctgtcatagaaaaaaggatacaaaagtacagtgaaggtgaaattcgatttaatttaatggccattgtgtctgacagaaaaatgatatatgagcagaagatagcagagttacaaagacaacttgcagaggaacccatggatacagatcaaggtaatagtatgttaagtgctattcagtcagaagttgccaaaaatcagatgcttattgaagaagaagtacagaaattaaaaagatacaagattgagaatatcagaaggaagcataattatctgcctttcattatggaattgttaaagactttagcagaacaccagcagttaataccactagtagaaaagggaaaataggataaaagaacaaggtgtgagaaggaatagaaggaaacaaacaggaaagatatggctgcaccatgcagtgctactatatgctgagattctacaggatgagatttttgaatagctgaggcagttgcctataatctgtgatgacataaaagtatttgacctaaaatctttttatttgcaaaataataaataaaaagtgattctccctcggcatggctataatgaacttggttagaacctataaatgtttttgttatgtgagactttttaaccgatgaattcgttgaatacacaccacatttaaaaactgcctaggaggtaatccaaaaatatatagttataaaacttcttgtattatgtaccaaatctctttcttaaaatataaaataaaattatctagtttaagattacatt

SEQ ID NO: 353529 - DNA, 3787 bp, Homo sapiens
agcaggccctctcgacgtcggcctgtggggagcgatgccgacaagcaggagcggtcccggcttcggaaagggcccaccctgaggaatggtccggccgggcctagcgaggatgtccctaccgcgatgctggttccgttacccagggtggacaggcgcggaagcgggacggggaagagcgatagtttcgcggcgtttgcccagcctcaacccctgggatgcgggtgagagacatggaggactggtcagaatttgcgcgtccctggggccgcacaaaaggctcccagccggcctcccgcaatgtcctcacctgtacctggcagccgaccccctggatccgcagcgccgccaggagaagtcctgcgcagcgctgggaaacgacaaaagaaggcagcctgacgggcagcgacagccacagcaacagcaacagccccactgccgccggggattccaggccccagcccttccgaatccgctacgggtgctgcaaggcctgggaagagtttcgatgtctctagggtggctagagcgtcctcccgcgctcagtcgcgctgcaggtgacggcgcccggaggctgtcgggaagtaggcggggtgacgtgtggttgacgagctcggcggcgggtttgctgagatctgtggccggcggcagctggtgcggggggcagctgagagcgagaggtggatcggggcggtgtgtggccagggccatgacgggcaatgccggggagtggtgcctcatggaaagcgaccccggggtcttcaccgagctcattaaaggattcggttgccgaggagcccaagtagaagaaatatggagtttagagcctgagaattttgaaaaattaaaaagaaccagcaggctctgtggttcaggactcccgacttgacacgatattttttgctaagcaggtaattaataatgcttgtgctactcaagccatagtgagtgtgttactgaactgtacccaccaggatgtccatttaggcgagacattatcagagtttaaagaattttcacaaagttttgatgcagctatgaaaggcttggcactgagcaattcagatgtgattcgacaagtacacaacagtttcgccagacagcaaatgtttgaatttgatacgaagacatcagcaaaagaagaagatgcttttcactttgtcagttatgttcctgttaatgggagactgtatgaattagatggattaagagaaggaccgattgatttaggtgcatgcaatcaagatgattggatcagtgcagtaaggcctgtcatagaaaaaaggatacaaaagtacagtgaaggtgaaattcgatttaatttaatggccattgtgtctgacagaaaaatgatatatgagcagaagatagcagagttacaaagacaacttgcagaggaacccatggatacagatcaaggtaatagtatgttaagtgctattcagtcagaagttgccaaaaatcagatgcttattgaagaagaagtacagaaattaaaaagatacaagattgagaatatcagaaggaagcataattatctgcctttcattatggaattgttaaagactttagcagaacaccagcagttaataccactagtagaaaaggcaaaagaaaaacagaacgcaaagaaagctcaggaaaccaaatgaagatgttttcagatatgtacacatttctgcttctgcacatattttcatggaaaccattatgtataaagaacttagagcaacatcctaattggctcagtgcacgtttggcaatagtgccagcctgtcttgtctttaatgcatggattcataaacttcttccctacctgcatcatgtgcatgtagtgcatattaaatgaaagtgatattaagaatgctttcccaaattccattatttgacattgagtctgacaactgttagttttctggttgtctaactaccatatgaagctagaaaatgcacaaacgatattccttatctgtaatttaaatacttaaaatttgcaattgtcagatcttgattaaactggttgtcttatttcttctcatcattaacggaaaaaaaatcagtatttctatctttgatatctaagtgttttgaggattttaaaactgaattttatctgctataccagttatttgagaaagtatgattttaatgtaaatcatttaaaaaggacaaaagtataatttccagtgattttcactgctgtcagtagaaaagtaataaacatctcaattttattttagtaaattttcttcaagtgtttggggttatttgtttatgtattagagaattgtttcaggaaggtctgagtattatgcttcaaagcaaaatttcaggttaagaagaaattgtaaatcttaaagaatgttggtgttactctcaatggaatattgtttcaagcttgtaagctgtgtataaaaaaactggaggtctgacagttcatgttatctgcttttttaaaaagatggtagtggtgatgggggtctttctatgccaatttgaataaatttcgtacagcctgcagttttcaagagccatatgtaatttgctcacaattgatttttaaaaattgatttgggagttgctttgtaataatcttctgcttctaatcttcctttgcaagtcagactttaaagaagactttataaagctttcttttttaaaggaagtaacctacttttttctttatcaagaatatttctgaggttgatacatgactttaacattttattatttattgtaaaatcaatttagcataatttattttattagggagaatgtgtacccatcttccagcttcagcacatttttaaggattgtttttaagcttagtaattgtggtattaaatgacttagaactaatggagaaaaacctgataggaaattgatagaaaaacgaatgaaatatttttcatacataatttcagttggaggtaatggaaaatatgtagtctctcagttatttgtgggtaaatatgttttgctgttgatacagtaataattatggagtgttttcaaagccatgatataatttttaaaaatagatttttaaggaaggctcatcttgatctcattcgtttatttcagcttaatttatatattctttcctattgaggcttaaattttgttaagcaatgtgaggattattgtggtaagttgtatttagtaatcaatacagtgtgatactggcactaggattgacaaataaagcaatggaacagaagagagagcctgaaaacagatcaacgtttatatgatcacttgatttcgacaaaggtggcaaaacaattcaacagagaaggaaagtcttttcaacaaatggagccagaatagaatagctgaatatccatatagaaaaaagtgaacaatgaccccctacctcacaaaaatgactttgagatgaatcatagacctaaatgtaatattttaaaagtatgaagctttttaactgaaaacagatgatatttttgtgacttggggggttagccaaaggtttcttaggtcacagaaagcagtaaccataaaagatccaaaattagagctcatcagaattgtcattgaaagtgttaacaaaagtaatatcaaatgacatttgaaaaatatccttgtaaaatgactatattaataggtataaggatttttcttattaatctaataaaattccttaataggaatttccatagcttaagagtggtttattttatctgcatcttctttggtgattgcaaatcccttgtgatacttcatgattacttctgtctgtgaataaagaagtgtgacttgtctgggtgct

SEQ ID NO: 353530 - DNA, 2347 bp, Homo sapiens
agcaggccctctcgacgtcggcctgtggggagcgatgccgacaagcaggagcggtcccggcttcggaaagggcccaccctgaggaatggtccggccgggcctagcgaggatgtccctaccgcgatgctggttccgttacccagggtggacaggcgcggaagcgggacggggaagagcgatagtttcgcggcgtttgcccagcctcaacccctgggatgcgggtgagagacatggaggactggtcagaatttgcgcgtccctggggccgcacaaaaggctcccagccggcctcccgcaatgtcctcacctgtacctggcagccgaccccctggatccgcagcgccgccaggagaagtcctgcgcagcgctgggaaacgacaaaagaaggcagcctgacgggcagcgacagccacagcaacagcaacagccccactgccgccggggattccaggccccagcccttccgaatccgctacgggtgctgcaaggcctgggaagagtttcgatgtctctagggtggctagagcgtcctcccgcgctcagtcgcgctgcaggtgacggcgcccggaggctgtcgggaagtaggcggggtgacgtgtggttgacgagctcggcggcgggtttgctgagatctgtggccggcggcagctggtgcggggggcagctgagagcgagaggtggatcggggcggtgtgtggccagggccatgacgggcaatgccggggagtggtgcctcatggaaagcgaccccggggtcttcaccgagctcattaaaggattcggttgccgaggagcccaagtagaagaaatatggagtttagagcctgagaattttgaaaaattaaagccagttcatgggttaatttttcttttcaagtggcagccaggagaagaaccagcaggctctgtggttcaggactcccgacttgacacgatattttttgctaagcaggtaattaataatgcttgtgctactcaagccatagtgagtgtgttactgaactgtacccaccaggatgtccatttaggcgagacattatcagagtttaaagaattttcacaaagttttgatgcagctatgaaaggcttggcactgagcaattcagatgtgattcgacaagtacacaacagtttcgccagacagcaaatgtttgaatttgatacgaagacatcagcaaaagaagaagatgcttttcactttgtcagttatgttcctgttaatgggagactgtatgaattagatggattaagagaaggaccgattgatttaggtgcatgcaatcaagatgattggatcagtgcagtaaggcctgtcatagaaaaaaggatacaaaagtacagtgaaggtgaaattcgatttaatttaatggccattgtgtctgacagaaaaatgatatatgagcagaagatagcagagttacaaagacaacttgcagaggaacccatggatacagatcaaggtaatagtatgttaagtgctattcagtcagaagttgccaaaaatcagatgcttattgaagaagaagtacagaaattaaaaagatacaagattgagaatatcagaaggaagcataattatctgcctttcattatggaattgttaaagactttagcagaacaccagcagttaataccactagtagaaaagtttgagaaacactttgagaagacactactaggcaaataaaattttggaccattaacttaaagacgagaatacatggcaaaagaaaaacagaacgcaaagaaagctcaggaaaccaaatgaagatgttttcagatatgtacacatttctgcttctgcacatattttcatggaaaccattatgtataaagaacttagagcaacatcctaattggctcagtgcacgtttggcaatagtgccagcctgtcttgtctttaatgcatggattcataaacttcttccctacctgcatcatgtgcatgtagtgcatattaaatgaaagtgatattaagaatgctttcccaaattccattatttgacattgagtctgacaactgttagttttctggttgtctaactaccatatgaagctagaaaatgcacaaacgatattccttatctgtaatttaaatacttaaaatttgcaattgtcagatcttgattaaactggttgtcttatttcttctcatcattaacggaaaaaaaatcagtatttctatctttgatatctaagtgttttgaggattttaaaactgaattttatctgctataccagttatttgagaaagtatgattttaatgtaaatcatttaaaaaggacaaaagtataatttccagtgattttcactgctgtcagtagaaaagtaataaacatctcaatt

SEQ ID NO: 353531 - DNA, 2626 bp, Homo sapiens
caggtctttttctcttctgccgtttttataaaacaaaaaataacttcggtgcaacgtacagtgaaggtgaaattcgatttaatttaatggccattgtgtctgacagaaaaatgatatatgagcagaagatagcagagttacaaagacaacttgcagaggaacccatggatacagatcaaggtaatagtatgttaagtgctattcagtcagaagttgccaaaaatcagatgcttattgaagaagaagtacagaaattaaaaagatacaagattgagaatatcagaaggaagcataattatctgcctttcattatggaattgttaaagactttagcagaacaccagcagttaataccactagtagaaaagtttgagaaacactttgagaagacactactaggcaaataaaattttggaccattaacttaaagacgagaatacatggcaaaagaaaaacagaacgcaaagaaagctcaggaaaccaaatgaagatgttttcagatatgtacacatttctgcttctgcacatattttcatggaaaccattatgtataaagaacttagagcaacatcctaattggctcagtgcacgtttggcaatagtgccagcctgtcttgtctttaatgcatggattcataaacttcttccctacctgcatcatgtgcatgtagtgcatattaaatgaaagtgatattaagaatgctttcccaaattccattatttgacattgagtctgacaactgttagttttctggttgtctaactaccatatgaagctagaaaatgcacaaacgatattccttatctgtaatttaaatacttaaaatttgcaattgtcagatcttgattaaactggttgtcttatttcttctcatcattaacggaaaaaaaatcagtatttctatctttgatatctaagtgttttgaggattttaaaactgaattttatctgctataccagttatttgagaaagtatgattttaatgtaaatcatttaaaaaggacaaaagtataatttccagtgattttcactgctgtcagtagaaaagtaataaacatctcaattttattttagtaaattttcttcaagtgtttggggttatttgtttatgtattagagaattgtttcaggaaggtctgagtattatgcttcaaagcaaaatttcaggttaagaagaaattgtaaatcttaaagaatgttggtgttactctcaatggaatattgtttcaagcttgtaagctgtgtataaaaaaactggaggtctgacagttcatgttatctgcttttttaaaaagatggtagtggtgatgggggtctttctatgccaatttgaataaatttcgtacagcctgcagttttcaagagccatatgtaatttgctcacaattgatttttaaaaattgatttgggagttgctttgtaataatcttctgcttctaatcttcctttgcaagtcagactttaaagaagactttataaagctttcttttttaaaggaagtaacctacttttttctttatcaagaatatttctgaggttgatacatgactttaacattttattatttattgtaaaatcaatttagcataatttattttattagggagaatgtgtacccatcttccagcttcagcacatttttaaggattgtttttaagcttagtaattgtggtattaaatgacttagaactaatggagaaaaacctgataggaaattgatagaaaaacgaatgaaatatttttcatacataatttcagttggaggtaatggaaaatatgtagtctctcagttatttgtgggtaaatatgttttgctgttgatacagtaataattatggagtgttttcaaagccatgatataatttttaaaaatagatttttaaggaaggctcatcttgatctcattcgtttatttcagcttaatttatatattctttcctattgaggcttaaattttgttaagcaatgtgaggattattgtggtaagttgtatttagtaatcaatacagtgtgatactggcactaggattgacaaataaagcaatggaacagaagagagagcctgaaaacagatcaacgtttatatgatcacttgatttcgacaaaggtggcaaaacaattcaacagagaaggaaagtcttttcaacaaatggagccagaatagaatagctgaatatccatatagaaaaaagtgaacaatgaccccctacctcacaaaaatgactttgagatgaatcatagacctaaatgtaatattttaaaagtatgaagctttttaactgaaaacagatgatatttttgtgacttggggggttagccaaaggtttcttaggtcacagaaagcagtaaccataaaagatccaaaattagagctcatcagaattgtcattgaaagtgttaacaaaagtaatatcaaatgacatttgaaaaatatccttgtaaaatgactatattaataggtataaggatttttcttattaatctaataaaattccttaataggaatttccatagcttaagagtggtttattttatctgcatcttctttggtgattgcaaatcccttgtgatacttcatgattacttctgtctgtgaataaagaagtgtgacttgtctgggtgct

SEQ ID NO: 353532 - DNA, 2059 bp, Homo sapiens
agcaggccctctcgacgtcggcctgtggggagcgatgccgacaagcaggagcggtcccggcttcggaaagggcccaccctgaggaatggtccggccgggcctagcgaggatgtccctaccgcgatgctggttccgttacccagggtggacaggcgcggaagcgggacggggaagagcgatagtttcgcggcgtttgcccagcctcaacccctgggatgcgggtgagagacatggaggactggtcagaatttgcgcgtccctggggccgcacaaaaggctcccagccggcctcccgcaatgtcctcacctgtacctggcagccgaccccctggatccgcagcgccgccaggagaagtcctgcgcagcgctgggaaacgacaaaagaaggcagcctgacgggcagcgacagccacagcaacagcaacagccccactgccgccggggattccaggccccagcccttccgaatccgctacgggtgctgcaaggcctgggaagagtttcgatgtctctagggtggctagagcgtcctcccgcgctcagtcgcgctgcaggtgacggcgcccggaggctgtcgggaagtaggcggggtgacgtgtggttgacgagctcggcggcgggtttgctgagatctgtggccggcggcagctggtgcggggggcagctgagagcgagaggtggatcggggcggtgtgtggccagggccatgacgggcaatgccggggagtggtgcctcatggaaagcgaccccggggtcttcaccgagctcattaaaggattcggttgccgaggagcccaagtagaagaaatatggagtttagagcctgagaattttgaaaaattaaagccagttcatgggttaatttttcttttcaagtggcagccaggagaagaaccagcaggctctgtggttcaggactcccgacttgacacgatattttttgctaagcaggtaattaataatgcttgtgctactcaagccatagtgagtgtgttactgaactgtacccaccaggatgtccatttaggcgagacattatcagagtttaaagaattttcacaaagttttgatgcagctatgaaaggcttggcactgagcaattcagatgtgattcgacaagtacacaacagtttcgccagacagcaaatgtttgaatttgatacgaagacatcagcaaaagaagaagatgcttttcactttgtcagttatgttcctgttaatgggagactgtatgaattagatggattaagagaaggaccgattgatttaggtgcatgcaatcaagatgattggatcagtgcagtaaggcctgtcatagaaaaaaggatacaaaagtaaatgctcagctaatctcattggcataatattctgttttttaagtattttttaaacttgtattttattgttattttagcagtgtgcattgaacatctacttttttttttctttttaatttttcgtagagacgggttttcaccatgttgcccaggctggtctcagactcctgagctcaagccatccgcctgcctcgacctcccaaagtggtaggattacaggcgtgagccactgtgcccagccaaacatctacttttgattgggttaatgcatttaagaagtctatttcagaaaatctctaaatttcatgtagtagtatgtcatcttgtctttagagaagttaaacatgcagatttccattaagttagataattttttattttcttttttttattttttgagacagagtctcactgggtcgcccaggctggagtgcagtggcacaatctcggctcactgcaacctctgcctcccgagttcaagcgattctcgtgtctcagcttcccgagtagctgggattatgggcacatgccaccacacccggctaatttttgtattttcagtagaggtggggtttcaccatgttctccaggcttgtctcaaactcctgacctcaagtgatctgcccaccttggcctcccgaagtgctgggattacaggcatgagccactgcacccggctaggtattttgtactgttggataattgacagttattttgtaga

SEQ ID NO: 353533 - DNA, 755 bp, Homo sapiens
gtggggagcgatgccgacaagcaggagcggtcccggcttcggaaagggcccaccctgaggaatggtccggccgggcctagcgaggatgtccctaccgcgatgctggttccgttacccagggtggacaggcgcggaagcgggacggggaagagcgatagtttcgcggcgtttgcccagcctcaacccctgggatgcgggtgagagacatggaggactggtcagaatttgcgcgtccctggggccgcacaaaaggctcccagccggcctcccgcaatgtcctcacctgtacctggcagccgaccccctggatccgcagcgccgccaggagaagtcctgcgcagcgctgggaaacgacaaaagaaggcagcctgacgggcagcgacagccacagcaacagcaacagccccactgccgccggggattccaggttcggttcccgggaacgagtcctgcccctcttcttttgccccgcctccgccccagaggggcgaggatcccggatgttgcctcctcggcgctgtgaatcaccgccctttcttctcaggccccagcccttccgaatccgctacgggtgctgcaaggcctgggaagagtttcgatgtctctagggtggctagagcgtcctcccgcgctcagtcgcgctgcaggtgacggcgcccggaggctgtcgggaagtaggcggggtgacgtgtggttgacgagctcggcggcgggtttgctgagatctgtggccggcggcagctggtgcggggggc

SEQ ID NO: 353534 - DNA, 3831 bp, Homo sapiens
agcaggccctctcgacgtcggcctgtggggagcgatgccgacaagcaggagcggtcccggcttcggaaagggcccaccctgaggaatggtccggccgggcctagcgaggatgtccctaccgcgatgctggttccgttacccagggtggacaggcgcggaagcgggacggggaagagcgatagtttcgcggcgtttgcccagcctcaacccctgggatgcgggtgagagacatggaggactggtcagaatttgcgcgtccctggggccgcacaaaaggctcccagccggcctcccgcaatgtcctcacctgtacctggcagccgaccccctggatccgcagcgccgccaggagaagtcctgcgcagcgctgggaaacgacaaaagaaggcagcctgacgggcagcgacagccacagcaacagcaacagccccactgccgccggggattccaggccccagcccttccgaatccgctacgggtgctgcaaggcctgggaagagtttcgatgtctctagggtggctagagcgtcctcccgcgctcagtcgcgctgcaggtgacggcgcccggaggctgtcgggaagtaggcggggtgacgtgtggttgacgagctcggcggcgggtttgctgagatctgtggccggcggcagctggtgcggggggcagctgagagcgagaggtggatcggggcggtgtgtggccagggccatgacgggcaatgccggggagtggtgcctcatggaaagcgaccccggggtcttcaccgagctcattaaaggattcggttgccgaggagcccaagtagaagaaatatggagtttagagcctgagaattttgaaaaattaaagccagttcatgggttaatttttcttttcaagtggcagccaggagaagaaccagcaggctctgtggttcaggactcccgacttgacacgatattttttgctaagcaggtaattaataatgcttgtgctactcaagccatagtgagtgtgttactgaactgtacccaccaggatgtccatttaggcgagacattatcagagtttaaagaattttcacaaagttttgatgcagctatgaaaggcttggcactgagcaattcagatgtgattcgacaagtacacaacagtttcgccagacagcaaatgtttgaatttgatacgaagacatcagcaaaagaagaagatgcttttcactttgtcagttatgttcctgttaatgggagactgtatgaattagatggattaagagaaggaccgattgatttaggtgcatgcaatcaagatgattggatcagtgcagtaaggcctgtcatagaaaaaaggatacaaaagtacagtgaaggtgaaattcgatttaatttaatggccattgtgtctgacagaaaaatgatatatgagcagaagatagcagagttacaaagacaacttgcagaggaacccatggatacagatcaaggtaatagtatgttaagtgctattcagtcagaagttgccaaaaatcagatgcttattgaagaagaagtacagaaattaaaaagatacaagattgagaatatcagaaggaagcataattatctgcctttcattatggaattgttaaagactttagcagaacaccagcagttaataccactagtagaaaaggcaaaagaaaaacagaacgcaaagaaagctcaggaaaccaaatgaagatgttttcagatatgtacacatttctgcttctgcacatattttcatggaaaccattatgtataaagaacttagagcaacatcctaattggctcagtgcacgtttggcaatagtgccagcctgtcttgtctttaatgcatggattcataaacttcttccctacctgcatcatgtgcatgtagtgcatattaaatgaaagtgatattaagaatgctttcccaaattccattatttgacattgagtctgacaactgttagttttctggttgtctaactaccatatgaagctagaaaatgcacaaacgatattccttatctgtaatttaaatacttaaaatttgcaattgtcagatcttgattaaactggttgtcttatttcttctcatcattaacggaaaaaaaatcagtatttctatctttgatatctaagtgttttgaggattttaaaactgaattttatctgctataccagttatttgagaaagtatgattttaatgtaaatcatttaaaaaggacaaaagtataatttccagtgattttcactgctgtcagtagaaaagtaataaacatctcaattttattttagtaaattttcttcaagtgtttggggttatttgtttatgtattagagaattgtttcaggaaggtctgagtattatgcttcaaagcaaaatttcaggttaagaagaaattgtaaatcttaaagaatgttggtgttactctcaatggaatattgtttcaagcttgtaagctgtgtataaaaaaactggaggtctgacagttcatgttatctgcttttttaaaaagatggtagtggtgatgggggtctttctatgccaatttgaataaatttcgtacagcctgcagttttcaagagccatatgtaatttgctcacaattgatttttaaaaattgatttgggagttgctttgtaataatcttctgcttctaatcttcctttgcaagtcagactttaaagaagactttataaagctttcttttttaaaggaagtaacctacttttttctttatcaagaatatttctgaggttgatacatgactttaacattttattatttattgtaaaatcaatttagcataatttattttattagggagaatgtgtacccatcttccagcttcagcacatttttaaggattgtttttaagcttagtaattgtggtattaaatgacttagaactaatggagaaaaacctgataggaaattgatagaaaaacgaatgaaatatttttcatacataatttcagttggaggtaatggaaaatatgtagtctctcagttatttgtgggtaaatatgttttgctgttgatacagtaataattatggagtgttttcaaagccatgatataatttttaaaaatagatttttaaggaaggctcatcttgatctcattcgtttatttcagcttaatttatatattctttcctattgaggcttaaattttgttaagcaatgtgaggattattgtggtaagttgtatttagtaatcaatacagtgtgatactggcactaggattgacaaataaagcaatggaacagaagagagagcctgaaaacagatcaacgtttatatgatcacttgatttcgacaaaggtggcaaaacaattcaacagagaaggaaagtcttttcaacaaatggagccagaatagaatagctgaatatccatatagaaaaaagtgaacaatgaccccctacctcacaaaaatgactttgagatgaatcatagacctaaatgtaatattttaaaagtatgaagctttttaactgaaaacagatgatatttttgtgacttggggggttagccaaaggtttcttaggtcacagaaagcagtaaccataaaagatccaaaattagagctcatcagaattgtcattgaaagtgttaacaaaagtaatatcaaatgacatttgaaaaatatccttgtaaaatgactatattaataggtataaggatttttcttattaatctaataaaattccttaataggaatttccatagcttaagagtggtttattttatctgcatcttctttggtgattgcaaatcccttgtgatacttcatgattacttctgtctgtgaataaagaagtgtgacttgtctgggtgct

SEQ ID NO: 353535 - DNA, 3603 bp, Homo sapiens
agcaggccctctcgacgtcggcctgtggggagcgatgccgacaagcaggagcggtcccggcttcggaaagggcccaccctgaggaatggtccggccgggcctagcgaggatgtccctaccgcgatgctggttccgttacccagggtggacaggcgcggaagcgggacggggaagagcgatagtttcgcggcgtttgcccagcctcaacccctgggatgcgggtgagagacatggaggactggtcagaatttgcgcgtccctggggccgcacaaaaggctcccagccggcctcccgcaatgtcctcacctgtacctggcagccgaccccctggatccgcagcgccgccaggagaagtcctgcgcagcgctgggaaacgacaaaagaaggcagcctgacgggcagcgacagccacagcaacagcaacagccccactgccgccggggattccaggccccagcccttccgaatccgctacgggtgctgcaaggcctgggaagagtttcgatgtctctagggtggctagagcgtcctcccgcgctcagtcgcgctgcaggttgccgaggagcccaagtagaagaaatatggagtttagagcctgagaattttgaaaaattaaagccagttcatgggttaatttttcttttcaagtggcagccaggagaagaaccagcaggctctgtggttcaggactcccgacttgacacgatattttttgctaagcaggtaattaataatgcttgtgctactcaagccatagtgagtgtgttactgaactgtacccaccaggatgtccatttaggcgagacattatcagagtttaaagaattttcacaaagttttgatgcagctatgaaaggcttggcactgagcaattcagatgtgattcgacaagtacacaacagtttcgccagacagcaaatgtttgaatttgatacgaagacatcagcaaaagaagaagatgcttttcactttgtcagttatgttcctgttaatgggagactgtatgaattagatggattaagagaaggaccgattgatttaggtgcatgcaatcaagatgattggatcagtgcagtaaggcctgtcatagaaaaaaggatacaaaagtacagtgaaggtgaaattcgatttaatttaatggccattgtgtctgacagaaaaatgatatatgagcagaagatagcagagttacaaagacaacttgcagaggaacccatggatacagatcaaggtaatagtatgttaagtgctattcagtcagaagttgccaaaaatcagatgcttattgaagaagaagtacagaaattaaaaagatacaagattgagaatatcagaaggaagcataattatctgcctttcattatggaattgttaaagactttagcagaacaccagcagttaataccactagtagaaaaggcaaaagaaaaacagaacgcaaagaaagctcaggaaaccaaatgaagatgttttcagatatgtacacatttctgcttctgcacatattttcatggaaaccattatgtataaagaacttagagcaacatcctaattggctcagtgcacgtttggcaatagtgccagcctgtcttgtctttaatgcatggattcataaacttcttccctacctgcatcatgtgcatgtagtgcatattaaatgaaagtgatattaagaatgctttcccaaattccattatttgacattgagtctgacaactgttagttttctggttgtctaactaccatatgaagctagaaaatgcacaaacgatattccttatctgtaatttaaatacttaaaatttgcaattgtcagatcttgattaaactggttgtcttatttcttctcatcattaacggaaaaaaaatcagtatttctatctttgatatctaagtgttttgaggattttaaaactgaattttatctgctataccagttatttgagaaagtatgattttaatgtaaatcatttaaaaaggacaaaagtataatttccagtgattttcactgctgtcagtagaaaagtaataaacatctcaattttattttagtaaattttcttcaagtgtttggggttatttgtttatgtattagagaattgtttcaggaaggtctgagtattatgcttcaaagcaaaatttcaggttaagaagaaattgtaaatcttaaagaatgttggtgttactctcaatggaatattgtttcaagcttgtaagctgtgtataaaaaaactggaggtctgacagttcatgttatctgcttttttaaaaagatggtagtggtgatgggggtctttctatgccaatttgaataaatttcgtacagcctgcagttttcaagagccatatgtaatttgctcacaattgatttttaaaaattgatttgggagttgctttgtaataatcttctgcttctaatcttcctttgcaagtcagactttaaagaagactttataaagctttcttttttaaaggaagtaacctacttttttctttatcaagaatatttctgaggttgatacatgactttaacattttattatttattgtaaaatcaatttagcataatttattttattagggagaatgtgtacccatcttccagcttcagcacatttttaaggattgtttttaagcttagtaattgtggtattaaatgacttagaactaatggagaaaaacctgataggaaattgatagaaaaacgaatgaaatatttttcatacataatttcagttggaggtaatggaaaatatgtagtctctcagttatttgtgggtaaatatgttttgctgttgatacagtaataattatggagtgttttcaaagccatgatataatttttaaaaatagatttttaaggaaggctcatcttgatctcattcgtttatttcagcttaatttatatattctttcctattgaggcttaaattttgttaagcaatgtgaggattattgtggtaagttgtatttagtaatcaatacagtgtgatactggcactaggattgacaaataaagcaatggaacagaagagagagcctgaaaacagatcaacgtttatatgatcacttgatttcgacaaaggtggcaaaacaattcaacagagaaggaaagtcttttcaacaaatggagccagaatagaatagctgaatatccatatagaaaaaagtgaacaatgaccccctacctcacaaaaatgactttgagatgaatcatagacctaaatgtaatattttaaaagtatgaagctttttaactgaaaacagatgatatttttgtgacttggggggttagccaaaggtttcttaggtcacagaaagcagtaaccataaaagatccaaaattagagctcatcagaattgtcattgaaagtgttaacaaaagtaatatcaaatgacatttgaaaaatatccttgtaaaatgactatattaataggtataaggatttttcttattaatctaataaaattccttaataggaatttccatagcttaagagtggtttattttatctgcatcttctttggtgattgcaaatcccttgtgatacttcatgattacttctgtctgtgaataaagaagtgtgacttgtctgggtgct

SEQ ID NO: 353536 - DNA, 1863 bp, Homo sapiens
agcaggccctctcgacgtcggcctgtggggagcgatgccgacaagcaggagcggtcccggcttcggaaagggcccaccctgaggaatggtccggccgggcctagcgaggatgtccctaccgcgatgctggttccgttacccagggtggacaggcgcggaagcgggacggggaagagcgatagtttcgcggcgtttgcccagcctcaacccctgggatgcgggtgagagacatggaggactggtcagaatttgcgcgtccctggggccgcacaaaaggctcccagccggcctcccgcaatgtcctcacctgtacctggcagccgaccccctggatccgcagcgccgccaggagaagtcctgcgcagcgctgggaaacgacaaaagaaggcagcctgacgggcagcgacagccacagcaacagcaacagccccactgccgccggggattccaggccccagcccttccgaatccgctacgggtgctgcaaggcctgggaagagtttcgatgtctctagggtggctagagcgtcctcccgcgctcagtcgcgctgcaggtgacggcgcccggaggctgtcgggaagtaggcggggtgacgtgtggttgacgagctcggcggcgggtttgctgagatctgtggccggcggcagctggtgcggggggcagctgagagcgagaggtggatcggggcggtgtgtggccagggccatgacgggcaatgccggggagtggtgcctcatggaaagcgaccccggggtcttcaccgagctcattaaaggattcggttgccgaggagcccaagtagaagaaatatggagtttagagcctgagaattttgaaaaattaaagccagttcatgggttaatttttcttttcaagtggcagccaggagaagaaccagcaggctctgtggttcaggactcccgacttgacacgatattttttgctaagcaggtaattaataatgcttgtgctactcaagccatagtgagtgtgttactgaactgtacccaccaggatgtccatttaggcgagacattatcagagtttaaagaattttcacaaagttttgatgcagctatgaaaggcttggcactgagcaattcagatgtgattcgacaagtacacaacagtttcgccagacagcaaatgtttgaatttgatacgaagacatcagcaaaagaagaagatgcttttcactttgtcagttatgttcctgttaatgggagactgtatgaattagatggattaagagaaggaccgattgatttaggtgcatgcaatcaagatgattggatcagtgcagtaaggcctgtcatagaaaaaaggatacaaaagtacagtgaaggtgaaattcgatttaatttaatggccattgtgtctgacagaaaaatgatatatgagcagaagatagcagagttacaaagacaacttgcagaggaacccatggatacagatcaaggtaatagtatgttaagtgctattcagtcagaagttgccaaaaatcagatgcttattgaagaagaagtacagaaattaaaaagatacaagattgagaatatcagaaggaagcataattatctgcctttcattatggaattgttaaagactttagcagaacaccagcagttaataccactagtagaaaagggaaaataggataaaagaacaaggtgtgagaaggaatagaaggaaacaaacaggaaagatatggctgcaccatgcagtgctactatatgctgagattctacaggatgagatttttgaatagctgaggcagttgcctataatctgtgatgacataaaagtatttgacctaaaatctttttatttgcaaaataataaataaaaagtgattctccctc

SEQ ID NO: 353537 - DNA, 1938 bp, Homo sapiens
agcaggccctctcgacgtcggcctgtggggagcgatgccgacaagcaggagcggtcccggcttcggaaagggcccaccctgaggaatggtccggccgggcctagcgaggatgtccctaccgcgatgctggttccgttacccagggtggacaggcgcggaagcgggacggggaagagcgatagtttcgcggcgtttgcccagcctcaacccctgggatgcgggtgagagacatggaggactggtcagaatttgcgcgtccctggggccgcacaaaaggctcccagccggcctcccgcaatgtcctcacctgtacctggcagccgaccccctggatccgcagcgccgccaggagaagtcctgcgcagcgctgggaaacgacaaaagaaggcagcctgacgggcagcgacagccacagcaacagcaacagccccactgccgccggggattccaggccccagcccttccgaatccgctacgggtgctgcaaggcctgggaagagtttcgatgtctctagggtggctagagcgtcctcccgcgctcagtcgcgctgcaggtgacggcgcccggaggctgtcgggaagtaggcggggtgacgtgtggttgacgagctcggcggcgggtttgctgagatctgtggccggcggcagctggtgcggggggcagctgagagcgagaggtggatcggggcggtgtgtggccagggccatgacgggcaatgccggggagtggtgcctcatggaaagcgaccccggggtcttcaccgagctcattaaaggattcggttgccgaggagcccaagtagaagaaatatggagtttagagcctgagaattttgaaaaattaaagccagttcatgggttaatttttcttttcaagtggcagccaggagaagaaccagcaggctctgtggttcaggactcccgacttgacacgatattttttgctaagcaggtaattaataatgcttgtgctactcaagccatagtgagtgtgttactgaactgtacccaccaggatgtccatttaggcgagacattatcagagtttaaagaattttcacaaagttttgatgcagctatgaaaggcttggcactgagcaattcagatgtgattcgacaagtacacaacagtttcgccagacagcaaatgtttgaatttgatacgaagacatcagcaaaagaagaagatgcttttcactttgtcagttatgttcctgttaatgggagactgtatgaattagatggattaagagaaggaccgattgatttaggtgcatgcaatcaagatgattggatcagtgcagtaaggcctgtcatagaaaaaaggatacaaaagtacagtgaaggtgaaattcgatttaatttaatggccattgtgtctgacagaaaaatgatatatgagcagaagatagcagagttacaaagacaacttgcagaggaacccatggatacagatcaaggtaatagtatgttaagtgctattcagtcagaagttgccaaaaatcagatgcttattgaagaagaagtacagaaattaaaaagatacaagattgagaatatcagaaggaagcataattatctgcctttcattatggaattgttaaagactttagcagaacaccagcagttaataccactagtagaaaagtttgagaaacactttgagaagacactactaggcaaataaaattttggaccattaacttaaagacgagaatacatgggaaaataggataaaagaacaaggtgtgagaaggaatagaaggaaacaaacaggaaagatatggctgcaccatgcagtgctactatatgctgagattctacaggatgagatttttgaatagctgaggcagttgcctataatctgtgatgacataaaagtatttgacctaaaatctttttatttgcaaaataataaataaaaagtgattctccctc

SEQ ID NO: 353538 - DNA, 1389 bp, Homo sapiens
agcaggccctctcgacgtcggcctgtggggagcgatgccgacaagcaggagcggtcccggcttcggaaagggcccaccctgaggaatggtccggccgggcctagcgaggatgtccctaccgcgatgctggttccgttacccagggtggacaggcgcggaagcgggacggggaagagcgatagtttcgcggcgtttgcccagcctcaacccctgggatgcgggtgagagacatggaggactggtcagaatttgcgcgtccctggggccgcacaaaaggctcccagccggcctcccgcaatgtcctcacctgtacctggcagccgaccccctggatccgcagcgccgccaggagaagtcctgcgcagcgctgggaaacgacaaaagaaggcagcctgacgggcagcgacagccacagcaacagcaacagccccactgccgccggggattccaggccccagcccttccgaatccgctacgggtgctgcaaggcctgggaagagtttcgatgtctctagggtggctagagcgtcctcccgcgctcagtcgcgctgcaggtgacggcgcccggaggctgtcgggaagtaggcggggtgacgtgtggttgacgagctcggcggcgggtttgctgagatctgtggccggcggcagctggtgcggggggcagctgagagcgagaggtggatcggggcggtgtgtggccagggccatgacgggcaatgccggggagtggtgcctcatggaaagcgaccccggggtcttcaccgagctcattaaaggattcggttgccgaggagcccaagtagaagaaatatggagtttagagcctgagaattttgaaaaattaaagccagttcatgggttaatttttcttttcaagtggcagccaggagaagaaccagcaggctctgtggttcaggactcccgacttgacacgatattttttgctaagcaggtatggtccttggatactctgaaaagtctcaagagcaaccctttttataaacaagactctagtttactactgtttgctactagtgtagtagtcctcaaactcttacactcttaaaaattattgacatctccaattacagtcttaaaaattattgacatctcaaaagagcttttgtttctgggattatctatcaatgtttgccatattagacattaaaactgaaacattttaataatatttacgccaggcatggtggcttataactgtaatcccagcactttgggaggccgaggcaggaggatcccttgagcccaggaatttgttttttctttttctgagatagagtcttgctctgtcgcccaggccagagtgcaatggtgcgaggctgaggtgggaacactgcatgagcccaggatatggaggctgagtgagatatg

SEQ ID NO: 353539 - DNA, 379 bp, Homo sapiens
ttgtatagccatgccggctaggctatagagcagcaaaggtctacagaggagcaaagggtaacatcccactctcttccccagtcttgcaggcacaaacgcagttggcatagccttgaggctgatttttccagatgaaccaggaagacccttggtttttggcagatttaataaccaacattcaaacaaggcactttaaaaaatctacaattcgagaggatttcctggcactatataaaaccccttccatcaatgggagttgttctcccttcttgaattggagtgttcattaagtccataaaatggaaagcacatgtaggataataacacagatattttgtgttagagaaaagttatgaagcatggcatcgaaagaggttag

SEQ ID NO: 353540 - DNA, 518 bp, Homo sapiens
gtgctggctctgtttccagttggaagatatagcagacacactgacatttgctgatcctccagctgcagagtgaaatccctgaggccttaggtgtcttcttactctcccagaatccaagtttaatgctaggataaatgttattaattacctgactaattcttcaaacagcttcttgtccaatggggaaaaaacaatcagatacattgcattgtgacaaatgccatgagagcaccaagctcagagggaaatatacatgtattcatatgtgtttatatatatgtaagtatatatgtatacctagacatgtatttatagatgtacgagagagaaaataaagcattaggagtggccttgataacaaagtgattgaacccctcctgggcgcaagaaatcctcccacctcagcctcccaagtagctggggctatatgcatgcaccaccacacccagctaattttttattttttgtagagacaagatctcactatgttgcccaggctggtatcaaactcctgtgct

SEQ ID NO: 353541 - DNA, 4762 bp, Homo sapiens
tttcatttttttgtttagtatttttgagaacccagccacctggccatgctgtaccagccttgtgctgagtgctggggataaaggaacaaataaaacccagtccaggcttctgtgtgcccagccctgtgccgggtcccagtgggtaacagcatgtccaatcccctcagtgtcccactagaggcttcctttggggctgctggggacatcttgtttctagttgagaattcagatttatgtccaaagacaagaactccctgaggggcagattacaacatggactgggccattacaatcaacaaggacacaaagctaacacagccatcgttatacaccagacatgtgctaaggacttgatttccccattgtttaatcatcaccaactccattatcacccccatttcacagatgtggaaactgaggctgagaagagtaagggacttgtccaagggcacagagcaagtcagggctacggtgatgtttcaggcccagacctgtttgcctctggagcccagggtttaacacaccccagtgctgctgtgaaagggctctggacagctcaggctggccggccaatgcggggataaccgaacagaggtatggaacagaaaggggcgttgaggatgttgctgtgtgtgtgcggtggggggagtgacaaggcttcagcaatggtactcattctctccaaccagctcccagtgctgctgtcctctgatccaccctccgctctgcctgccatggactaattgttctgaaatcccatggatcaagtcactcctcagctgaggacctgtccatggctccctggtacccagaggatagaaacccagcattcaaaacctctctaaccagctccccacctcaaccctcacactcctgctcactagcccccaggcgcagtgggctcttccagcggccaagcctgtgcctacggtgccttcttgcctggaatgcccaactcccccttctcagccttctttgactctcaagtaggaaaagcactctttgtctccctgagccccttggcacttatcacagagcactctgggcgttaacttccactgtctccgtcttggattagagtggatctcagagggcccggtggtgtctgcttcacctccctctccactgcagcagcttagcaaggactggccgggtaaactaaaaaatgcaaagagctgagagaatcctgggaaagtgcacatttcccaggactgcccaatgacaagccccgtaccaaggcacagcatcaggataccctgatgtggaagaaccaaaaattgcaccctcatggcttatcaggatggtccttgtgtctgtccctttcaagggttctgataatgaaatctgggcaagtcaccctcctgctttaaaacttccaatggttcccagaggtctagcataaaatccaaactcaagggcccacataacctaggtgctgcctggcccccaggccctcctcttgccacgcccccctccctggccagcctccctcacttctttcagttcctcaaggactccccctcactaaagccttacccaggtcgcctctctgcctagggggctcctccattccctgctcactcagccacctccctctccctcttcaggtctcactttttaggggaggcttccctgatctgtccagataagacctcaccactcccacccaatcccaaacgctcccataacctgatcgtttccttcacagcaagaattaatcttcagtgtaaataatgatctactgaagacctatgaggaatgggaaagtcttgttttttgctgattcttcaacacccagctcagagcctaaatatctctcaaatgaatgaatatatgaatgaatgagtgaatgaacctatatacataaatcaagacaagaaggtgggcagaatcctagggaacactgaggcaggaaaagcagggccctgggccaggcgtcatggctcacacctgtaatcccagcactttgggaggccaaggcaggcagatcacttgaggtcaggactttgagaccagcctggccaacatggtaaaaccctgtctctactaaaaacacaaacattagccgggtatggtggcacatgcctgtagtcccagctactcaagaggctgaggcaggagaatcacttgtacctgggaggaggaggttgcagtgagctgagatcgtgccactgcactccagcctgggcaccacagcaagactccgtctaaaaaaaaaaaagaaaaagaaagaaagaaagaaaaagaaaaccagggccctaactaaaaaagacaggaggaaaaacagggccctaactaaaaagagaggaggggccctaactgaaaaaaccagggccctaactaaaaaagtcaggaggaaaaacagggccctaactaaaaagagaagaggaaataaaccagacagtgcagcctcccagaagcaaaaggagggagtttctggaactgcactagagactggcacatggagtcctgaggaaagagcactggattggacatcgaggaggtcactggggcctccctgattgaaccaaggttccgtggaggtgggcacagggctggtacattgcagggggcagaggagtaaagagggatgaataagcaaagctctcaggcgacggttgctcagctgggtctatgccagcctggccctgcagggtctgcggaagacagggcccctgtgtcatagtcaccaaaagcatcaacagagcataacattctttttgttgacagattacattgaggcaacttggcttttggagttatcagggctcagtctcaaaggcagatgcatcagagccaagacccggccctcaagtcctcctattagggcagcactagggctacctctttgtcagcagaacctttggatagccgctgatggggtgagtcagctttctgggcccggcagaccttttgggaatccctggcttttggggcacaacatcctggggaccaccaaaaagccctttcacctgagctttgggaaagaggaacagctccggctgtgggtggctcatgtcaccatctggaagccagctgggccacagcagacgcgtaagtcctgtattcattcatccccttctccttttggcagaaaagggatggcgtgggttggaggggtgttttcctgggttcttgcacaattgctcattagaaattcacttctgtttgggtgttggaagctgggcgattccccctagtagtgatccttcctgtctcactggtcacaaagccctttggcatctacaagctcgttgggtccacacagcagctttgttaggtgggtagggggagaccaaggcacccatcctacaggtggagaaaccgaggctgaagctgggaggtgagccagtctcctggcttccagcccaggactctgcactcctccccccacctccccacctacttcagcaggtcacctgtgaatctgatagtcaggtgggccccaccctgccagctggccccagcgggcatgactcatccgcttccccatgactcacacacctcaggtgctcctcctctggtcaacaagtccagagacttggcaaatggacccccatttttctcacctctccaaagcctctgggaagaattcctgcacctcctctttatggggactctgctcttctacagaatagcaaccaaggccttgagagggaaagcaactctcctaaagtcacatagcaagcaaccagcacagccagggtgggagccaggcatccgggcaccgagcccagtcccggcctcctccctacaagatcactctcgcctgacctccctctcaaggacaggaaaggagcagagacgcactctgagccttattaggaagacctcagggactcccactgaatccactgtggctacagcggctgcttccaccactgaagtcccctccaggcttccctgggcagccagggcggggtttaagaggacgacaggtgtctgtattgctctacctacctaacaaggctgtgcagggtgaagagtgctgctccgtgggaaggcgctgggaccaaggccgaagcactggacaaagagagctatgagcactacctgtaaacaaagggcacagaatgtcagcctcagggggagttcaaggtcatctggtcaaatccccatttgatgtttcaacccctttcctcccctccaccaggggtcacacaatcagtacttgcacacatccagcaacaccgcactcactacctgccaaggctgcaagacctgctgctggagggtttggctgcgtaaaagaattgtcctaaggatgcactaaaatctctctcttcttatgccttgtacctgctggtattagctctgcctccttttgggtcagccagaacaggtctgtccccctctttcctgatggctctttagagatttgaagacagtgatcctgggcccctcaagtcttctacaaattgtgcaccccctttcctccagctcttcctgagaccagggtttccggttcgctcaccctgttccctgatctgctccagatgaaacctgtccctactgacagcacaagacccagaattagacaatcagtcaagctctatccaggacagggcaagcaggactctcacctccttcattagagatatcatgcttctattaattgagcctaaaatcccatttgcatttaaggcagccctattgcatggctgaattcagtttacagtcaacttcagagctgtacgttagtactctgaagttatataaactgggccctcacttaactgtgtaacttgagcaagcaaaaaaa

SEQ ID NO: 353542 - DNA, 423 bp, Homo sapiens
caccccctcatcccacacagtcagaaatccatgtgtaactttcagctctcccagaacttcactgctagtagtctactgttgacctgaagccttactgataacataaatagttcatgaacacattttatatgttttatgtacagtatactgtattcttacaataaagtaagctaaagaaaagaaaatgttaagaaaatcataaggaagagaaattatatttactattcattaggttgaagtgaatcatcataaaggtcttcatcctcaggggtcaactgtatatcagagatgcattgagttggttgtggtttttggttctgttttttttagtataaattctaagttgtttggtttcatatattacaggtttactttgttgcaagagtttttgttgtctttgaaataaattttatgtacatacgt

SEQ ID NO: 353543 - DNA, 418 bp, Homo sapiens
gatgtcaagaggcaggtgacagcacagctccaggagggtgggcggacaggcccagggtctgccttggacttgctctcccagtgggtggattctagaggcaagtggtgtgaccctgtgcagggaggcatttccactggggagaggctgggatggcccacggtgcagggtcagtggaaatcacacatgcagggcgtcctctctggcactgactgaggcccggtcagcccccacacaatgcccttggacccctcagcacctgtcaccaggcctggtcttcatggtgcatgtctacggaagggtcccggtggcacacagacacctcaacgtggaccggtgctggacagaggacagtgtcactctaaactccgcgggcacagatgtggcgccagcggtgggagtgtggagggccagggcggcc

SEQ ID NO: 353544 - DNA, 419 bp, Homo sapiens
tccaggcgcttcttctcgacatcaggctgcttcttccctctgctggctgagttctggggtctttatgggcacaggatggggacggggcaggccgtaggtagttttggaaaaggcaatattcaattggtaaaaagacagtattcagaaataaccaatcgggagagaatggaagttctcactttgggctgtgggtttcaggcttttcggcttgaaggtgggattttgccagcgacccgcccctgtatgcctacagtttctctgcctcctgttgctatcaattttaagctaccaacatgacgccactgaacagaatcgggaagagacatgcggaacacatattatatagtatttccaccaacagatataatagatgtaaataacctcaaaagagtagataatagtaaaataattatgaagtg

SEQ ID NO: 353545 - DNA, 467 bp, Homo sapiens
tttttttaataaggacccaatcattgaatttaggggtaccctaatccagtggccctcatcttaattaattatatcttccaagataatttttccaaataagaccacattctgaggttccgggtggacatgttcttagggagaaaaacattcaacctagtagcagaaggtcatgtgtttcaaatcagcacatggatctaacagttaatgtagtgtctatgataaatggagagcacttaataaagcattgattcagacaaaatacatcaacaataagcatcattctccttccactttctgcataaaaacattatttttaatacaatatggtttgatagaaacatttaatcttgttccaaaatattttcagggatccagtctctggagaaaactgatgtttaagatacagctacacatatgtattaagtaattacaaaacaacaaaaattaaaagcattttctttaatgcc

SEQ ID NO: 353546 - DNA, 1740 bp, Homo sapiens
cctcgggcggcggcggcggcggcggcgaggcgaagcgaaggaggagtgtgtgcggcggggccggcggcgggtaaaggcgagaaggctgcaggagaccgagggggagccgggccggtggggccgccgccgccgccatgcaggaaatcatcgccagcgtggaccacatcaagtttgacttggagatcgcggtggagcagcagctgggggcgcagccgctgcccttccccggcatggacaagtcgggcgctgctgtctgtgaattctttttgaaagctgcctgcggcaaagggggcatgtgtccgtttcgccacatcagtggtgagaagacagttgtgtgcaaacactggctgcgtggcctatgcaagaaaggggaccagtgtgagttcctgcatgagtatgacatgaccaagatgcccgagtgctacttctactccaagttcggggagtgcagcaacaaggaatgtcccttcctgcacatcgaccccgagtccaagatcaaggactgtccttggtatgaccgtggcttctgcaagcacggtcccctctgcaggcaccggcacacacggagagtcatctgtgtgaattacctcgtgggattctgcccggaggggccctcgtgtaaattcatgcaccctcgatttgaactgcccatgggaaccaccgagcagcccccactgccgcagcagacacagcctccagcaaaggagaaccccgcaggtcatcggggtcatgcagagtcaaaacagcagcgcgggcaaccggggaccccggccactggagcaggtcacctgttacaagtgtggcgagaaaggacactacgccaacagatgcaccaaagggcacttggcctttctcagtggacagtgacagcagctggagccagctccgagcagcccgggggccccgctgttgggagtgtgcatttaactgtttcatgcgcttgttggcgcgactgtggctcgagctggcccgcagacacgtgggtttcatcactctgaggggccacgtctgttagtttcctatcattttgccttagtattttttgaaaaagggacatgtgtcctgtgggtccctgcagtcgacatcatgtttggctgggcatcgatgcctcctttctgggactcccggcacaactcccctcatccagggagggaggcagctgctggggaggggcttggctaggtagttctgtgtggcggtggtcattcccctcattaaacaccagttcttggtgacgccaggggctggtaggtcattcaaagctgtggccagctcacgcctgcttcctccctccctgccctgctgaatcctaaagctgtgcctatatctgtgatttgaatgagggagccctttggggcaaattcaggtgcccccattgcctcaggctggccctggtcccaggtggcagcggttgaggaggggtacagggctctcaagcctgaggttttcttctctgggcttaattttctcttggggtacgtgcctgacagtgtttaaggtgtccgttgaactggagttgcagacttttaaatagatgaccccttcagatcatctgtgcctacctcctgcccatcaggcgtctacactgtcactcagacacctgtggcatgtggaggagactgccctgtcctgagcctggaaaatgtgaaactgtctcctgcaacctgctgggcatgtgggcctggctgtgttcaattgcaagaacaatttttatgaaatggattaaagcttgttttttaa

SEQ ID NO: 353547 - DNA, 1202 bp, Homo sapiens
cactttgggaggccgaggtgggtggatcacctgaagtcaagagttcgagaccagcctggccaacatgggaaaccccgtctctactaaaatacacaaattagccaagcgtggtggcaggcacctgcaatcccagctacttgggaggctgaggcacagagaattgcttgaacctgggaggcagagattgcagtgagccaagatcgcgtcattgcactccagcccaggcacactagagcgaaaccccatctcaaaaaaaaaaaaattatttctgtgatctcgtactccagccttcctttccccacccactcttaactccttgaaaggatcttatatacaggaggctctcaaagcactgggtaatgactgttctcaatgtatgtgtctcattttgtagggcgtgactaacttaagcagcttcttccttgcttggttgggctttgcaaatttttgctactttatttcctgtaccctgaacccttggtgggtcagaggtcagaagggttccctcccactgtcttcagacattgtcaatagcaaattgcacctctttgattcctctccttttctctcctttctacagagtcgggcgctgctgtctgtgaattctttttgaaagctgcctgcggcaaaggtaagaaactccgggctccctgatgtgcctccggaggcgccctcccacctccttctccccggcagacttggaggccgccaggtctctggcttacattgctttctacagactaacgatctctgtagataaaactggtttggacaggctaggaccctgatggggtgttccacctgaaacctaaacgcaggactgaacctggctctaaggctgccttatcacttcgcattccccgtggccacaagctgacctgtgacatggagagaagcccccagcattgagacactcaggaactttctcaatgtcacagagttaataagcggcagagcccagtgtctgaacccaggtctttctcattccatagtttccactggctcatggttttctgtggcctcccatcgaaacaccccatgataacccatcttgcggggtcttgttctcgataaccagccctcaacacagactacacaaaactactgaggtgcgagaatcccttgaaccagggagtcagaggttgcagtgagccgagatcgtgccattgcactccagcctggcaacagagcaagactctatc

SEQ ID NO: 353548 - DNA, 481 bp, Homo sapiens
tatttttcgtttttgtgtgtctgcatggtgtttttcgggcagtggcttctgccatcatcaccacatgtttctctgctgcccactgtcctgaggtgggccgtcgtggaagccctgcttcctgccgtttgcgggacgagtcccgccctcttttttcctgtccccatcggtagtctgcgtgcacgtgttttccacagtaaaaccgtgttgtgtaactctcaaagtaacaatccgccattacaaaggtcgtcctccttgatccagttaacgagtcagaactcttctcccaatcagcagagaaccccgcaggtcatcggggtcatgcagagtcaaaacagcagcgcgggcaaccggggaccccggccactggagcaggtcacctgttacaaggtgagtccctgggctgggggacagggtggggtcttcccttaccgtcagtggccattccctcatgccccatgtgtttggtgaaatgagaaaaatg

SEQ ID NO: 353549 - DNA, 300 bp, Homo sapiens
tttttttcttttcttttcttttttattaacaagcaacataatcggccgggcgttgtggctcacacctgtaatcccagcactttgggaggccatgagtaactattaaaatgtaaaatgtctgtcagtgtagtacctcaaatcatgttgccttctgtgagggggacctctgcccctttccaggacgtgatgccttcaggtggctccaggagttaggaagtgaaggtacctcagcttcttcaggccgtgtcccccaggctcagggtggcctctctgctgacaccctgtccctatcttgccggc

SEQ ID NO: 353550 - DNA, 1817 bp, Homo sapiens
cctcgggcggcggcggcggcggcggcgaggcgaagcgaaggaggagtgtgtgcggcggggccggcggcgggtaaaggcgagaaggctgcaggagaccgagggggagccgggccggtggggccgccgccgccgccatgcaggaaatcatcgccagcgtggaccacatcaagtttgacttggagatcgcggtggagcagcagctgggggcgcagccgctgcccttccccggcatggacaagtcgggcgctgctgtctgtgaattctttttgaaagctgcctgcggcaaagggggcatgtgtccgtttcgccacatcagtggtgagaagacagttgtgtgcaaacactggctgcgtggcctatgcaagaaaggggaccagtgtgagttcctgcatgagtatgacatgaccaagatgcccgagtgctacttctactccaagttcggggagtgcagcaacaaggaatgtcccttcctgcacatcgaccccgagtccaagatcaaggactgtccttggtatgaccgtggcttctgcaagcacggtcccctctgcaggcaccggcacacacggagagtcatctgtgtgaattacctcgtgggattctgcccggaggggccctcgtgtaaattcatgcaccctcgatttgaactgcccatgggaaccaccgagcagcccccactgccgcagcagacacagcctccagcaaagcaaagtaacaatccgccattacaaaggtcgtcctccttgatccagttaacgagtcagaactcttctcccaatcagcagagaaccccgcaggtcatcggggtcatgcagagtcaaaacagcagcgcgggcaaccggggaccccggccactggagcaggtcacctgttacaagtgtggcgagaaaggacactacgccaacagatgcaccaaagggcacttggcctttctcagtggacagtgacagcagctggagccagctccgagcagcccgggggccccgctgttgggagtgtgcatttaactgtttcatgcgcttgttggcgcgactgtggctcgagctggcccgcagacacgtgggtttcatcactctgaggggccacgtctgttagtttcctatcattttgccttagtattttttgaaaaagggacatgtgtcctgtgggtccctgcagtcgacatcatgtttggctgggcatcgatgcctcctttctgggactcccggcacaactcccctcatccagggagggaggcagctgctggggaggggcttggctaggtagttctgtgtggcggtggtcattcccctcattaaacaccagttcttggtgacgccaggggctggtaggtcattcaaagctgtggccagctcacgcctgcttcctccctccctgccctgctgaatcctaaagctgtgcctatatctgtgatttgaatgagggagccctttggggcaaattcaggtgcccccattgcctcaggctggccctggtcccaggtggcagcggttgaggaggggtacagggctctcaagcctgaggttttcttctctgggcttaattttctcttggggtacgtgcctgacagtgtttaaggtgtccgttgaactggagttgcagacttttaaatagatgaccccttcagatcatctgtgcctacctcctgcccatcaggcgtctacactgtcactcagacacctgtggcatgtggaggagactgccctgtcctgagcctggaaaatgtgaaactgtctcctgcaacctgctgggcatgtgggcctggctgtgttcaattgcaagaacaatttttatgaaatggattaaagcttgttttttaa

SEQ ID NO: 353551 - DNA, 1744 bp, Homo sapiens
cctcgggcggcggcggcggcggcggcgaggcgaagcgaaggaggagtgtgtgcggcggggccggcggcgggtaaaggcgagaaggctgcaggagaccgagggggagccgggccggtggggccgccgccgccgccatgcaggaaatcatcgccagcgtggaccacatcaagtttgacttggagatcgcggtggagcagcagctgggggcgcagccgctgcccttccccggcatggacaagtcgggcgctgctgtctgtgaattctttttgaaagctgcctgcggcaaagggggcatgtgtccgtttcgccacatcagtggtgagaagacagttgtgtgcaaacactggctgcgtggcctatgcaagaaaggggaccagtgtgagttcctgcatgagtatgacatgaccaagatgcccgagtgctacttctactccaagttcggggagtgcagcaacaaggaatgtcccttcctgcacatcgaccccgagtccaagatcaaggactgtccttggtatgaccgtggcttctgcaagcacggtcccctctgcaggcaccggcacacacggagagtcatctgtgtgaattacctcgtgggattctgcccggaggggccctcgtgtaaattcatgcacaaagtaacaatccgccattacaaaggtcgtcctccttgatccagttaacgagtcagaactcttctcccaatcagcagagaaccccgcaggtcatcggggtcatgcagagtcaaaacagcagcgcgggcaaccggggaccccggccactggagcaggtcacctgttacaagtgtggcgagaaaggacactacgccaacagatgcaccaaagggcacttggcctttctcagtggacagtgacagcagctggagccagctccgagcagcccgggggccccgctgttgggagtgtgcatttaactgtttcatgcgcttgttggcgcgactgtggctcgagctggcccgcagacacgtgggtttcatcactctgaggggccacgtctgttagtttcctatcattttgccttagtattttttgaaaaagggacatgtgtcctgtgggtccctgcagtcgacatcatgtttggctgggcatcgatgcctcctttctgggactcccggcacaactcccctcatccagggagggaggcagctgctggggaggggcttggctaggtagttctgtgtggcggtggtcattcccctcattaaacaccagttcttggtgacgccaggggctggtaggtcattcaaagctgtggccagctcacgcctgcttcctccctccctgccctgctgaatcctaaagctgtgcctatatctgtgatttgaatgagggagccctttggggcaaattcaggtgcccccattgcctcaggctggccctggtcccaggtggcagcggttgaggaggggtacagggctctcaagcctgaggttttcttctctgggcttaattttctcttggggtacgtgcctgacagtgtttaaggtgtccgttgaactggagttgcagacttttaaatagatgaccccttcagatcatctgtgcctacctcctgcccatcaggcgtctacactgtcactcagacacctgtggcatgtggaggagactgccctgtcctgagcctggaaaatgtgaaactgtctcctgcaacctgctgggcatgtgggcctggctgtgttcaattgcaagaacaatttttatgaaatggattaaagcttgttttttaa

SEQ ID NO: 353552 - DNA, 2085 bp, Homo sapiens
cctcgggcggcggcggcggcggcggcgaggcgaagcgaaggaggagtgtgtgcggcggggccggcggcgggtaaaggcgagaaggctgcaggagaccgagggggagccgggccggtggggccgccgccgccgccatgcaggaaatcatcgccagcgtggaccacatcaagtttgacttggagatcgcggtggagcagcagctgggggcgcagccgctgcccttccccggcatggacaagtcgggcgctgctgtctgtgaattctttttgaaagctgcctgcggcaaagaagagacaggatttcaccgtgacagccaggatggtctccgtgccagccaggatggtctcgatctcctgaccttgtgatccgcccacctcggccttccaaagtgctgggattaccagcgtgatccactgcgcccggccatgagtaactattaaaatgtaaaatgtctgtcagtgtagtacctcaaatcatgttgccttctgtgagggggacctctgcccctttccaggacgtgatgccttcaggtggctccaggagttaggaagtgaagggggcatgtgtccgtttcgccacatcagtggtgagaagacagttgtgtgcaaacactggctgcgtggcctatgcaagaaaggggaccagtgtgagttcctgcatgagtatgacatgaccaagatgcccgagtgctacttctactccaagttcggggagtgcagcaacaaggaatgtcccttcctgcacatcgaccccgagtccaagatcaaggactgtccttggtatgaccgtggcttctgcaagcacggtcccctctgcaggcaccggcacacacggagagtcatctgtgtgaattacctcgtgggattctgcccggaggggccctcgtgtaaattcatgcaccctcgatttgaactgcccatgggaaccaccgagcagcccccactgccgcagcagacacagcctccagcaaagcaaagtaacaatccgccattacaaaggtcgtcctccttgatccagttaacgagtcagaactcttctcccaatcagcagagaaccccgcaggtcatcggggtcatgcagagtcaaaacagcagcgcgggcaaccggggaccccggccactggagcaggtcacctgttacaagtgtggcgagaaaggacactacgccaacagatgcaccaaagggcacttggcctttctcagtggacagtgacagcagctggagccagctccgagcagcccgggggccccgctgttgggagtgtgcatttaactgtttcatgcgcttgttggcgcgactgtggctcgagctggcccgcagacacgtgggtttcatcactctgaggggccacgtctgttagtttcctatcattttgccttagtattttttgaaaaagggacatgtgtcctgtgggtccctgcagtcgacatcatgtttggctgggcatcgatgcctcctttctgggactcccggcacaactcccctcatccagggagggaggcagctgctggggaggggcttggctaggtagttctgtgtggcggtggtcattcccctcattaaacaccagttcttggtgacgccaggggctggtaggtcattcaaagctgtggccagctcacgcctgcttcctccctccctgccctgctgaatcctaaagctgtgcctatatctgtgatttgaatgagggagccctttggggcaaattcaggtgcccccattgcctcaggctggccctggtcccaggtggcagcggttgaggaggggtacagggctctcaagcctgaggttttcttctctgggcttaattttctcttggggtacgtgcctgacagtgtttaaggtgtccgttgaactggagttgcagacttttaaatagatgaccccttcagatcatctgtgcctacctcctgcccatcaggcgtctacactgtcactcagacacctgtggcatgtggaggagactgccctgtcctgagcctggaaaatgtgaaactgtctcctgcaacctgctgggcatgtgggcctggctgtgttcaattgcaagaacaatttttatgaaatggattaaagcttgttttttaa

SEQ ID NO: 353553 - DNA, 1329 bp, Homo sapiens
tatttttcgtttttgtgtgtctgcatggtgtttttcgggcagtggcttctgccatcatcaccacatgtttctctgctgcccactgtcctgaggtgggccgtcgtggaagccctgcttcctgccgtttgcgggacgagtcccgccctcttttttcctgtccccatcggtagtctgcgtgcacgtgttttccacagtaaaaccgtgttgtgtaactctcaaagtaacaatccgccattacaaaggtcgtcctccttgatccagttaacgagtcagaactcttctcccaatcagcagagaaccccgcaggtcatcggggtcatgcagagtcaaaacagcagcgcgggcaaccggggaccccggccactggagcaggtcacctgttacaagtgtggcgagaaaggacactacgccaacagatgcaccaaagggcacttggcctttctcagtggacagtgacagcagctggagccagctccgagcagcccgggggccccgctgttgggagtgtgcatttaactgtttcatgcgcttgttggcgcgactgtggctcgagctggcccgcagacacgtgggtttcatcactctgaggggccacgtctgttagtttcctatcattttgccttagtattttttgaaaaagggacatgtgtcctgtgggtccctgcagtcgacatcatgtttggctgggcatcgatgcctcctttctgggactcccggcacaactcccctcatccagggagggaggcagctgctggggaggggcttggctaggtagttctgtgtggcggtggtcattcccctcattaaacaccagttcttggtgacgccaggggctggtaggtcattcaaagctgtggccagctcacgcctgcttcctccctccctgccctgctgaatcctaaagctgtgcctatatctgtgatttgaatgagggagccctttggggcaaattcaggtgcccccattgcctcaggctggccctggtcccaggtggcagcggttgaggaggggtacagggctctcaagcctgaggttttcttctctgggcttaattttctcttggggtacgtgcctgacagtgtttaaggtgtccgttgaactggagttgcagacttttaaatagatgaccccttcagatcatctgtgcctacctcctgcccatcaggcgtctacactgtcactcagacacctgtggcatgtggaggagactgccctgtcctgagcctggaaaatgtgaaactgtctcctgcaacctgctgggcatgtgggcctggctgtgttcaattgcaagaacaatttttatgaaatggattaaagcttgttttttaa

SEQ ID NO: 353554 - DNA, 1206 bp, Homo sapiens
cctcgggcggcggcggcggcggcggcgaggcgaagcgaaggaggagtgtgtgcggcggggccggcggcgggtaaaggcgagaaggctgcaggacaaagtaacaatccgccattacaaaggtcgtcctccttgatccagttaacgagtcagaactcttctcccaatcagcagagaaccccgcaggtcatcggggtcatgcagagtcaaaacagcagcgcgggcaaccggggaccccggccactggagcaggtcacctgttacaagtgtggcgagaaaggacactacgccaacagatgcaccaaagggcacttggcctttctcagtggacagtgacagcagctggagccagctccgagcagcccgggggccccgctgttgggagtgtgcatttaactgtttcatgcgcttgttggcgcgactgtggctcgagctggcccgcagacacgtgggtttcatcactctgaggggccacgtctgttagtttcctatcattttgccttagtattttttgaaaaagggacatgtgtcctgtgggtccctgcagtcgacatcatgtttggctgggcatcgatgcctcctttctgggactcccggcacaactcccctcatccagggagggaggcagctgctggggaggggcttggctaggtagttctgtgtggcggtggtcattcccctcattaaacaccagttcttggtgacgccaggggctggtaggtcattcaaagctgtggccagctcacgcctgcttcctccctccctgccctgctgaatcctaaagctgtgcctatatctgtgatttgaatgagggagccctttggggcaaattcaggtgcccccattgcctcaggctggccctggtcccaggtggcagcggttgaggaggggtacagggctctcaagcctgaggttttcttctctgggcttaattttctcttggggtacgtgcctgacagtgtttaaggtgtccgttgaactggagttgcagacttttaaatagatgaccccttcagatcatctgtgcctacctcctgcccatcaggcgtctacactgtcactcagacacctgtggcatgtggaggagactgccctgtcctgagcctggaaaatgtgaaactgtctcctgcaacctgctgggcatgtgggcctggctgtgttcaattgcaagaacaatttttatgaaatggattaaagcttgttttttaa

SEQ ID NO: 353555 - DNA, 1690 bp, Homo sapiens
cctcgggcggcggcggcggcggcggcgaggcgaagcgaaggaggagtgtgtgcggcggggccggcggcgggtaaaggcgagaaggctgcaggagaccgagggggagccgggccggtggggccgccgccgccgccatgcaggaaatcatcgccagcgtggaccacatcaagtttgacttggagatcgcggtggagcagcagctgggggcgcagccgctgcccttccccggcatggacaagtcgggcgctgctgtctgtgaattctttttgaaagctgcctgcggcaaagggggcatgtgtccgtttcgccacatcagtggtgagaagacagttgtgtgcaaacactggctgcgtggcctatgcaagaaaggggaccagtgtgagttcctgcatgagtatgacatgaccaagatgcccgagtgctacttctactccaagttcggggagtgcagcaacaaggaatgtcccttcctgcacatcgaccccgagtccaagatcaaggactgtccttggtatgaccgtggcttctgcaagcacggtcccctctgcaggcaccggcacacacggagagtcatctgtgtgaattacctcgtgggattctgcccggaggggccctcgtgtaaattcatgcacaaagtaacaatccgccattacaaaggtcgtcctccttgatccagttaacgagtcagaactcttctcccaatcagcagagaaccccgcaggtcatcggggtcatgcagagtcaaaacagcagcgcgggcaaccggggaccccggccactggagcaggtcacctgttacaagtgtggcgagaaaggacactacgccaacagatgcaccaaagggcacttggcctttctcagtggacagtgacagcagctggagccagctccgagcagcccgggggccccgctgttgggagtgtgcatttaactgtttcatgcgcttgttggcgcgactgtggctcgagctggcccgcagacacgtgggtttcatcactctgaggggccacgtctgttagtttcctatcattttgccttagtattttttgaatcgatgcctcctttctgggactcccggcacaactcccctcatccagggagggaggcagctgctggggaggggcttggctaggtagttctgtgtggcggtggtcattcccctcattaaacaccagttcttggtgacgccaggggctggtaggtcattcaaagctgtggccagctcacgcctgcttcctccctccctgccctgctgaatcctaaagctgtgcctatatctgtgatttgaatgagggagccctttggggcaaattcaggtgcccccattgcctcaggctggccctggtcccaggtggcagcggttgaggaggggtacagggctctcaagcctgaggttttcttctctgggcttaattttctcttggggtacgtgcctgacagtgtttaaggtgtccgttgaactggagttgcagacttttaaatagatgaccccttcagatcatctgtgcctacctcctgcccatcaggcgtctacactgtcactcagacacctgtggcatgtggaggagactgccctgtcctgagcctggaaaatgtgaaactgtctcctgcaacctgctgggcatgtgggcctggctgtgttcaattgcaagaacaatttttatgaaatggattaaagcttgttttttaa

SEQ ID NO: 353556 - DNA, 1823 bp, Homo sapiens
atagagctggcaagagtgttgggtgccaactgggcagagcccctcagggcagcagggactcaggggtgggtgtcagtacagagtcagtgcccccagctgcctcctgacccttttgttcagtgcttgaggctgccgttttaggagtcatagagtaaagagaagctatggaagggcctggataatcaggactgggatgaggcagggtcagggctggatttgtcatgtggctctgcaggctccccttacccaagtctaagcatcgtcccatctctctgatcctgtaatcaaaacctgtccccaaggtagcttaggtgtgtcacagccacgagggaaaacgttgggtacagcccaccctctgtccccagcagtggctccccaagggaggggaggctgggacacttctgatgctgttccctcccatctcctgccagggaaccccagaccttggctcagaggtaagtgactggcctgtggtgcagaagggcttggtccccagacggggtggcggagctcaggtgccacgggcttctctttgtcctgctacccacttgggagtccctccctgggcaggccatgtgtccaggtgggagagttgtgggcctgaaagagcaggtcgctagcaggtcgccttctggcggccttgttctcccttgcatctgcggagttgctggctagtttctgcaccactgcactttccatcctgagctccctcaccctctaatttgaaagaaactctgtaccactgagaatttcagagtcatgtcccgactggggacttggtggatgatttgggatttggtgggcactcccttagttgaaaactgcatttgaacagtgttgttgtctgtctctcctcttcccccacttcctgctgttcccagtgtggcgagaaaggacactacgccaacagatgcaccaaagggcacttggcctttctcagtggacagtgacagcagctggagccagctccgagcagcccgggggccccgctgttgggagtgtgcatttaactgtttcatgcgcttgttggcgcgactgtggctcgagctggcccgcagacacgtgggtttcatcactctgaggggccacgtctgttagtttcctatcattttgccttagtattttttgaaaaagggacatgtgtcctgtgggtccctgcagtcgacatcatgtttggctgggcatcgatgcctcctttctgggactcccggcacaactcccctcatccagggagggaggcagctgctggggaggggcttggctaggtagttctgtgtggcggtggtcattcccctcattaaacaccagttcttggtgacgccaggggctggtaggtcattcaaagctgtggccagctcacgcctgcttcctccctccctgccctgctgaatcctaaagctgtgcctatatctgtgatttgaatgagggagccctttggggcaaattcaggtgcccccattgcctcaggctggccctggtcccaggtggcagcggttgaggaggggtacagggctctcaagcctgaggttttcttctctgggcttaattttctcttggggtacgtgcctgacagtgtttaaggtgtccgttgaactggagttgcagacttttaaatagatgaccccttcagatcatctgtgcctacctcctgcccatcaggcgtctacactgtcactcagacacctgtggcatgtggaggagactgccctgtcctgagcctggaaaatgtgaaactgtctcctgcaacctgctgggcatgtgggcctggctgtgttcaattgcaagaacaatttttatgaaatggattaaagcttgttttttaa

SEQ ID NO: 353557 - DNA, 1129 bp, Homo sapiens
cctcgggcggcggcggcggcggcggcgaggcgaagcgaaggaggagtgtgtgcggcggggccggcggcgggtaaaggcgagaaggctgcaggagagaaccccgcaggtcatcggggtcatgcagagtcaaaacagcagcgcgggcaaccggggaccccggccactggagcaggtcacctgttacaagtgtggcgagaaaggacactacgccaacagatgcaccaaagggcacttggcctttctcagtggacagtgacagcagctggagccagctccgagcagcccgggggccccgctgttgggagtgtgcatttaactgtttcatgcgcttgttggcgcgactgtggctcgagctggcccgcagacacgtgggtttcatcactctgaggggccacgtctgttagtttcctatcattttgccttagtattttttgaaaaagggacatgtgtcctgtgggtccctgcagtcgacatcatgtttggctgggcatcgatgcctcctttctgggactcccggcacaactcccctcatccagggagggaggcagctgctggggaggggcttggctaggtagttctgtgtggcggtggtcattcccctcattaaacaccagttcttggtgacgccaggggctggtaggtcattcaaagctgtggccagctcacgcctgcttcctccctccctgccctgctgaatcctaaagctgtgcctatatctgtgatttgaatgagggagccctttggggcaaattcaggtgcccccattgcctcaggctggccctggtcccaggtggcagcggttgaggaggggtacagggctctcaagcctgaggttttcttctctgggcttaattttctcttggggtacgtgcctgacagtgtttaaggtgtccgttgaactggagttgcagacttttaaatagatgaccccttcagatcatctgtgcctacctcctgcccatcaggcgtctacactgtcactcagacacctgtggcatgtggaggagactgccctgtcctgagcctggaaaatgtgaaactgtctcctgcaacctgctgggcatgtgggcctggctgtgttcaattgcaagaacaatttttatgaaatggattaaagcttgttttttaa

SEQ ID NO: 353558 - DNA, 2247 bp, Homo sapiens
cctcgggcggcggcggcggcggcggcgaggcgaagcgaaggaggagtgtgtgcggcggggccggcggcgggtaaaggcgagaaggctgcaggagaccgagggggagccgggccggtggggccgccgccgccgccatgcaggaaatcatcgccagcgtggaccacatcaagtttgacttggagatcgcggtggagcagcagctgggggcgcagccgctgcccttccccggcatggacaagtcgggcgctgctgtctgtgaattctttttgaaagctgcctgcggcaaagggggcatgtgtccgtttcgccacatcagtggtgagaagacagttgtgtgcaaacactggctgcgtggcctatgcaagaaaggggaccagtgtgagttcctgcatgagtatgacatgaccaagatgcccgagtgctacttctactccaagttcggggagtgcagcaacaaggaatgtcccttcctgcacatcgaccccgagtccaagatcaaggactgtccttggtatgaccgtggcttctgcaagcacggtcccctctgcaggcaccggcacacacggagagtcatctgtgtgaattacctcgtgggattctgcccggaggggccctcgtgtaaattcatgcaccctcgatttgaactgcccatgggaaccaccgagcagcccccactgccgcagcagacacagcctccagcaaaggagaaccccgcaggtcatcggggtcatgcagagtcaaaacagcagcgcgggcaaccggggaccccggccactggagcaggtcacctgttacaagtgtggcgagaaaggacactacgccaacagatgcaccaaagggcacttggcctttctcagtggacagtgacagcagctggagccagctccgagcagcccgggggccccgctgttgggagtgtgcatttaactgtttcatgcgcttgttggcgcgactgtggctcgagctggcccgcagacacgtgggtttcatcactctgaggggccacgtctgttagtttcctatcattttgccttagtattttttgaaaaagggacatgtgtcctgtgggtccctgcagtcgacatcatgtttggctgggcatcgatgcctcctttctgggactcccggcacaactcccctcatccagggagggaggcagctgctggggaggggcttggctaggtagttctgtgtggcggtggtcattcccctcattaaacaccagttcttggtgacgccaggggctggtaggtcattcaaagctgtggccagctcacgcctgcttcctccctccctgccctgctgaatcctaaagctgtgcctatatctgtgatttgaatgagggagccctttggggcaaattcaggtgcccccattgcctcaggctggccctggtcccaggtggcagcggttgaggaggggtacagggctctcaagcctgaggttttcttctctgggcttaattttctcttggggtacgtgcctgacagtgtttaaggtgtccgttgaactggagttgcagacttttaaatagatgaccccttcagatcatctgtgcctacctcctgcccatcaggcgtctacactgtcactcagacacctgtggcatgtggaggagactgccctgtcctgagcctggaaaatgtgaaactgtctcctgcaacctgctgggcatgtgggcctggctgtgttcaattgcaagaacaatttttatgaaatggattaaagcttgttttttaaaaaaaaaaaaaaaaaaaaaaaaaaaaaaaaaaaaaaaaaaaaaaaaaaaaaaaaaaaaaaaaaaaaaaaaaaaaaaaaaaaaaaaaaaaaaaaaaaaaaaaaaaaaaaaaaaaaaaaaaaaaaaaaaaaacaaaaaaaaagagacggcggcgcggccggcgacgccgaccatccctctaccgcgagcgcggacgcacaaagagccacgaccagccacaacgagtagaagaaaagaagggcgagcagcatgtagaagagaggaagtagcagacaacacaagagcgagacgaggcgtcttatactatataaaccaaatatggggctgaaaggagaagaggaaaagaaattgcataacaagagcgaagtatttattcgtgtacaaaagagaagaatctattcttgacggaggcgtggagtgaccataaaggaggggagcaaacacacacaaagaagagtatatgaagtatcgacgttggagaaattataaaaaaaacagaatgggagaaa

SEQ ID NO: 353559 - DNA, 374 bp, Homo sapiens
gaagacagttgtgtgcaaacactggctgcgtggcctatgcaagaaaggggaccagtgtgagttcctgcatgagtatgacatgaccaagatgcccgagtgctacttctactccaagttcggtaaggcgcctggagccctggaggctctgctgagaaccagggtgcagaggggtccgctggctgctcagtgcccacactgtctctgcctgcttttcccatctttctattctcagaggagaactctggcagaacctgccagcctcagccagcttttaggggacagtgtggctattttctgctcatctctttttttttttttttttttttaaagacatagggtctcgctatgtttcacatactggtcttgaactcctg

SEQ ID NO: 353560 - DNA, 1719 bp, Homo sapiens
tcgctcgctcctccttcgcttcgcctcgccgccgccatgcaggaaatcatcgccagcgtggaccacatcaagtttgacttggagatcgcggtggagcagcagctgggggcgcagccgctgcccttccccggcatggacaagtcgggcgctgctgtctgtgaattctttttgaaagctgcctgcggcaaagggggcatgtgtccgtttcgccacatcagtggtgagaagacagttgtgtgcaaacactggctgcgtggcctatgcaagaaaggggaccagtgtgagttcctgcatgagtatgacatgaccaagatgcccgagtgctacttctactccaagttcggggagtgcagcaacaaggaatgtcccttcctgcacatcgaccccgagtccaagatcaaggactgtccttggtatgaccgtggcttctgcaagcacggtcccctctgcaggcaccggcacacacggagagtcatctgtgtgaattacctcgtgggattctgcccggaggggccctcgtgtaaattcatgcaccctcgatttgaactgcccatgggaaccaccgagcagcccccactgccgcagcagacacagcctccagcaaagcaaagtaacaatccgccattacaaaggtcgtcctccttgatccagttaacgagtcagaactcttctcccaatcagcagagaaccccgcaggtcatcggggtcatgcagagtcaaaacagcagcgcgggcaaccggggaccccggccactggagcaggtcacctgttacaagtgtggcgagaaaggacactacgccaacagatgcaccaaagggcacttggcctttctcagtggacagtgacagcagctggagccagctccgagcagcccgggggccccgctgttgggagtgtgcatttaactgtttcatgcgcttgttggcgcgactgtggctcgagctggcccgcagacacgtgggtttcatcactctgaggggccacgtctgttagtttcctatcattttgccttagtattttttgaaaaagggacatgtgtcctgtgggtccctgcagtcgacatcatgtttggctgggcatcgatgcctcctttctgggactcccggcacaactcccctcatccagggagggaggcagctgctggggaggggcttggctaggtagttctgtgtggcggtggtcattcccctcattaaacaccagttcttggtgacgccaggggctggtaggtcattcaaagctgtggccagctcacgcctgcttcctccctccctgccctgctgaatcctaaagctgtgcctatatctgtgatttgaatgagggagccctttggggcaaattcaggtgcccccattgcctcaggctggccctggtcccaggtggcagcggttgaggaggggtacagggctctcaagcctgaggttttcttctctgggcttaattttctcttggggtacgtgcctgacagtgtttaaggtgtccgttgaactggagttgcagacttttaaatagatgaccccttcagatcatctgtgcctacctcctgcccatcaggcgtctacactgtcactcagacacctgtggcatgtggaggagactgccctgtcctgagcctggaaaatgtgaaactgtctcctgcaacctgctgggcatgtgggcctggctgtgttcaattgcaagaacaatttttatgaaatggattaaagcttgttttttaa

SEQ ID NO: 353561 - DNA, 1763 bp, Homo sapiens
cctcgggcggcggcggcggcggcggcgaggcgaagcgaaggaggagtgtgtgcggcggggccggcggcgggtaaaggcgagaaggctgcaggagaccgagggggagccgggccggtggggccgccgccgccgccatgcaggaaatcatcgccagcgtggaccacatcaagtttgacttggagatcgcggtggagcagcagctgggggcgcagccgctgcccttccccggcatggacaagtcgggcgctgctgtctgtgaattctttttgaaagctgcctgcggcaaagggggcatgtgtccgtttcgccacatcagtggtgagaagacagttgtgtgcaaacactggctgcgtggcctatgcaagaaaggggaccagtgtgagttcctgcatgagtatgacatgaccaagatgcccgagtgctacttctactccaagttcggggagtgcagcaacaaggaatgtcccttcctgcacatcgaccccgagtccaagatcaaggactgtccttggtatgaccgtggcttctgcaagcacggtcccctctgcaggcaccggcacacacggagagtcatctgtgtgaattacctcgtgggattctgcccggaggggccctcgtgtaaattcatgcaccctcgatttgaactgcccatgggaaccaccgagcagcccccactgccgcagcagacacagcctccagcaaagcaaagtaacaatccgccattacaaaggtcgtcctccttgatccagttaacgagtcagaactcttctcccaatcagcagagaaccccgcaggtcatcggggtcatgcagagtcaaaacagcagcgcgggcaaccggggaccccggccactggagcaggtcacctgttacaagtgtggcgagaaaggacactacgccaacagatgcaccaaagggcacttggcctttctcagtggacagtgacagcagctggagccagctccgagcagcccgggggccccgctgttgggagtgtgcatttaactgtttcatgcgcttgttggcgcgactgtggctcgagctggcccgcagacacgtgggtttcatcactctgaggggccacgtctgttagtttcctatcattttgccttagtattttttgaatcgatgcctcctttctgggactcccggcacaactcccctcatccagggagggaggcagctgctggggaggggcttggctaggtagttctgtgtggcggtggtcattcccctcattaaacaccagttcttggtgacgccaggggctggtaggtcattcaaagctgtggccagctcacgcctgcttcctccctccctgccctgctgaatcctaaagctgtgcctatatctgtgatttgaatgagggagccctttggggcaaattcaggtgcccccattgcctcaggctggccctggtcccaggtggcagcggttgaggaggggtacagggctctcaagcctgaggttttcttctctgggcttaattttctcttggggtacgtgcctgacagtgtttaaggtgtccgttgaactggagttgcagacttttaaatagatgaccccttcagatcatctgtgcctacctcctgcccatcaggcgtctacactgtcactcagacacctgtggcatgtggaggagactgccctgtcctgagcctggaaaatgtgaaactgtctcctgcaacctgctgggcatgtgggcctggctgtgttcaattgcaagaacaatttttatgaaatggattaaagcttgttttttaa

SEQ ID NO: 353562 - DNA, 2012 bp, Homo sapiens
cctcgggcggcggcggcggcggcggcgaggcgaagcgaaggaggagtgtgtgcggcggggccggcggcgggtaaaggcgagaaggctgcaggagaccgagggggagccgggccggtggggccgccgccgccgccatgcaggaaatcatcgccagcgtggaccacatcaagtttgacttggagatcgcggtggagcagcagctgggggcgcagccgctgcccttccccggcatggacaagtcgggcgctgctgtctgtgaattctttttgaaagctgcctgcggcaaagaagagacaggatttcaccgtgacagccaggatggtctccgtgccagccaggatggtctcgatctcctgaccttgtgatccgcccacctcggccttccaaagtgctgggattaccagcgtgatccactgcgcccggccatgagtaactattaaaatgtaaaatgtctgtcagtgtagtacctcaaatcatgttgccttctgtgagggggacctctgcccctttccaggacgtgatgccttcaggtggctccaggagttaggaagtgaagggggcatgtgtccgtttcgccacatcagtggtgagaagacagttgtgtgcaaacactggctgcgtggcctatgcaagaaaggggaccagtgtgagttcctgcatgagtatgacatgaccaagatgcccgagtgctacttctactccaagttcggggagtgcagcaacaaggaatgtcccttcctgcacatcgaccccgagtccaagatcaaggactgtccttggtatgaccgtggcttctgcaagcacggtcccctctgcaggcaccggcacacacggagagtcatctgtgtgaattacctcgtgggattctgcccggaggggccctcgtgtaaattcatgcacaaagtaacaatccgccattacaaaggtcgtcctccttgatccagttaacgagtcagaactcttctcccaatcagcagagaaccccgcaggtcatcggggtcatgcagagtcaaaacagcagcgcgggcaaccggggaccccggccactggagcaggtcacctgttacaagtgtggcgagaaaggacactacgccaacagatgcaccaaagggcacttggcctttctcagtggacagtgacagcagctggagccagctccgagcagcccgggggccccgctgttgggagtgtgcatttaactgtttcatgcgcttgttggcgcgactgtggctcgagctggcccgcagacacgtgggtttcatcactctgaggggccacgtctgttagtttcctatcattttgccttagtattttttgaaaaagggacatgtgtcctgtgggtccctgcagtcgacatcatgtttggctgggcatcgatgcctcctttctgggactcccggcacaactcccctcatccagggagggaggcagctgctggggaggggcttggctaggtagttctgtgtggcggtggtcattcccctcattaaacaccagttcttggtgacgccaggggctggtaggtcattcaaagctgtggccagctcacgcctgcttcctccctccctgccctgctgaatcctaaagctgtgcctatatctgtgatttgaatgagggagccctttggggcaaattcaggtgcccccattgcctcaggctggccctggtcccaggtggcagcggttgaggaggggtacagggctctcaagcctgaggttttcttctctgggcttaattttctcttggggtacgtgcctgacagtgtttaaggtgtccgttgaactggagttgcagacttttaaatagatgaccccttcagatcatctgtgcctacctcctgcccatcaggcgtctacactgtcactcagacacctgtggcatgtggaggagactgccctgtcctgagcctggaaaatgtgaaactgtctcctgcaacctgctgggcatgtgggcctggctgtgttcaattgcaagaacaatttttatgaaatggattaaagcttgttttttaa

SEQ ID NO: 353563 - DNA, 1734 bp, Homo sapiens
gagacctcctcttctggatcccgggacgctccccttggtttcaggactcctgactcccaggcccccatttccaccgtctggggactccttttaccctcactcggactcaggagttcactgcctcggatctttggccctctgcggctgttcaaagagtcgggcgctgctgtctgtgaattctttttgaaagctgcctgcggcaaagggggcatgtgtccgtttcgccacatcagtggtgagaagacagttgtgtgcaaacactggctgcgtggcctatgcaagaaaggggaccagtgtgagttcctgcatgagtatgacatgaccaagatgcccgagtgctacttctactccaagttcggggagtgcagcaacaaggaatgtcccttcctgcacatcgaccccgagtccaagatcaaggactgtccttggtatgaccgtggcttctgcaagcacggtcccctctgcaggcaccggcacacacggagagtcatctgtgtgaattacctcgtgggattctgcccggaggggccctcgtgtaaattcatgcaccctcgatttgaactgcccatgggaaccaccgagcagcccccactgccgcagcagacacagcctccagcaaagcaaagtaacaatccgccattacaaaggtcgtcctccttgatccagttaacgagtcagaactcttctcccaatcagcagagaaccccgcaggtcatcggggtcatgcagagtcaaaacagcagcgcgggcaaccggggaccccggccactggagcaggtcacctgttacaagtgtggcgagaaaggacactacgccaacagatgcaccaaagggcacttggcctttctcagtggacagtgacagcagctggagccagctccgagcagcccgggggccccgctgttgggagtgtgcatttaactgtttcatgcgcttgttggcgcgactgtggctcgagctggcccgcagacacgtgggtttcatcactctgaggggccacgtctgttagtttcctatcattttgccttagtattttttgaaaaagggacatgtgtcctgtgggtccctgcagtcgacatcatgtttggctgggcatcgatgcctcctttctgggactcccggcacaactcccctcatccagggagggaggcagctgctggggaggggcttggctaggtagttctgtgtggcggtggtcattcccctcattaaacaccagttcttggtgacgccaggggctggtaggtcattcaaagctgtggccagctcacgcctgcttcctccctccctgccctgctgaatcctaaagctgtgcctatatctgtgatttgaatgagggagccctttggggcaaattcaggtgcccccattgcctcaggctggccctggtcccaggtggcagcggttgaggaggggtacagggctctcaagcctgaggttttcttctctgggcttaattttctcttggggtacgtgcctgacagtgtttaaggtgtccgttgaactggagttgcagacttttaaatagatgaccccttcagatcatctgtgcctacctcctgcccatcaggcgtctacactgtcactcagacacctgtggcatgtggaggagactgccctgtcctgagcctggaaaatgtgaaactgtctcctgcaacctgctgggcatgtgggcctggctgtgttcaattgcaagaacaatttttatgaaatggattaaagcttgttttttaa

SEQ ID NO: 353564 - DNA, 1146 bp, Homo sapiens
cctcgggcggcggcggcggcggcggcgaggcgaagcgaaggaggagtgtgtgcggcggggccggcggcgggtaaaggcgagaaggctgcaggagaccgagggggagccgggccggtggggccgccgccgccgccatgcaggaaatcatcgccagccgcgggcaaccggggaccccggccactggagcaggtcacctgttacaagtgtggcgagaaaggacactacgccaacagatgcaccaaagggcacttggcctttctcagtggacagtgacagcagctggagccagctccgagcagcccgggggccccgctgttgggagtgtgcatttaactgtttcatgcgcttgttggcgcgactgtggctcgagctggcccgcagacacgtgggtttcatcactctgaggggccacgtctgttagtttcctatcattttgccttagtattttttgaaaaagggacatgtgtcctgtgggtccctgcagtcgacatcatgtttggctgggcatcgatgcctcctttctgggactcccggcacaactcccctcatccagggagggaggcagctgctggggaggggcttggctaggtagttctgtgtggcggtggtcattcccctcattaaacaccagttcttggtgacgccaggggctggtaggtcattcaaagctgtggccagctcacgcctgcttcctccctccctgccctgctgaatcctaaagctgtgcctatatctgtgatttgaatgagggagccctttggggcaaattcaggtgcccccattgcctcaggctggccctggtcccaggtggcagcggttgaggaggggtacagggctctcaagcctgaggttttcttctctgggcttaattttctcttggggtacgtgcctgacagtgtttaaggtgtccgttgaactggagttgcagacttttaaatagatgaccccttcagatcatctgtgcctacctcctgcccatcaggcgtctacactgtcactcagacacctgtggcatgtggaggagactgccctgtcctgagcctggaaaatgtgaaactgtctcctgcaacctgctgggcatgtgggcctggctgtgttcaattgcaagaacaatttttatgaaatggattaaagcttgttttttaa

SEQ ID NO: 353565 - DNA, 1646 bp, Homo sapiens
cctcgggcggcggcggcggcggcggcgaggcgaagcgaaggaggagtgtgtgcggcggggccggcggcgggtaaaggcgagaaggctgcaggagaccgagggggagccgggccggtggggccgccgccgccgccatgcaggaaatcatcgccagcgtggaccacatcaagtttgacttggagatcgcggtggagcagcagctgggggcgcagccgctgcccttccccggcatggacaagtcgggcgctgctgtctgtgaattctttttgaaagctgcctgcggcaaagggggcatgtgtccgtttcgccacatcagtggtgagaagacagttgtgtgcaaacactggctgcgtggcctatgcaagaaaggggaccagtgtgagttcctgcatgagtatgacatgaccaagatgcccgagtgctacttctactccaagttcggggagtgcagcaacaaggaatgtcccttcctgcacatcgaccccgagtccaagatcaaggactgtccttggtatgaccgtggcttctgcaagcacgccctcgatttgaactgcccatgggaaccaccgagcagcccccactgccgcagcagacacagcctccagcaaaggagaaccccgcaggtcatcggggtcatgcagagtcaaaacagcagcgcgggcaaccggggaccccggccactggagcaggtcacctgttacaagtgtggcgagaaaggacactacgccaacagatgcaccaaagggcacttggcctttctcagtggacagtgacagcagctggagccagctccgagcagcccgggggccccgctgttgggagtgtgcatttaactgtttcatgcgcttgttggcgcgactgtggctcgagctggcccgcagacacgtgggtttcatcactctgaggggccacgtctgttagtttcctatcattttgccttagtattttttgaaaaagggacatgtgtcctgtgggtccctgcagtcgacatcatgtttggctgggcatcgatgcctcctttctgggactcccggcacaactcccctcatccagggagggaggcagctgctggggaggggcttggctaggtagttctgtgtggcggtggtcattcccctcattaaacaccagttcttggtgacgccaggggctggtaggtcattcaaagctgtggccagctcacgcctgcttcctccctccctgccctgctgaatcctaaagctgtgcctatatctgtgatttgaatgagggagccctttggggcaaattcaggtgcccccattgcctcaggctggccctggtcccaggtggcagcggttgaggaggggtacagggctctcaagcctgaggttttcttctctgggcttaattttctcttggggtacgtgcctgacagtgtttaaggtgtccgttgaactggagttgcagacttttaaatagatgaccccttcagatcatctgtgcctacctcctgcccatcaggcgtctacactgtcactcagacacctgtggcatgtggaggagactgccctgtcctgagcctggaaaatgtgaaactgtctcctgcaacctgctgggcatgtgggcctggctgtgttcaattgcaagaacaatttttatgaaatggattaaagcttgttttttaa

SEQ ID NO: 353566 - DNA, 1583 bp, Homo sapiens
cctcgggcggcggcggcggcggcggcgaggcgaagcgaaggaggagtgtgtgcggcggggccggcggcgggtaaaggcgagaaggctgcaggagaccgagggggagccgggccggtggggccgccgccgccgccatgcaggaaatcatcgccagcgtggaccacatcaagtttgacttggagatcgcggtggagcagcagctgggggcgcagccgctgcccttccccggcatggacaagtcgggcgctgctgtctgtgaattctttttgaaagctgcctgcggcaaagggggcatgtgtccgtttcgccacatcagtggtgagaagacagttgtgtgcaaacactggctgcgtggcctatgcaagaaaggggaccagtgtgagttcctgcatgagtatgacatgaccaagatgcccgagtgctacttctactccaagttcggggagtgcagcaacaaggaatgtcccttcctgcacatcgaccccgagtccaagatcaaggactgtccttggtatgaccgtggcttctgcaagcacggtcccctctgcaggcaccggcacacacggagagtcatctgtgtgaattacctcgtgggattctgcccggaggggccctcgtgtaaattcatgcaccctcgatttgaactgcccatgggaaccaccgagcagcccccactgccgcagcagacacagcctccagcaaaggagaaccccgcaggtcatcggggtcatgcagagtcaaaacagcagcgcgggcaaccggggaccccggccactggagcaggtcacctgttacaagtgtggcgagaaaggacactacgccaacagatgcaccaaagggcacttggcctttctcagtggacagtgacagcagctggagccagctccgagcagcccgggggccccgctgttgggagtgtgcatttaactgtttcatgcgcttgttggcgcgactgtggctcgagctggcccgcagacacgtgggtttcatcactctgaggggccacgtctgttagtttcctatcattttgccttagtattttttgaaaaagggacatgtgtcctgtgggtccctgcagtcgacatcatgtttggctgggcatcgatgcctcctttctgggactcccggcacaactccctgccctgctgaatcctaaagctgtgcctatatctgtgatttgaatgagggagccctttggggcaaattcaggtgcccccattgcctcaggctggccctggtcccaggtggcagcggttgaggaggggtacagggctctcaagcctgaggttttcttctctgggcttaattttctcttggggtacgtgcctgacagtgtttaaggtgtccgttgaactggagttgcagacttttaaatagatgaccccttcagatcatctgtgcctacctcctgcccatcaggcgtctacactgtcactcagacacctgtggcatgtggaggagactgccctgtcctgagcctggaaaatgtgaaactgtctcctgcaacctgctgggcatgtgggcctggctgtgttcaattgcaagaacaatttttatgaaatggattaaagcttgttttttaa

SEQ ID NO: 353567 - DNA, 312 bp, Homo sapiens
gaaattgagaagctaattctagaatttatttggaaatgcaaagaacctagattacctaaaacaactttgaaaacgaatatagctagaggactaaaactgcctcacttcaagttatagtaaaacagtgtggtacaggcataaagataaggtaaacatatcaatggaacagagtccagaaacagacccacagatatataaacaactgatttttgacaaaggtacaaggacaatccggtagaggaatgatagtcctttcaacaactggtactaaaacagctggatattcatatgcaaaaaactgaacttggatcc

SEQ ID NO: 353568 - DNA, 300 bp, Homo sapiens
tctattccttattcatggtttactttcagcccagatacttgcatagcataccatactcatgcatatgttcttcaaccttgtcttccagggtgtgcccatgcagatactgacctcacttagggccaaacacctgggaagagcagacttcagagtaggggatgggagatgtagatgagtcaaaaagtatttcatttcctgtaatcccagcactttgggaggctgaggtagatggatcacttgaaaccaggagtttgagaccagcctggccaacattgtgaaaccccgtctctactataaata

SEQ ID NO: 353569 - DNA, 1096 bp, Homo sapiens
gggtgagccggacgcaggcgtgcctgcgcagtgcgcggaggagtgctgttcgtgtgttcgagtccctgggttgcttcctggggtctgtggtgctgggtgtgctatctgcgtgtgattctctagcgagagattgtgggcgagtgaccgagtgggcaaggggccgtcactgtgtgtgcgtgattttgacagtgtgtggtggtagcttctgactccgcgtgggtcgttgaatgtatgactgggaccgtttagcggtggatacacaactgtgtgcggctgtggaagattgcctcatccgttacgttcccatttccgtggaacaacagttttaccagaaggtttcgaaggaaccttaaagtttggaagcgtaagagtttatctggcggctttggtgtcatcaaatgtgagaagccctggactttacacatcccgagccagtgtgatccagtatgattgggagtccgagtgccagatgccggtcaggacctgttatgctgggtctcagaatgcggaaactctccctgtccgaggtggaacagtttgtccttgagtgaggactggagtcctgagtgactcttttgatttgatcctgtttccctcaaacctgagatgggagcctcactgtattgcccaggctggtcttgaactccggagctcaagtgatcgtcttgcttcagccttgcaaaatgatggtgaagctgcatcattgtctgggatggagtccctgtctgaccgggccatgttgtatgttccttgctgtacacgtggttgacaaagaaaagggaagatggagctgcgatgttggacatgcctggcccccaggacatacagccctgccgagcaaataatgaacgtaactcacaaacttcctgcttatcatcaaacgcacgcatccacttatcatcaaacacctcgggtgacagaagaatgcaggtcagctccctgctgccttggcattatcaatcagcccaggaaccatcctataaaatctccagcaagcctttgtttccttgcagtcagctcctcttccactgattctgcctgttgctccctgataacatactttgatactgtctttaataaatctgcctttcttcac

SEQ ID NO: 353570 - DNA, 1384 bp, Homo sapiens
gggtgagccggacgcaggcgtgcctgcgcagtgcgcggaggagtgctgttcgtgtgttcgagtccctgggttgcttcctggggtctgtggtgctgggtgtgctatctgcgtgtgattctctagcgagagattgtgggcgagtgaccgagtgggcaaggggccgtcactgtgtgtgcgtgattttgacagtgtgtggtggtagcttctgactccgcgtgggtcgttgaatgtatgactgggaccgtttagcggtggatacacaactgtgtgcggctgtggaagattgcctcatccgttacgttcccatttccgtggaacaacagttttaccagaaggtttcgaaggaaccttaaagtttggaagcgtaagagtttatctggcggctttggtgtcatcaaatgtgagaagccctggactttacacatcccgagccagtgtgatccagtatgattgggagtccgagtgccagatgccggtcaggacctgttatgctgggtctcagaatgcggaaactctccctgtccgaggtggaacagtttgtccttgagtgaggactggagtcctgagtgactcttttgatttgatcctgtttccctcaaacctgagatgggagcctcactgtattgcccaggctggtcttgaactccggagctcaagtgatcgtcttgcttcagccttgcaaaatgatggtgaagctgcatcattgtctggggtaaatacctgaggttcgttgtctcacgccaagggaatcaaggacgtggacacacaagaagtgagtttaagagcggaggtttaataggcgaaagagaaaagagaatagctctagctcctgcagagagaaaagggctcccaagtaggacttccagtccgtggcgaagggcacggggtttatagactggcttcaggaggtggtgtctgatttacgtaggccccaaagattggttggaccaggtgtgccaatcagaagctggctgccccaccctaatcttttattatgcagatggagtccctgtctgaccgggccatgttgtatgttccttgctgtacacgtggttgacaaagaaaagggaagatggagctgcgatgttggacatgcctggcccccaggacatacagccctgccgagcaaataatgaacgtaactcacaaacttcctgcttatcatcaaacgcacgcatccacttatcatcaaacacctcgggtgacagaagaatgcaggtcagctccctgctgccttggcattatcaatcagcccaggaaccatcctataaaatctccagcaagcctttgtttccttgcagtcagctcctcttccactgattctgcctgttgctccctgataacatactttgatactgtctttaataaatctgcctttcttcac

SEQ ID NO: 353571 - DNA, 1240 bp, Homo sapiens
gggtgagccggacgcaggcgtgcctgcgcagtgcgcggaggagtgctgttcgtgtgttcgagtccctgggttgcttcctggggtctgtggtgctgggtgtgctatctgcgtgtgattctctagcgagagattgtgggcgagtgaccgagtgggcaaggggccgtcactgtgtgtgcgtgattttgacagtgtgtggtggtagcttctgactccgcgtgggtcgttgaatgtatgactgggaccgtttagcggtggatacacaactgtgtgcggctgtggaagattgcctcatccgttacgttcccatttccgtggaacaacagttttaccagaaggtttcgaaggaaccttaaagtttggaagcgtaagagtttatctggcggctttggtgtcatcaaatgtgagaagccctggactttacacatcccgagccagtgtgatccagtatgattgggagtccgagtgccagatgccggtcaggacctgttatgctgggtctcagaatgcggaaactctccctgtccgaggtggaacagtttgtccttgagtgaggactggagtcctgagtgactcttttgatttgatcctgtttccctcaaacctgagatgggagcctcactgtattgcccaggctggtcttgaactccggagctcaagtgatcgtcttgcttcagccttgcaaaatgatggtgaagctgcatcattgtctggggtaaatacctgaggttcgttgtctcacgccaagggaatcaaggacgtggacacacaagaatggagtccctgtctgaccgggccatgttgtatgttccttgctgtacacgtggttgacaaagaaaagggaagatggagctgcgatgttggacatgcctggcccccaggacatacagccctgccgagcaaataatgaacgtaactcacaaacttcctgcttatcatcaaacgcacgcatccacttatcatcaaacacctcgggtgacagaagaatgcaggtcagctccctgctgccttggcattatcaatcagcccaggaaccatcctataaaatctccagcaagcctttgtttccttgcagtcagctcctcttccactgattctgcctgttgctccctgataacatactttgatactgtctttaataaatctgcctttcttcacccacagctgtcttggtaagttcttttacctctgtgccaccagcccaaacagttgctgctcacatcctaccgggcccctctccagc

SEQ ID NO: 353572 - DNA, 1093 bp, Homo sapiens
gggtgagccggacgcaggcgtgcctgcgcagtgcgcggaggagtgctgttcgtgtgttcgagtccctgggttgcttcctggggtctgtggtgctgggtgtgctatctgcgtgtgattctctagcgagagattgtgggcgagtgaccgagtgggcaaggggccgtcactgtgtgtgcgtgattttgacagtgtgtggtggtagcttctgactccgcgtgggtcgttgaatgtatgactgggaccgtttagcggtggatacacaactgtgtgcggctgtggaagattgcctcatccgttacgttcccatttccgtggaacaacagttttaccagaaggtttcgaaggaaccttaaagtttggaagcgtaagagtttatctggcggctttggtgtcatcaaatgtgagaagccctggactttacacatcccgagccagtgtgatccagtatgattgggagtccgagtgccagatgccggtcaggacctgttatgctgggtctcagaatgcggaaactctccctgtccgaggtggaacagtttgtccttgagtgaggactggagtcctgagtgactcttttgatttgatcctgtttccctcaaacctgagatgggagcctcactgtattgcccaggctggtcttgaactccggagctcaagtgatcgtcttgcttcagccttgcaaaatgatggtgaagctgcatcattgtctggggtaaatacctgaggttcgttgtctcacgccaagggaatcaaggacgtggacacacaagaaaaagggaagatggagctgcgatgttggacatgcctggcccccaggacatacagccctgccgagcaaataatgaacgtaactcacaaacttcctgcttatcatcaaacgcacgcatccacttatcatcaaacacctcgggtgacagaagaatgcaggtcagctccctgctgccttggcattatcaatcagcccaggaaccatcctataaaatctccagcaagcctttgtttccttgcagtcagctcctcttccactgattctgcctgttgctccctgataacatactttgatactgtctttaataaatctgcctttcttcac

SEQ ID NO: 353573 - DNA, 1159 bp, Homo sapiens
gggtgagccggacgcaggcgtgcctgcgcagtgcgcggaggagtgctgttcgtgtgttcgagtccctgggttgcttcctggggtctgtggtgctgggtgtgctatctgcgtgtgattctctagcgagagattgtgggcgagtgaccgagtgggcaaggggccgtcactgtgtgtgcgtgattttgacagtgtgtggtggtagcttctgactccgcgtgggtcgttgaatgtatgactgggaccgtttagcggtggatacacaactgtgtgcggctgtggaagattgcctcatccgttacgttcccatttccgtggaacaacagttttaccagaaggtttcgaaggaaccttaaagtttggaagcgtaagagtttatctgagatgggagcctcactgtattgcccaggctggtcttgaactccggagctcaagtgatcgtcttgcttcagccttgcaaaatgatggtgaagctgcatcattgtctggggtaaatacctgaggttcgttgtctcacgccaagggaatcaaggacgtggacacacaagaagtgagtttaagagcggaggtttaataggcgaaagagaaaagagaatagctctagctcctgcagagagaaaagggctcccaagtaggacttccagtccgtggcgaagggcacggggtttatagactggcttcaggaggtggtgtctgatttacgtaggccccaaagattggttggaccaggtgtgccaatcagaagctggctgccccaccctaatcttttattatgcagatggagtccctgtctgaccgggccatgttgtatgttccttgctgtacacgtggttgacaaagaaaagggaagatggagctgcgatgttggacatgcctggcccccaggacatacagccctgccgagcaaataatgaacgtaactcacaaacttcctgcttatcatcaaacgcacgcatccacttatcatcaaacacctcgggtgacagaagaatgcaggtcagctccctgctgccttggcattatcaatcagcccaggaaccatcctataaaatctccagcaagcctttgtttccttgcagtcagctcctcttccactgattctgcctgttgctccctgataacatactttgatactgtctttaataaatctgcctttcttcac

SEQ ID NO: 353574 - DNA, 311 bp, Homo sapiens
aaacgcacgcatccacttatcatcaaacacctcgggtgacagaagaatgcaggtcagctccctgctgccttggcattatcaatcagcccaggaaccatcctataaaatctccagcaagcctttgtttccttgcagtcagctcctcttccactgattctgcctgttgctccctgataacatactttgatactgtctttaataaatctgcctttcttcacccacagctgtcttggtaagttcttttacctctgtgccaccagcccaaacagttgctgctcacctgaaacaaagaataaatgtggtttttaagc

SEQ ID NO: 353575 - DNA, 282 bp, Homo sapiens
tacctcagcctcccaagtagctgagaacacaggtgcgtaccaccacaccagctaatttttcttttctttttttttttctgtagagatgggagcctcactgtattgcccaggctggtcttgaactccggagctcaagtgatcgtcttgcttcagccttgcaaaatgatggtgaagctgcatcattgtctggggtaaatacctgaggttcgttgtctcacgccaagggaatcaaggacgtggacacacaagaagtgagtttaagagcggaggtttaataggcga

SEQ ID NO: 353576 - DNA, 1155 bp, Homo sapiens
gggtgagccggacgcaggcgtgcctgcgcagtgcgcggaggagtgctgttcgtgtgttcgagtccctgggttgcttcctggggtctgtggtgctgggtgtgctatctgcgtgtgattctctagcgagagattgtgggcgagtgaccgagtgggcaaggggccgtcactgtgtgtgcgtgattttgacagtgtgtggtggtagcttctgactccgcgtgggtcgttgaatgtatgactgggaccgtttagcggtggatacacaactgtgtgcggctgtggaagattgcctcatccgttacgttcccatttccgtggaacaacagttttaccagaaggtttcgaaggaaccttaaagtttggaagcgtaagagtttatctggcggctttggtgtcatcaaatgtgagaagccctggactttacacatcccgagccagtgtgatccagtatgattgggagtccgagtgccagatgccggtcaggacctgttatgctgggtctcagaatgcggaaactctccctgtccgaggtggaacagtttgtccttgagtgaggactggagtcctgagtgactcttttgatttgatcctgtttccctcaaacctgagatgggagcctcactgtattgcccaggctggtcttgaactccggagctcaagtgatcgtcttgcttcagccttgcaaaatgatggtgaagctgcatcattgtctggggtaaatacctgaggttcgttgtctcacgccaagggaatcaaggacgtggacacacaagaatggagtccctgtctgaccgggccatgttgtatgttccttgctgtacacgtggttgacaaagaaaagggaagatggagctgcgatgttggacatgcctggcccccaggacatacagccctgccgagcaaataatgaacgtaactcacaaacttcctgcttatcatcaaacgcacgcatccacttatcatcaaacacctcgggtgacagaagaatgcaggtcagctccctgctgccttggcattatcaatcagcccaggaaccatcctataaaatctccagcaagcctttgtttccttgcagtcagctcctcttccactgattctgcctgttgctccctgataacatactttgatactgtctttaataaatctgcctttcttcac

SEQ ID NO: 353577 - DNA, 1751 bp, Homo sapiens
gggtgagccggacgcaggcgtgcctgcgcagtgcgcggaggagtgctgttcgtgtgttcgagtccctgggttgcttcctggggtctgtggtgctgggtgtgctatctgcgtgtgattctctagcgagagattgtgggcgagtgaccgagtgggcaaggggccgtcactgtgtgtgcgtgattttgacagtgtgtggtggtagcttctgactccgcgtgggtcgttgaatgtatgactgggaccgtttagcggtggatacacaactgtgtgcggctgtggaagattgcctcatccgttacgttcccatttccgtggaacaacagttttaccagaaggtttcgaaggaaccttaaagtttggaagcgtaagagtttatctggcggctttggtgtcatcaaatgtgagaagccctggactttacacatcccgagccagtgtgatccagtatgattgggagtccgagtgccagatgccggtcaggacctgttatgctgggtctcagaatgcggaaactctccctgtccgaggtggaacagtttgtccttgagtgaggactggagtcctgagtgactcttttgatttgatcctgtttccctcaaacctgagatgggagcctcactgtattgcccaggctggtcttgaactccggagctcaagtgatcgtcttgcttcagccttgcaaaatgatggtgaagctgcatcattgtctggggtaaatacctgaggttcgttgtctcacgccaagggaatcaaggacgtggacacacaagaatggagtccctgtctgaccgggccatgttgtatgttccttgctgtacacgtggttgacaaagaaaagggaagatggagctgcgatgttggacatgcctggcccccaggtagctttttcctattggcacagctgctggcattcacccgtgcaaacttccagcttgcttatctatgtctgcagcttgatttttcaggctgctgtttgttagaaaagaaatgacttgggggctgcttttcattaaaaggaaaaccttaccggggatttccttaccctcactatctgcctaaataatttcttgtttaactcctatgtcacttgggattacaggcatgagccgctgtgcctgctagagggttttttatctttattcctcaagattttgcatttagataattatgttaaacttgggtgtgctaggtagacatacgtctgctgattacctgtttaggaagaatgtggattcgtacgtagggaaaaggagtcaggctggtgggaccaggggaaagcaaagagataaagcaaataagctatagatctgcattttcttcatggtccaggatatataaacaaaaaaaggaagcagataagctataggcttgcttttctttatgacccaggacatacagccctgccgagcaaataatgaacgtaactcacaaacttcctgcttatcatcaaacgcacgcatccacttatcatcaaacacctcgggtgacagaagaatgcaggtcagctccctgctgccttggcattatcaatcagcccaggaaccatcctataaaatctccagcaagcctttgtttccttgcagtcagctcctcttccactgattctgcctgttgctccctgataacatactttgatactgtctttaataaatctgcctttcttcacccacagctgtcttggtaagttcttttacctctgtgccaccagcccaaacagttgctgctcacatcctaccgggcccctctccagc

SEQ ID NO: 353578 - DNA, 1257 bp, Homo sapiens
gggtgagccggacgcaggcgtgcctgcgcagtgcgcggaggagtgctgttcgtgtgttcgagtccctgggttgcttcctggggtctgtggtgctgggtgtgctatctgcgtgtgattctctagcgagagattgtgggcgagtgaccgagtgggcaaggggccgtcactgtgtgtgcgtgattttgacagtgtgtggtggtagcttctgactccgcgtgggtcgttgaatgtatgactgggaccgtttagcggtggatacacaactgtgtgcggctgtggaagattgcctcatccgttacgttcccatttccgtggaacaacagttttaccagaaggtttcgaaggaaccttaaagtttggaagcgtaagagtttatctggtaactaattttaaacattacatctatggtgagttaaatgtgggttatgaaggagaacgcaaaataaaaacgttataaagatgtaaaggagttttatggggcggcatctcttgggcaaatatcagaccgccgtaggtagtcgttaattctctcgtttttaggcggctttggtgtcatcaaatgtgagaagccctggactttacacatcccgagccagtgtgatccagtatgattgggagtccgagtgccagatgccggtcaggacctgttatgctgggtctcagaatgcggaaactctccctgtccgaggtggaacagtttgtccttgagtgaggactggagtcctgagtgactcttttgatttgatcctgtttccctcaaacctgagatgggagcctcactgtattgcccaggctggtcttgaactccggagctcaagtgatcgtcttgcttcagccttgcaaaatgatggtgaagctgcatcattgtctgggatggagtccctgtctgaccgggccatgttgtatgttccttgctgtacacgtggttgacaaagaaaagggaagatggagctgcgatgttggacatgcctggcccccaggacatacagccctgccgagcaaataatgaacgtaactcacaaacttcctgcttatcatcaaacgcacgcatccacttatcatcaaacacctcgggtgacagaagaatgcaggtcagctccctgctgccttggcattatcaatcagcccaggaaccatcctataaaatctccagcaagcctttgtttccttgcagtcagctcctcttccactgattctgcctgttgctccctgataacatactttgatactgtctttaataaatctgcctttcttcac

SEQ ID NO: 353579 - DNA, 1850 bp, Homo sapiens
gggtgagccggacgcaggcgtgcctgcgcagtgcgcggaggagtgctgttcgtgtgttcgagtccctgggttgcttcctggggtctgtggtgctgggtgtgctatctgcgtgtgattctctagcgagagattgtgggcgagtgaccgagtgggcaaggggccgtcactgtgtgtgcgtgattttgacagtgtgtggtggtagcttctgactccgcgtgggtcgttgaatgtatgactgggaccgtttagcggtggatacacaactgtgtgcggctgtggaagattgcctcatccgttacgttcccatttccgtggaacaacagttttaccagaaggtttcgaaggaaccttaaagtttggaagcgtaagagtttatctggtaactaattttaaacattacatctatggtgagttaaatgtgggttatgaaggagaacgcaaaataaaaacgttataaagatgtaaaggagttttatggggcggcatctcttgggcaaatatcagaccgccgtaggtagtcgttaattctctcgtttttaggcggctttggtgtcatcaaatgtgagaagccctggactttacacatcccgagccagtgtgatccagtatgattgggagtccgagtgccagatgccggtcaggacctgttatgctgggtctcagaatgcggaaactctccctgtccgaggtggaacagtttgtccttgagtgaggactggagtcctgagtgactcttttgatttgatcctgtttccctcaaacctgagatgggagcctcactgtattgcccaggctggtcttgaactccggagctcaagtgatcgtcttgcttcagccttgcaaaatgatggtgaagctgcatcattgtctggggtaaatacctgaggttcgttgtctcacgccaagggaatcaaggacgtggacacacaagaaaaagggaagatggagctgcgatgttggacatgcctggcccccaggtagctttttcctattggcacagctgctggcattcacccgtgcaaacttccagcttgcttatctatgtctgcagcttgatttttcaggctgctgtttgttagaaaagaaatgacttgggggctgcttttcattaaaaggaaaaccttaccggggatttccttaccctcactatctgcctaaataatttcttgtttaactcctatgtcacttgggattacaggcatgagccgctgtgcctgctagagggttttttatctttattcctcaagattttgcatttagataattatgttaaacttgggtgtgctaggtagacatacgtctgctgattacctgtttaggaagaatgtggattcgtacgtagggaaaaggagtcaggctggtgggaccaggggaaagcaaagagataaagcaaataagctatagatctgcattttcttcatggtccaggatatataaacaaaaaaaggaagcagataagctataggcttgcttttctttatgacccaggacatacagccctgccgagcaaataatgaacgtaactcacaaacttcctgcttatcatcaaacgcacgcatccacttatcatcaaacacctcgggtgacagaagaatgcaggtcagctccctgctgccttggcattatcaatcagcccaggaaccatcctataaaatctccagcaagcctttgtttccttgcagtcagctcctcttccactgattctgcctgttgctccctgataacatactttgatactgtctttaataaatctgcctttcttcacccacagctgtcttggtaagttcttttacctctgtgccaccagcccaaacagttgctgctcacatcctaccgggcccctctccagc

SEQ ID NO: 353580 - DNA, 1059 bp, Homo sapiens
gtaacagaaagatatctagataatccccatatattagaaattaaatgcatttttaaatagcccatagtcaaaaagtcgtcagggaaattagaaaacatcttgaatagaatggaaacaaacagacaacatgtcaaaagatatgatccagccaaagcgctattgaggaaattaaagcagttagtgatttaaaaatctcagatctcccatataaacttccacattaagaaaatagaaaaagaagagcaaattataatgaaagtaatcagaaggaaggaaatagacaaaagcacaactatgaagaagcagaaaattaaaatagaaaacattaaaagaaagctggttctttgagaagatcaataaatttaatgaactttagccagactaatcaggaaaagagaagacacattacaaattgcagaattgaggaagaagggacatcactactgatcctacagatgctaaaaaatagataatagaatattaacgattttatgccagtaaacttttaagtttaatggacagatttcttgaaagctcactcaacaaaaaataggcaacctggccaggcgtggtagctcacatctgtaatcccagcacttttgggaggccgaagcaggtggatcacctgaggtcagcagttcaagaccagcctggccaacatggtgaaaccccagctctactaaaaaaaatacaaaaattagccgggcgtggtggtatgcacttgtagtcccagctactcaggaagctgaggcaggaagaccacttgaatctgggaggtgtgagtttgcagtgagatcaccccactgcactccagcctgggtgacagagtgagactctgtctcaaaaaaaaaaaaaaacctgagtaatctcatctctattcaaaaaaacctgagtaatcttatctctattcaaagaaattgaatttgtggttcaaacttttttcacaaaacttaagatctaggtctattccgtggtaaattcatccaaacatttaagggagaagtaatgtaaattctgtgcaaattcttccgggaaataggagagaacatattccacctc

SEQ ID NO: 353581 - DNA, 9110 bp, Homo sapiens
  misc_feature (3667)..(3667): n is a, c, g, or t
  misc_feature (5720)..(5720): n is a, c, g, or t
  misc_feature (6098)..(6098): n is a, c, g, or t
cggggccagggcagcgcggactcgcgtcccgcggagcgttccaggcgggcgcgcggctttctccccagacccaccgagtggcggcggaggcgagatgcgcgggggcgtgctcctggtcttgctgctgtgtgtcgccgcgcagtgccggcagagaggcctgtttcctgccattctcaatcttgccagcaatgctcacatcagcaccaatgccacctgtggcgagaaggggccggagatgttctgcaaacttgtggagcatgtgccaggtcggcccgtccgaaacccacagtgccggatctgtgatggcaacagcgcaaaccccagagaacgccatccaatatcacatgccatagatggcaccaataactggtggcaaagtcccagcattcagaatgggagagaatatcactgggtcacaatcactctggacttaagacaggtctttcaagttgcatatgtcatcattaaagctgccaatgcccctcgacctggaaactggattttggagcgttctctggatggcaccacgttcagcccctggcagtattatgcagtcagcgactcagagtgtttgtctcgttacaatataactccaagacgagggccacccacctacagggctgatgatgaagtgatctgcacctcctattattccagattggtgccacttgagcatggagagattcatacatcactcatcaatggcagaccaagcgctgacgatctttcacccaagttgttggaattcacttctgcacgatatattcgccttcgcttcgaacgcattagaacgctcaatgcagatctcatgacccttagccaccgggaacctaaagaactggatcctatgttaccaagacgctattattattcaataaaggacatttctgttggaggcatgtgtatctgctatggccatgctagtagctgcccatgggatgaaactacaaagaaactgcagtgtcaatgtgagcataatacttgcggggagagctgtaacaggtgctgtcctgggtaccatcagcagccctggaggccgggaaccgtgtcctccggcaatacatgtgaagcatgtaattgtcacaataaagccaaagactgttactatgatgaaagtgttgcaaagcagaagaaaagtttgaatactgctggacagttcagaggaggaggggtttgcataaattgcttgcagaacaccatgggaatcaactgtgaaacctgtattgatggatattatagaccacacaaagtgtctccttatgaggatgagccttgccgcccctgtaattgtgaccctgtggggtccctcagttctgtctgtattaaggatgacctccattctgacttagagaatgggaagcagccaggtcagtgcccatgtaaggaaggttatacaggagaaaaatgtgatcgctgccaacttggctataaggattacccgacctgtgtctcctgtgggtgcaacccagtgggcagtgccagtgatgagccctgcacagggccctgtgtttgtaaggaaaacgttgaggggaaggcctgtgatcgctgcaagccaggattctataacttgaaggaaaaaaacccccggggctgctccgagtgcttctgctttggcgtttctgatgtctgcagcagcctctcttggcctcttggtcaggtaaacagtatgtccgggtggctggtcaccgacttgatcagtcccaggaagatcccgtctcagcaagatgcactaggcgggcgccatcaggtcagcatcaacaacaccgcggtcatgcagagactggctcccaagtactactgggcagcccccgaggcctaccttggaaataagctgactgcgtttggcggattcctgaaatacacggtgtcctacgatattccggtagagacggtagacagtaacctcatgtcgcatgctgacgtcatcattaagggaaacggactcactttaagcacacaggctgagggtctgtcattgcagccttatgaagagtacctaaacgtggttagacttgtgcctgaaaacttccaagattttcacagcaaaaggcagattgatcgtgaccagctgatgactgtccttgccaatgtgacacatcttttgatcagagccacctacaattctgcaaaaatggctctttacaggttggagtccgtctctctggacatagccagctctaatgccatcgacctggtggtggctgctgatgtggagcactgtgaatgtccgcaaggctacacagggacctcctgtgagtcgtgcctctctggctattaccgcgtggatggaatactctttggaggaatttgtcaaccctgtgaatgccacggccatgcagctgagtgtaatgttcacggcgtttgcattgcgtgtgcgcacaacaccaccggcgtccactgtgagcagtgcttgcccggcttctacggggagccttcccgagggacacctggggactgccagccctgcgcctgccctctcaccatagcctccaacaatttcagccccacctgccacctcaatgatggagatgaagtggtctgtgactggtgtgccccgggctactcaggagcttggtgtgagagatgcgcagatggttactatggaaacccaacagtgcctggcgaatcttgtgttccctgtgactgcagcggcaacgtggacccctcggaggctggtcactgtgactcagtcaccggggagtgcctgaagtgcctggggaacacagatggcgcccactgtgaaaggtgcgctgacgggttctatggggacgctgtgacagccaagaactgccgcgcctgtgaatgccatgtgaaaggctcccattctgccgtgtgccatcttgagaccgggctctgtgactgcaaaccaaacgtgactggacagcagtgtgaccagtgcttgcatggctattatgggctggactcaggccatggctgccggccctgcaactgcagcgtggcaggctccgtgtcagatggctgcacggatgaaggccagtgtcactgtgtcccaggtgtggcagggaaaaggtgtgacaggtgtgcccatggcttctacgcctaccaggatggtagctgtacaccctgtgactgcccacacactcagaatacctgcgacccagaaactggagagtgtgtctgcccccctcacacacagggtgtgaagtgtgaagaatgtgaggatgggcactggggctacgatgcggaggtggggtgccaggcctgcaattgcagtctcgtggggtcgactcatcatcggtgcgatgtggtcaccggccattgccagtgcaagtcaaaatttggtggccgggcctgcgtacagtgttccttgggttacagagactttcccgactgtgttccctgtgactgtgacctgagggggacgtcgggggacgcctgcaacctggagcagggtctctgcggctgtgtggaggaaaccggggcctgcccttgcaaggaaaatgtctttggtcctcagtgcaacgaatgtcgagagggcaccttcgctctccgcgcagacaaccccctgggctgcagcccgtgcttctgctccgggctgtcccacctctgctcagagctggaggactacgtgaggaccccagtaacgctgggctccgatcagcctcttctgcgtgtggtttctcagagtaacttgaggggcacgacngagggggtttactaccaggcccccgacttcctgctggatgccgccaccgtccggcagcacatccgtgcagagccgttttactggcggctgccgcagcagttccaaggagaccagctcatggcctatggtggcaaactgaagtacagcgtggccttctattctttggatggcgtcggcacctccaattttgagcctcaagttctcatcaaaggtggtcggatcagaaagcaagtcatttacatggatgcaccagccccagagaatggagtgagacaggaacaagaagtagcaatgagagagaatttttggaaatattttaactctgtttctgaaaaacctgtcacgcgagaggattttatgtctgtcctcagcgatattgagtacatcctcatcaaggcatcgtatggtcaaggattacagcagagcagaatctcagacatttcaatggaggttggcagaaaggctgaaaagctgcacccagaagaagaggttgcatctcttttagagaattgtgtctgtcctcctggcactgtgggattctcatgtcaggactgcgcccctgggtaccacagagggaagctcccagcagggagtgacaggggaccacgccctctggttgctccttgtgttccctgcagttgcaacaaccacagtgacacctgtgaccccaacaccgggaagtgtctgaactgtggcgataacacagcaggtgaccattgtgatgtgtgtacttctggctactacgggaaggtgactggctcagcaagtgactgtgctctgtgtgcctgtcctcacagccctcctgccagttttagtcccacttgtgtcttggaaggggaccacgatttccgttgtgacgcctgtctcctgggctatgaaggaaaacactgtgaaaggtgctcctcaagctattatgggaaccctcaaacaccaggtggcagttgccagaagtgtgactgcaacccgcacggctctgtccacggtgactgtgaccgcacatctgggcagtgcgtttgcaggctgggggcctcggggctccggtgcgatgagtgtgaaccgaggcacattctgatggaaacagattgtgtttcctgtgatgatgagtgtgtaggtgtgctgctgaatgacttggatgagattggtgatgccgttctttctctgaacctcactggcattatccctgtcccatatggaattttgtcaaacctggaaaatacaactaaatatctccaggaatctttattaaaagaaaatatgcaaaaggacctgggaaaaattaagcttgaaggtgttgcagaagaaacggacaacctgcaaaagaagctcactaggatgttagcgagtacccaaaaggtgaatagggcaactgagagaatcttcaaggagagtcaagacctggccgtagccattgagaggctgcagatgagcatcacagaaattatggaaaagacaactttaaatcagactttggatgaagatttcctactacccaattctactcttcagaacatgcaacagaatggtacatctttgctagaaatcatgcagataagagacttcacacagttgcaccaaaatgccacccttgaactcaaggctgctgaagatttattgtcacaaattcaggaaaattaccagaagccgctggaagaattggaggtattgaaagaagcagcaagccatgtcctttcaaagcacaacaatgaactaaaggcggctgaggcgctcgtgagggaagctgaggcaaagatgcaggaaagcaaccacctgctgctcatggtcaatgctaatctgagagaattcagtgataaaaagctgcatgttcaagaagaacaaaatctgacctcagagctcattgtccaaggaagaggattgatagatgctgctgctgcacaaacagatgctgtacaagatgctctagagcacttagaggatcaccaggataagctacttttatggtctgccaaaatcaggcaccacatagatgacctggtcatgcacatgtcccaaaggaacgcagtcgacctggtctacagagctgaggaccatgccnctgagttccagagactagcagatgttctgtacagtggccttgaaaacatcagaaatgtgtccctgaatgccaccagtgcagcctatgtccattacaacatccagagcctgattgaagaatcggaggaactggccagagatgctcacaggactgtgactgagacgagcctgctctcagaatcccttgtttctaacgggaaagcggccgtgcagcgcagctccagatttctaaaagaaggcaacaacctcagcaggaagcttccaggtattgcattggaactgagtgaattgagaaataagacaaacagatttcaagagaatgctgttgaaattaccaggcaaaccaatgaatcactcttgatacttagagcaattcctnaaggtataagagacaagggagccaaaaccaaagagctggccacgtctgcaagccagagcgcggtgagcacgctgagggacgtggcggggctgagccaggagctgctgaacacatctgccagcctgtccagggtcaacaccacattacgagagacacaccagcttctgcaggactccaccatggccactctgttggctggaagaaaagtcaaagacgtggaaattcaagccaaccttttgtttgatcggttgaagcctttgaagatgttagaggagaatctgagcagaaacctatcagaaattaaactgttgatcagccaggcccgcaaacaagcagcttctattaaagtcgccgtgtctgcagacagagattgcatccgggcctaccagcctcagatttcctctaccaactacaataccttaacactaaatgttaagacacaggaacccgataatcttctcttctacctcggtagcagcaccgcttctgatttccttgcagtggagatgcggcgagggagagtggccttcctgtgggacctgggctccgggtccacacgcttggagtttccagactttcccattgatgacaacagatggcacagtatccatgtagccagatttggaaacattggttcactgagtgtaaaggaaatgagctcaaatcaaaagtcaccaacaaaaacaagtaaatcccctgggacagctaatgttctggatgtaaacaattcaacactcatgtttgttggaggtcttggaggacaaatcaagaaatctcctgctgtgaaggttactcattttaaaggctgcttgggggaggccttcctgaatggaaaatccataggcctatggaactatattgaaagggaaggcaagtgccgtgggtgcttcggaagctcccagaatgaagacccttccttccattttgacgggagtgggtactctgtcgtggagaagtcacttccggctaccgtgacccagataatcatgctttttaataccttttcacctaatggacttcttctctacctgggttcatacggcacaaaagactttttatccatcgagctgtttcgtggcagagtgaaggttatgactgacctgggttcaggacccattacccttttgacagacagacgttataacaatggaacctggtacaaaattgccttccagcgaaaccggaagcaaggagtgctagcagttatcgatgcctataacaccagtaataaagaaaccaagcagggcgagactccgggagcatcttctgacctcaaccgcctagacaaggacccgatttatgtgggtggattaccaaggtcaagagttgtaaggagaggtgtcaccaccaaaagctttgtgggctgcatcaagaacctggaaatatccagatcaacctttgacttactcagaaattcctatggagtgagaaaaggctgtttactggagcccatccggagtgttagcttcctgaaaggcggctacattgaattgccacccaaatctttgtcaccagaatcagaatggctggtaacatttgccaccacgaacagcagtggcatcatcctggctgccctcggcggggatgtggagaagcggggtgatcgtgaggaagcacacgtgcccttcttttccgtcatgctgatcggaggcaacattgaggtacatgtcaatcctggggatgggacaggcctgagaaaagctctcctgcacgctcccacgggtacctgcagtgatggacaagcgcattccatctccttggtcaggaatcggagaattatcactgtccaattggatgagaacaatcctgtggaaatgaagttgggcacattagtagaaagcaggacgataaatgtgtccaatctgtacgtcgggggaattccagagggagaggggacgtcactgctcacaatgagaagatcgttccatggctgtatcaaaaacctgatcttcaatttggaacttttggatttcaacagtgcagttggccatgagcaagtcgacctggacacctgctggctgtcagaaaggcctaagctggctcccgatgcagaggacagcaagctcttgccagagccccgggcttttccagaacagtgtgtggtggatgcagctctggagtacgttcccggcgctcaccagtttggtctcacacaaaacagccatttcatcttgccttttaatcagtcggctgtcagaaagaagctctcggttgagctaagcatccgcacgttcgcctccagcggcctgatttactacatggctcatcagaaccaagcagactacgctgtgctccagctgcacgggggccgcctccacttcatgtttgaccttggcaaaggcagaacaaaggtctctcaccctgcactgctcagtgatggcaagtggcacacggtcaagacagactatgttaaaagaaaaggcttcataactgtcgacggccgagagtctcccatggtgactgtggtgggagatggaaccatgctggatgtggagggtttgttctacctaggaggcctgccctcccagtaccaggccaggaaaattggaaatatcacccacagcatccctgcctgcattggggatgtgacggttaacagcaaacagctggacaaggacagcccggtgtctgccttcacggtgaacaggtgctacgcagtggcccaggaaggaacatactttgacggaagcggatatgcagctcttgtcaaagagggctacaaagtccagtcagatgtgaacatcacactggagtttcgaacctcctcgcagaatggcgtcctcctggggatcagcactgccaaagtggatgccattggactagagcttgtggacggcaaggtcttgttccatgtcaacaatggtgctggcaggataacagctgcatatgagcccaaaaccgccactgtgctctgtgatggaaaatggcacactcttccagctaacaaaaagcaaacaccgtatcactctgattgttgacggggacgcagttggcgcttgaaagtcacaacca

SEQ ID NO: 353582 - DNA, 8286 bp, Homo sapiens
  misc_feature (3667)..(3667): n is a, c, g, or t
  misc_feature (5720)..(5720): n is a, c, g, or t
  misc_feature (6098)..(6098): n is a, c, g, or t
cggggccagggcagcgcggactcgcgtcccgcggagcgttccaggcgggcgcgcggctttctccccagacccaccgagtggcggcggaggcgagatgcgcgggggcgtgctcctggtcttgctgctgtgtgtcgccgcgcagtgccggcagagaggcctgtttcctgccattctcaatcttgccagcaatgctcacatcagcaccaatgccacctgtggcgagaaggggccggagatgttctgcaaacttgtggagcatgtgccaggtcggcccgtccgaaacccacagtgccggatctgtgatggcaacagcgcaaaccccagagaacgccatccaatatcacatgccatagatggcaccaataactggtggcaaagtcccagcattcagaatgggagagaatatcactgggtcacaatcactctggacttaagacaggtctttcaagttgcatatgtcatcattaaagctgccaatgcccctcgacctggaaactggattttggagcgttctctggatggcaccacgttcagcccctggcagtattatgcagtcagcgactcagagtgtttgtctcgttacaatataactccaagacgagggccacccacctacagggctgatgatgaagtgatctgcacctcctattattccagattggtgccacttgagcatggagagattcatacatcactcatcaatggcagaccaagcgctgacgatctttcacccaagttgttggaattcacttctgcacgatatattcgccttcgcttcgaacgcattagaacgctcaatgcagatctcatgacccttagccaccgggaacctaaagaactggatcctatgttaccaagacgctattattattcaataaaggacatttctgttggaggcatgtgtatctgctatggccatgctagtagctgcccatgggatgaaactacaaagaaactgcagtgtcaatgtgagcataatacttgcggggagagctgtaacaggtgctgtcctgggtaccatcagcagccctggaggccgggaaccgtgtcctccggcaatacatgtgaagcatgtaattgtcacaataaagccaaagactgttactatgatgaaagtgttgcaaagcagaagaaaagtttgaatactgctggacagttcagaggaggaggggtttgcataaattgcttgcagaacaccatgggaatcaactgtgaaacctgtattgatggatattatagaccacacaaagtgtctccttatgaggatgagccttgccgcccctgtaattgtgaccctgtggggtccctcagttctgtctgtattaaggatgacctccattctgacttagagaatgggaagcagccaggtcagtgcccatgtaaggaaggttatacaggagaaaaatgtgatcgctgccaacttggctataaggattacccgacctgtgtctcctgtgggtgcaacccagtgggcagtgccagtgatgagccctgcacagggccctgtgtttgtaaggaaaacgttgaggggaaggcctgtgatcgctgcaagccaggattctataacttgaaggaaaaaaacccccggggctgctccgagtgcttctgctttggcgtttctgatgtctgcagcagcctctcttggcctcttggtcaggtaaacagtatgtccgggtggctggtcaccgacttgatcagtcccaggaagatcccgtctcagcaagatgcactaggcgggcgccatcaggtcagcatcaacaacaccgcggtcatgcagagactggctcccaagtactactgggcagcccccgaggcctaccttggaaataagctgactgcgtttggcggattcctgaaatacacggtgtcctacgatattccggtagagacggtagacagtaacctcatgtcgcatgctgacgtcatcattaagggaaacggactcactttaagcacacaggctgagggtctgtcattgcagccttatgaagagtacctaaacgtggttagacttgtgcctgaaaacttccaagattttcacagcaaaaggcagattgatcgtgaccagctgatgactgtccttgccaatgtgacacatcttttgatcagagccacctacaattctgcaaaaatggctctttacaggttggagtccgtctctctggacatagccagctctaatgccatcgacctggtggtggctgctgatgtggagcactgtgaatgtccgcaaggctacacagggacctcctgtgagtcgtgcctctctggctattaccgcgtggatggaatactctttggaggaatttgtcaaccctgtgaatgccacggccatgcagctgagtgtaatgttcacggcgtttgcattgcgtgtgcgcacaacaccaccggcgtccactgtgagcagtgcttgcccggcttctacggggagccttcccgagggacacctggggactgccagccctgcgcctgccctctcaccatagcctccaacaatttcagccccacctgccacctcaatgatggagatgaagtggtctgtgactggtgtgccccgggctactcaggagcttggtgtgagagatgcgcagatggttactatggaaacccaacagtgcctggcgaatcttgtgttccctgtgactgcagcggcaacgtggacccctcggaggctggtcactgtgactcagtcaccggggagtgcctgaagtgcctggggaacacagatggcgcccactgtgaaaggtgcgctgacgggttctatggggacgctgtgacagccaagaactgccgcgcctgtgaatgccatgtgaaaggctcccattctgccgtgtgccatcttgagaccgggctctgtgactgcaaaccaaacgtgactggacagcagtgtgaccagtgcttgcatggctattatgggctggactcaggccatggctgccggccctgcaactgcagcgtggcaggctccgtgtcagatggctgcacggatgaaggccagtgtcactgtgtcccaggtgtggcagggaaaaggtgtgacaggtgtgcccatggcttctacgcctaccaggatggtagctgtacaccctgtgactgcccacacactcagaatacctgcgacccagaaactggagagtgtgtctgcccccctcacacacagggtgtgaagtgtgaagaatgtgaggatgggcactggggctacgatgcggaggtggggtgccaggcctgcaattgcagtctcgtggggtcgactcatcatcggtgcgatgtggtcaccggccattgccagtgcaagtcaaaatttggtggccgggcctgcgtacagtgttccttgggttacagagactttcccgactgtgttccctgtgactgtgacctgagggggacgtcgggggacgcctgcaacctggagcagggtctctgcggctgtgtggaggaaaccggggcctgcccttgcaaggaaaatgtctttggtcctcagtgcaacgaatgtcgagagggcaccttcgctctccgcgcagacaaccccctgggctgcagcccgtgcttctgctccgggctgtcccacctctgctcagagctggaggactacgtgaggaccccagtaacgctgggctccgatcagcctcttctgcgtgtggtttctcagagtaacttgaggggcacgacngagggggtttactaccaggcccccgacttcctgctggatgccgccaccgtccggcagcacatccgtgcagagccgttttactggcggctgccgcagcagttccaaggagaccagctcatggcctatggtggcaaactgaagtacagcgtggccttctattctttggatggcgtcggcacctccaattttgagcctcaagttctcatcaaaggtggtcggatcagaaagcaagtcatttacatggatgcaccagccccagagaatggagtgagacaggaacaagaagtagcaatgagagagaatttttggaaatattttaactctgtttctgaaaaacctgtcacgcgagaggattttatgtctgtcctcagcgatattgagtacatcctcatcaaggcatcgtatggtcaaggattacagcagagcagaatctcagacatttcaatggaggttggcagaaaggctgaaaagctgcacccagaagaagaggttgcatctcttttagagaattgtgtctgtcctcctggcactgtgggattctcatgtcaggactgcgcccctgggtaccacagagggaagctcccagcagggagtgacaggggaccacgccctctggttgctccttgtgttccctgcagttgcaacaaccacagtgacacctgtgaccccaacaccgggaagtgtctgaactgtggcgataacacagcaggtgaccattgtgatgtgtgtacttctggctactacgggaaggtgactggctcagcaagtgactgtgctctgtgtgcctgtcctcacagccctcctgccagttttagtcccacttgtgtcttggaaggggaccacgatttccgttgtgacgcctgtctcctgggctatgaaggaaaacactgtgaaaggtgctcctcaagctattatgggaaccctcaaacaccaggtggcagttgccagaagtgtgactgcaacccgcacggctctgtccacggtgactgtgaccgcacatctgggcagtgcgtttgcaggctgggggcctcggggctccggtgcgatgagtgtgaaccgaggcacattctgatggaaacagattgtgtttcctgtgatgatgagtgtgtaggtgtgctgctgaatgacttggatgagattggtgatgccgttctttctctgaacctcactggcattatccctgtcccatatggaattttgtcaaacctggaaaatacaactaaatatctccaggaatctttattaaaagaaaatatgcaaaaggacctgggaaaaattaagcttgaaggtgttgcagaagaaacggacaacctgcaaaagaagctcactaggatgttagcgagtacccaaaaggtgaatagggcaactgagagaatcttcaaggagagtcaagacctggccgtagccattgagaggctgcagatgagcatcacagaaattatggaaaagacaactttaaatcagactttggatgaagatttcctactacccaattctactcttcagaacatgcaacagaatggtacatctttgctagaaatcatgcagataagagacttcacacagttgcaccaaaatgccacccttgaactcaaggctgctgaagatttattgtcacaaattcaggaaaattaccagaagccgctggaagaattggaggtattgaaagaagcagcaagccatgtcctttcaaagcacaacaatgaactaaaggcggctgaggcgctcgtgagggaagctgaggcaaagatgcaggaaagcaaccacctgctgctcatggtcaatgctaatctgagagaattcagtgataaaaagctgcatgttcaagaagaacaaaatctgacctcagagctcattgtccaaggaagaggattgatagatgctgctgctgcacaaacagatgctgtacaagatgctctagagcacttagaggatcaccaggataagctacttttatggtctgccaaaatcaggcaccacatagatgacctggtcatgcacatgtcccaaaggaacgcagtcgacctggtctacagagctgaggaccatgccnctgagttccagagactagcagatgttctgtacagtggccttgaaaacatcagaaatgtgtccctgaatgccaccagtgcagcctatgtccattacaacatccagagcctgattgaagaatcggaggaactggccagagatgctcacaggactgtgactgagacgagcctgctctcagaatcccttgtttctaacgggaaagcggccgtgcagcgcagctccagatttctaaaagaaggcaacaacctcagcaggaagcttccaggtattgcattggaactgagtgaattgagaaataagacaaacagatttcaagagaatgctgttgaaattaccaggcaaaccaatgaatcactcttgatacttagagcaattcctnaaggtataagagacaagggagccaaaaccaaagagctggccacgtctgcaagccagagcgcggtgagcacgctgagggacgtggcggggctgagccaggagctgctgaacacatctgccagcctgtccagggtcaacaccacattacgagagacacaccagcttctgcaggactccaccatggccactctgttggctggaagaaaagtcaaagacgtggaaattcaagccaaccttttgtttgatcggttgaagcctttgaagatgttagaggagaatctgagcagaaacctatcagaaattaaactgttgatcagccaggcccgcaaacaagcagcttctattaaagtcgccgtgtctgcagacagagattgcatccgggcctaccagcctcagatttcctctaccaactacaataccttaacactaaatgttaagacacaggaacccgataatcttctcttctacctcggtagcagcaccgcttctgatttccttgcagtggagatgcggcgagggagagtggccttcctgtgggacctgggctccgggtccacacgcttggagtttccagactttcccattgatgacaacagatggcacagtatccatgtagccagatttggaaacattggttcactgagtgtaaaggaaatgagctcaaatcaaaagtcaccaacaaaaacaagtaaatcccctgggacagctaatgttctggatgtaaacaattcaacactcatgtttgttggaggtcttggaggacaaatcaagaaatctcctgctgtgaaggttactcattttaaaggctgcttgggggaggccttcctgaatggaaaatccataggcctatggaactatattgaaagggaaggcaagtgccgtgggtgcttcggaagctcccagaatgaagacccttccttccattttgacgggagtgggtactctgtcgtggagaagtcacttccggctaccgtgacccagataatcatgctttttaataccttttcacctaatggacttcttctctacctgggttcatacggcacaaaagactttttatccatcgagctgtttcgtggcagagtgaaggttatgactgacctgggttcaggacccattacccttttgacagacagacgttataacaatggaacctggtacaaaattgccttccagcgaaaccggaagcaaggagtgctagcagttatcgatgcctataacaccagtaataaagaaaccaagcagggcgagactccgggagcatcttctgacctcaaccgcctagacaaggacccgatttatgtgggtggattaccaaggtcaagagttgtaaggagaggtgtcaccaccaaaagctttgtgggctgcatcaagaacctggaaatatccagatcaacctttgacttactcagaaattcctatggagtgagaaaaggctgtttactggagcccatccggagtgttagcttcctgaaaggcggctacattgaattgccacccaaatctttgtcaccagaatcagaatggctggtaacatttgccaccacgaacagcagtggcatcatcctggctgccctcggcggggatgtggagaagcggggtgatcgtgaggaagcacacgtgcccttcttttccgtcatgctgatcggaggcaacattgaggtacatgtcaatcctggggatgggacaggcctgagaaaagctctcctgcacgctcccacgggtacctgcagtgatggacaagcgcattccatctccttggtcaggaatcggaggtacttgcacgcggccaggcagtgtgtaatgaaggtgtggtgagctcagagggaatgtgggaggaaccttgcggtggtgccctgggcggctagatgactggggtcatcggcatccagacgattctagaaccttgctaggattctttcctgggaaccagtttcatctgctttgtaataagatacttgtagaatttttataattaaacaactttagctctgccctttactggggcccagcataaattgtctttacattggattgattctgtggcaaatagtagtacactattagtaaatagtattatatcaatagtaaatagcattatatcaacattcctgtatatttccctccaaaatatagactgaatgctttaaaagcacactgggcattttcatcataggtaaagaggttaa

SEQ ID NO: 353583 - DNA, 855 bp, Homo sapiens
gcccttcccgcctggctcctcttgtctgcatcctgccctgtcagtgtggacctaggttcacactctgaggccctgcaaaacatgtcacctgtgggcacctccagttttccagtgcctggtccgcagctcgtctcggcagctgcatccttagggccattcccaaaacctcgggtcacggcgggggcctagggggacagcaaggcctttgccccttaagcctgatgaaaatttgtaggagagacttcagtgtccttatgaatttcagtgaagccgagtgggattaaggtgacagacagaagctctaagtgctttcttcagggagataaagcgctggcgagtgcatcatttaaaccgaagatggagtgagcgccaacaggcactggtggttgttgctgttctaatgggattgcttcgtagatggcccttcatggcggaacacgcgtgtgtcagtggggttcgggctgcgggtggcggctgagtgtccctgtgtgtctcttacaggaacagtgtgtggtggatgcagctctggagtacgttcccggcgctcaccagtttggtctcacacaaaacagccatttcatcttgccttttaatcagtcggctgtcagaaagaactgcctgtccctgggacccttctgccaagggaagatctcaaggcctggagcttggggctcccggactccatgttgctcctctctcctcctgaggtcctccagctcacctgccaggcttgcctgcagtctctgccatgccctgcccgtcttgttgtcattggctgtgccaccctgtcatacccccttagacctgggctcctgtctgtcttctgcagctcctgccatcactctctgtgaattc

SEQ ID NO: 353584 - DNA, 8550 bp, Homo sapiens
  misc_feature (3667)..(3667): n is a, c, g, or t
  misc_feature (5720)..(5720): n is a, c, g, or t
  misc_feature (6098)..(6098): n is a, c, g, or t
cggggccagggcagcgcggactcgcgtcccgcggagcgttccaggcgggcgcgcggctttctccccagacccaccgagtggcggcggaggcgagatgcgcgggggcgtgctcctggtcttgctgctgtgtgtcgccgcgcagtgccggcagagaggcctgtttcctgccattctcaatcttgccagcaatgctcacatcagcaccaatgccacctgtggcgagaaggggccggagatgttctgcaaacttgtggagcatgtgccaggtcggcccgtccgaaacccacagtgccggatctgtgatggcaacagcgcaaaccccagagaacgccatccaatatcacatgccatagatggcaccaataactggtggcaaagtcccagcattcagaatgggagagaatatcactgggtcacaatcactctggacttaagacaggtctttcaagttgcatatgtcatcattaaagctgccaatgcccctcgacctggaaactggattttggagcgttctctggatggcaccacgttcagcccctggcagtattatgcagtcagcgactcagagtgtttgtctcgttacaatataactccaagacgagggccacccacctacagggctgatgatgaagtgatctgcacctcctattattccagattggtgccacttgagcatggagagattcatacatcactcatcaatggcagaccaagcgctgacgatctttcacccaagttgttggaattcacttctgcacgatatattcgccttcgcttcgaacgcattagaacgctcaatgcagatctcatgacccttagccaccgggaacctaaagaactggatcctatgttaccaagacgctattattattcaataaaggacatttctgttggaggcatgtgtatctgctatggccatgctagtagctgcccatgggatgaaactacaaagaaactgcagtgtcaatgtgagcataatacttgcggggagagctgtaacaggtgctgtcctgggtaccatcagcagccctggaggccgggaaccgtgtcctccggcaatacatgtgaagcatgtaattgtcacaataaagccaaagactgttactatgatgaaagtgttgcaaagcagaagaaaagtttgaatactgctggacagttcagaggaggaggggtttgcataaattgcttgcagaacaccatgggaatcaactgtgaaacctgtattgatggatattatagaccacacaaagtgtctccttatgaggatgagccttgccgcccctgtaattgtgaccctgtggggtccctcagttctgtctgtattaaggatgacctccattctgacttagagaatgggaagcagccaggtcagtgcccatgtaaggaaggttatacaggagaaaaatgtgatcgctgccaacttggctataaggattacccgacctgtgtctcctgtgggtgcaacccagtgggcagtgccagtgatgagccctgcacagggccctgtgtttgtaaggaaaacgttgaggggaaggcctgtgatcgctgcaagccaggattctataacttgaaggaaaaaaacccccggggctgctccgagtgcttctgctttggcgtttctgatgtctgcagcagcctctcttggcctcttggtcaggtaaacagtatgtccgggtggctggtcaccgacttgatcagtcccaggaagatcccgtctcagcaagatgcactaggcgggcgccatcaggtcagcatcaacaacaccgcggtcatgcagagactggctcccaagtactactgggcagcccccgaggcctaccttggaaataagctgactgcgtttggcggattcctgaaatacacggtgtcctacgatattccggtagagacggtagacagtaacctcatgtcgcatgctgacgtcatcattaagggaaacggactcactttaagcacacaggctgagggtctgtcattgcagccttatgaagagtacctaaacgtggttagacttgtgcctgaaaacttccaagattttcacagcaaaaggcagattgatcgtgaccagctgatgactgtccttgccaatgtgacacatcttttgatcagagccacctacaattctgcaaaaatggctctttacaggttggagtccgtctctctggacatagccagctctaatgccatcgacctggtggtggctgctgatgtggagcactgtgaatgtccgcaaggctacacagggacctcctgtgagtcgtgcctctctggctattaccgcgtggatggaatactctttggaggaatttgtcaaccctgtgaatgccacggccatgcagctgagtgtaatgttcacggcgtttgcattgcgtgtgcgcacaacaccaccggcgtccactgtgagcagtgcttgcccggcttctacggggagccttcccgagggacacctggggactgccagccctgcgcctgccctctcaccatagcctccaacaatttcagccccacctgccacctcaatgatggagatgaagtggtctgtgactggtgtgccccgggctactcaggagcttggtgtgagagatgcgcagatggttactatggaaacccaacagtgcctggcgaatcttgtgttccctgtgactgcagcggcaacgtggacccctcggaggctggtcactgtgactcagtcaccggggagtgcctgaagtgcctggggaacacagatggcgcccactgtgaaaggtgcgctgacgggttctatggggacgctgtgacagccaagaactgccgcgcctgtgaatgccatgtgaaaggctcccattctgccgtgtgccatcttgagaccgggctctgtgactgcaaaccaaacgtgactggacagcagtgtgaccagtgcttgcatggctattatgggctggactcaggccatggctgccggccctgcaactgcagcgtggcaggctccgtgtcagatggctgcacggatgaaggccagtgtcactgtgtcccaggtgtggcagggaaaaggtgtgacaggtgtgcccatggcttctacgcctaccaggatggtagctgtacaccctgtgactgcccacacactcagaatacctgcgacccagaaactggagagtgtgtctgcccccctcacacacagggtgtgaagtgtgaagaatgtgaggatgggcactggggctacgatgcggaggtggggtgccaggcctgcaattgcagtctcgtggggtcgactcatcatcggtgcgatgtggtcaccggccattgccagtgcaagtcaaaatttggtggccgggcctgcgtacagtgttccttgggttacagagactttcccgactgtgttccctgtgactgtgacctgagggggacgtcgggggacgcctgcaacctggagcagggtctctgcggctgtgtggaggaaaccggggcctgcccttgcaaggaaaatgtctttggtcctcagtgcaacgaatgtcgagagggcaccttcgctctccgcgcagacaaccccctgggctgcagcccgtgcttctgctccgggctgtcccacctctgctcagagctggaggactacgtgaggaccccagtaacgctgggctccgatcagcctcttctgcgtgtggtttctcagagtaacttgaggggcacgacngagggggtttactaccaggcccccgacttcctgctggatgccgccaccgtccggcagcacatccgtgcagagccgttttactggcggctgccgcagcagttccaaggagaccagctcatggcctatggtggcaaactgaagtacagcgtggccttctattctttggatggcgtcggcacctccaattttgagcctcaagttctcatcaaaggtggtcggatcagaaagcaagtcatttacatggatgcaccagccccagagaatggagtgagacaggaacaagaagtagcaatgagagagaatttttggaaatattttaactctgtttctgaaaaacctgtcacgcgagaggattttatgtctgtcctcagcgatattgagtacatcctcatcaaggcatcgtatggtcaaggattacagcagagcagaatctcagacatttcaatggaggttggcagaaaggctgaaaagctgcacccagaagaagaggttgcatctcttttagagaattgtgtctgtcctcctggcactgtgggattctcatgtcaggactgcgcccctgggtaccacagagggaagctcccagcagggagtgacaggggaccacgccctctggttgctccttgtgttccctgcagttgcaacaaccacagtgacacctgtgaccccaacaccgggaagtgtctgaactgtggcgataacacagcaggtgaccattgtgatgtgtgtacttctggctactacgggaaggtgactggctcagcaagtgactgtgctctgtgtgcctgtcctcacagccctcctgccagttttagtcccacttgtgtcttggaaggggaccacgatttccgttgtgacgcctgtctcctgggctatgaaggaaaacactgtgaaaggtgctcctcaagctattatgggaaccctcaaacaccaggtggcagttgccagaagtgtgactgcaacccgcacggctctgtccacggtgactgtgaccgcacatctgggcagtgcgtttgcaggctgggggcctcggggctccggtgcgatgagtgtgaaccgaggcacattctgatggaaacagattgtgtttcctgtgatgatgagtgtgtaggtgtgctgctgaatgacttggatgagattggtgatgccgttctttctctgaacctcactggcattatccctgtcccatatggaattttgtcaaacctggaaaatacaactaaatatctccaggaatctttattaaaagaaaatatgcaaaaggacctgggaaaaattaagcttgaaggtgttgcagaagaaacggacaacctgcaaaagaagctcactaggatgttagcgagtacccaaaaggtgaatagggcaactgagagaatcttcaaggagagtcaagacctggccgtagccattgagaggctgcagatgagcatcacagaaattatggaaaagacaactttaaatcagactttggatgaagatttcctactacccaattctactcttcagaacatgcaacagaatggtacatctttgctagaaatcatgcagataagagacttcacacagttgcaccaaaatgccacccttgaactcaaggctgctgaagatttattgtcacaaattcaggaaaattaccagaagccgctggaagaattggaggtattgaaagaagcagcaagccatgtcctttcaaagcacaacaatgaactaaaggcggctgaggcgctcgtgagggaagctgaggcaaagatgcaggaaagcaaccacctgctgctcatggtcaatgctaatctgagagaattcagtgataaaaagctgcatgttcaagaagaacaaaatctgacctcagagctcattgtccaaggaagaggattgatagatgctgctgctgcacaaacagatgctgtacaagatgctctagagcacttagaggatcaccaggataagctacttttatggtctgccaaaatcaggcaccacatagatgacctggtcatgcacatgtcccaaaggaacgcagtcgacctggtctacagagctgaggaccatgccnctgagttccagagactagcagatgttctgtacagtggccttgaaaacatcagaaatgtgtccctgaatgccaccagtgcagcctatgtccattacaacatccagagcctgattgaagaatcggaggaactggccagagatgctcacaggactgtgactgagacgagcctgctctcagaatcccttgtttctaacgggaaagcggccgtgcagcgcagctccagatttctaaaagaaggcaacaacctcagcaggaagcttccaggtattgcattggaactgagtgaattgagaaataagacaaacagatttcaagagaatgctgttgaaattaccaggcaaaccaatgaatcactcttgatacttagagcaattcctnaaggtataagagacaagggagccaaaaccaaagagctggccacgtctgcaagccagagcgcggtgagcacgctgagggacgtggcggggctgagccaggagctgctgaacacatctgccagcctgtccagggtcaacaccacattacgagagacacaccagcttctgcaggactccaccatggccactctgttggctggaagaaaagtcaaagacgtggaaattcaagccaaccttttgtttgatcggttgaagcctttgaagatgttagaggagaatctgagcagaaacctatcagaaattaaactgttgatcagccaggcccgcaaacaagcagcttctattaaagtcgccgtgtctgcagacagagattgcatccgggcctaccagcctcagatttcctctaccaactacaataccttaacactaaatgttaagacacaggaacccgataatcttctcttctacctcggtagcagcaccgcttctgatttccttgcagtggagatgcggcgagggagagtggccttcctgtgggacctgggctccgggtccacacgcttggagtttccagactttcccattgatgacaacagatggcacagtatccatgtagccagatttggaaacattggttcactgagtgtaaaggaaatgagctcaaatcaaaagtcaccaacaaaaacaagtaaatcccctgggacagctaatgttctggatgtaaacaattcaacactcatgtttgttggaggtcttggaggacaaatcaagaaatctcctgctgtgaaggttactcattttaaaggctgcttgggggaggccttcctgaatggaaaatccataggcctatggaactatattgaaagggaaggcaagtgccgtgggtgcttcggaagctcccagaatgaagacccttccttccattttgacgggagtgggtactctgtcgtggagaagtcacttccggctaccgtgacccagataatcatgctttttaataccttttcacctaatggacttcttctctacctgggttcatacggcacaaaagactttttatccatcgagctgtttcgtggcagagtgaaggttatgactgacctgggttcaggacccattacccttttgacagacagacgttataacaatggaacctggtacaaaattgccttccagcgaaaccggaagcaaggagtgctagcagttatcgatgcctataacaccagtaataaagaaaccaagcagggcgagactccgggagcatcttctgacctcaaccgcctagacaaggacccgatttatgtgggtggattaccaaggtcaagagttgtaaggagaggtgtcaccaccaaaagctttgtgggctgcatcaagaacctggaaatatccagatcaacctttgacttactcagaaattcctatggagtgagaaaaggctgtttactggagcccatccggagtgttagcttcctgaaaggcggctacattgaattgccacccaaatctttgtcaccagaatcagaatggctggtaacatttgccaccacgaacagcagtggcatcatcctggctgccctcggcggggatgtggagaagcggggtgatcgtgaggaagcacacgtgcccttcttttccgtcatgctgatcggaggcaacattgaggtacatgtcaatcctggggatgggacaggcctgagaaaagctctcctgcacgctcccacgggtacctgcagtgatggacaagcgcattccatctccttggtcaggaatcggagaattatcactgtccaattggatgagaacaatcctgtggaaatgaagttgggcacattagtagaaagcaggacgataaatgtgtccaatctgtacgtcgggggaattccagagggagaggggacgtcactgctcacaatgagaagatcgttccatggctgtatcaaaaacctgatcttcaatttggaacttttggatttcaacagtgcagttggccatgagcaagtcgacctggacacctgctggctgtcagaaaggcctaagctggctcccgatgcagaggacagcaagctcttgccagagccccgggcttttccagtaggagcggcttcctttactatcagtcaggtccagtcagcaaaggagggcctaggacagagggagttaaaatggggccttgctgtaaaggtgcctgcgaaagctggagctggagctggagctggagctgtgctaaaaatcagagcggggacagggagggaaagggtgcctcaagcaactcagatgacacggcccaatccatagattgtaggccccaacacccaggccgcgcattgggctgatgtataatatgcttttggcagagcttctataaggactcattatcaatttacatttagccaggaaagcatgaaaataagtacttcatgtaaagccattgtgcacatatttgttgctttaaa

SEQ ID NO: 353585 - DNA, 2123 bp, Homo sapiens
tccagccccgggggacccgccgcccagctcccgagggtgcggcagcctctggccactcagccggggccgagagggagctgccgggcggggaggcgccgcaggcacccggcgggcagggcggggcagggcaagacggccgcctccgcaagtgccacccggcccacccgggcctctcccttctgcctgggacgtcagcggacggggcgctcgcgggccggggctgtatggggctcccgcgcgggtcgttcttctggctgctgctcctgctcacggctgcctgctcggggctcctctttgccctgtacttctcggcggtgcagcggtacccggggccagcggccggagccagggacaccacatcatttgaagcattctttcaatccaaggcatcgaattcttggacaggaaagggccaggcctgccgacacctgcttcacctggccattcagcggcacccccacttccgtggcctgttcaatctctccattccagtgctgctgtggggggacctcttcaccccagcgctctgggaccgcctgagccaacacaaagccccgtatggctggcgggggctctctcaccaagtcatcgcctccaccctgagccttctgaacggctcagagagtgccaagctgtttgccccgcccagggacacccctccaaagtgtatccggtgtgccgtggtgggcaacggaggcattctgaatgggtcccgccagggtcccaacatcgatgcccatgactatgtattcagactcaatggagctgtgatcaaaggcttcgagcgcgatgtgggcaccaagacttccttctatggtttcactgtgaacacgatgaagaactccctcgtctcctactggaatctgggcttcacctccgtgccacaaggacaggacctgcagtatatcttcatcccctcagacatccgcgactatgtgatgctgagatcggccattctgggcgtgcctgtccctgagggcctagataaaggggacaggccgcacgcctattttggaccagaagcctctgccagtaaattcaagctgctacatccggacttcatcagctacctgacagaaaggttcttgaaatcaaagttgattaacacacattttggagacctatatatgcctagtaccggggctctcatgctgctgacagctttgcatacctgtgaccaggtcagtgcctatggattcatcacaagcaactactggaaattttccgaccactatttcgaacgaaaaatgaagccattgatattttatgcaaaccacgatctgtccctggaagctgccctgtggagggacctgcacaaggccggcatccttcagctgtaccagcgctgaccccaatgcactgagccctttgcttcttcaagagttgcggccctgatcctctcaagtggccaaaagcttttttaacttttcaatcttcaccttcccttgccaacagagggcactggggtgaattcaagattttcatcgaggtctgttcaatataggacaccccagcttgtccttggctcatccaagaactcttctgtatctaaaacaatacatctcaatcttggccaagggaaaatggactgctttgctggattggcactgagcaactttaggaaatgtcggtggagtgttcagcaagatcagacagcagtccaggtcaaaggcaaacacacacgctccagcccaaatcctcctggtggcacatcctaccccagatgctaaagtgattcaaggactccaggacacctcttaagagcctttctaagaacatgataggcttacttctgctccataataaagtgggagaaaaaagccagaatataacttaagactagataactgcgtacatgatggaccattttttttttttggctgggtagagaaatcatataaaacgcaggctgtttagcatggagatgactctcagaacactgggagggtctggcacttgatgggggttagttgcttggcagcctgcctgccactgagggaagtcccattagagatgtatcaccaccttgtcaccaacaggatgatgtcaccaacaggatgatgtcaccaggtaataaaccttcatcctcatatcatggcgtcagtaaatttgaactcagctga

SEQ ID NO: 353586 - DNA, 685 bp, Homo sapiens
tccagccccgggggacccgccgcccagctcccgagggtgcggcagcctctggccactcagccggggccgagagggagctgccgggcggggaggcgccgcaggcacccggcgggcagggcggggcagggcaagacggccgcctccgcaagtgccacccggcccacccgggcctctcccttctgcctgggacgtcagcggacggggcgctcgcgggccggggctgtatggggctcccgcgcgggtcgttcttctggctgctgctcctgctcacggctgcctgctcggggctcctctttgccctgtacttctcggcggtgcagcggtacccggggccagcggccggagccagctgccaacccagagtcccctccacctgtggctgctggggtgaagggaggggtctgagagaagcctggccaccttttgaaaggggacaccacatcatttgaagcattctttcaatccaaggcatcgaattcttggacaggaaagggccaggcctgccgacacctgcttcacctggccattcagcggcacccccacttccgtggcctgttcaatctctccattccagtgctgctgtggggggacctcttcaccccagcgctctgggaccgcctgagccaacacaaagccccgtatggctggcgggggctctctcaccaaggtaacccgcgcccgctgt

SEQ ID NO: 353587 - DNA, 2062 bp, Homo sapiens
tccagccccgggggacccgccgcccagctcccgagggtgcggcagcctctggccactcagccggggccgagagggagctgccgggcggggaggcgccgcaggcacccggcgggcagggcggggcagggcaagacggccgcctccgcaagtgccacccggcccacccgggcctctcccttctgcctgggacgtcagcggacggggcgctcgcgggccggggctgtatggggctcccgcgcgggtcgttcttctggctgctgctcctgctcacggctgcctgctcggggctcctctttgccctgtacttctcggcggtgcagcggtacccggggccagcggccggagccagggccaggcctgccgacacctgcttcacctggccattcagcggcacccccacttccgtggcctgttcaatctctccattccagtgctgctgtggggggacctcttcaccccagcgctctgggaccgcctgagccaacacaaagccccgtatggctggcgggggctctctcaccaagtcatcgcctccaccctgagccttctgaacggctcagagagtgccaagctgtttgccccgcccagggacacccctccaaagtgtatccggtgtgccgtggtgggcaacggaggcattctgaatgggtcccgccagggtcccaacatcgatgcccatgactatgtattcagactcaatggagctgtgatcaaaggcttcgagcgcgatgtgggcaccaagacttccttctatggtttcactgtgaacacgatgaagaactccctcgtctcctactggaatctgggcttcacctccgtgccacaaggacaggacctgcagtatatcttcatcccctcagacatccgcgactatgtgatgctgagatcggccattctgggcgtgcctgtccctgagggcctagataaaggggacaggccgcacgcctattttggaccagaagcctctgccagtaaattcaagctgctacatccggacttcatcagctacctgacagaaaggttcttgaaatcaaagttgattaacacacattttggagacctatatatgcctagtaccggggctctcatgctgctgacagctttgcatacctgtgaccaggtcagtgcctatggattcatcacaagcaactactggaaattttccgaccactatttcgaacgaaaaatgaagccattgatattttatgcaaaccacgatctgtccctggaagctgccctgtggagggacctgcacaaggccggcatccttcagctgtaccagcgctgaccccaatgcactgagccctttgcttcttcaagagttgcggccctgatcctctcaagtggccaaaagcttttttaacttttcaatcttcaccttcccttgccaacagagggcactggggtgaattcaagattttcatcgaggtctgttcaatataggacaccccagcttgtccttggctcatccaagaactcttctgtatctaaaacaatacatctcaatcttggccaagggaaaatggactgctttgctggattggcactgagcaactttaggaaatgtcggtggagtgttcagcaagatcagacagcagtccaggtcaaaggcaaacacacacgctccagcccaaatcctcctggtggcacatcctaccccagatgctaaagtgattcaaggactccaggacacctcttaagagcctttctaagaacatgataggcttacttctgctccataataaagtgggagaaaaaagccagaatataacttaagactagataactgcgtacatgatggaccattttttttttttggctgggtagagaaatcatataaaacgcaggctgtttagcatggagatgactctcagaacactgggagggtctggcacttgatgggggttagttgcttggcagcctgcctgccactgagggaagtcccattagagatgtatcaccaccttgtcaccaacaggatgatgtcaccaacaggatgatgtcaccaggtaataaaccttcatcctcatatcatggcgtcagtaaatttgaactcagctga

SEQ ID NO: 353588 - DNA, 1950 bp, Homo sapiens
agccgagattgcaccactgtactccagcaaagcactgggattacagatgtgagccaccacgatgggcacagacagactttgtccgcccctagagctaagggggtcggtcagtccaaaagcttccaaggggtaggtcagagctgctgacccctgcttttttctgctttttcccccagggacaccacatcatttgaagcattctttcaatccaaggcatcgaattcttggacaggaaagggccaggcctgccgacacctgcttcacctggccattcagcggcacccccacttccgtggcctgttcaatctctccattccagtgctgctgtggggggacctcttcaccccagcgctctgggaccgcctgagccaacacaaagccccgtatggctggcgggggctctctcaccaagtcatcgcctccaccctgagccttctgaacggctcagagagtgccaagctgtttgccccgcccagggacacccctccaaagtgtatccggtgtgccgtggtgggcaacggaggcattctgaatgggtcccgccagggtcccaacatcgatgcccatgactatgtattcagactcaatggagctgtgatcaaaggcttcgagcgcgatgtgggcaccaagacttccttctatggtttcactgtgaacacgatgaagaactccctcgtctcctactggaatctgggcttcacctccgtgccacaaggacaggacctgcagtatatcttcatcccctcagacatccgcgactatgtgatgctgagatcggccattctgggcgtgcctgtccctgagggcctagataaaggggacaggccgcacgcctattttggaccagaagcctctgccagtaaattcaagctgctacatccggacttcatcagctacctgacagaaaggttcttgaaatcaaagttgattaacacacattttggagacctatatatgcctagtaccggggctctcatgctgctgacagctttgcatacctgtgaccaggtcagtgcctatggattcatcacaagcaactactggaaattttccgaccactatttcgaacgaaaaatgaagccattgatattttatgcaaaccacgatctgtccctggaagctgccctgtggagggacctgcacaaggccggcatccttcagctgtaccagcgctgaccccaatgcactgagccctttgcttcttcaagagttgcggccctgatcctctcaagtggccaaaagcttttttaacttttcaatcttcaccttcccttgccaacagagggcactggggtgaattcaagattttcatcgaggtctgttcaatataggacaccccagcttgtccttggctcatccaagaactcttctgtatctaaaacaatacatctcaatcttggccaagggaaaatggactgctttgctggattggcactgagcaactttaggaaatgtcggtggagtgttcagcaagatcagacagcagtccaggtcaaaggcaaacacacacgctccagcccaaatcctcctggtggcacatcctaccccagatgctaaagtgattcaaggactccaggacacctcttaagagcctttctaagaacatgataggcttacttctgctccataataaagtgggagaaaaaagccagaatataacttaagactagataactgcgtacatgatggaccattttttttttttggctgggtagagaaatcatataaaacgcaggctgtttagcatggagatgactctcagaacactgggagggtctggcacttgatgggggttagttgcttggcagcctgcctgccactgagggaagtcccattagagatgtatcaccaccttgtcaccaacaggatgatgtcaccaacaggatgatgtcaccaggtaataaaccttcatcctcatatcatggcgtcagtaaatttgaactcagctga

SEQ ID NO: 353589 - DNA, 2039 bp, Homo sapiens
tccagccccgggggacccgccgcccagctcccgagggtgcggcagcctctggccactcagccggggccgagagggagctgccgggcggggaggcgccgcaggcacccggcgggcagggcggggcagggcaagacggccgcctccgcaagtgccacccggcccacccgggcctctcccttctgcctgggacgtcagcggacggggcgctcgcgggccggggctgtatggggctcccgcgcgggtcgttcttctggctgctgctcctgctcacggctgcctgctcggggctcctctttgccctgtacttctcggcggtgcagcggtacccggggccagcggccggagccagggacaccacatcatttgaagcattctttcaatccaaggcatcgaattcttggacaggaaagggccaggcctgccgacacctgcttcacctggccattcagcggcacccccacttccgtggcctgttcaatctctccattccagtgctgctgtggggggacctcttcaccccagcgctctgggaccgcctgagccaacacaaagccccgtatggctggcgggggctctctcaccaagtcatcgcctccaccctgagccttctgaacggctcagagagtgccaagctgtttgccccgcccagggacacccctccaaagtgtatccggtgtgccgtggtgggcaacggaggcattctgaatgggtcccgccagggtcccaacatcgatgcccatgactatgtattcagactcaatggagctgtgatcaaaggcttcgagcgcgatgtgggcaccaagacttccttctatggtttcactgtgaacacgatgaagaactccctcgtctcctactggaatctgggcttcacctccgtgccacaaggacaggacctgcagtatatcttcatcccctcagacatccgcgactatgtgatgctgagatcggccattctgggcgtgcctgtccctgagggcctagataaaggggacaggttcttgaaatcaaagttgattaacacacattttggagacctatatatgcctagtaccggggctctcatgctgctgacagctttgcatacctgtgaccaggtcagtgcctatggattcatcacaagcaactactggaaattttccgaccactatttcgaacgaaaaatgaagccattgatattttatgcaaaccacgatctgtccctggaagctgccctgtggagggacctgcacaaggccggcatccttcagctgtaccagcgctgaccccaatgcactgagccctttgcttcttcaagagttgcggccctgatcctctcaagtggccaaaagcttttttaacttttcaatcttcaccttcccttgccaacagagggcactggggtgaattcaagattttcatcgaggtctgttcaatataggacaccccagcttgtccttggctcatccaagaactcttctgtatctaaaacaatacatctcaatcttggccaagggaaaatggactgctttgctggattggcactgagcaactttaggaaatgtcggtggagtgttcagcaagatcagacagcagtccaggtcaaaggcaaacacacacgctccagcccaaatcctcctggtggcacatcctaccccagatgctaaagtgattcaaggactccaggacacctcttaagagcctttctaagaacatgataggcttacttctgctccataataaagtgggagaaaaaagccagaatataacttaagactagataactgcgtacatgatggaccattttttttttttggctgggtagagaaatcatataaaacgcaggctgtttagcatggagatgactctcagaacactgggagggtctggcacttgatgggggttagttgcttggcagcctgcctgccactgagggaagtcccattagagatgtatcaccaccttgtcaccaacaggatgatgtcaccaacaggatgatgtcaccaggtaataaaccttcatcctcatatcatggcgtcagtaaatttgaactcagctga

SEQ ID NO: 353590 - DNA, 1973 bp, Homo sapiens
tccagccccgggggacccgccgcccagctcccgagggtgcggcagcctctggccactcagccggggccgagagggagctgccgggcggggaggcgccgcaggcacccggcgggcagggcggggcagggcaagacggccgcctccgcaagtgccacccggcccacccgggcctctcccttctgcctgggacgtcagcggacggggcgctcgcgggccggggctgtatggggctcccgcgcgggtcgttcttctggctgctgctcctgctcacggctgcctgctcggggctcctctttgccctgtacttctcggcggtgcagcggtacccggggccagcggccggagccagggacaccacatcatttgaagcattctttcaatccaaggcatcgaattcttggacaggaaagggccaggcctgccgacacctgcttcacctggccattcagcggcacccccacttccgtggcctgttcaatctctccattccagtgctgctgtggggggacctcttcaccccagcgctctgggaccgcctgagccaacacaaagccccgtatggctggcgggggctctctcaccaagtcatcgcctccaccctgagccttctgaacggctcagagagtgccaagctgtttgccccgcccagggacacccctccaaagtgtatccggtgtgccgtggtgggcaacggaggcattctgaatgggtcccgccagggtcccaacatcgatgcccatgactatgtattcagactcaatggagctgtgatcaaaggcttcgagcgcgatgtgggcaccaagacttccttctatggtttcactgtgaacacgatgaagaactccctcgtctcctactggaatctgggcttcacctccgtgccacaaggacaggacctgcagtatatcttcatcccctcagacatccgcgactatgtgatgctgagatcggccattctgggcgtgcctgtccctgagggcctagataaaggggacaggccgcacgcctattttggaccagaagcctctgccagtaaattcaagctgctacatccggacttcatcagctacctgacagaaaggttcttgaaatcaaagttgattaacacacattttggagacctatatatgcctagtaccggggctctcatgctgctgacagctttgcatacctgtgaccaggtcagtgcctatggattcatcacaagcaactactggaaattttccgaccactatttcgaacgaaaaatgaagccattgatattttatgcaaaccacgatctgtccctggaagctgccctgtggagggacctgcacaaggccggcatccttcagctgtaccagcgctgaccccaatgcactgagccctttgcttcttcaagagttgcggccctgatcctctcaagtggccaaaagcttttttaacttttcaatcttcaccttcccttgccaacagagggcactggggtgaattcaagattttcatcgaggtctgttcaatataggacaccccagcttgtccttggctcatccaagaactcttctgtatctaaaacaatacatctcaatcttggccaagggaaaatggactgctttgctggattggcactgagcaactttaggaaatgtcggtggagtgttcagcaagatcagacagcagtccaggtcaaaggcaaacacacacgctccagcccaaatcctcctggtggcacatcctaccccagatgctaaagtgattcaaggactccaggacacctcttaagagcctttctaagaacatgataggcttacttctgctccataataaagtgggagaaaaaagccagaatataacttaagactagataactgcgtacatgatggaccattttttttttttggctgggtagagaaatcatataaaacgcaggctgtttagcctatcatggcaattgacctctggggatgggggattcccctctggctagggctggc

SEQ ID NO: 353591 - DNA, 1622 bp, Homo sapiens
ctcgaatcccagggcagggagcagttggagaggggtgtgtggatgtggggaggcaaatgaagcccctctaattagtcccgtgctacagaggaagacaggctctgagaggtcaggtgatcggcctggcacagctcgatgtgaactcaggcctgagggcagagcccgtggtcacaccctggcctcactcttggactgtgtgggtccggtcacagggtctgagctccctgtccctcacacgtgattcctacttaatcaagatgtggagtagagagaaactgcagtctcaggctaaataaacaggccacctatgcccttggcagtgtggttacttagtagcttggggtgaaaacaagctgttgccaaaagggggaacctgtggttcctttctcaccaccccctcccccaaccttacctaaggtctcaaagatctttgtatttagtccacttggaccgaataaagaactgactggagtagaaggccctcagtttttgaagttttcccacctatttgaatgtgtagttgtgaagtgtgatgatagccatcaagctagtgagctgaaacgtctctttttgcttccaggttcttgaaatcaaagttgattaacacacattttggagacctatatatgcctagtaccggggctctcatgctgctgacagctttgcatacctgtgaccaggtcagtgcctatggattcatcacaagcaactactggaaattttccgaccactatttcgaacgaaaaatgaagccattgatattttatgcaaaccacgatctgtccctggaagctgccctgtggagggacctgcacaaggccggcatccttcagctgtaccagcgctgaccccaatgcactgagccctttgcttcttcaagagttgcggccctgatcctctcaagtggccaaaagcttttttaacttttcaatcttcaccttcccttgccaacagagggcactggggtgaattcaagattttcatcgaggtctgttcaatataggacaccccagcttgtccttggctcatccaagaactcttctgtatctaaaacaatacatctcaatcttggccaagggaaaatggactgctttgctggattggcactgagcaactttaggaaatgtcggtggagtgttcagcaagatcagacagcagtccaggtcaaaggcaaacacacacgctccagcccaaatcctcctggtggcacatcctaccccagatgctaaagtgattcaaggactccaggacacctcttaagagcctttctaagaacatgataggcttacttctgctccataataaagtgggagaaaaaagccagaatataacttaagactagataactgcgtacatgatggaccattttttttttttggctgggtagagaaatcatataaaacgcaggctgtttagcatggagatgactctcagaacactgggagggtctggcacttgatgggggttagttgcttggcagcctgcctgccactgagggaagtcccattagagatgtatcaccaccttgtcaccaacaggatgatgtcaccaacaggatgatgtcaccaggtaataaaccttcatcctcatatcatggcgtcagtaaatttgaactcagctga

SEQ ID NO: 353592 - DNA, 1087 bp, Homo sapiens
ccccacttgctaagtgggaataagccctagaccattatcctcacctcagcagacggacacctttctaaactcatgtcacttcacccaagtgtctgtacacactagacgctcaacaaatactaatccagcgactatccttgcccaggtcagtgcctatggattcatcacaagcaactactggaaattttccgaccactatttcgaacgaaaaatgaagccattgatattttatgcaaaccacgatctgtccctggaagctgccctgtggagggacctgcacaaggccggcatccttcagctgtaccagcgctgaccccaatgcactgagccctttgcttcttcaagagttgcggccctgatcctctcaagtggccaaaagcttttttaacttttcaatcttcaccttcccttgccaacagagggcactggggtgaattcaagattttcatcgaggtctgttcaatataggacaccccagcttgtccttggctcatccaagaactcttctgtatctaaaacaatacatctcaatcttggccaagggaaaatggactgctttgctggattggcactgagcaactttaggaaatgtcggtggagtgttcagcaagatcagacagcagtccaggtcaaaggcaaacacacacgctccagcccaaatcctcctggtggcacatcctaccccagatgctaaagtgattcaaggactccaggacacctcttaagagcctttctaagaacatgataggcttacttctgctccataataaagtgggagaaaaaagccagaatataacttaagactagataactgcgtacatgatggaccattttttttttttggctgggtagagaaatcatataaaacgcaggctgtttagcatggagatgactctcagaacactgggagggtctggcacttgatgggggttagttgcttggcagcctgcctgccactgagggaagtcccattagagatgtatcaccaccttgtcaccaacaggatgatgtcaccaacaggatgatgtcaccaggtaataaaccttcatcctcatatcatggcgtcagtaaatttgaactcagctga

SEQ ID NO: 353593 - DNA, 419 bp, Homo sapiens
cggggtggtctagagggtacccgaagaggaagtgaaggactccaggacacctcttaagagcctttctaagaacatgataggcttacttctgctccataataaagtgggagaaaaaagccagaatataacttaagactagataactgcgtacatgatggaccattttttttttttggctgggtagagaaatcatataaaacgcaggctgtttagcatggagatgactctcagaacactgggagggtctggcacttgatgggggttagttgcttggcagcctgcctgccactgagggaagtcccattagagatgtatcaccaccttgtcaccaacaggatgatgtcaccaacaggatgatgtcaccaggtaataaaccttcatcctcatatcatggcgtcagtaaatttgaactcagctga

SEQ ID NO: 353594 - DNA, 631 bp, Homo sapiens
accatctcactgttcctataaactccacatttctgccacttgctgagggacgccttgatctttgagtttacacagtgaggcaaaacataagaaagtgacagtatcctgtgtgcctaaagagaaagacatggcaagaataagagcacagagctgggcgcagtggcttacgcctgtaatcccagcactttggaaggccaaggtgggcagatcacctgaagtcgggagttcgagaccagcctgaccaacatggaaaaaccccgtctctactaaaaatacaaaattagctgggtgtggtggcgcatgcctgtaatcccagctactcaggaggctgaggcaggagaatcacttgaacccaggaggcagaggttgcagtgagccgagattgcaccactgtactccagcaaagcactgggattacagatgtgagccaccacgatgggcacagacagactttgtccgcccctagagctaagggggtcggtcagtccaaaagcttccaaggggtaggtcagagctgctgacccctgcttttttctgctttttcccccagggacaccacatcatttgaagcattctttcaatccaaggcatcgaattcttggacaggaaaggtagagtggtcgactaccct

SEQ ID NO: 353595 - DNA, 2088 bp, Homo sapiens
tccagccccgggggacccgccgcccagctcccgagggtgcggcagcctctggccactcagccggggccgagagggagctgccgggcggggaggcgccgcaggcacccggcgggcagggcggggcagggcaagacggccgcctccgcaagtgccacccggcccacccgggcctctcccttctgcctgggacgtcagcggacggggcgctcgcgggccggggctgtatggggctcccgcgcgggtcgttcttctggctgctgctcctgctcacggctgcctgctcggggctcctctttgccctgtacttctcggcggtgcagcggtacccggggccagcggccggagccagggacaccacatcatttgaagcattctttcaatccaaggcatcgaattcttggacaggaaagggccaggcctgccgacacctgcttcacctggccattcagcggcacccccacttccgtggcctgttcaatctctccattccagtgctgctgtggggggacctcttcaccccagcgctctgggaccgcctgagccaacacaaagccccgtatggctggcgggggctctctcaccaagtcatcgcctccaccctgagccttctgaacggctcagagagtgccaagctgtttgccccgcccagggacacccctccaaagtgtatccggtgtgccgtggtgggcaacggaggcattctgaatgggtcccgccagggtcccaacatcgatgcccatgactatgtattcagactcaatggagctgtgatcaaaggcttcgagcgcgatgtgggcaccaagacttccttctatggtttcactgtgaacacgatgaagaactccctcgtctcctactggaatctgggcttcacctccgtgccacaaggacaggacctgcagtatatcttcatcccctcagacatccgcgactatgtgatgctgagatcggccattctgggcgtgcctgtccctgagggcctagataaaggggacaggccgcacgcctattttggaccagaagcctctgccagtaaattcaagctgctacatccggacttcatcagctacctgacagaaaggttcttgaaatcaaagttgattaacacacattttggagacctatatatgcctagtaccggggctctcatgctgctgacagctttgcatacctgtgaccaggtcagtgcctatggattcatcacaagcaactactggaaattttccgaccactatttcgaacgaaaaatgaagccattgatattttatgcaaaccacgatctgtccctggaagctgccctgtggagggacctgcacaaggccggcatccttcagctgtaccagcgctgaccccaatgcactgagccctttgcttcttcaagagttgcggccctgatcctctcaagtggccaaaagcttttttaacttttcaatcttcaccttcccttgccaacagagggcactggggtgaattcaagattttcatcgaggtctgttcaatataggacaccccagcttgtccttggctcatccaagaactcttctgtatctaaaacaatacatctcaatcttggccaagggaaaatggactgctttgctggattggcactgagcaactttaggaaatgtcggtggagtgttcagcaagatcagacagcagtccaggtcaaaggcaaacacacacgctccagcccaaatcctcctggtggcacatcctaccccagatgctaaagtgattcaaggactccaggacacctcttaagagcctttctaagaacatgataggcttacttctgctccataataaagtgggagaaaaaagccagaatataacttaagactagataactgcgtacatgatggaccattttttttttttggctgggtagagaaatcatataaaacgcaggctgtttagcatggagatgactctcagaacactgggagggtctggcacttgatgggggttagttgcttggcagcctgcctgccactgagggaagtcccattagagatgtatcaccaccttgtcaccaacaggatgatgtcaccaacaggatgatgtcaccaggtaataaaccttcatcct

SEQ ID NO: 353596 - DNA, 2150 bp, Homo sapiens
tccagccccgggggacccgccgcccagctcccgagggtgcggcagcctctggccactcagccggggccgagagggagctgccgggcggggaggcgccgcaggcacccggcgggcagggcggggcagggcaagacggccgcctccgcaagtgccacccggcccacccgggcctctcccttctgcctgggacgtcagcggacggggcgctcgcgggccggggctgtatggggctcccgcgcgggtcgttcttctggctgctgctcctgctcacggctgcctgctcggggctcctctttgccctgtacttctcggcggtgcagcggtacccggggccagcggccggagccagggacaccacatcatttgaagcattctttcaatccaaggcatcgaattcttggacaggaaagggccaggcctgccgacacctgcttcacctggccattcagcggcacccccacttccgtggcctgttcaatctctccattccagtgctgctgtggggggacctcttcaccccagcgctctgggaccgcctgagccaacacaaagccccgtatggctggcgggggctctctcaccaagtcatcgcctccaccctgagccttctgaacggctcagagagtgccaagctgtttgccccgcccagggacacccctccaaagtgtatccggtgtgccgtggtgggcaacggaggcattctgaatgggtcccgccagggtcccaacatcgatgcccatgactatgtattcagacactgatgggcctctgtgccaaccagactcaatggagctgtgatcaaaggcttcgagcgcgatgtgggcaccaagacttccttctatggtttcactgtgaacacgatgaagaactccctcgtctcctactggaatctgggcttcacctccgtgccacaaggacaggacctgcagtatatcttcatcccctcagacatccgcgactatgtgatgctgagatcggccattctgggcgtgcctgtccctgagggcctagataaaggggacaggccgcacgcctattttggaccagaagcctctgccagtaaattcaagctgctacatccggacttcatcagctacctgacagaaaggttcttgaaatcaaagttgattaacacacattttggagacctatatatgcctagtaccggggctctcatgctgctgacagctttgcatacctgtgaccaggtcagtgcctatggattcatcacaagcaactactggaaattttccgaccactatttcgaacgaaaaatgaagccattgatattttatgcaaaccacgatctgtccctggaagctgccctgtggagggacctgcacaaggccggcatccttcagctgtaccagcgctgaccccaatgcactgagccctttgcttcttcaagagttgcggccctgatcctctcaagtggccaaaagcttttttaacttttcaatcttcaccttcccttgccaacagagggcactggggtgaattcaagattttcatcgaggtctgttcaatataggacaccccagcttgtccttggctcatccaagaactcttctgtatctaaaacaatacatctcaatcttggccaagggaaaatggactgctttgctggattggcactgagcaactttaggaaatgtcggtggagtgttcagcaagatcagacagcagtccaggtcaaaggcaaacacacacgctccagcccaaatcctcctggtggcacatcctaccccagatgctaaagtgattcaaggactccaggacacctcttaagagcctttctaagaacatgataggcttacttctgctccataataaagtgggagaaaaaagccagaatataacttaagactagataactgcgtacatgatggaccattttttttttttggctgggtagagaaatcatataaaacgcaggctgtttagcatggagatgactctcagaacactgggagggtctggcacttgatgggggttagttgcttggcagcctgcctgccactgagggaagtcccattagagatgtatcaccaccttgtcaccaacaggatgatgtcaccaacaggatgatgtcaccaggtaataaaccttcatcctcatatcatggcgtcagtaaatttgaactcagctga

SEQ ID NO: 353597 - DNA, 2240 bp, Homo sapiens
tccagccccgggggacccgccgcccagctcccgagggtgcggcagcctctggccactcagccggggccgagagggagctgccgggcggggaggcgccgcaggcacccggcgggcagggcggggcagggcaagacggccgcctccgcaagtgccacccggcccacccgggcctctcccttctgcctgggacgtcagcggacggggcgctcgcgggccggggctgtatggggctcccgcgcgggtcgttcttctggctgctgctcctgctcacggctgcctgctcggggctcctctttgccctgtacttctcggcggtgcagcggtacccggggccagcggccggagccagggacaccacatcatttgaagcattctttcaatccaaggcatcgaattcttggacaggaaagggccaggcctgccgacacctgcttcacctggccattcagcggcacccccacttccgtggcctgttcaatctctccattccagtgctgctgtggggggacctcttcaccccagcgctctgggaccgcctgagccaacacaaagccccgtatggctggcgggggctctctcaccaagtcatcgcctccaccctgagccttctgaacggctcagagagtgccaagctgtttgccccgcccagggacacccctccaaagtgtatccggtgtgccgtggtgggcaacggaggcattctgaatgggtcccgccagggtcccaacatcgatgcccatgactatgtattcagactcaatggagctgtgatcaaaggcttcgagcgcgatgtgggcaccaagacttccttctatggtttcactgtgaacacgatgaagaactccctcgtctcctactggaatctgggcttcacctccgtgccacaaggacaggacctgcagtatatcttcatcccctcagacatccgcgactatgtgatgctgagatcggccattctgggcgtgcctgtccctgagggcctagataaaggggacagccccgctcctaccgctcagggtaccgcggctactccggcgccctgaccctcccctccatctcccccttgcaatacgacggctctgggcgctctgtccacttctatcatgggtcctaggccgcacgcctattttggaccagaagcctctgccagtaaattcaagctgctacatccggacttcatcagctacctgacagaaaggttcttgaaatcaaagttgattaacacacattttggagacctatatatgcctagtaccggggctctcatgctgctgacagctttgcatacctgtgaccaggtcagtgcctatggattcatcacaagcaactactggaaattttccgaccactatttcgaacgaaaaatgaagccattgatattttatgcaaaccacgatctgtccctggaagctgccctgtggagggacctgcacaaggccggcatccttcagctgtaccagcgctgaccccaatgcactgagccctttgcttcttcaagagttgcggccctgatcctctcaagtggccaaaagcttttttaacttttcaatcttcaccttcccttgccaacagagggcactggggtgaattcaagattttcatcgaggtctgttcaatataggacaccccagcttgtccttggctcatccaagaactcttctgtatctaaaacaatacatctcaatcttggccaagggaaaatggactgctttgctggattggcactgagcaactttaggaaatgtcggtggagtgttcagcaagatcagacagcagtccaggtcaaaggcaaacacacacgctccagcccaaatcctcctggtggcacatcctaccccagatgctaaagtgattcaaggactccaggacacctcttaagagcctttctaagaacatgataggcttacttctgctccataataaagtgggagaaaaaagccagaatataacttaagactagataactgcgtacatgatggaccattttttttttttggctgggtagagaaatcatataaaacgcaggctgtttagcatggagatgactctcagaacactgggagggtctggcacttgatgggggttagttgcttggcagcctgcctgccactgagggaagtcccattagagatgtatcaccaccttgtcaccaacaggatgatgtcaccaacaggatgatgtcaccaggtaataaaccttcatcctcatatcatggcgtcagtaaatttgaactcagctga

SEQ ID NO: 353598 - DNA, 2667 bp, Homo sapiens
tccagccccgggggacccgccgcccagctcccgagggtgcggcagcctctggccactcagccggggccgagagggagctgccgggcggggaggcgccgcaggcacccggcgggcagggcggggcagggcaagacggccgcctccgcaagtgccacccggcccacccgggcctctcccttctgcctgggacgtcagcggacggggcgctcgcgggccggggctgtatggggctcccgcgcgggtcgttcttctggctgctgctcctgctcacggctgcctgctcggggctcctctttgccctgtacttctcggcggtgcagcggtacccggggccagcggccggagccagggacaccacatcatttgaagcattctttcaatccaaggcatcgaattcttggacaggaaagggccaggcctgccgacacctgcttcacctggccattcagcggcacccccacttccgtggcctgttcaatctctccattccagtgctgctgtggggggacctcttcaccccagcgctctgggaccgcctgagccaacacaaagccccgtatggctggcgggggctctctcaccaagtcatcgcctccaccctgagccttctgaacggctcagagagtgccaagctgtttgccccgcccagggacacccctccaaagtgtatccggtgtgccgtggtgggcaacggaggcattctgaatgggtcccgccagggtcccaacatcgatgcccatgactatgtattcagactcaatggagctgtgatcaaaggcttcgagcgcgatgtgggcaccaagacttccttctatggtttcactgtgaacacgatgaagaactccctcgtctcctactggaatctgggcttcacctccgtgccacaaggacaggacctgcagtatatcttcatcccctcagacatccgcgactatgtgatgctgagatcggccattctgggcgtgcctgtccctgagggcctagataaaggggacagccccgctcctaccgctcagggtaccgcggctactccggcgccctgaccctcccctccatctcccccttgcaatacgacggctctgggcgctctgtccacttctatcatgggtcctaggccgcacgcctattttggaccagaagcctctgccagtaaattcaagctgctacatccggacttcatcagctacctgacagaaaggtacggagtggggtgcctgaagaacagcgtccccttccttcccccttttacacacccacccacatccagtcagcgccctcacacgtgattcctacttaatcaagatgtggagtagagagaaactgcagtctcaggctaaataaacaggccacctatgcccttggcagtgtggttacttagtagcttggggtgaaaacaagctgttgccaaaagggggaacctgtggttcctttctcaccaccccctcccccaaccttacctaaggtctcaaagatctttgtatttagtccacttggaccgaataaagaactgactggagtagaaggccctcagtttttgaagttttcccacctatttgaatgtgtagttgtgaagtgtgatgatagccatcaagctagtgagctgaaacgtctctttttgcttccaggttcttgaaatcaaagttgattaacacacattttggagacctatatatgcctagtaccggggctctcatgctgctgacagctttgcatacctgtgaccaggtcagtgcctatggattcatcacaagcaactactggaaattttccgaccactatttcgaacgaaaaatgaagccattgatattttatgcaaaccacgatctgtccctggaagctgccctgtggagggacctgcacaaggccggcatccttcagctgtaccagcgctgaccccaatgcactgagccctttgcttcttcaagagttgcggccctgatcctctcaagtggccaaaagcttttttaacttttcaatcttcaccttcccttgccaacagagggcactggggtgaattcaagattttcatcgaggtctgttcaatataggacaccccagcttgtccttggctcatccaagaactcttctgtatctaaaacaatacatctcaatcttggccaagggaaaatggactgctttgctggattggcactgagcaactttaggaaatgtcggtggagtgttcagcaagatcagacagcagtccaggtcaaaggcaaacacacacgctccagcccaaatcctcctggtggcacatcctaccccagatgctaaagtgattcaaggactccaggacacctcttaagagcctttctaagaacatgataggcttacttctgctccataataaagtgggagaaaaaagccagaatataacttaagactagataactgcgtacatgatggaccattttttttttttggctgggtagagaaatcatataaaacgcaggctgtttagcatggagatgactctcagaacactgggagggtctggcacttgatgggggttagttgcttggcagcctgcctgccactgagggaagtcccattagagatgtatcaccaccttgtcaccaacaggatgatgtcaccaacaggatgatgtcaccaggtaataaaccttcatcctcatatcatggcgtcagtaaatttgaactcagctga

SEQ ID NO: 353599 - DNA, 1041 bp, Homo sapiens
tgactctatgaggatcccctccagagcgtgtatgctgacctatatatgcctagtaccggggctctcatgctgctgacagctttgcatacctgtgaccaggtcagtgcctatggattcatcacaagcaactactggaaattttccgaccactatttcgaacgaaaaatgaagccattgatattttatgcaaaccacgatctgtccctggaagctgccctgtggagggacctgcacaaggccggcatccttcagctgtaccagcgctgaccccaatgcactgagccctttgcttcttcaagagttgcggccctgatcctctcaagtggccaaaagcttttttaacttttcaatcttcaccttcccttgccaacagagggcactggggtgaattcaagattttcatcgaggtctgttcaatataggacaccccagcttgtccttggctcatccaagaactcttctgtatctaaaacaatacatctcaatcttggccaagggaaaatggactgctttgctggattggcactgagcaactttaggaaatgtcggtggagtgttcagcaagatcagacagcagtccaggtcaaaggcaaacacacacgctccagcccaaatcctcctggtggcacatcctaccccagatgctaaagtgattcaaggactccaggacacctcttaagagcctttctaagaacatgataggcttacttctgctccataataaagtgggagaaaaaagccagaatataacttaagactagataactgcgtacatgatggaccattttttttttttggctgggtagagaaatcatataaaacgcaggctgtttagcatggagatgactctcagaacactgggagggtctggcacttgatgggggttagttgcttggcagcctgcctgccactgagggaagtcccattagagatgtatcaccaccttgtcaccaacaggatgatgtcaccaacaggatgatgtcaccaggtaataaaccttcatcctcatatcatggcgtcagtaaatttgaactcagctga

SEQ ID NO: 353600 - DNA, 1916 bp, Homo sapiens
tccagccccgggggacccgccgcccagctcccgagggtgcggcagcctctggccactcagccggggccgagagggagctgccgggcggggaggcgccgcaggcacccggcgggcagggcggggcagggcaagacggccgcctccgcaagtgccacccggcccacccgggcctctcccttctgcctgggacgtcagcggacggggcgctcgcgggccggggctgtatggggctcccgcgcgggtcgttcttctggctgctgctcctgctcacggctgcctgctcggggctcctctttgccctgtacttctcggcggtgcagcggtacccggggccagcggccggagccagggacaccacatcatttgaagcattctttcaatccaaggcatcgaattcttggacaggaaagggccaggcctgccgacacctgcttcacctggccattcagcggcacccccacttccgtggcctgttcaatctctccattccagtgctgctgtggggggacctcttcaccccagcgctctgggaccgcctgagccaacacaaagccccgtatggctggcgggggctctctcaccaagtcatcgcctccaccctgagccttctgaacggctcagagagtgccaagctgtttgccccgcccagggacacccctccaaagtgtatccggtgtgccgtggtgggcaacggaggcattctgaatgggtcccgccagggtcccaacatcgatgcccatgactatgtattcagactcaatggagctgtgatcaaaggcttcgagcgcgatgtgggcaccaagacttccttctatggtttcactgtgaacacgatgaagaactccctcgtctcctactggaatctgggcttcacctccgtgccacaaggacaggacctgcagtatatcttcatcccctcagacatccgcgactatgtgatgctgagatcggccattctgggcgtgcctgtccctgagggcctagataaaggggacagccccgctcctaccgctcagggtaccgcggctactccggcgccctgaccctcccctccatctcccccttgcaatacgacggctctgggcgctctgtccacttctatcatgggtcctaggccgcacgcctattttggaccagaagcctctgccagtaaattcaagctgctacatccggacttcatcagctacctgacagaaaggtacggagtggggtgcctgaagaacagcgtccccttccttcccccttttacacacccacccacatccagtcagcgccctcacacgtgattcctacttaatcaagatgtggagtagagagaaactgcagtctcaggctaaataaacaggccacctatgcccttggcagtgtggttacttagtagcttggggtgaaaacaagctgttgccaaaagggggaacctgtggttcctttctcaccaccccctcccccaaccttacctaaggtctcaaagatctttgtatttagtccacttggaccgaataaagaactgactggagtagaaggccctcagtttttgaagttttcccacctatttgaatgtgtagttgtgaagtgtgatgatagccatcaagctagtgagctgaaacgtctctttttgcttccaggttcttgaaatcaaagttgattaacacacattttggagacctatatatgcctagtaccggggctctcatgctgctgacagctttgcatacctgtgaccaggtaagaggccttctcttccagaagcccatgccggcagaacacaggataacagaacccaacaggatcccctgatatcccttacctcggagctgggactcttggcctctgttcgtggaatccccagttccaagagtgctgctggtactgctcacttccttgcccacaaccctggggcctttgaaggacaggtc

SEQ ID NO: 353601 - DNA, 354 bp, Homo sapiens
gggataagacaggcaaagaggtataaccttcaagagtatgatgtgatgcccaaattccctctaatttcaggctctgtcagccacctcaatgcaaatttccctgaataaattccactaggctacatagtcatttgcatggtaatattaatgagctctcgttgcctgtgccacctctctaccccaaagttttctacccctgcccaagagcaaattttattaaggaggaaaagaatacaagggtatcagcttacaaacttggtgaggtgggattggggacattaccaataaggaaaagcaaaattgaagagcagtgtatcttcacttatatgcaagactggagtgctgccagtcagg

SEQ ID NO: 353602 - DNA, 320 bp, Homo sapiens
gctattgcctgaaaacttaccaactctcaaagtaaggctgcctctgacctgccaacctgggacactctgattggctgctggtgatgtcacaggaatctctgggagatgattggtgggtgagagcccctaggtcaggtggaaggagggcttgatggttagggctggtgtctgtggcatgttcacagaggccgacccaggagctagctgaggacgaacaggtgcctaaggggcccccatctttgttggggcgacccctcctcctaaccccactcacagcagccagcgatgaccatggccccttctcacttgatagcatctgg

SEQ ID NO: 353603 - DNA, 989 bp, Homo sapiens
ccacagccctgcgcctgcgcgtgggcctgggccgcccgtcgtacctgatggtaggaggcagtagttccccgcttcccttccgcgggagggagagttagctagccatccaagaaaacaccatgaaagataacgatatcaagagactactgtatacccatcttttatgcatattttcaattatcctaagtgtcttcattccatcactcttcttggagaacttctcaatattggaaacacacttgacatggttgtgcatctgttctggttttgtaactgctgtcaatctagtactatatttagtagtgaaaccaaatacatcctctaaaagaagttcattatcacacaaggtaactggatttttgaaatgctgtatctactttcttatgtcttgtttctcctttcatgtaatttttgttctgtatggagcaccactgatagagttggcattggaaacatttttatttgcagttattttgtctacttttactactgtgccttgcttatgtttgttaggaccaaacctcaaagcatggctaagagtgttcagtagaaatggagttacatccatatgggagaatagtctccagatcactacaatttctagctttgtaggagcatggcttggagcacttcctattccactggattgggaaagaccatggcaggtatggcccatctcctgtacgcttggagcgacctttggctacgtggctggccttgttatttcaccactctggatatactggaatagaaagcaacttacatacaagaacaattaactggagcaaagggagatatttctttgtgcagattctgtaagggctgggcagaaatgtgtatggtcaaagccaagcagttccatttacagctctgttttttacgtagttacaacatgatgtgattgtagctttttaaactatgaaacccctgagagattgtaccttctagttgaaataaagtatttataatagaaaaaaacttcagatgct

SEQ ID NO: 353604 - DNA, 872 bp, Homo sapiens
atgaggtttttaaactcacgttttattaatgggtaggcaggtaacatgatgattaggagttctggcatcagattactgggttgaaatcctggctttgtcacttgctagtgaggatgaaataataaaatccctctaaaatacctagctcagcacctgacacatggttattacttaattaatgttacaggcatttgtgacctagaaaagacatagtttaatgactatatttttagccttcaaaaaatgcaaattccatgatttatttgagttctcatatattagagaatatgttaattgtctcagtttgttgttttattttttctgcccagcagtctttcagttggtagagtggactgttaatttatctatttctctggtatttagttatgccaatttagggtatttggatttcacataattttcaatcctgtctgacatttcagatgacagtagaaagaaaacgtagcacttatagatctctccatgtaccctgcagggggcttggtactgtgaaatgagtaacttaatcctgacaaccgtagtgcaaggtatggcccatctcctgtacgcttggagcgacctttggctacgtggctggccttgttatttcaccactctggatatactggaatagaaagcaacttacatacaagaacaattaactggagcaaagggagatatttctttgtgcagattctgtaagggctgggcagaaatgtgtatggtcaaagccaagcagttccatttacagctctgttttttacgtagttacaacatgatgtgattgtagctttttaaactatgaaacccctgagagattgtaccttctagttgaaataaagtatttataatagaaaaaaacttcagatgct

SEQ ID NO: 353605 - DNA, 602 bp, Homo sapiens
tgtaatagtttactgttgtaattcgtttataccatgtgttggacaactcagctaatatgttaattgatttatacaattcctttcaattttatctaaaaataagcagaccaaaattaaataagaaagttacataagattccatttgagcatacataaggccatgatactttaatgtgaaccaccatttcttggaagaaagaagacatccaaatgtccgattcagagagaaagttcctggccagtcatccagtagactctctccactcttcaatgggaaggtatggcccatctcctgtacgcttggagcgacctttggctacgtggctggccttgttatttcaccactctggatatactggaatagaaagcaacttacatacaagaacaattaactggagcaaagggagatatttctttgtgcagattctgtaagggctgggcagaaatgtgtatggtcaaagccaagcagttccatttacagctctgttttttacgtagttacaacatgatgtgattgtagctttttaaactatgaaacccctgagagattgtaccttctagttgaaataaagtatttataatagaaaaaaacttcagatgct

SEQ ID NO: 353606 - DNA, 1094 bp, Homo sapiens
ccacagccctgcgcctgcgcgtgggcctgggccgcccgtcgtacctgatggtaggaggcagtagttccccgcttcccttccgcgggagggagagttagctagccatccaagaaaacaccatgaaagataacgatatcaagagactactgtatacccatcttttatgcatattttcaattatcctaagtgtcttcattccatcactcttcttggagaacttctcaatattggaaacacacttgacatggttgtgcatctgttctggttttgtaactgctgtcaatctagtactatatttagtagtgaaaccaaatacatcctctaaaagaagttcattatcacacaaggtaactggatttttgaaatgctgtatctactttcttatgtcttgtttctcctttcatgtaatttttgttctgtatggagcaccactgatagagttggcattggaaacatttttatttgcagttattttgtctacttttactactgtgccttgcttatgtttgttaggaccaaacctcaaagcatggctaagagtgttcagtagaaatggagttacatccatatgggagaatagtctccagatcactacaatttctagctttgtaggagcatggcttggagcacttcctattccactggattgggaaagaccatggcagatgacagtagaaagaaaacgtagcacttatagatctctccatgtaccctgcagggggcttggtactgtgaaatgagtaacttaatcctgacaaccgtagtgcaaggtatggcccatctcctgtacgcttggagcgacctttggctacgtggctggccttgttatttcaccactctggatatactggaatagaaagcaacttacatacaagaacaattaactggagcaaagggagatatttctttgtgcagattctgtaagggctgggcagaaatgtgtatggtcaaagccaagcagttccatttacagctctgttttttacgtagttacaacatgatgtgattgtagctttttaaactatgaaacccctgagagattgtaccttctagttgaaataaagtatttataatagaaaaaaacttcagatgct

SEQ ID NO: 353607 - DNA, 935 bp, Homo sapiens
ccacagccctgcgcctgcgcgtgggcctgggccgcccgtcgtacctgatggtaggaggcagtagttccccgcttcccttccgcgggagggagagttagctagccatccaagaaaacaccatgaaagataacgatatcaagagactactgtatacccatcttttatgcatattttcaattatcctaagtgtcttcattccatcactcttcttggagaacttctcaatattggaaacacacttgacatggttgtgcatctgttctggttttgtaactgctgtcaatctagtactatatttagtagtgaaaccaaatacatcctcttttcttatgtcttgtttctcctttcatgtaatttttgttctgtatggagcaccactgatagagttggcattggaaacatttttatttgcagttattttgtctacttttactactgtgccttgcttatgtttgttaggaccaaacctcaaagcatggctaagagtgttcagtagaaatggagttacatccatatgggagaatagtctccagatcactacaatttctagctttgtaggagcatggcttggagcacttcctattccactggattgggaaagaccatggcaggtatggcccatctcctgtacgcttggagcgacctttggctacgtggctggccttgttatttcaccactctggatatactggaatagaaagcaacttacatacaagaacaattaactggagcaaagggagatatttctttgtgcagattctgtaagggctgggcagaaatgtgtatggtcaaagccaagcagttccatttacagctctgttttttacgtagttacaacatgatgtgattgtagctttttaaactatgaaacccctgagagattgtaccttctagttgaaataaagtatttataatagaaaaaaacttcagatgct

SEQ ID NO: 353608 - DNA, 740 bp, Homo sapiens
ccacagccctgcgcctgcgcgtgggcctgggccgcccgtcgtacctgatggtaggaggcagtagttccccgcttcccttccgcgggagggagagttaggtaactggatttttgaaatgctgtatctactttcttatgtcttgtttctcctttcatgtaatttttgttctgtatggagcaccactgatagagttggcattggaaacatttttatttgcagttattttgtctacttttactactgtgccttgcttatgtttgttaggaccaaacctcaaagcatggctaagagtgttcagtagaaatggagttacatccatatgggagaatagtctccagatcactacaatttctagctttgtaggagcatggcttggagcacttcctattccactggattgggaaagaccatggcaggtatggcccatctcctgtacgcttggagcgacctttggctacgtggctggccttgttatttcaccactctggatatactggaatagaaagcaacttacatacaagaacaattaactggagcaaagggagatatttctttgtgcagattctgtaagggctgggcagaaatgtgtatggtcaaagccaagcagttccatttacagctctgttttttacgtagttacaacatgatgtgattgtagctttttaaactatgaaacccctgagagattgtaccttctagttgaaataaagtatttataatagaaaaaaacttcagatgct

SEQ ID NO: 353609 - DNA, 1839 bp, Homo sapiens
tgtaatagtttactgttgtaattcgtttataccatgtgttggacaactcagctaatatgttaattgatttatacaattcctttcaattttatctaaaaataagcagaccaaaattaaataagaaagttacataagattccatttgagcatacataaggccatgatactttaatgtgaaccaccatttcttggaagaaagaagacatccaaatgtccgattcagagagaaagttcctggccagtcatccagtagactctctccactcttcaatgggaaggtgatgcttatatttttaaaaatctctacaaagctcacatacaacaagacagtacatcctagatttgtgactgatatgagcatttaaggctgtcattttcaagtataaaagtttagtgttccattacccaatctgtgcagtagacatagctataagctcaagtcatgtgaattaacagaagcccaccaaagacatttaaaaaattataatttgggcaacagcaagtttaaatgtaggaaaggctagaaaaaatgtgatgagattgtttctctaaaatgcattaggttgttcacaatgaagctttgtctaacaccattatctgatgcatccattatctgatgcatggcatatgcaataaggcagatccacagcagaccaaacaaggaagctgaattaggtaatagaactagtaattaagatggttcacctctaacacagttctgtggcctgttccccccagagaaagattagaaatggctccagtgtaccaaataagcttcacagaagaacatgaaaattttcctccaacttttttttcttttttttttcaagcagagcctttcacttagggaccaactgcttgtagatgaaataaatcaacattaattacttctagcctgatgtaatatggctggagaaaaggggtctctggaagccggtattttgtttaacttacattctaggtgtgtatataagttgtcgctctataacttctgctgtggttccaacatctatatctgaaaggtggaagcagctgctctgttacaattttcatgtaacacgcttggattctaggtctttcctctttaacacaacttaaagaaagtttcttgtggtttggtcagcatacacacttctcatttcatttgatgtacacagccaaagtggaattaaaaaaaaaaaattaccaactagttcagagagctaaattgagtctatcattatggcaaagtctgacccaaaattttaatttgtaattttagcatgtgtctcatgcactttggggagcgtcaaactaaatctacaattgccagaagccttgttacagtttaatgcacattaactaaaatgtgtacatttttagtgttcatgataaatgcagttatgaccttattacacttttggcattctttaagaaagcacattaagctttaatatagaaatatttaggttacacttgtgctcaagtaataataaaacatttgttcttttttgatctcatacattctctcctcaggtatggcccatctcctgtacgcttggagcgacctttggctacgtggctggccttgttatttcaccactctggatatactggaatagaaagcaacttacatacaagaacaattaactggagcaaagggagatatttctttgtgcagattctgtaagggctgggcagaaatgtgtatggtcaaagccaagcagttccatttacagctctgttttttacgtagttacaacatgatgtgattgtagctttttaaactatgaaacccctgagagattgtaccttctagttgaaataaagtatttataatagaaaaaaacttcagatgct

SEQ ID NO: 353610 - DNA, 1041 bp, Homo sapiens
ccacagccctgcgcctgcgcgtgggcctgggccgcccgtcgtacctgatggtaggaggcagtagttccccgcttcccttccgcgggagggagagttagctagccatccaagaaaacaccatgaaagataacgatatcaagagactactgtatacccatcttttatgcatattttcaattatcctaagtgtcttcattccatcactcttcttggagaacttctcaatattggaaacacacttgacatggttgtgcatctgttctggttttgtaactgctgtcaatctagtactatatttagtagtgaaaccaaatacatcctctaaaagaagttcattatcacacaaggtaactggatttttgaaatgctgtatctactttcttatgtcttgtttctcctttcatgtaatttttgttctgtatggagcaccactgatagagttggcattggaaacatttttatttgcagttattttgtctacttttactactgtgccttgcttatgtttgttaggaccaaacctcaaagcatggctaagagtgttcagtagaaatggagttacatccatatgggagaatagtctccagatcactacaatttctagctttgtaggagcatggcttggagcacttcctattccactggattgggaaagaccatggcagggggcttggtactgtgaaatgagtaacttaatcctgacaaccgtagtgcaaggtatggcccatctcctgtacgcttggagcgacctttggctacgtggctggccttgttatttcaccactctggatatactggaatagaaagcaacttacatacaagaacaattaactggagcaaagggagatatttctttgtgcagattctgtaagggctgggcagaaatgtgtatggtcaaagccaagcagttccatttacagctctgttttttacgtagttacaacatgatgtgattgtagctttttaaactatgaaacccctgagagattgtaccttctagttgaaataaagtatttataatagaaaaaaacttcagatgct

SEQ ID NO: 353611 - DNA, 740 bp, Homo sapiens
cgcccgtcgtacctgatggtaggaggcagtagttccccgcttcccttccgcgggagggagagttaggtaagccccgctggacgccctcggcgctctcgcctcacgaggtgcaagctacccccgcgaattgccgaagcagccctgagccttggcgccccgacccgccggcgctcgccgtcagctcagcgccactcttccggcgtgccctgatggacagaccccctttcggatccgagttttcgcctctgtcccccagttttcccttgtcttcaactcccatgctctttgatcctgcctctcagctggttcctcgctgcccacgcttgcgccggcgtaggctcgggcagaatcccgagggacccgggttggggtggggctgccggtgaaggtgcggcgatgcccgcgaaggctcctctgggtgccgctcggaagagccttctctccgctgcggtgcgtagcgaggtgggccgggtcatgcccgtggcacttctgcaggcgtcctgggggcacgccagggcctaaccggtgctggttccctctttgcttactctggttccttcattcattcagcaaacatttgagtttgggtcctgctcactgtattacatccacatctgctgctggcagctgcgattccgagggtggctcagaaaaatcgctgaagggctatctgttgagagaatggattcctgatccccttgccctccctcaatcagcttaagatagaatctatgggaaac

SEQ ID NO: 353612 - DNA, 1373 bp, Homo sapiens
ccacagccctgcgcctgcgcgtgggcctgggccgcccgtcgtacctgatggtaggaggcagtagttccccgcttcccttccgcgggagggagagttaggtaagccccgctggacgccctcggcgctctcgcctcacgaggtgcaagctacccccgcgaattgccgaagcagccctgagccttggcgccccgacccgccggcgctcgccgtcagctcagcgccactcttccggcgtgccctgatggacagaccccctttcggatccgagttttcgcctctgtcccccagttttcccttgtcttcaactcccatgctctttgatcctgcctctcagctggttcctcgctgcccacgcttgcgccggcgtaggctcgggcagaatcccgagggacccgggttggggtggggctgccggtgaaggtgcggcgatgcccgcgaaggctcctctgggtgccgctcggaagagccttctctccgctgcgctagccatccaagaaaacaccatgaaagataacgatatcaagagactactgtatacccatcttttatgcatattttcaattatcctaagtgtcttcattccatcactcttcttggagaacttctcaatattggaaacacacttgacatggttgtgcatctgttctggttttgtaactgctgtcaatctagtactatatttagtagtgaaaccaaatacatcctctaaaagaagttcattatcacacaaggtaactggatttttgaaatgctgtatctactttcttatgtcttgtttctcctttcatgtaatttttgttctgtatggagcaccactgatagagttggcattggaaacatttttatttgcagttattttgtctacttttactactgtgccttgcttatgtttgttaggaccaaacctcaaagcatggctaagagtgttcagtagaaatggagttacatccatatgggagaatagtctccagatcactacaatttctagctttgtaggagcatggcttggagcacttcctattccactggattgggaaagaccatggcaggtatggcccatctcctgtacgcttggagcgacctttggctacgtggctggccttgttatttcaccactctggatatactggaatagaaagcaacttacatacaagaacaattaactggagcaaagggagatatttctttgtgcagattctgtaagggctgggcagaaatgtgtatggtcaaagccaagcagttccatttacagctctgttttttacgtagttacaacatgatgtgattgtagctttttaaactatgaaacccctgagagattgtaccttctagttgaaataaagtatttataatagaaaaaaacttcagatgct

SEQ ID NO: 353613 - DNA, 1112 bp, Homo sapiens
ccacagccctgcgcctgcgcgtgggcctgggccgcccgtcgtacctgatggtaggaggcagtagttccccgcttcccttccgcgggagggagagttagctagccatccaagaaaacaccatgaaagataacgatatcaagagactactgtatacccatcttttatgcatattttcaattatcctaagtgtcttcattccatcactcttcttggagaacttctcaatattggaaacacacttgacatggttgtgcatctgttctggttttgtaactgctgtcaatctagtactatatttagtagtgaaaccaaatacatcctctaaaagaagttcattatcacacaaggtaactggatttttgaaatgctgtatctactttcttatgtcttgtttctcctttcatgtaatttttgttctgtatggagcaccactgatagagttggcattggaaacatttttatttgcagttattttgtctacttttactactgtgccttgcttatgtttgttaggaccaaacctcaaagcatggctaagagtgttcagtagaaatggagttacatccatatgggagaatagtctccagatcactacaatttctagctttgtaggagcatggcttggagcacttcctattccactggattgggaaagaccatggcagaagcagatagcaaggtaatttttgcagcagcggcctgtgttatcaagaaagctcacaaacatcagatttttcgtcttgtatcacaataagataaagctgatatgctaggtaaagcactgtgaggtatggcccatctcctgtacgcttggagcgacctttggctacgtggctggccttgttatttcaccactctggatatactggaatagaaagcaacttacatacaagaacaattaactggagcaaagggagatatttctttgtgcagattctgtaagggctgggcagaaatgtgtatggtcaaagccaagcagttccatttacagctctgttttttacgtagttacaacatgatgtgattgtagctttttaaactatgaaacccctgagagattgtaccttctagttgaaataaagtatttataatagaaaaaaacttcagatgct

SEQ ID NO: 353614 - DNA, 1869 bp, Homo sapiens
cccaacgcgcaggcgccgctgctatgctgagtgccgcgtctcgcgtagtctcccgcgccgccgtccactgcgcgcttcgctctccgccgcccgaggcccgcgcgctcgccatgtcccggccaccgccaccgcgggtcgcctcggtgctgggcaccatggagatggggcgccgcatggacgcgcccgccagcgccgcggccgtgcgcgcctttctggagcgcggccacaccgaactggacacggccttcatgtacagcgacggccagtccgagaccatcctgggcggcctggggctcgggctgggcggtggcgactgcagagtgaaaattgccaccaaggccaacccttgggatggaaaatcactaaagcctgacagtgtccggtcccagctggagacgtcattgaagaggctgcagtgtccccaagtggacctcttctacctacacgcacctgaccacggcaccccggtggaagagacgctgcatgcctgccagcggctgcaccaggagggcaagttcgtggagcttggcctctccaactatgctagctgggaagtggccgagatctgtaccctctgcaagagcaatggctggatcctgcccactgtgtaccagggcatgtacaacgccaccacccggcaggtggaaacggagctcttcccctgcctcaggcactttggactgaggttctatgcctacaaccctctggctgggggcctgctgactggcaagtacaagtatgaggacaaggacgggaaacagcctgtgggccgcttctttgggaatagctgggctgagacctacaggaatcgcttctggaaggagcaccacttcgaggccattgcgttggtggagaaggccctgcaggccgcatatggcgccagcgcccccagtgtgacctcggctgccctccggtggatgtaccaccactcacagctgcagggtgcccacggggacgcggtcatcctgggcatgtccagcctggagcagctggagcagaacttggcagcaacagaggaagggcccctggagccggctgtcgtggatgcctttaatcaagcctggcatttggttgctcacgaatgtcccaactacttccgctaggcccatcatggctcaggctgcccaaggcttttctgtcacctcttttgttctctcacactgaccagtcttggccttaagctgacttagaagggtttttctgaattgtctagatccatgcattatttttctagcttcctgccttgctccctattcactttacactgtgaaaggtggggggtgagtcccacttgagcgcttcctgttgaataaagcaggcacttgacctggctgtagcctaggtcttgagtgaaccccaaaaaaccacacaaaaaaaaaaaaaaaaaagcacccgcttctgtggcgcgccagcccccagaaaacacctcaaacacccaatggagtggcacacggcaccaatgagaacgcaccacgggccaacaagggacacaaagaaacccggcacaacaaaggcgggctcccacagaaaaaaaaggccggggaacacagaaggcgtctgaaacaaaccgacaggagagacgaggaacacaagcgggacccacacaggagaccaagagaagtcaaaaaagacccgacggggtggtttgcaccgggagaaaacacagcgacgaagagaaaagaaagcgagggcgacacagagaaaggcggcagagacagaggacgcgccaaaggaagcgacaaacgacgggggaccgaagagcagagcaaaacaacgagggagacaagagcgtacgcgacgacaggcgcgaagaaaacagcgcgagagcccgacgcagaggaacaagaaaggccgaggaggagaggaaga

SEQ ID NO: 353615 - DNA, 3017 bp, Homo sapiens
cccaacgcgcaggcgccgctgctatgctgagtgccgcgtctcgcgtagtctcccgcgccgccgtccactgcgcgcttcgctctccgccgcccgaggcccgcgcgctcgccatgtcccggccaccgccaccgcgggtcgcctcggtgctgggcaccatggagatggggcgccgcatggacgcgcccgccagcgccgcggccgtgcgcgcctttctggagcgcggccacaccgaactggacacggccttcatgtacagcgacggccagtccgagaccatcctgggcggcctggggctcgggctgggcggtggcgactgcagagtgaaaattgccaccaaggccaacccttgggatggaaaatcactaaagcctgacagtgtccggtcccagctggagacgtcattgaagaggctgcagtgtccccaagtggacctcttctacctacacgcacctgaccacggcaccccggtggaagagacgctgcatgcctgccagcggctgcaccaggagggcaagttcgtggagcttggcctctccaactatgctagctgggaagtggccgagatctgtaccctctgcaagagcaatggctggatcctgcccactgtgtaccagggggcctgctgactggcaagtacaagtatgaggacaaggacgggaaacagcctgtgggccgcttctttgggaatagctgggctgagacctacaggaatcgcttctggaaggagcaccacttcgaggccattgcgttggtggagaaggccctgcaggccgcatatggcgccagcgcccccagtgtgacctcggctgccctccggtggatgtaccaccactcacagctgcagggtgcccacggggacgcggtcatcctgggcatgtccagcctggagcagctggagcagaacttggcagcaacagaggaagggcccctggagccggctgtcgtggatgcctttaatcaagcctggcatttggttgctcacgaatgtcccaactacttccgctaggcccatcatggctcaggctgcccaaggcttttctgtcacctcttttgttctctcacactgaccagtcttggccttaagctgacttagaagggtttttctgaattgtctagatccatgcattatttttctagcttcctgccttgctccctattcactttacactgtgaaaggtggggggtgagtcccacttgagcgcttcctgttgaataaagcaggcacttgacctggctgtagcctaggtcttgagtgaaccccaaaaacttgctttctctgctgttaacactttgtttcccatcctacctggggactgagaaagggcagaaccatgggctggagtcttcagagggcagaggtagtaggagggtcacagaagcacactgccctcccagggtctcctcgggcccctggtctgaatacccacctgacctctcaacattgaggtgtctctcactcttctacacacgatagaaaagagagtcatacacctgcagtacattttctctaattcagagttgcctcaatacattcttaggaatgaaacaactgggacaaagaaactaccattagagtcactaccaagaagaagaacacttcccaggatctgtggaacatcttgaagctctcaatcttagcctcctcttgtcttaactaaagcctcttgtcttttcacccattaggttctcagtcttggctctgggcctcctgttcggcatggggacagacataggcagccaaggtcctcatttcccttggaaacccctactccaaacaggaggcaccaaggctgagaataagaatccttggttcagtggttgctgaacctgctgcattcccagtgcaccaaaatccctccagccatgggcagggcagcaggcagcacttggagcagcttcttgaagcaatgaaagaggcccaacctggaaatttactttttcatttatatttattatttgttcttgagacaggctcttgctctgtcacctagaccggagtacagtggcatgatcactgctcacagcaattttgacctccggggctcaagggatcctcccacctcagcctcccgagaagtttttatttttattttttttgtggagtggagatctccctatgttgtcaccgtcttttctgtttacccgtaacaaaacagatgctcacccatgtggaatggtgtatcagttatctttgcacaacaaaccacactaataagttgcttgaaaagataaaatccaaggctggcacagtggctcatggctataatcccagcacgttgagagcccaaagcaggcagatcacttgagctcaggagtttgagaccagcctgggcaacatggtgaaaccctgtctctaccaaaaatacaaaaaattaatctgtgtgtggtggcacatacctgtggtcccagctactctggaggctgaggtgggaggatcgcctgggccccggaaacagaggttgcagtgggccgagatcatgccattacactctagcctgggtgacacagtcagacccatctcaaaaaaaaaaaaaaatcttattgatcaaaagatttgatataattcctattattcccagctgactttttcttaatactgaaattgacaaactaatcctaaagctcatatggaaattcaagggacccaggagaaccaaaacagtcttgaaaaacacatagttggaggacttatactttctgatttcaaaacttactacaaagctacagtaataaagacaatggttctggcataagaatagagcaactgaacagaactgagagtccagaaataaactcttactgattttagagttgagtgacaactcaatagggacagttcaatagggaaaagaatcatcttcaccaacatccagatgtcctcctgtgaaagagtgaagttggaccccttccccataccataaacaaaaaattaactcgaatcaccatctaaatgtataaggtaaactataaaactcttagaagaaaatacttgagtcaagtgtgactttggattaggc

SEQ ID NO: 353616 - DNA, 1949 bp, Homo sapiens
ctatacggttgtgagaagacgacagaagggtttttctgaattgtctagatccatgcattatttttctagcttcctgccttgctccctattcactttacactgtgaaaggtggggggtgagtcccacttgagcgcttcctgttgaataaagcaggcacttgacctggctgtagcctaggtcttgagtgaaccccaaaaacttgctttctctgctgttaacactttgtttcccatcctacctggggactgagaaagggcagaaccatgggctggagtcttcagagggcagaggtagtaggagggtcacagaagcacactgccctcccagggtctcctcgggcccctggtctgaatacccacctgacctctcaacattgaggtgtctctcactcttctacacacgatagaaaagagagtcatacacctgcagtacattttctctaattcagagttgcctcaatacattcttaggaatgaaacaactgggacaaagaaactaccattagagtcactaccaagaagaagaacacttcccaggatctgtggaacatcttgaagctctcaatcttagcctcctcttgtcttaactaaagcctcttgtcttttcacccattaggttctcagtcttggctctgggcctcctgttcggcatggggacagacataggcagccaaggtcctcatttcccttggaaacccctactccaaacaggaggcaccaaggctgagaataagaatccttggttcagtggttgctgaacctgctgcattcccagtgcaccaaaatccctccagccatgggcagggcagcaggcagcacttggagcagcttcttgaagcaatgaaagaggcccaacctggaaatttactttttcatttatatttattatttgttcttgagacaggctcttgctctgtcacctagaccggagtacagtggcatgatcactgctcacagcaattttgacctccggggctcaagggatcctcccacctcagcctcccgagaagtttttatttttattttttttgtggagtggagatctccctatgttgtcaccgtcttttctgtttacccgtaacaaaacagatgctcacccatgtggaatggtgtatcagttatctttgcacaacaaaccacactaataagttgcttgaaaagataaaatccaaggctggcacagtggctcatggctataatcccagcacgttgagagcccaaagcaggcagatcacttgagctcaggagtttgagaccagcctgggcaacatggtgaaaccctgtctctaccaaaaatacaaaaaattaatctgtgtgtggtggcacatacctgtggtcccagctactctggaggctgaggtgggaggatcgcctgggccccggaaacagaggttgcagtgggccgagatcatgccattacactctagcctgggtgacacagtcagacccatctcaaaaaaaaaaaaaaatcttattgatcaaaagatttgatataattcctattattcccagctgactttttcttaatactgaaattgacaaactaatcctaaagctcatatggaaattcaagggacccaggagaaccaaaacagtcttgaaaaacacatagttggaggacttatactttctgatttcaaaacttactacaaagctacagtaataaagacaatggttctggcataagaatagagcaactgaacagaactgagagtccagaaataaactcttactgattttagagttgagtgacaactcaatagggacagttcaatagggaaaagaatcatcttcaccaacatccagatgtcctcctgtgaaagagtgaagttggaccccttccccataccataaacaaaaaattaactcgaatcaccatctaaatgtataaggtaaactataaaactcttagaagaaaatacttgagtcaagtgtgactttggattaggc

SEQ ID NO: 353617 - DNA, 900 bp, Homo sapiens
cccaacgcgcaggcgccgctgctatgctgagtgccgcgtctcgcgtagtctcccgcgccgccgtccactgcgcgcttcgctctccgccgcccgaggcccgcgcgctcgccatgtcccggccaccgccaccgcgggtcgcctcggtgctgggcaccatggagatggggcgccgcatggacgcgcccgccagcgccgcggccgtgcgcgcctttctggagcgcggccacaccgaactggacacggccttcatgtacagcgacggccagtccgagaccatcctgggcggcctggggctcgggctgggcggtggcgactgcagagtgaaaattgccaccaaggccaacccttgggatggaaaatcactaaagcctgacagtgtccggtcccagctggagacgtcattgaagaggctgcagtgtccccaagtggacctcttctacctacacgcacctgaccacggcaccccggtggaagagacgctgcatgcctgccagcggctgcaccaggaggtcactgaagcggctgcagtgtccctgagtggacctcttctatctacatgcacctgaccacagcgccccggtggaagagacactgcgtgcctgccaccagctgcaccaggagggcaagttcgtggagcttggcctctccaactatgccgcctgggaagtggccgagatctgtaccctctgcaagagcaacggctggatcctgcccactgtgtaccagggcatgtacagcgccaccacccggcaggtggaaacggagctcttcccctgcctcaggcactttggactgaggttctatgcctacaaccctctggctgggggcctgctgaccggcaagtacaagtatgaggacaaggacgggaaacagcccgtgggccgcttctttgggactcag

SEQ ID NO: 353618 - DNA, 304 bp, Homo sapiens
ggcaagttcgtggagcttggcctctccaactatgctagctgggaagtggccgagatctgtaccctctgcaagagcaatggctggatcctgcccactgtgtaccaggtgagggccggggctgcagaggccaaggtctccaggactcctgctaatcctgggctctctttgcccccctgactgccccctgtgccgtctgcatagcagccactcccctgctgaaagcctgcagatggctcccatgtaccctcaggatgccattcaagctcctcagcctggccactgggcatctgcttccttcctgcct

SEQ ID NO: 353619 - DNA, 3114 bp, Homo sapiens
cccaacgcgcaggcgccgctgctatgctgagtgccgcgtctcgcgtagtctcccgcgccgccgtccactgcgcgcttcgctctccgccgcccgaggcccgcgcgctcgccatgtcccggccaccgccaccgcgggtcgcctcggtgctgggcaccatggagatggggcgccgcatggacgcgcccgccagcgccgcggccgtgcgcgcctttctggagcgcggccacaccgaactggacacggccttcatgtacagcgacggccagtccgagaccatcctgggcggcctggggctcgggctgggcggtggcgactgcagagtgaaaattgccaccaaggccaacccttgggatggaaaatcactaaagcctgacagtgtccggtcccagctggagacgtcattgaagaggctgcagtgtccccaagtggacctcttctacctacacgcacctgaccacggcaccccggtggaagagacgctgcatgcctgccagcggctgcaccaggagggcaagttcgtggagcttggcctctccaactatgctagctgggaagtggccgagatctgtaccctctgcaagagcaatggctggatcctgcccactgtgtaccagggcatgtacaacgccaccacccggcaggtggaaacggagctcttcccctgcctcaggcactttggactgaggttctatgcctacaaccctctggctgggggcctgctgactggcaagtacaagtatgaggacaaggacgggaaacagcctgtgggccgcttctttgggaatagctgggctgagacctacaggaatcgcttctggaaggagcaccacttcgaggccattgcgttggtggagaaggccctgcaggccgcatatggcgccagcgcccccagtgtgacctcggctgccctccggtggatgtaccaccactcacagctgcagggtgcccacggggacgcggtcatcctgggcatgtccagcctggagcagctggagcagaacttggcagcaacagaggaagggcccctggagccggctgtcgtggatgcctttaatcaagcctggcatttggttgctcacgaatgtcccaactacttccgctaggcccatcatggctcaggctgcccaaggcttttctgtcacctcttttgttctctcacactgaccagtcttggccttaagctgacttagaagggtttttctgaattgtctagatccatgcattatttttctagcttcctgccttgctccctattcactttacactgtgaaaggtggggggtgagtcccacttgagcgcttcctgttgaataaagcaggcacttgacctggctgtagcctaggtcttgagtgaaccccaaaaacttgctttctctgctgttaacactttgtttcccatcctacctggggactgagaaagggcagaaccatgggctggagtcttcagagggcagaggtagtaggagggtcacagaagcacactgccctcccagggtctcctcgggcccctggtctgaatacccacctgacctctcaacattgaggtgtctctcactcttctacacacgatagaaaagagagtcatacacctgcagtacattttctctaattcagagttgcctcaatacattcttaggaatgaaacaactgggacaaagaaactaccattagagtcactaccaagaagaagaacacttcccaggatctgtggaacatcttgaagctctcaatcttagcctcctcttgtcttaactaaagcctcttgtcttttcacccattaggttctcagtcttggctctgggcctcctgttcggcatggggacagacataggcagccaaggtcctcatttcccttggaaacccctactccaaacaggaggcaccaaggctgagaataagaatccttggttcagtggttgctgaacctgctgcattcccagtgcaccaaaatccctccagccatgggcagggcagcaggcagcacttggagcagcttcttgaagcaatgaaagaggcccaacctggaaatttactttttcatttatatttattatttgttcttgagacaggctcttgctctgtcacctagaccggagtacagtggcatgatcactgctcacagcaattttgacctccggggctcaagggatcctcccacctcagcctcccgagaagtttttatttttattttttttgtggagtggagatctccctatgttgtcaccgtcttttctgtttacccgtaacaaaacagatgctcacccatgtggaatggtgtatcagttatctttgcacaacaaaccacactaataagttgcttgaaaagataaaatccaaggctggcacagtggctcatggctataatcccagcacgttgagagcccaaagcaggcagatcacttgagctcaggagtttgagaccagcctgggcaacatggtgaaaccctgtctctaccaaaaatacaaaaaattaatctgtgtgtggtggcacatacctgtggtcccagctactctggaggctgaggtgggaggatcgcctgggccccggaaacagaggttgcagtgggccgagatcatgccattacactctagcctgggtgacacagtcagacccatctcaaaaaaaaaaaaaaatcttattgatcaaaagatttgatataattcctattattcccagctgactttttcttaatactgaaattgacaaactaatcctaaagctcatatggaaattcaagggacccaggagaaccaaaacagtcttgaaaaacacatagttggaggacttatactttctgatttcaaaacttactacaaagctacagtaataaagacaatggttctggcataagaatagagcaactgaacagaactgagagtccagaaataaactcttactgattttagagttgagtgacaactcaatagggacagttcaatagggaaaagaatcatcttcaccaacatccagatgtcctcctgtgaaagagtgaagttggaccccttccccataccataaacaaaaaattaactcgaatcaccatctaaatgtataaggtaaactataaaactcttagaagaaaatacttgagtcaagtgtgactttggattaggc

SEQ ID NO: 353620 - DNA, 3050 bp, Homo sapiens
gcgcgcggctcctgggctgtcacagtctcccgttgccgccgtcatgtcccggcagctgtcgcgggcccggccagcctcggtgctgggcaccatggagatggggcgccgcatggacgcgcccgccagcgccgcggccgtgcgcgcctttctggagcgcggccacaccgaactggacacggccttcatgtacagcgacggccagtccgagaccatcctgggcggcctggggctcgggctgggcggtggcgactgcagagtgaaaattgccaccaaggccaacccttgggatggaaaatcactaaagcctgacagtgtccggtcccagctggagacgtcattgaagaggctgcagtgtccccaagtggacctcttctacctacacgcacctgaccacggcaccccggtggaagagacgctgcatgcctgccagcggctgcaccaggagggcaagttcgtggagcttggcctctccaactatgctagctgggaagtggccgagatctgtaccctctgcaagagcaatggctggatcctgcccactgtgtaccagggcatgtacaacgccaccacccggcaggtggaaacggagctcttcccctgcctcaggcactttggactgaggttctatgcctacaaccctctggctgggggcctgctgactggcaagtacaagtatgaggacaaggacgggaaacagcctgtgggccgcttctttgggaatagctgggctgagacctacaggaatcgcttctggaaggagcaccacttcgaggccattgcgttggtggagaaggccctgcaggccgcatatggcgccagcgcccccagtgtgacctcggctgccctccggtggatgtaccaccactcacagctgcagggtgcccacggggacgcggtcatcctgggcatgtccagcctggagcagctggagcagaacttggcagcaacagaggaagggcccctggagccggctgtcgtggatgcctttaatcaagcctggcatttggttgctcacgaatgtcccaactacttccgctaggcccatcatggctcaggctgcccaaggcttttctgtcacctcttttgttctctcacactgaccagtcttggccttaagctgacttagaagggtttttctgaattgtctagatccatgcattatttttctagcttcctgccttgctccctattcactttacactgtgaaaggtggggggtgagtcccacttgagcgcttcctgttgaataaagcaggcacttgacctggctgtagcctaggtcttgagtgaaccccaaaaacttgctttctctgctgttaacactttgtttcccatcctacctggggactgagaaagggcagaaccatgggctggagtcttcagagggcagaggtagtaggagggtcacagaagcacactgccctcccagggtctcctcgggcccctggtctgaatacccacctgacctctcaacattgaggtgtctctcactcttctacacacgatagaaaagagagtcatacacctgcagtacattttctctaattcagagttgcctcaatacattcttaggaatgaaacaactgggacaaagaaactaccattagagtcactaccaagaagaagaacacttcccaggatctgtggaacatcttgaagctctcaatcttagcctcctcttgtcttaactaaagcctcttgtcttttcacccattaggttctcagtcttggctctgggcctcctgttcggcatggggacagacataggcagccaaggtcctcatttcccttggaaacccctactccaaacaggaggcaccaaggctgagaataagaatccttggttcagtggttgctgaacctgctgcattcccagtgcaccaaaatccctccagccatgggcagggcagcaggcagcacttggagcagcttcttgaagcaatgaaagaggcccaacctggaaatttactttttcatttatatttattatttgttcttgagacaggctcttgctctgtcacctagaccggagtacagtggcatgatcactgctcacagcaattttgacctccggggctcaagggatcctcccacctcagcctcccgagaagtttttatttttattttttttgtggagtggagatctccctatgttgtcaccgtcttttctgtttacccgtaacaaaacagatgctcacccatgtggaatggtgtatcagttatctttgcacaacaaaccacactaataagttgcttgaaaagataaaatccaaggctggcacagtggctcatggctataatcccagcacgttgagagcccaaagcaggcagatcacttgagctcaggagtttgagaccagcctgggcaacatggtgaaaccctgtctctaccaaaaatacaaaaaattaatctgtgtgtggtggcacatacctgtggtcccagctactctggaggctgaggtgggaggatcgcctgggccccggaaacagaggttgcagtgggccgagatcatgccattacactctagcctgggtgacacagtcagacccatctcaaaaaaaaaaaaaaatcttattgatcaaaagatttgatataattcctattattcccagctgactttttcttaatactgaaattgacaaactaatcctaaagctcatatggaaattcaagggacccaggagaaccaaaacagtcttgaaaaacacatagttggaggacttatactttctgatttcaaaacttactacaaagctacagtaataaagacaatggttctggcataagaatagagcaactgaacagaactgagagtccagaaataaactcttactgattttagagttgagtgacaactcaatagggacagttcaatagggaaaagaatcatcttcaccaacatccagatgtcctcctgtgaaagagtgaagttggaccccttccccataccataaacaaaaaattaactcgaatcaccatctaaatgtataaggtaaactataaaactcttagaagaaaatacttgagtcaagtgtgactttggattaggc

SEQ ID NO: 353621 - DNA, 343 bp, Homo sapiens
cttaccctaatgagaaggaaccacaaaaccaatgctggtaatatgacaaaataaggctcttgaacagcaccccccaaaatcacactagtttaccagcaatggatccaacccaagaagaaatccctgatttacctgaaaaagaattcaggaggttagttattaagctaatcagggaggcaccagagaaaggtgaagctcaatgcaaggaaatccaaaaaacgatacaagaagtgacgggagaaatagccaagaaaatagatagcttaaagaaaaaaaaataaataaaaaatccaggaaaaattggacacacttatagtaatgcaaaatgctctggaaagtctca

SEQ ID NO: 353622 - DNA, 979 bp, Homo sapiens
agttgatgacgcacccatggcgcctggttgtctagacgagccggtgtaccgactccccggtggatgataactatgagtgcaaaagcaagacgcgcactttcctgtcacctcgccctttcaccccctcgggaagatcaaagtgtctttagcccaagcatggccttgagcgacttcatcacacctgcatgaggtcacaagcagtcactagcgcaggggggtgaggcgagttctgggtgaaagaaacggggcggggctgaggccaaggaagaggttggactgtgtctcgcatgctcctgacgcagaaggttttgaaccttttttcacctcgtctgaaatggctgcctcccagtgtctctgctgctcaaaatttctcttccagagacagaacctcgcctgtttcctcacaaacccacactgtggcagccttgttaatgcagatggccatggtgaagtgtggacagattggaataatatgtccaagtttttccagtatggatggcgatgcaccactaatgagaatacctattcaaaccgtaccctgatgggcaactggaaccaggaaagatatgacctgaggaatatcgtgcagcccaaacccttgccttcccagtttggacactactttgaaacaacatatgatacaagctacaacaacaaaatgccactttcaacacatagatttaagcgagagcctcactggttcccaggacatcaacctgaactggatcctccccgatacaaatgcacagaaaagtcaacttacatgaatagctattcaaagccttaaattgggcatcactcaggatgtgtataagatcttaatattgactagtttcacatccaggtttctaagaaatgataagatacttcacttttccagagtgaaatgtaggagggagcacattctaagtacagctaaaaatttagctcactgtaacacagtttcactctctgaataaataaagcaaaaaacacagta

SEQ ID NO: 353623 - DNA, 2607 bp, Homo sapiens
gtttcgcagaggggcgggctcgctacctcgctcgcgcaggcactgcagattctcccaggccagtggatcccgagccaactcggccgggcgctggaggcaggtggcgagacagaacctcgcctgtttcctcacaaacccacactgtggcagccttgttaatgcagatggccatggtgaagtgtggacagattggaataatatgtccaagtttttccagtatggatggcgatgcaccactaatgagaatacctattcaaaccgtaccctgatgggcaactggaaccaggaaagatatgacctgaggaatatcgtgcagcccaaacccttgccttcccagtttggacactactttgaaacaacatatgatacaagctacaacaacaaaatgccactttcaacacatagatttaagcgagagcctcactggttcccaggacatcaacctgaactggatcctccccgatacaaatgcacagaaaagtcaacttacatgaatagctattcaaagccttaaattgggcatcactcaggatgtgtataagatcttaatattgactagtttcacatccaggtttctaagaaatgataagatacttcacttttccagagtgaaatgtaggagggagcacattctaagtacagctaaaaatttagctcactgtaacacagtttcactctctgaataaataaagcaaaaaacacagtaaatattctttatccctttttttgttgttgttttaaccaagatttaaatgtcaaatttaatacagcaactcagttctacatttggggtgttgtagaagggccttaaaaagaattattttaggccaggcacggtggctcatgcctgtaatcccagcactttgggaggccgaggcaggtggatcacgtgaggtcaggagttcgagaccagcctgaccaacatggtgaaacactgtctctactaaaaacacaaaaattagctgagcatggtggctcacgcctgtaatcccagctactcaggaggctgaggcaggggaatcgcttgaacctgagaagtggaggttgtggtgagctgagatcatgccactgcactttagcctgggtgacagagcgagactctgtctcaaaaaaaaaaaaaaaaaaagaattatttctctgaagtctacaaccactgtggtcttcccttccttctgtcgtagcaagacctcagaatctagcataacttaggctaggtttggctagatgctttctgggtataagccagagtcgtatagtgcaactttgctgtgaccttagtgaacatcccctcttgaggactacaaaaacaaacgtaactttttaaaattattatggagaattttacgtaaaacaaaagtagacaggctagtctaatgaactcccatgtatcattacccagcatcaactatttatgactaatcttacctacttctactttgtcttattgaattaattttggagcagatcttagaaatagaatttaatctataaaaatcttggtgggctgggtacggtggctcatgcctgtaatcccagcactttgggaggctgaggtgggtggatcacctgaggtcaggagtccaagaccagcctggccaatgtggtgaaactccatctcttctaaaaatacaaaaattagctggtcttggtggcgggcgcctgtaatcccagctacttgggaggctgaggcaggagaattgcttgaacccaggaagcagaggttgcagtgagctgagacggtgccattgctctccagcctgggcgacaagagcgaaactccgtctcaaaaaaaaaaaagaaaagaaaaagaaaaaaaaaatcttggtatactggctgggcacagtggctcacacctaatcccagcactttgggaggctgaggcaggaggatagcttgaggctgggagttcaaaaccagcctgggcaacatagcaagaccccatctctaccaaaaaaaatttttttaaagatttcaggtatatttctcaaaaagataaggactgtcaattgtctactcccccccaacaaaggtcactaaggaaacctgttgactaaacaaagctcattaaacctattgtagtgtagcaaaggagaccatcaacttgacacagagtcttggtaatgattcaaagggaggatgttagagtaaggtatttataaggatttgagataagggtccaactggtttaaaatgagtcaaaatagggaactagtagagactgagaaagggttgtgaatagcttaggtttggtaaacttaggaaatcaacagttttaattttaatatggttaaactgattagtatttcctatttttttatctactgtgtaagaagaccctataatatatgggcattactgagagatactgcccatatgttgtcctcgtaagcaaggagatattttttatctcccatatattacctttcaaacctttgttactttagtttcgagatatagatccagtttatgttgttactcagtagtgaggaagtttcttttttttttttaaatggctatcaagttgtccccccattagttattgaaaagaccataattttttcactcctattcaatgccatttttattgtaaataaactatgtacatgt

SEQ ID NO: 353624 - DNA, 912 bp, Homo sapiens
agttgatgacgcacccatggcgcctggttgtctagacgagccggtgtaccgactccccggtggatgataactatgagtgcaaaagcaagacgcgcactttcctgtcacctcgccctttcaccccctcgggaagatcaaagtgtctttagcccaagcatggccttgagcgacttcatcacacctgcatgaggtcacaagcagtcactagcgcaggggggtgaggcgagttctgggtgaaagaaacggggcggggctgaggccaaggaagaggttggactgtgtctcgcatgctcctgacgcagaaggttttgaaccttttttcacctcgtctgaaatggctgcctcccagtgtctctgctgctcaaaatttctcttccagagacagaacctcgcctgtttcctcacaaacccacactgtggcagccttgttaatgcagatggccatggtgaagtgtggacagattggaataatatgtccaagtttttccagtatggatggcgatgcaccactaatgagaatacctattcaaaccgtaccctgatgggcaactggaaccaggaaagatatgacctgaggaatatcgtgcagcccaaacccttgccttcccaggatttaagcgagagcctcactggttcccaggacatcaacctgaactggatcctccccgatacaaatgcacagaaaagtcaacttacatgaatagctattcaaagccttaaattgggcatcactcaggatgtgtataagatcttaatattgactagtttcacatccaggtttctaagaaatgataagatacttcacttttccagagtgaaatgtaggagggagcacattctaagtacagctaaaaatttagctcactgtaacacagtttcactctctgaataaataaagcaaaaaacacagta

SEQ ID NO: 353625 - DNA, 706 bp, Homo sapiens
gtttcgcagaggggcgggctcgctacctcgctcgcgcaggcactgcagattctcccaggccagtggatcccgagccaactcggccgggcgctggaggcaggtggcgagacagaacctcgcctgtttcctcacaaacccacactgtggcagccttgttaatgcagatggccatggtgaagtgtggacagattggaataatatgtccaagtttttccagtatggatggcgatgcaccactaatgagaatacctattcaaaccgtaccctgatgggcaactggaaccaggaaagatatgacctgaggaatatcgtgcagcccaaacccttgccttcccagtttggacactactttgaaacaacatatgatacaagctacaacaacaaaatgccactttcaacacatagatttaagcgagagcctcactggttcccaggacatcaacctgaactggatcctccccgatacaaatgcacagaaaagtcaacttacatgaatagctattcaaagccttaaattgggcatcactcaggatgtgtataagatcttaatattgactagtttcacatccaggtttctaagaaatgataagatacttcacttttccagagtgaaatgtaggagggagcacattctaagtacagctaaaaatttagctcactgtaacacagtttcactctctgaataaataaagcaaaaaacacagta

SEQ ID NO: 353626 - DNA, 2880 bp, Homo sapiens
agttgatgacgcacccatggcgcctggttgtctagacgagccggtgtaccgactccccggtggatgataactatgagtgcaaaagcaagacgcgcactttcctgtcacctcgccctttcaccccctcgggaagatcaaagtgtctttagcccaagcatggccttgagcgacttcatcacacctgcatgaggtcacaagcagtcactagcgcaggggggtgaggcgagttctgggtgaaagaaacggggcggggctgaggccaaggaagaggttggactgtgtctcgcatgctcctgacgcagaaggttttgaaccttttttcacctcgtctgaaatggctgcctcccagtgtctctgctgctcaaaatttctcttccagagacagaacctcgcctgtttcctcacaaacccacactgtggcagccttgttaatgcagatggccatggtgaagtgtggacagattggaataatatgtccaagtttttccagtatggatggcgatgcaccactaatgagaatacctattcaaaccgtaccctgatgggcaactggaaccaggaaagatatgacctgaggaatatcgtgcagcccaaacccttgccttcccagtttggacactactttgaaacaacatatgatacaagctacaacaacaaaatgccactttcaacacatagatttaagcgagagcctcactggttcccaggacatcaacctgaactggatcctccccgatacaaatgcacagaaaagtcaacttacatgaatagctattcaaagccttaaattgggcatcactcaggatgtgtataagatcttaatattgactagtttcacatccaggtttctaagaaatgataagatacttcacttttccagagtgaaatgtaggagggagcacattctaagtacagctaaaaatttagctcactgtaacacagtttcactctctgaataaataaagcaaaaaacacagtaaatattctttatccctttttttgttgttgttttaaccaagatttaaatgtcaaatttaatacagcaactcagttctacatttggggtgttgtagaagggccttaaaaagaattattttaggccaggcacggtggctcatgcctgtaatcccagcactttgggaggccgaggcaggtggatcacgtgaggtcaggagttcgagaccagcctgaccaacatggtgaaacactgtctctactaaaaacacaaaaattagctgagcatggtggctcacgcctgtaatcccagctactcaggaggctgaggcaggggaatcgcttgaacctgagaagtggaggttgtggtgagctgagatcatgccactgcactttagcctgggtgacagagcgagactctgtctcaaaaaaaaaaaaaaaaaaagaattatttctctgaagtctacaaccactgtggtcttcccttccttctgtcgtagcaagacctcagaatctagcataacttaggctaggtttggctagatgctttctgggtataagccagagtcgtatagtgcaactttgctgtgaccttagtgaacatcccctcttgaggactacaaaaacaaacgtaactttttaaaattattatggagaattttacgtaaaacaaaagtagacaggctagtctaatgaactcccatgtatcattacccagcatcaactatttatgactaatcttacctacttctactttgtcttattgaattaattttggagcagatcttagaaatagaatttaatctataaaaatcttggtgggctgggtacggtggctcatgcctgtaatcccagcactttgggaggctgaggtgggtggatcacctgaggtcaggagtccaagaccagcctggccaatgtggtgaaactccatctcttctaaaaatacaaaaattagctggtcttggtggcgggcgcctgtaatcccagctacttgggaggctgaggcaggagaattgcttgaacccaggaagcagaggttgcagtgagctgagacggtgccattgctctccagcctgggcgacaagagcgaaactccgtctcaaaaaaaaaaaagaaaagaaaaagaaaaaaaaaatcttggtatactggctgggcacagtggctcacacctaatcccagcactttgggaggctgaggcaggaggatagcttgaggctgggagttcaaaaccagcctgggcaacatagcaagaccccatctctaccaaaaaaaatttttttaaagatttcaggtatatttctcaaaaagataaggactgtcaattgtctactcccccccaacaaaggtcactaaggaaacctgttgactaaacaaagctcattaaacctattgtagtgtagcaaaggagaccatcaacttgacacagagtcttggtaatgattcaaagggaggatgttagagtaaggtatttataaggatttgagataagggtccaactggtttaaaatgagtcaaaatagggaactagtagagactgagaaagggttgtgaatagcttaggtttggtaaacttaggaaatcaacagttttaattttaatatggttaaactgattagtatttcctatttttttatctactgtgtaagaagaccctataatatatgggcattactgagagatactgcccatatgttgtcctcgtaagcaaggagatattttttatctcccatatattacctttcaaacctttgttactttagtttcgagatatagatccagtttatgttgttactcagtagtgaggaagtttcttttttttttttaaatggctatcaagttgtccccccattagttattgaaaagaccataattttttcactcctattcaatgccatttttattgtaaataaactatgtacatgt

SEQ ID NO: 353627 - DNA, 2813 bp, Homo sapiens
agttgatgacgcacccatggcgcctggttgtctagacgagccggtgtaccgactccccggtggatgataactatgagtgcaaaagcaagacgcgcactttcctgtcacctcgccctttcaccccctcgggaagatcaaagtgtctttagcccaagcatggccttgagcgacttcatcacacctgcatgaggtcacaagcagtcactagcgcaggggggtgaggcgagttctgggtgaaagaaacggggcggggctgaggccaaggaagaggttggactgtgtctcgcatgctcctgacgcagaaggttttgaaccttttttcacctcgtctgaaatggctgcctcccagtgtctctgctgctcaaaatttctcttccagagacagaacctcgcctgtttcctcacaaacccacactgtggcagccttgttaatgcagatggccatggtgaagtgtggacagattggaataatatgtccaagtttttccagtatggatggcgatgcaccactaatgagaatacctattcaaaccgtaccctgatgggcaactggaaccaggaaagatatgacctgaggaatatcgtgcagcccaaacccttgccttcccaggatttaagcgagagcctcactggttcccaggacatcaacctgaactggatcctccccgatacaaatgcacagaaaagtcaacttacatgaatagctattcaaagccttaaattgggcatcactcaggatgtgtataagatcttaatattgactagtttcacatccaggtttctaagaaatgataagatacttcacttttccagagtgaaatgtaggagggagcacattctaagtacagctaaaaatttagctcactgtaacacagtttcactctctgaataaataaagcaaaaaacacagtaaatattctttatccctttttttgttgttgttttaaccaagatttaaatgtcaaatttaatacagcaactcagttctacatttggggtgttgtagaagggccttaaaaagaattattttaggccaggcacggtggctcatgcctgtaatcccagcactttgggaggccgaggcaggtggatcacgtgaggtcaggagttcgagaccagcctgaccaacatggtgaaacactgtctctactaaaaacacaaaaattagctgagcatggtggctcacgcctgtaatcccagctactcaggaggctgaggcaggggaatcgcttgaacctgagaagtggaggttgtggtgagctgagatcatgccactgcactttagcctgggtgacagagcgagactctgtctcaaaaaaaaaaaaaaaaaaagaattatttctctgaagtctacaaccactgtggtcttcccttccttctgtcgtagcaagacctcagaatctagcataacttaggctaggtttggctagatgctttctgggtataagccagagtcgtatagtgcaactttgctgtgaccttagtgaacatcccctcttgaggactacaaaaacaaacgtaactttttaaaattattatggagaattttacgtaaaacaaaagtagacaggctagtctaatgaactcccatgtatcattacccagcatcaactatttatgactaatcttacctacttctactttgtcttattgaattaattttggagcagatcttagaaatagaatttaatctataaaaatcttggtgggctgggtacggtggctcatgcctgtaatcccagcactttgggaggctgaggtgggtggatcacctgaggtcaggagtccaagaccagcctggccaatgtggtgaaactccatctcttctaaaaatacaaaaattagctggtcttggtggcgggcgcctgtaatcccagctacttgggaggctgaggcaggagaattgcttgaacccaggaagcagaggttgcagtgagctgagacggtgccattgctctccagcctgggcgacaagagcgaaactccgtctcaaaaaaaaaaaagaaaagaaaaagaaaaaaaaaatcttggtatactggctgggcacagtggctcacacctaatcccagcactttgggaggctgaggcaggaggatagcttgaggctgggagttcaaaaccagcctgggcaacatagcaagaccccatctctaccaaaaaaaatttttttaaagatttcaggtatatttctcaaaaagataaggactgtcaattgtctactcccccccaacaaaggtcactaaggaaacctgttgactaaacaaagctcattaaacctattgtagtgtagcaaaggagaccatcaacttgacacagagtcttggtaatgattcaaagggaggatgttagagtaaggtatttataaggatttgagataagggtccaactggtttaaaatgagtcaaaatagggaactagtagagactgagaaagggttgtgaatagcttaggtttggtaaacttaggaaatcaacagttttaattttaatatggttaaactgattagtatttcctatttttttatctactgtgtaagaagaccctataatatatgggcattactgagagatactgcccatatgttgtcctcgtaagcaaggagatattttttatctcccatatattacctttcaaacctttgttactttagtttcgagatatagatccagtttatgttgttactcagtagtgaggaagtttcttttttttttttaaatggctatcaagttgtccccccattagttattgaaaagaccataattttttcactcctattcaatgccatttttattgtaaataaactatgtacatgt

SEQ ID NO: 353628 - DNA, 2342 bp, Homo sapiens
agcggggtgcgtccgcgggtggctgccccgcaggtgcgcgcggccggggctggcggcgactctctccaccgggccgcccgggaggctcatgcagcgcggctgggtcccgcggcgcccggatcggggaagtgaaagtgcctcggaggaggagggccggtccggcagtgcagccgcctcacaggtcggcggacgggccaggcgggcggcctcctgaaccgaaccgaatcggctcctcgggccgtcgtcctcccgcccctcctcgcccgccgccggagttttctttcggtttcttccaagattcctggccttccctcgacggagccgggcccagtgcgggggcgcagggcgcgggagctccacctcctcggctttccctgcgtccagaggctggcatggcgcgggccgagtactgagcgcacggtcggggcacagcagggccggggggtgcagctggctcgcgcctcctctccggccgccgtctcctccggtccccggcgaaagccattgagacaccagctggacgtcacgcgccggagcatgtctgggagtcagagcgaggtggctccatccccgcagagtccgcggagccccgagatgggacgggacttgcggcccgggtcccgcgtgctcctgctcctgcttctgctcctgctggtgtacctgactcagccaggcaatggcaacgagggcagcgtcactggaagttgttattgtggtaaaagaatttcttccgactccccgccatcggttcagttcatgaatcgtctccggaaacacctgagagcttaccatcggtgtctatactacacgaggttccagctcctttcctggagcgtgtgtgtggaggcaacaaggacccatgggttcaggaattgatgagctgtcttgatctcaaagaatgtggacatgcttactcggggattgtggcccaccagaagcatttacttcctaccagccccccaatttctcaggcctcagagggggcatcttcagatatccacacccctgcccagatgctcctgtccaccttgcagtccactcagcgccccaccctcccagtaggatcactgtcctcggacaaagagctcactcgtcccaatgaaaccaccattcacactgcgggccacagtctggcagttgggcctgaggctggggagaaccagaagcagccggaaaaaaatgctggtcccacagccaggacatcagccacagtgccggtcctgtgcctcctggccatcatcttcatcctcaccgcagccctttcctatgtgctgtgcaagaggaggagggggcagtcaccgcagtcctctccagatctgccggttcattatatacctgtggcacctgactctaatacctgagccaagaatggaagcttgtgaggagacggactctatgttgcccaggctgttatggaactcctgagtcaagtgatcctcccaccttggcctctgaaggtgcgaggattataggcgtcacctaccacatccagcctacacgtatttgttaatatctaacataggactaaccagccactgccctctcttaggcccctcatttaaaaacggttatactataaaatctgcttttcacactgggtgataataacttggacaaattctatgtgtattttgttttgttttgctttgctttgttttgagacggagtctcgctctgtcatccaggctggagtgcagtggcatgatctcggctcactgcaacccccatctcccaggttcaagcgattctcctgcctcctcctgagtagctgggactacaggtgctcaccaccacacccggctaattttttgtatttttagtagagacggggtttcaccatgttgaccaggctggtctcgaactcctgacctggtgatctgcccacccaggcctcccaaagtgctgggattaaaggtgtgagccaccatgcctggccctatgtgtgttttttaactactaaaaattatttttgtaatgattgagtcttctttatggaaacaactggcctcagcccttgcgcccttactgtgattcctggcttcattttttgctgatggttccccctcgtcccaaatctctctcccagtacaccagttgttcctcccccacctcagccctctcctgcatcctcctgtacccgcaacgaaggcctgggctttcccaccctccctccttagcaggtgccgtgctgggacaccatacgggttggtttcacctcctcagtcccttgcctaccccagtgagagtctgatcttgtttttattgttattgcttttattattattgcttttattatcattaaaactctagttcttgttttgtctctccgaaaaaaaaaaaag

SEQ ID NO: 353629 - DNA, 1607 bp, Homo sapiens
agcggggtgcgtccgcgggtggctgccccgcaggtgcgcgcggccggggctggcggcgactctctccaccgggccgcccgggaggctcatgcagcgcggctgggtcccgcggcgcccggatcggggaagtgaaagtgcctcggaggaggagggccggtccggcagtgcagccgcctcacaggtcggcggacgggccaggcgggcggcctcctgaaccgaaccgaatcggctcctcgggccgtcgtcctcccgcccctcctcgcccgccgccggagttttctttcggtttcttccaagattcctggccttccctcgacggagccgggcccagtgcgggggcgcagggcgcgggagctccacctcctcggctttccctgcgtccagaggctggcatggcgcgggccgagtactgagcgcacggtcggggcacagcagggccggggggtgcagctggctcgcgcctcctctccggccgccgtctcctccggtccccggcgaaagccattgagacaccagctggacgtcacgcgccggagcatgtctgggagtcagagcgaggtggctccatccccgcagagtccgcggagccccgagatgggacgggacttgcggcccgggtcccgcgtgctcctgctcctgcttctgctcctgctggtgtacctgactcagccaggcaatggcaacgagggcagcgtcactggaagttgttattgtggtaaaagaatttcttccgactccccgccatcggttcagttcatgaatcgtctccggaaacacctgagagcttaccatcggtgtctatactacacgaggttccagctcctttcctggagcgtgtgtgtggaggcaacaaggacccatgggttcaggaattgatgagctgtcttgatctcaaagaatgtggacatgcttactcggggattgtggcccaccagaagcatttacttcctaccagccccccaatttctcaggcctcagagggggcatcttcagatatccacacccctgcccagatgctcctgtccaccttgcagtccactcagcgccccaccctcccagtaggatcactgtcctcggacaaagagctcactcgtcccaatgaaaccaccattcacactgcgggccacagtctggcagttgggcctgaggctggggagaaccagaagcagccggaaaaaaatgctggtcccacagccaggacatcagccacagtgccggtcctgtgcctcctggccatcatcttcatcctcaccgcagccctttcctatgtgctgtgcaagaggaggagggggcagtcaccgcagtcctctccagatctgccggttcattatatacctgtggcacctgactctaatacctgagccaagaatggaagcttgtgaggagacggactctatgttgcccaggctgttatggaactcctgagtcaagtgatcctcccaccttggcctctgaaggtgcgaggattataggcgtcacctaccacatccagcctacacgtatttgttaatatctaacataggactaaccagccactgccctctcttaggcccctcatttaaaaacggttatactataaaatctgcttttcacactgggtgataata

SEQ ID NO: 353630 - DNA, 1561 bp, Homo sapiens
agcggggtgcgtccgcgggtggctgccccgcaggtgcgcgcggccggggctggcggcgactctctccaccgggccgcccgggaggctcatgcagcgcggctgggtcccgcggcgcccggatcggggaagtgaaagtgcctcggaggaggagggccggtccggcagtgcagccgcctcacaggtcggcggacgggccaggcgggcggcctcctgaaccgaaccgaatcggctcctcgggccgtcgtcctcccgcccctcctcgcccgccgccggagttttctttcggtttcttccaagattcctggccttccctcgacggagccgggcccagtgcgggggcgcagggcgcgggagctccacctcctcggctttccctgcgtccagaggctggcatggcgcgggccgagtactgagcgcacggtcggggcacagcagggccggggggtgcagctggctcgcgcctcctctccggccgccgtctcctccggtccccggcgaaagccattgagacaccagctggacgtcacgcgccggagcatgtctgggagtcagagcgaggtggctccatccccgcagagtccgcggagccccgagatgggacgggacttgcggcccgggtcccgcgtgctcctgctcctgcttctgctcctgctggtgtacctgactcagccaggcaatggcaacgagggcagcgtcactggaagttgttattgtggtaaaagaatttcttccgactccccgccatcggttcagttcatgaatcgtctccggaaacacctgagagcttaccatcggtgtctatactacacgaggttccagctcctttcctggagcgtgtgtgtggaggcaacaaggacccatgggttcaggaattgatgagctgtcttgatctcaaagaatgtggacatgcttactcggggattgtggcccaccagaagcatttacttcctaccagccccccaatttctcaggcctcagagggggcatcttcagatatccacacccctgcccagatgctcctgtccaccttgcagtccactcagcgccccaccctcccagtaggatcactgtcctcggacaaagagctcactcgtcccaatgaaaccaccattcacactgcgggccacagtctggcagttgggcctgaggctggggagaaccagaagcagccggaaaaaaatgctggtcccacagccaggacatcagccacagtgccggtcctgtgcctcctggccatcatcttcatcctcaccgcagccctttcctatgtgctgtgcaagaggaggagggggcagtcaccgcagtcctctccagatctgccggttcattatatacctgtggcacctgactctaatacctgagccaagaatggaagcttgtgaggagacggactctatgttgcccaggctgttatggaactcctgagtcaagtgatcctcccaccttggcctctgaaggtgcgaggattataggcgtcacctaccacatccagcctacacgtatttgttaatatctaacataggactaaccagcacaacctggaacagcacaacctggacca

SEQ ID NO: 353631 - DNA, 2445 bp, Homo sapiens
agcggggtgcgtccgcgggtggctgccccgcaggtgcgcgcggccggggctggcggcgactctctccaccgggccgcccgggaggctcatgcagcgcggctgggtcccgcggcgcccggatcggggaagtgaaagtgcctcggaggaggagggccggtccggcagtgcagccgcctcacaggtcggcggacgggccaggcgggcggcctcctgaaccgaaccgaatcggctcctcgggccgtcgtcctcccgcccctcctcgcccgccgccggagttttctttcggtttcttccaagattcctggccttccctcgacggagccgggcccagtgcgggggcgcagggcgcgggagctccacctcctcggctttccctgcgtccagaggctggcatggcgcgggccgagtactgagcgcacggtcggggcacagcagggccggggggtgcagctggctcgcgcctcctctccggccgccgtctcctccggtccccggcgaaagccattgagacaccagctggacgtcacgcgccggagcatgtctgggagtcagagcgaggtggctccatccccgcagagtccgcggagccccgagatgggacgggacttgcggcccgggtcccgcgtgctcctgctcctgcttctgctcctgctggtgtacctgactcagccaggcaatggcaacgagggcagcgtcactggaagttgttattgtggtaaaagaatttcttccgactccccgccatcggttcagttcatgaatcgtctccggaaacacctgagagcttaccatcggtgtctatactacacgaggttccagctcctttcctggagcgtgtgtgtggaggcaacaaggacccatgggttcaggaattgatgagctgtcttgatctcaaagaatgtggacatgcttactcggggattgtggcccaccagaagcatttacttcctaccagccccccaatttctcaggcctcagagggggcatcttcagatatccacacccctgcccagatgctcctgtccaccttgcagtccactcagcgccccaccctcccagtaggatcactgtcctcggacaaagagctcactcgtcccaatgaaaccaccattcacactgcgggccacagtctggcagttgggcctgaggctggggagaaccagaagcagccggaaaaaaatgctggtcccacagccaggacatcagccacagtgccggtcctgtgcctcctggccatcatcttcatcctcaccgcagccctttcctatgtgctgtgcaagaggaggagggggcagtcaccgcagtcctctccagatctgccggttcattatatacctgtggcacctgactctaatacctgagccaagaatggaagcttgtgagggtaaactgtggcttattcttacaaaaagtgtaataaaggagactgacccctgacaacatggtaggcactgtatacatacttgtttttgttttttgttttttagagacggactctatgttgcccaggctgttatggaactcctgagtcaagtgatcctcccaccttggcctctgaaggtgcgaggattataggcgtcacctaccacatccagcctacacgtatttgttaatatctaacataggactaaccagccactgccctctcttaggcccctcatttaaaaacggttatactataaaatctgcttttcacactgggtgataataacttggacaaattctatgtgtattttgttttgttttgctttgctttgttttgagacggagtctcgctctgtcatccaggctggagtgcagtggcatgatctcggctcactgcaacccccatctcccaggttcaagcgattctcctgcctcctcctgagtagctgggactacaggtgctcaccaccacacccggctaattttttgtatttttagtagagacggggtttcaccatgttgaccaggctggtctcgaactcctgacctggtgatctgcccacccaggcctcccaaagtgctgggattaaaggtgtgagccaccatgcctggccctatgtgtgttttttaactactaaaaattatttttgtaatgattgagtcttctttatggaaacaactggcctcagcccttgcgcccttactgtgattcctggcttcattttttgctgatggttccccctcgtcccaaatctctctcccagtacaccagttgttcctcccccacctcagccctctcctgcatcctcctgtacccgcaacgaaggcctgggctttcccaccctccctccttagcaggtgccgtgctgggacaccatacgggttggtttcacctcctcagtcccttgcctaccccagtgagagtctgatcttgtttttattgttattgcttttattattattgcttttattatcattaaaactctagttcttgttttgtctctccgaaaaaaaaaaaag

SEQ ID NO: 353632 - DNA, 1581 bp, Homo sapiens
ccggggaaggaaagaaggcgccgcagctaagcccaggtctctcctccgcaggttccagctcctttcctggagcgtgtgtgtggaggcaacaaggacccatgggttcaggaattgatgagctgtcttgatctcaaagaatgtggacatgcttactcggggattgtggcccaccagaagcatttacttcctaccagccccccaatttctcaggcctcagagggggcatcttcagatatccacacccctgcccagatgctcctgtccaccttgcagtccactcagcgccccaccctcccagtaggatcactgtcctcggacaaagagctcactcgtcccaatgaaaccaccattcacactgcgggccacagtctggcagttgggcctgaggctggggagaaccagaagcagccggaaaaaaatgctggtcccacagccaggacatcagccacagtgccggtcctgtgcctcctggccatcatcttcatcctcaccgcagccctttcctatgtgctgtgcaagaggaggagggggcagtcaccgcagtcctctccagatctgccggttcattatatacctgtggcacctgactctaatacctgagccaagaatggaagcttgtgaggagacggactctatgttgcccaggctgttatggaactcctgagtcaagtgatcctcccaccttggcctctgaaggtgcgaggattataggcgtcacctaccacatccagcctacacgtatttgttaatatctaacataggactaaccagccactgccctctcttaggcccctcatttaaaaacggttatactataaaatctgcttttcacactgggtgataataacttggacaaattctatgtgtattttgttttgttttgctttgctttgttttgagacggagtctcgctctgtcatccaggctggagtgcagtggcatgatctcggctcactgcaacccccatctcccaggttcaagcgattctcctgcctcctcctgagtagctgggactacaggtgctcaccaccacacccggctaattttttgtatttttagtagagacggggtttcaccatgttgaccaggctggtctcgaactcctgacctggtgatctgcccacccaggcctcccaaagtgctgggattaaaggtgtgagccaccatgcctggccctatgtgtgttttttaactactaaaaattatttttgtaatgattgagtcttctttatggaaacaactggcctcagcccttgcgcccttactgtgattcctggcttcattttttgctgatggttccccctcgtcccaaatctctctcccagtacaccagttgttcctcccccacctcagccctctcctgcatcctcctgtacccgcaacgaaggcctgggctttcccaccctccctccttagcaggtgccgtgctgggacaccatacgggttggtttcacctcctcagtcccttgcctaccccagtgagagtctgatcttgtttttattgttattgcttttattattattgcttttattatcattaaaactctagttcttgttttgtctctccgaaaaaaaaaaaag

SEQ ID NO: 353633 - DNA, 1522 bp, Homo sapiens
agcggggtgcgtccgcgggtggctgccccgcaggtgcgcgcggccggggctggcggcgactctctccaccgggccgcccgggaggctcatgcagcgcggctgggtcccgcggcgcccggatcggggaagtgaaagtgcctcggaggaggagggccggtccggcagtgcagccgcctcacaggtcggcggacgggccaggcgggcggcctcctgaaccgaaccgaatcggctcctcgggccgtcgtcctcccgcccctcctcgcccgccgccggagttttctttcggtttcttccaagattcctggccttccctcgacggagccgggcccagtgcgggggcgcagggcgcgggagctccacctcctcggctttccctgcgtccagaggctggcatggcgcgggccgagtactgagcgcacggtcggggcacagcagggccggggggtgcagctggctcgcgcctcctctccggccgccgtctcctccggtccccggcgaaagccattgagacaccagctggacgtcacgcgccggagcatgtctgggagtcagagcgaggtggctccatccccgcagagtccgcggagccccgagatgggacgggacttgcggcccgggtcccgcgtgctcctgctcctgcttctgctcctgctggtgtacctgactcagccaggcaatggcaacgagggcagcgtcactggaagttgttattgtggtaaaagaatttcttccgactccccgccatcggttcagttcatgaatcgtctccggaaacacctgagagcttaccatcggtgtctatactacacgaggttccagctcctttcctggagcgtgtgtgtggaggcaacaaggacccatgggttcaggaattgatgagctgtcttgatctcaaagaatgtggacatgcttactcggggattgtggcccaccagaagcatttacttcctaccagccccccaatttctcaggcctcagagggggcatcttcagatatccacacccctgcccagatgctcctgtccaccttgcagtccactcagcgccccaccctcccagtaggatcactgtcctcggacaaagagctcactcgtcccaatgaaaccaccattcacactgcgggccacagtctggcagttgggcctgaggctggggagaaccagaagcagccggaaaaaaatgctggtcccacagccaggacatcagccacagtgccggtcctgtgcctcctggccatcatcttcatcctcaccgcagccctttcctatgtgctgtgcaagaggaggagggggcagtcaccgcagtcctctccagatctgccggttcattatatacctgtggcacctgactctaatacctgagccaagaatggaagcttgtgaggagacggactctatgttgcccaggctgttatggaactcctgagtcaagtgatcctcccaccttggcctctgaaggtgcgaggattataggcgtcacctaccacatagttcagctctgacggtaccgagctcgattctct

SEQ ID NO: 353634 - DNA, 1226 bp, Homo sapiens
agcggggtgcgtccgcgggtggctgccccgcaggtgcgcgcggccggggctggcggcgactctctccaccgggccgcccgggaggctcatgcagcgcggctgggtcccgcggcgcccggatcggggaagtgaaagtgcctcggaggaggagggccggtccggcagtgcagccgcctcacaggtcggcggacgggccaggcgggcggcctcctgaaccgaaccgaatcggctcctcgggccgtcgtcctcccgcccctcctcgcccgccgccggagttttctttcggtttcttccaagattcctggccttccctcgacggagccgggcccagtgcgggggcgcagggcgcgggagctccacctcctcggctttccctgcgtccagaggctggcatggcgcgggccgagtactgagcgcacggtcggggcacagcagggccggggggtgcagctggctcgcgcctcctctccggccgccgtctcctccggtccccggcgaaagccattgagacaccagctggacgtcacgcgccggagcatgtctgggagtcagagcgaggtggctccatccccgcagagtccgcggagccccgagatgggacgggacttgcggcccgggtcccgcgtgctcctgctcctgcttctgctcctgctggtgtacctgactcagccaggcaatggcaacgagggcagcgtcactggaagttgttattgtggtaaaagaatttcttccgactccccgccatcggttcagttcatgaatcgtctccggaaacacctgagagcttaccatcggtgtctatactacacgaggttccagctcctttcctggagcgtgtgtgtggaggcaacaaggacccatgggttcaggaattgatgagctgtcttgatctcaaagaatgtggacatgcttactcggggattgtggcccaccagaagcatttacttcctaccagccccccaatttctcaggcctcagagggggcatcttcagatatccacacccctgcccagatgctcctgtccaccttgcagtccactcagcgccccatctctactaaaaatacaaaaattagctgggcgtggtggcacgcatctgtagtcccagctactcaggaggctgagacaagagaatcgcttgaacatgggaggcggaggttgcagtgagctgagattgcaccattgcactccagcctgggcgacagagcgtgaccctctctcaaaaca

SEQ ID NO: 353635 - DNA, 435 bp, Homo sapiens
gcaggttattccgattctcatcacacactaacaaaaaaaaaaattcaacaaaatgagggaaagaaactatcatggcaccatcctcaagcatgaacaatttctaagagtctggagaaaagcaggagggaaggcaaaccacaaagaagaaacctcaaaataggtgactgccttcctttcatcacgaagggccattcaaattttctgcccatgcctccagggactcccctatggctgctgcagctgataaagatgcatccaagaaaacttccaaggaatggtcaatgtgtggcacagctaactcagtgaaggccaaactgctgaagaatctatttgtcttaactagctgaattcaccaatctgtttcccaaaaacttggtttgagaaatattttcctgtaatatcttcagtgaataaaagatcttattcttataaata

SEQ ID NO: 353636 - DNA, 645 bp, Homo sapiens
gcaggttattccgattctcatcacacactaacaaaaaaaaaaattcaacaaaatgagggaaagaaactatcatggcaccatcctcaagcatgaacaatttctaagagtctggagaaaagcaggagggaaggcaaaccacaaagaagaaacctcaaaatagaaaatgccatgatcatatcagattccttatggatgactttcgcctttccacctggatagcccagatcagcttcaacctagaaaacattcatcagcagttttagttgctgcagcacagctctatttagagttatgcacatcccataagatttaaatgtaggataagaagaaaatgtagcagcagcagcagcagcagcagcaagaaaaaagggtgactgccttcctttcatcacgaagggccattcaaattttctgcccatgcctccagggactcccctatggctgctgcagctgataaagatgcatccaagaaaacttccaaggaatggtcaatgtgtggcacagctaactcagtgaaggccaaactgctgaagaatctatttgtcttaactagctgaattcaccaatctgtttcccaaaaacttggtttgagaaatattttcctgtaatatcttcagtgaataaaagatcttattcttataaata

SEQ ID NO: 353637 - DNA, 588 bp, Homo sapiens
gcaggttattccgattctcatcacacactaacaaaaaaaaaaattcaacaaaatgagggaaagaaactatcatggcaccatcctcaagcatgaacaatttctaagagtctggagaaaagcaggagggaaggcaaaccacaaagaagaaacctcaaaatagaaaatgccatgatcatatcagattccttatggatgactttcgcctttccacctggatagcccagatcagcttcaacctagaaaacattcatcagcagttttagttgctgcagcacagctctatttagagttatgcacatcccataagatttaaatgtaggataagaagaaaatgtagcagcagcagcagcagcagcagcaagaaaaaaggggactcccctatggctgctgcagctgataaagatgcatccaagaaaacttccaaggaatggtcaatgtgtggcacagctaactcagtgaaggccaaactgctgaagaatctatttgtcttaactagctgaattcaccaatctgtttcccaaaaacttggtttgagaaatattttcctgtaatatcttcagtgaataaaagatcttattcttataaata

SEQ ID NO: 353638 - DNA, 1519 bp, Homo sapiens
gcaggttattccgattctcatcacacactaacaaaaaaaaaaattcaacaaaatgagggaaagaaactatcatggcaccatcctcaagcatgaacaatttctaagagtctggagaaaagcaggagggaaggcaaaccacaaagaagaaacctcaaaataggtgactgccttcctttcatcacgaagggccattcaaattttctgcccatgcctccagggactcccctatggctgctgcagctgataaagatgcatccaagaaaacttccaaggaatggtcaatgtgtggcacagctaactcagtgaaggccaaactgctgaagaatctatttgtcttaactagctgaattcaccaatctgtttcccaaaaacttggtttgagaaatattttcctgtaatatcttcagtgaataaaagatcttattcttataaataaatatataacttcagcatttctcagggattttttttaaatgcacccagcatttttaggattagcctgccaattttattggtcaattttctgaatttgccaaatttagtgattaccaaaatcctatttgacaattttaaagatgtaagcactcttactggattgggtagagttttagtaagttttgcatatttctgagcctaacgacgagtttttattttgtcctaacagccttaatgttttattcataatttttttcttaataaaacaccttttttttcagatctgagctattcaaaacagcaatcactaaccatatgtaactatttaaatttagatcaattaaaattaaaattcagtttctcaatcatgctagccacatttcaagtactcagtaaccacatgtggctggtgactactatgttggactatgcagatacagatttccatcatcacagaaagttctatgggacagtactggacaagacagtaattccattcaatgttttaaaattaaaagggtacatgataaaaattcttccatcctaactcccagccatgtacttcccttccttggagccaactgatgcttatatagcactttaagaaacattccgtttatctctgtcctacttccctgttcatggggacccactgctggaagaaaaatagaacacacagagactgaggggcataatggaagggagactaaggggcggagagggggagaattagttaaggaagaagcaaactcgtggggaagggcaagacgagaatgggagggtccaagaaacccagacacctggcttcccacagcactctacactctgacaagtcaaccagtcaagctgctatcaaccttaccaatacttaaaacatacttgtgataaatcattaattttaataatttgaagaacaaaacactcagaaaattgatcactcaatgaactggttttctgtgaataacagagcccctaattgaccagaaatcttattgattaagacagggtctcactttgttacccaggatggagtgcagtggtgtgtgatctcagctcactacaacctccacctcctgggctcaag

SEQ ID NO: 353639 - DNA, 1462 bp, Homo sapiens
gcaggttattccgattctcatcacacactaacaaaaaaaaaaattcaacaaaatgagggaaagaaactatcatggcaccatcctcaagcatgaacaatttctaagagtctggagaaaagcaggagggaaggcaaaccacaaagaagaaacctcaaaataggtgactgccttcctttcatcacgaagggccattcaaattttctgcccatgcctccagggactcccctatggctgctgcagctgataaagatgcatccaagaaaacttccaaggaatggtcaatgtgtggcacagctaactcagtgaaggccaaactgctgaagaatctatttgtcttaactagctgaattcaccaatctgtttcccaaaaacttggtttgagaaatattttcctgtaatatcttcagtgaataaaagatcttattcttataaataaatatataacttcagcatttctcagggattttttttaaatgcacccagcatttttaggattagcctgccaattttattggtcaattttctgaatttgccaaatttagtgattaccaaaatcctatttgacaattttaaagatgtaagcactcttactggattgggtagagttttagtaagttttgcatatttctgagcctaacgacgagtttttattttgtcctaacagccttaatgttttattcataatttttttcttaataaaacaccttttttttcagatctgagctattcaaaacagcaatcactaaccatatgtaactatttaaatttagatcaattaaaattaaaattcagtttctcaatcatgctagccacatttcaagtactcagtaaccacatgtggctggtgactactatgttggactatgcagatacagatttccatcatcacagaaagttctatgggacagtactggacaagacagtaattccattcaatgttttaaaattaaaagggtacatgataaaaattcttccatcctaactcccagccatgtacttcccttccttggagccaactgatgcttatatagcactttaagaaacattccgtttatctctgtcctacttccctgttcatggggacccactgctggaagaaaaatagaacacacagagactgaggggcataatggaagggagactaaggggcggagagggggagaattagttaaggaagaagcaaactcgtggggaagggcaagacgagaatgggagggtccaagaaacccagacacctggcttcccacagcactctacactctgacaagtcaaccagtcaagaatttgaagaacaaaacactcagaaaattgatcactcaatgaactggttttctgtgaataacagagcccctaattgaccagaaatcttattgattaagacagggtctcactttgttacccaggatggagtgcagtggtgtgtgatctcagctcactacaacctccacctcctgggctcaag

SEQ ID NO: 353640 - DNA, 722 bp, Homo sapiens
acctctctgtttcactatctagaaacaccagtgcccctccgctgtcacctctgcagctgtccttgcccccactttctaagccagcacaaagcatgttagcagttacacttccccttggatagggtggcttttcatatgcagcagtacatttttgatggtcaacaatcggtatgtcgacatacattagatttctagcaagaaaacccctttgggttaatccccatccagatgcagttccaatgtcatctgtcctcataaaggattcagcttcttttcttggcagacaaataggcgtgatgttgctattgattacaactttgttattcaatttaatcagtgctatgtcattgtcaaagccagcatcatgagtataaccttcatgtataaaaacagcttcagaccaggcttgtgtataatgaggtgatagtcttttcagggtgcccattcgaatgtccagggcagatgcatcatgtttttgctcatagacggcatgagcagctgttaggacccagttgtcatataaaagtgcacctgctgctgtggttccacctaatatcaggacttgccaaggaaaatcaccaggttttgccttttgccctccatatatacgccctcctgttgtgcgggctgatagtccacaaactggagaaagaagcagataggtagagagcctttgtaaaaatgtcaatcgtgtttttcttaaattatgaccgccttgaagt

SEQ ID NO: 353641 - DNA, 1581 bp, Homo sapiens
aataaccaaaaccaaggcaacatgcagagggagccaaaccaggccttcggttctggaaataactcttatagtggctctaattctggtgcagcaattggttggggatcagcatccaatgcagggtcgggcagtggttttaatggaggctttggctcaagcatggattctaagtcttctggctggggaatgtagacagtggggttgtggttggttggtatagaatggtgggaattcaaatttttctaaactcatggtaagtatattgtaaaatacatatgtactaagaattttcaaaattggtttgttcagtgtggagtatattcagcagtatttttgacatttttctttagaaaaaggaagagctaaaggaattttataagttttgttacatgaaaggttgaaatattgagtggttgaaagtgaactgctgtttgcctgattggtaaaccaacacactacaattgatatcaaaaggtttctcctgtaatattttatccctggacttgtcaagtgaattctttgcatgttcaaaacggaaaccattgattagaactacattctttaccccttgttttaattcgaaccccaccatatggatttttttccttaagaaaatctccttttaggagatcatggtgtcacagtgtttggttcttttgttttgttttttaacacttgtctcccctcatacacaaaagtacaatatgaagccttcatttaatctctgcagttcatctcatttcaaatgtttatggaagaagcacttcattgaaagtagtgctgtaaatattctgccataggaatactgtctacatgctttctcattcaagaattcgtcatcacgcatcacaggccgcgtctttgacggtgggtgtcccatttttatccgctactctttatttcatggagtcgtatcaacgctatgaacgcaaggctgtgatatggaaccagaaggctgtctgaacttttgaaaccttgtgtgggattgatggtggtgccgaggcatgaaaggctagtatgagcgagaaaaggagagagcgcgtgcagagacttggtggtgcataatggatattttttaacttggcgagatgtgtctctcaatcctgtggctttggtgagagagtgtgcagagagcaatgatagcaaataatgtacgaatgttttttgcattcaaaggacatccacatctgttggaagacttttaagtgagtttttgttcttagataacccacattagatgaatgtgttaagtgaaatgatacttgtactccccctacccctttgtcaactgctgtgaatgctgtatggtgtgtgttctcttctgttactgatatgtaagtgtggcaatgtgaactgaagctgatgggctgagaacatggactgagcttgtggtgtgctttgcaggaggacttgaagcagagttcaccagtgagctcaggtgtctcaaagaagggtggaagttctaatgtctgttagctacccataagaatgctgtttgctgcagttctgtgtcctgtgcttggatgctttttataagagttgtcattgttggaaattcttaaataaaactgatttaaataa

SEQ ID NO: 353642 - DNA, 1527 bp, Homo sapiens
aataaccaaaaccaaggcaacatgcagagggagccaaaccaggccttcggttctggaaataactcttatagtggctctaattctggtgcagcaattggttggggatcagcatccaatgcagggtcgggcagtggttttaatggaggctttggctcaagcatggattctaagtcttctggctggggaatgtagacagtggggttgtggttggttggtatagaatggtgggaattcaaatttttctaaactcatggtaagtatattgtaaaatacatatgtactaagaattttcaaaattggtttgttcagtgtggagtatattcagcagtatttttgacatttttctttagaaaaaggaagagctaaaggaattttataagttttgttacatgaaaggttgaaatattgagtggttgaaagtgaactgctgtttgcctgattggtaaaccaacacactacaattgatatcaaaaggtttctcctgtaatattttatccctggacttgtcaagtgaattctttgcatgttcaaaacggaaaccattgattagaactacattctttaccccttgttttaattcgaaccccaccatatggatttttttccttaagaaaatctccttttaggagatcatggtgtcacagtgtttggttcttttgttttgttttttaacacttgtctcccctcatacacgtttatggaagaagcacttcattgaaagtagtgctgtaaatattctgccataggaatactgtctacatgctttctcattcaagaattcgtcatcacgcatcacaggccgcgtctttgacggtgggtgtcccatttttatccgctactctttatttcatggagtcgtatcaacgctatgaacgcaaggctgtgatatggaaccagaaggctgtctgaacttttgaaaccttgtgtgggattgatggtggtgccgaggcatgaaaggctagtatgagcgagaaaaggagagagcgcgtgcagagacttggtggtgcataatggatattttttaacttggcgagatgtgtctctcaatcctgtggctttggtgagagagtgtgcagagagcaatgatagcaaataatgtacgaatgttttttgcattcaaaggacatccacatctgttggaagacttttaagtgagtttttgttcttagataacccacattagatgaatgtgttaagtgaaatgatacttgtactccccctacccctttgtcaactgctgtgaatgctgtatggtgtgtgttctcttctgttactgatatgtaagtgtggcaatgtgaactgaagctgatgggctgagaacatggactgagcttgtggtgtgctttgcaggaggacttgaagcagagttcaccagtgagctcaggtgtctcaaagaagggtggaagttctaatgtctgttagctacccataagaatgctgtttgctgcagttctgtgtcctgtgcttggatgctttttataagagttgtcattgttggaaattcttaaataaaactgatttaaataa

SEQ ID NO: 353643 - DNA, 3035 bp, Homo sapiens
aataaccaaaaccaaggcaacatgcagagggagccaaaccaggccttcggttctggaaataactcttatagtggctctaattctggtgcagcaattggttggggatcagcatccaatgcagggtcgggcagtggttttaatggaggctttggctcaagcatggattctaagtcttctggctggggaatgtagacagtggggttgtggttggttggtatagaatggtgggaattcaaatttttctaaactcatggtaagtatattgtaaaatacatatgtactaagaattttcaaaattggtttgttcagtgtggagtatattcagcagtatttttgacatttttctttagaaaaaggaagagctaaaggaattttataagttttgttacatgaaaggttgaaatattgagtggttgaaagtgaactgctgtttgcctgattggtaaaccaacacactacaattgatatcaaaaggtttctcctgtaatattttatccctggacttgtcaagtgaattctttgcatgttcaaaacggaaaccattgattagaactacattctttaccccttgttttaattcgaaccccaccatatggatttttttccttaagaaaatctccttttaggagatcatggtgtcacagtgtttggttcttttgttttgttttttaacacttgtctcccctcatacacaaaagtacaatatgaagccttcatttaatctctgcagttcatctcatttcaaatgtttatggaagaagcacttcattgaaagtagtgctgtaaatattctgccataggaatactgtctacatgctttctcattcaagaattcgtcatcacgcatcacaggccgcgtctttgacggtgggtgtcccatttttatccgctactctttatttcatggagtcgtatcaacgctatgaacgcaaggctgtgatatggaaccagaaggctgtctgaacttttgaaaccttgtgtgggattgatggtggtgccgaggcatgaaaggctagtatgagcgagaaaaggagagagcgcgtgcagagacttggtggtgcataatggatattttttaacttggcgagatgtgtctctcaatcctgtggctttggtgagagagtgtgcagagagcaatgatagcaaataatgtacgaatgttttttgcattcaaaggacatccacatctgttggaagacttttaagtgagtttttgttcttagataacccacattagatgaatgtgttaagtgaaatgatacttgtactccccctacccctttgtcaactgctgtgaatgctgtatggtgtgtgttctcttctgttactgatatgtaagtgtggcaatgtgaactgaagctgatgggctgagaacatggactgagcttgtggtgtgctttgcaggaggacttgaagcagagttcaccagtgagctcaggtgtctcaaagaagggtggaagttctaatgtctgttagctacccataagaatgctgtttgctgcagttctgtgtcctgtgcttggatgctttttataagagttgtcattgttggaaattcttaaataaaactgatttaaataatatgtgtctttgttttgcagccctgaatgcaaagaattcatagcagttaattccccttttttgacccttttgagatggaactttcataaagtttcttggcagtagtttattttgcttcaaataaacttatttgaaaagttgtctcaagtcaaatggattcatcacctgtcatgcattgacacctgatacccagacttaattggtatttgttcttgcattggccaaagtgaaaatttttttttttcttttgaaatctagttttgaataagtctgggtgaccgcacctaaaatggtaagcagtaccctccggctttttcttagtgcctctgtgcatttgggtgatgttctatttacatggcctgtgtaaatctccattgggaagtcatgccttctaaaaagattcttatttgggggagtgggcaaaatgttgattattttctaatgctttgtagcaaagcatatcaattgaaaagggaatatcagcaccttcctagtttgggatttgaaaagtggaattaattgcagtagggataaagtagaagaaaccacaaattatcttgtgcctgaaatccattaagaggcctgatagctttaagaattagggtgggttgtctgtctggaagtgttaagtggaatgggctttgtcctccaggaggtgggggaatgtggtaacattgaatacagttgaataaaatcgcttacaaaactcacactctcacaatgcattgttaagtatgtaaaagcaataacattgattctctgttgtacttttttgtaactaattctgtgagagttgagctcattttctagttggaagaatgtgatatttgttgtgttggtagtttacctaatgcccttacctaattagattatgataaataggtttgtcattttgcaagttacatgttttaaacatttatcaatgaagtcatcctttagacttgtaatcgccacattgtttcattattcagtttcctctgtaaagggatcttgagttgttttaattttttttttctgcatctgaatctgcatgatttccaaaccctgtaccatctgaattttgcattttagcacttgcactattactcagcagcagtaacatggtaacacttaaaatggtactcggggacctccaaagactaaactgacaagccttcaaggagcccaggggtaagttaacttgtcaacggcatggtttaatcccttctttacacttgtgtaaatttcagttactggtcatagaaggctttcaatgttgagtggccttttattaacatgtttatggtactgcatagatacgggtatttattttaccctaagaagattttgaagtttaaaagtacttaaactatttggcaaagatttgtttttaaaaatctatttggtcaatctaaatgcattcattctaaaaaattttttgaaccagataaataaaatttttttttgacaccaca

SEQ ID NO: 353644 - DNA, 670 bp, Homo sapiens
tgcagtgactcacacctgtaatcccagcactttgggaggccaaggcaagcggatcacctgaggtcaggagttcaagaccagcgtggccaacatggcgaacgaaaccccatctctactaaaaaatacaaaattagccgggcttggtggtgcataatggatattttttaacttggcgagatgtgtctctcaatcctgtggctttggtgagagagtgtgcagagagcaatgatagcaaataatgtacgaatgttttttgcattcaaaggacatccacatctgttggaagacttttaagtgagtttttgttcttagataacccacattagatgaatgtgttaagtgaaatgatacttgtactccccctacccctttgtcaactgctgtgaatgctgtatggtgtgtgttctcttctgttactgatatgtaagtgtggcaatgtgaactgaagctgatgggctgagaacatggactgagcttgtggtgtgctttgcaggaggacttgaagcagagttcaccagtgagctcaggtgtctcaaagaagggtggaagttctaatgtctgttagctacccataagaatgctgtttgctgcagttctgtgtcctgtgcttggatgctttttataagagttgtcattgttggaaattcttaaataaaactgatttaaataa

SEQ ID NO: 353645 - DNA, 4085 bp, Homo sapiens
aataaccaaaaccaaggcaacatgcagagggagccaaaccaggccttcggttctggaaataactcttatagtggctctaattctggtgcagcaattggttggggatcagcatccaatgcagggtcgggcagtggttttaatggaggctttggctcaagcatggattctaagtcttctggctggggaatgtagacagtggggttgtggttggttggtatagaatggtgggaattcaaatttttctaaactcatggtaagtatattgtaaaatacatatgtactaagaattttcaaaattggtttgttcagtgtggagtatattcagcagtatttttgacatttttctttagaaaaaggaagagctaaaggaattttataagttttgttacatgaaaggttgaaatattgagtggttgaaagtgaactgctgtttgcctgattggtaaaccaacacactacaattgatatcaaaaggtttctcctgtaatattttatccctggacttgtcaagtgaattctttgcatgttcaaaacggaaaccattgattagaactacattctttaccccttgttttaattcgaaccccaccatatggatttttttccttaagaaaatctccttttaggagatcatggtgtcacagtgtttggttcttttgttttgttttttaacacttgtctcccctcatacacaaaagtacaatatgaagccttcatttaatctctgcagttcatctcatttcaaatgtttatggaagaagcacttcattgaaagtagtgctgtaaatattctgccataggaatactgtctacatgctttctcattcaagaattcgtcatcacgcatcacaggccgcgtctttgacggtgggtgtcccatttttatccgctactctttatttcatggagtcgtatcaacgctatgaacgcaaggctgtgatatggaaccagaaggctgtctgaacttttgaaaccttgtgtgggattgatggtggtgccgaggcatgaaaggctagtatgagcgagaaaaggagagagcgcgtgcagagacttggtggtgcataatggatattttttaacttggcgagatgtgtctctcaatcctgtggctttggtgagagagtgtgcagagagcaatgatagcaaataatgtacgaatgttttttgcattcaaaggacatccacatctgttggaagacttttaagtgagtttttgttcttagataacccacattagatgaatgtgttaagtgaaatgatacttgtactccccctacccctttgtcaactgctgtgaatgctgtatggtgtgtgttctcttctgttactgatatgtaagtgtggcaatgtgaactgaagctgatgggctgagaacatggactgagcttgtggtgtgctttgcaggaggacttgaagcagagttcaccagtgagctcaggtgtctcaaagaagggtggaagttctaatgtctgttagctacccataagaatgctgtttgctgcagttctgtgtcctgtgcttggatgctttttataagagttgtcattgttggaaattcttaaataaaactgatttaaataatatgtgtctttgttttgcagccctgaatgcaaagaattcatagcagttaattccccttttttgacccttttgagatggaactttcataaagtttcttggcagtagtttattttgcttcaaataaacttatttgaaaagttgtctcaagtcaaatggattcatcacctgtcatgcattgacacctgatacccagacttaattggtatttgttcttgcattggccaaagtgaaaatttttttttttcttttgaaatctagttttgaataagtctgggtgaccgcacctaaaatggtaagcagtaccctccggctttttcttagtgcctctgtgcatttgggtgatgttctatttacatggcctgtgtaaatctccattgggaagtcatgccttctaaaaagattcttatttgggggagtgggcaaaatgttgattattttctaatgctttgtagcaaagcatatcaattgaaaagggaatatcagcaccttcctagtttgggatttgaaaagtggaattaattgcagtagggataaagtagaagaaaccacaaattatcttgtgcctgaaatccattaagaggcctgatagctttaagaattagggtgggttgtctgtctggaagtgttaagtggaatgggctttgtcctccaggaggtgggggaatgtggtaacattgaatacagttgaataaaatcgcttacaaaactcacactctcacaatgcattgttaagtatgtaaaagcaataacattgattctctgttgtacttttttgtaactaattctgtgagagttgagctcattttctagttggaagaatgtgatatttgttgtgttggtagtttacctaatgcccttacctaattagattatgataaataggtttgtcattttgcaagttacatgttttaaacatttatcaatgaagtcatcctttagacttgtaatcgccacattgtttcattattcagtttcctctgtaaagggatcttgagttgttttaattttttttttctgcatctgaatctgcatgatttccaaaccctgtaccatctgaattttgcattttagcacttgcactattactcagcagcagtaacatggtaacacttaaaatggtactcggggacctccaaagactaaactgacaagccttcaaggagcccaggggtaagttaacttgtcaacggcatggtttaatcccttctttacacttgtgtaaatttcagttactggtcatagaaggctttcaatgttgagtggccttttattaacatgtttatggtactgcatagatacgggtatttattttaccctaagaagattttgaagtttaaaagtacttaaactatttggcaaagatttgtttttaaaaatctatttggtcaatctaaatgcattcattctaaaaaattttttgaaccagataaataaaatttttttttgacaccacagtttagtgtctggagtcttactggaaaaacacgatttctttttatatgtgatatacagatgctggaaagttacctttaaaaattgagtctctaaagaaaaaagaaaataataaaaattgagtctcaagaagttgtacttcatatgcacaagagaaatgaggccaagactcacaatatggaatttcactactgttgcccaggctagagtataatggtgcgatctgggctcaccgcaacctccaccacctgggttcaagcaattctgcctcagccgctcgagtagctgggattacaggcatgtaccaccacacccggctaattttgtatttttattagagacggggtttctccatgctggtcaggctggcctcaggtgacccacctgcctcggcctcccaaagtgctgggattacaggcgtgagccacacctggcctaaaaatcatttaattttttatgcttgcctagttataaggtcaaagagaatcaaatgactgatgcagtcagcacctaacaacctctgtatatgggaagggggtaatgagaacatactatttggaaataataacagcctaagagccaagtgctgaagttacatttctgcctaccacagctaaagctctcctcactgtctcctacccagtcctcctttccatcaattaccagtctcttgtataaatgtatccattaccaggctcacagactgggagtgatttttctcctttggagctcgtccagaatccatcagcctcacacacatatttacctgcaaatcattggaaaagcaaaaatgtttaactgcatgtataagatggttgtcatttgcttgaatacccccttgaaaaatgttgattcttgagcatcagtgggacatagaggtgtctgaagaaccattttacatgatttcataaataggaggtctctgcattaccatgtttgcttgcaaagtggaaaccttttagatgtgtaacttgaatatgtatcaagatctcaagtgcttaatgataaggtgttgacttgttaaattaaaccatttggaatacaaaaaaaaa

SEQ ID NO: 353646 - DNA, 2964 bp, Homo sapiens
aataaccaaaaccaaggcaacatgcagagggagccaaaccaggccttcggttctggaaataactcttatagtggctctaattctggtgcagcaattggttggggatcagcatccaatgcagggtcgggcagtggttttaatggaggctttggctcaagcatggattctaagtcttctggctggggaatgtagacagtggggttgtggttggttggtatagaatggtgggaattcaaatttttctaaactcatggtaagtatattgtaaaatacatatgtactaagaattttcaaaattggtttgttcagtgtggagtatattcagcagtatttttgacatttttctttagaaaaaggaagagctaaaggaattttataagttttgttacatgaaaggttgaaatattgagtggttgaaagtgaactgctgtttgcctgattggtaaaccaacacactacaattgatatcaaaaggtttctcctgtaatattttatccctggacttgtcaagtgaattctttgcatgttcaaaacggaaaccattgattagaactacattctttaccccttgttttaattcgaaccccaccatatggatttttttccttaagaaaatctccttttaggagatcatggtgtcacagtgtttggttcttttgttttgttttttaacacttgtctcccctcatacacaaaagtacaatatgaagccttcatttaatctctgcagttcatctcatttcaaatgtttatggaagaagcacttcattgaaagtagtgctgtaaatattctgccataggaatactgtctacatgctttctcattcaagaattcgtcatcacgcatcacaggccgcgtctttgacggtgggtgtcccatttttatccgctactctttatttcatggagtcgtatcaacgctatgaacgcaaggctgtgatatggaaccagaaggctgtctgaacttttgaaaccttgtgtgggattgatggtggtgccgaggcatgaaaggctagtatgagcgagaaaaggagagagcgcgtgcagagacttggtggtgcataatggatattttttaacttggcgagatgtgtctctcaatcctgtggctttggtgagagagtgtgcagagagcaatgatagcaaataatgtacgaatgttttttgcattcaaaggacatccacatctgttggaagacttttaagtgagtttttgttcttagataacccacattagatgaatgtgttaagtgaaatgatacttgtactccccctacccctttgtcaactgctgtgaatgctgtatggtgtgtgttctcttctgttactgatatgtaagtgtggcaatgtgaactgaagctgatgggctgagaacatggactgagcttgtggtgtgctttgcaggaggacttgaagcagagttcaccagtgagctcaggtgtctcaaagaagggtggaagttctaatgtctgttagctacccataagaatgctgtttgctgcagttctgtgtcctgtgcttggatgctttttataagagttgtcattgttggaaattcttaaataaaactgatttaaataatatgtgtctttgttttgcagccctgaatgcaaagaattcatagcagttaattccccttttttgacccttttgagatggaactttcataaagtttcttggcagtagtttattttgcttcaaataaacttatttgaaaagttgtctcaagtcaaatggattcatcacctgtcatgcattgacacctgatacccagacttaattggtatttgttcttgcattggccaaagtgaaaatttttttttttcttttgaaatctagttttgaataagtctgggtgaccgcacctaaaatgcacttgcactattactcagcagcagtaacatggtaacacttaaaatggtactcggggacctccaaagactaaactgacaagccttcaaggagcccagggatgctggaaagttacctttaaaaattgagtctctaaagaaaaaagaaaataataaaaattgagtctcaagaagttgtacttcatatgcacaagagaaatgaggccaagactcacaatatggaatttcactactgttgcccaggctagagtataatggtgcgatctgggctcaccgcaacctccaccacctgggttcaagcaattctgcctcagccgctcgagtagctgggattacaggcatgtaccaccacacccggctaattttgtatttttattagagacggggtttctccatgctggtcaggctggcctcaggtgacccacctgcctcggcctcccaaagtgctgggattacaggcgtgagccacacctggcctaaaaatcatttaattttttatgcttgcctagttataaggtcaaagagaatcaaatgactgatgcagtcagcacctaacaacctctgtatatgggaagggggtaatgagaacatactatttggaaataataacagcctaagagccaagtgctgaagttacatttctgcctaccacagctaaagctctcctcactgtctcctacccagtcctcctttccatcaattaccagtctcttgtataaatgtatccattaccaggctcacagactgggagtgatttttctcctttggagctcgtccagaatccatcagcctcacacacatatttacctgcaaatcattggaaaagcaaaaatgtttaactgcatgtataagatggttgtcatttgcttgaatacccccttgaaaaatgttgattcttgagcatcagtgggacatagaggtgtctgaagaaccattttacatgatttcataaataggaggtctctgcattaccatgtttgcttgcaaagtggaaaccttttagatgtgtaacttgaatatgtatcaagatctcaagtgcttaatgataaggtgttgacttgttaaattaaaccatttggaatacaaaaaaaaa

SEQ ID NO: 353647 - DNA, 2256 bp, Homo sapiens
aataaccaaaaccaaggcaacatgcagagggagccaaaccaggccttcggttctggaaataactcttatagtggctctaattctggtgcagcaattggttggggatcagcatccaatgcagggtcgggcagtggttttaatggaggctttggctcaagcatggattctaagtcttctggctggggaatgtagacagtggggttgtggttggttggtatagaatggtgggaattcaaatttttctaaactcatggtaagtatattgtaaaatacatatgtactaagaattttcaaaattggtttgttcagtgtggagtatattcagcagtatttttgacatttttctttagaaaaaggaagagctaaaggaattttataagttttgttacatgaaaggttgaaatattgagtggttgaaagtgaactgctgtttgcctgattggtaaaccaacacactacaattgatatcaaaaggtttctcctgtaatattttatccctggacttgtcaagtgaattctttgcatgttcaaaacggaaaccattgattagaactacattctttaccccttgttttaattcgaaccccaccatatggatttttttccttaagaaaatctccttttaggagatcatggtgtcacagtgtttggttcttttgttttgttttttaacacttgtctcccctcatacacaaaagtacaatatgaagccttcatttaatctctgcagttcatctcatttcaaatgtttatggaagaagcacttcattgaaagtagtgctgtaaatattctgccataggaatactgtctacatgctttctcattcaagaattcgtcatcacgcatcacaggccgcgtctttgacggtgggtgtcccatttttatccgctactctttatttcatggagtcgtatcaacgctatgaacgcaaggctgtgatatggaaccagaaggctgtctgaacttttgaaaccttgtgtgggattgatggtggtgccgaggcatgaaaggctagtatgagcgagaaaaggagagagcgcgtgcagagacttggtggtgcataatggatattttttaacttggcgagatgtgtctctcaatcctgtggctttggtgagagagtgtgcagagagcaatgatagcaaataatgtacgaatgttttttgcattcaaaggacatccacatctgttggaagacttttaagtgagtttttgttcttagataacccacattagatgaatgtgttaagtgaaatgatacttgtactccccctacccctttgtcaactgctgtgaatgctgtatggtgtgtgttctcttctgttactgatatgtaagtgtggcaatgtgaactgaagctgatgggctgagaacatggactgagcttgtggtgtgctttgcaggaggacttgaagcagagttcaccagtgagctcaggtgtctcaaagaagggtggaagttctaatgtctgttagctacccataagaatgctgtttgctgcagttctgtgtcctgtgcttggatgctttttataagagttgtcattgttggaaattcttaaataaaactgatttaaataatatgtgtctttgttttgcagccctgaatgcaaagaattcatagcagttaattccccttttttgacccttttgagatggaactttcataaagtttcttggcagtagtttattttgcttcaaataaacttatttgaaaagttgtctcaagtcaaatggattcatcacctgtcatgcattgacacctgatacccagacttaattggtatttgttcttgcattggccaaagtgaaaatttttttttttcttttgaaatctagttttgaataagtctgggtgaccgcacctaaaatgcacttgcactattactcagcagcagtaacatggtaacacttaaaatggtactcggggacctccaaagactaaactgacaagccttcaaggagcccaggggtaagttaacttgtcaacggcatggtttaatcccttctttacacttgtgtaaatttcagttactggtcatagaaggctttcaatgttgagtggccttttattaacatgtttatggtactgcatagatacgggtatttattttaccctaagaagattttgaagtttaaaagtacttaaactatttggcaaagatttgtttttaaaaatctatttggtcaatctaaatgcattcattctaaaaaattttttgaaccagataaataaaatttttttttgacaccaca

SEQ ID NO: 353648 - DNA, 1729 bp, Homo sapiens
aataaccaaaaccaaggcaacatgcagagggagccaaaccaggccttcggttctggaaataactcttatagtggctctaattctggtgcagcaattggttggggatcagcatccaatgcagggtcgggcagtggttttaatggaggctttggctcaagcatggattctaagtcttctggctggggaatgtagacagtggggttgtggttggttggtatagaatggtgggaattcaaatttttctaaactcatggtaagtatattgtaaaatacatatgtactaagaattttcaaaattggtttgttcagtgtggagtatattcagcagtatttttgacatttttctttagaaaaaggaagagctaaaggaattttataagttttgttacatgaaaggttgaaatattgagtggttgaaagtgaactgctgtttgcctgattggtaaaccaacacactacaattgatatcaaaaggtttctcctgtaatattttatccctggacttgtcaagtgaattctttgcatgttcaaaacggaaaccattgattagaactacattctttaccccttgttttaattcgaaccccaccatatggatttttttccttaagaaaatctccttttaggagatcatggtgtcacagtgtttggttcttttgttttgttttttaacacttgtctcccctcatacacaaaagtacaatatgaagccttcatttaatctctgcagttcatctcatttcaaatgtttatggaagaagcacttcattgaaagtagtgctgtaaatattctgccataggaatactgtctacatgctttctcattcaagaattcgtcatcacgcatcacaggccgcgtctttgacggtgggtgtcccatttttatccgctactctttatttcatggagtcgtatcaacgctatgaacgcaaggctgtgatatggaaccagaaggctgtctgaacttttgaaaccttgtgtgggattgatggtggtgccgaggcatgaaaggctagtatgagcgagaaaaggagagagcgcgtgcagagacttggtggtgcataatggatattttttaacttggcgagatgtgtctctcaatcctgtggctttggtgagagagtgtgcagagagcaatgatagcaaataatgtacgaatgttttttgcattcaaaggacatccacatctgttggaagacttttaagtgagtttttgttcttagataacccacattagatgaatgtgttaagtgaaatgatacttgtactccccctacccctttgtcaactgctgtgaatgctgtatggtgtgtgttctcttctgttactgatatgtaagtgtggcaatgtgaactgaagctgatgggctgagaacatggactgagcttgtggtgtgctttgcaggaggacttgaagcagagttcaccagtgagctcaggtgtctcaaagaagggtggaagttctaatgtctgttagctacccataagaatgctgtttgctgcagttctgtgtcctgtgcttggatgctttttataagagttgtcattgttggaaattcttaaataaaactgatttaaataatatgtgtctttgttttgcagccctgaatgcaaagaattcatagcagttaattccccttttttgacccttttgagatggaactttcataaagtttcttggcagtagtttattttgcttcaaataaacttatttgaaaagttgtctcaag

SEQ ID NO: 353649 - DNA, 1995 bp, Homo sapiens
  misc_feature (1718)..(1719): n is a, c, g, or t
aataaccaaaaccaaggcaacatgcagagggagccaaaccaggccttcggttctggaaataactcttatagtggctctaattctggtgcagcaattggttggggatcagcatccaatgcagggtcgggcagtggttttaatggaggctttggctcaagcatggattctaagtcttctggctggggaatgtagacagtggggttgtggttggttggtatagaatggtgggaattcaaatttttctaaactcatggtaagtatattgtaaaatacatatgtactaagaattttcaaaattggtttgttcagtgtggagtatattcagcagtatttttgacatttttctttagaaaaaggaagagctaaaggaattttataagttttgttacatgaaaggttgaaatattgagtggttgaaagtgaactgctgtttgcctgattggtaaaccaacacactacaattgatatcaaaaggtttctcctgtaatattttatccctggacttgtcaagtgaattctttgcatgttcaaaacggaaaccattgattagaactacattctttaccccttgttttaattcgaaccccaccatatggatttttttccttaagaaaatctccttttaggagatcatggtgtcacagtgtttggttcttttgttttgttttttaacacttgtctcccctcatacacaaaagtacaatatgaagccttcatttaatctctgcagttcatctcatttcaaatgtttatggaagaagcacttcattgaaagtagtgctgtaaatattctgccataggaatactgtctacatgctttctcattcaagaattcgtcatcacgcatcacaggccgcgtctttgacggtgggtgtcccatttttatccgctactctttatttcatggagtcgtatcaacgctatgaacgcaaggctgtgatatggaaccagaaggctgtctgaacttttgaaaccttgtgtgggattgatggtggtgccgaggcatgaaaggctagtatgagcgagaaaaggagagagcgcgtgcagagacttggtggtgcataatggatattttttaacttggcgagatgtgtctctcaatcctgtggctttggtgagagagtgtgcagagagcaatgatagcaaataatgtacgaatgttttttgcattcaaaggacatccacatctgttggaagacttttaagtgagtttttgttcttagataacccacattagatgaatgtgttaagtgaaatgatacttgtactccccctacccctttgtcaactgctgtgaatgctgtatggtgtgtgttctcttctgttactgatatgtaagtgtggcaatgtgaactgaagctgatgggctgagaacatggactgagcttgtggtgtgctttgcaggaggacttgaagcagagttcaccagtgagctcaggtgtctcaaagaagggtggaagttctaatgtctgttagctacccataagaatgctgtttgctgcagttctgtgtcctgtgcttggatgctttttataagagttgtcattgttggaaattcttaaataaaactgatttaaataaaaaaaaaaaaaaaaaaaaaaaaaaaaaaaaaaaaaaaaaaaaaaaaaaaaaaaaaaaaaaaaaaaaaaaaaaaaaaaaaaaaaaaaaaaaaaaaaaaaaaaaaaaaaaaaaaggggaaaaaaaaaaaaaaaaaaaannaatttgtgggccctttggccccatttttttttaattttggaaaatttatttttggggcccaaatttgggcttattttggcaaattcccctattaggggggatataaaaatacaggggccggttttacaaccgcggggggggggaaaaccgtggggtccccaaattataaggtttaaaaaacacccctttgccaagtgggaataaaaaaaaaggcccccccaacccccttcccaagttggcccccttaggggaaggaaaatttggcttttttttgaa

SEQ ID NO: 353650 - DNA, 1924 bp, Homo sapiens
aataaccaaaaccaaggcaacatgcagagggagccaaaccaggccttcggttctggaaataactcttatagtggctctaattctggtgcagcaattggttggggatcagcatccaatgcagggtcgggcagtggttttaatggaggctttggctcaagcatggattctaagtcttctggctggggaatgtagacagtggggttgtggttggttggtatagaatggtgggaattcaaatttttctaaactcatggtaagtatattgtaaaatacatatgtactaagaattttcaaaattggtttgttcagtgtggagtatattcagcagtatttttgacatttttctttagaaaaaggaagagctaaaggaattttataagttttgttacatgaaaggttgaaatattgagtggttgaaagtgaactgctgtttgcctgattggtaaaccaacacactacaattgatatcaaaaggtttctcctgtaatattttatccctggacttgtcaagtgaattctttgcatgttcaaaacggaaaccattgattagaactacattctttaccccttgttttaattcgaaccccaccatatggatttttttccttaagaaaatctccttttaggagatcatggtgtcacagtgtttggttcttttgttttgttttttaacacttgtctcccctcatacacaaaagtacaatatgaagccttcatttaatctctgcagttcatctcatttcaaatgtttatggaagaagcacttcattgaaagtagtgctgtaaatattctgccataggaatactgtctacatgctttctcattcaagaattcgtcatcacgcatcacaggccgcgtctttgacggtgggtgtcccatttttatccgctactctttatttcatggagtcgtatcaacgctatgaacgcaaggctgtgatatggaaccagaaggctgtctgaacttttgaaaccttgtgtgggattgatggtggtgccgaggcatgaaaggctagtatgagcgagaaaaggagagagcgcgtgcagagacttggtggtgcataatggatattttttaacttggcgagatgtgtctctcaatcctgtggctttggtgagagagtgtgcagagagcaatgatagcaaataatgtacgaatgttttttgcattcaaaggacatccacatctgttggaagacttttaagtgagtttttgttcttagataacccacattagatgaatgtgttaagtgaaatgatacttgtactccccctacccctttgtcaactgctgtgaatgctgtatggtgtgtgttctcttctgttactgatatgtaagtgtggcaatgtgaactgaagctgatgggctgagaacatggactgagcttgtggtgtgctttgcaggaggacttgaagcagagttcaccagtgagctcaggtgtctcaaagaagggtggaagttctaatgtctgttagctacccataagaatgctgtttgctgcagttctgtgtcctgtgcttggatgctttttataagagttgtcattgttggaaattcttaaataaaactgatttaaataaaaaaaaaaaaaaagggcggcccggacgcgtgggtcgacccaggcgtccgtgcagcgcaagtaggtctacaagacgctacttccccgtatcatagaagagcttatcaccatttaatgatcacgccctcataatcatttcctaatcggcttcctagatccgtgtaatgacccttttcctaacaactccacaaagaaaatctcacctaatactaacatctcagaacgctcaggcaaatagaacccggtttgaatatcctggccgacataatcacaagtcctcatggacactcccattcactaagcatcctttacataccagacgaggttctagatcccttccctac

SEQ ID NO: 353651 - DNA, 2639 bp, Homo sapiens
aataaccaaaaccaaggcaacatgcagagggagccaaaccaggccttcggttctggaaataactcttatagtggctctaattctggtgcagcaattggttggggatcagcatccaatgcagggtcgggcagtggttttaatggaggctttggctcaagcatggattctaagtcttctggctggggaatgtagacagtggggttgtggttggttggtatagaatggtgggaattcaaatttttctaaactcatggtaagtatattgtaaaatacatatgtactaagaattttcaaaattggtttgttcagtgtggagtatattcagcagtatttttgacatttttctttagaaaaaggaagagctaaaggaattttataagttttgttacatgaaaggttgaaatattgagtggttgaaagtgaactgctgtttgcctgattggtaaaccaacacactacaattgatatcaaaaggtttctcctgtaatattttatccctggacttgtcaagtgaattctttgcatgttcaaaacggaaaccattgattagaactacattctttaccccttgttttaattcgaaccccaccatatggatttttttccttaagaaaatctccttttaggagatcatggtgtcacagtgtttggttcttttgttttgttttttaacacttgtctcccctcatacacaaaagtacaatatgaagccttcatttaatctctgcagttcatctcatttcaaatgtttatggaagaagcacttcattgaaagtagtgctgtaaatattctgccataggaatactgtctacatgctttctcattcaagaattcgtcatcacgcatcacaggccgcgtctttgacggtgggtgtcccatttttatccgctactctttatttcatggagtcgtatcaacgctatgaacgcaaggctgtgatatggaaccagaaggctgtctgaacttttgaaaccttgtgtgggattgatggtggtgccgaggcatgaaaggctagtatgagcgagaaaaggagagagcgcgtgcagagacttggtggtgcataatggatattttttaacttggcgagatgtgtctctcaatcctgtggctttggtgagagagtgtgcagagagcaatgatagcaaataatgtacgaatgttttttgcattcaaaggacatccacatctgttggaagacttttaaccctgaatgcaaagaattcatagcagttaattccccttttttgacccttttgagatggaactttcataaagtttcttggcagtagtttattttgcttcaaataaacttatttgaaaagttgtctcaagtcaaatggattcatcacctgtcatgcattgacacctgatacccagacttaattggtatttgttcttgcattggccaaagtgaaaatttttttttttcttttgaaatctagttttgaataagtctgggtgaccgcacctaaaatggtaagcagtaccctccggctttttcttagtgcctctgtgcatttgggtgatgttctatttacatggcctgtgtaaatctccattgggaagtcatgccttctaaaaagattcttatttgggggagtgggcaaaatgttgattattttctaatgctttgtagcaaagcatatcaattgaaaagggaatatcagcaccttcctagtttgggatttgaaaagtggaattaattgcagtagggataaagtagaagaaaccacaaattatcttgtgcctgaaatccattaagaggcctgatagctttaagaattagggtgggttgtctgtctggaagtgttaagtggaatgggctttgtcctccaggaggtgggggaatgtggtaacattgaatacagttgaataaaatcgcttacaaaactcacactctcacaatgcattgttaagtatgtaaaagcaataacattgattctctgttgtacttttttgtaactaattctgtgagagttgagctcattttctagttggaagaatgtgatatttgttgtgttggtagtttacctaatgcccttacctaattagattatgataaataggtttgtcattttgcaagttacatgttttaaacatttatcaatgaagtcatcctttagacttgtaatcgccacattgtttcattattcagtttcctctgtaaagggatcttgagttgttttaattttttttttctgcatctgaatctgcatgatttccaaaccctgtaccatctgaattttgcattttagcacttgcactattactcagcagcagtaacatggtaacacttaaaatggtactcggggacctccaaagactaaactgacaagccttcaaggagcccaggggtaagttaacttgtcaacggcatggtttaatcccttctttacacttgtgtaaatttcagttactggtcatagaaggctttcaatgttgagtggccttttattaacatgtttatggtactgcatagatacgggtatttattttaccctaagaagattttgaagtttaaaagtacttaaactatttggcaaagatttgtttttaaaaatctatttggtcaatctaaatgcattcattctaaaaaattttttgaaccagataaataaaatttttttttgacaccaca

SEQ ID NO: 353652 - DNA, 1487 bp, Homo sapiens
aataaccaaaaccaaggcaacatgcagagggagccaaaccaggccttcggttctggaaataactcttatagtggctctaattctggtgcagcaattggttggggatcagcatccaatgcagggtcgggcagtggttttaatggaggctttggctcaagcatggattctaagtcttctggctggggaatgtagacagtggggttgtggttggttggtatagaatggtgggaattcaaatttttctaaactcatggtaagtatattgtaaaatacatatgtactaagaattttcaaaattggtttgttcagtgtggagtatattcagcagtatttttgacatttttctttagaaaaaggaagagctaaaggaattttataagttttgttacatgaaaggttgaaatattgagtggttgaaagtgaactgctgtttgcctgattggtaaaccaacacactacaattgatatcaaaaggtttctcctgtaatattttatccctggacttgtcaagtgaattctttgcatgttcaaaacggaaaccattgattagaactacattctttaccccttgttttaattcgaaccccaccatatggatttttttccttaagaaaatctccttttaggagatcatggtgtcacagtgtttggttcttttgttttgttttttaacacttgtctcccctcatacacaaaagtacaatatgaagccttcatttaatctctgcagttcatctcatttcaaatgtttatggaagaagcacttcattgaaagtagtgctgtaaatattctgccataggaatactgtctacatgctttctcattcaagaattcgtcatcacgcatcacaggccgcgtctttgacggtgggtgtcccatttttatccgctactctttatttcatggagtcgtatcaacgctatgaacgcaaggctgtgatatggaaccagaaggctgtctgaacttttgaaaccttgtgtgggattgatggtggtgccgaggcatgaaaggctagtatgagcgagaaaaggagagagcgcgtgcagagacttggtggtgcataatggatattttttaacttggcgagatgtgtctctcaatcctgtggctttggtgagagagtgtgcagagagcaatgatagcaaataatgtacgaatgttttttgcattcaaaggacatccacatctgttggaagacttttaagtgagtttttgttcttagataacccacattagatgaatgtgttaagtgaaatgatacttgtactccccctacccctttgtcaactgctgtgaatgctgtatggtgtgtgttctcttctgttactgatatgtaagtgtggcaatgtgaactgaagctgatgggctgagaacatggactgagcttgtggtgtgctttgcaggaggacttgaagcagagttcaccagtgagctcaggtgtctcaaagaagggtgttacggagggtcgttacggaggcgctcgtta

SEQ ID NO: 353653 - DNA, 1592 bp, Homo sapiens
aataaccaaaaccaaggcaacatgcagagggagccaaaccaggccttcggttctggaaataactcttatagtggctctaattctggtgcagcaattggttggggatcagcatccaatgcagggtcgggcagtggttttaatggaggctttggctcaagcatggattctaagtcttctggctggggaatgtagacagtggggttgtggttggttggtatagaatggtgggaattcaaatttttctaaactcatggtaagtatattgtaaaatacatatgtactaagaattttcaaaattggtttgttcagtgtggagtatattcagcagtatttttgacatttttctttagaaaaaggaagagctaaaggaattttataagttttgttacatgaaaggttgaaatattgagtggttgaaagtgaactgctgtttgcctgattggtaaaccaacacactacaattgatatcaaaaggtttctcctgtaatattttatccctggacttgtcaagtgaattctttgcatgttcaaaacggaaaccattgattagaactacattctttaccccttgttttaattcgaaccccaccatatggatttttttccttaagaaaatctccttttaggagatcatggtgtcacagtgtttggttcttttgttttgttttttaacacttgtctcccctcatacacaaaagtacaatatgaagccttcatttaatctctgcagttcatctcatttcaaatgtttatggaagaagcacttcattgaaagtagtgctgtaaatattctgccataggaatactgtctacatgctttctcattcaagaattcgtcatcacgcatcacaggccgcgtctttgacggtgggtgtcccatttttatccgctactctttatttcatggagtcgtatcaacgctatgaacgcaaggctgtgatatggaaccagaaggctgtctgaacttttgaaaccttgtgtgggattgatggtggtgccgaggcatgaaaggctagtatgagcgagaaaaggagagagcgcgtgcagagacttggtggtgcataatggatattttttaacttggcgagatgtgtctctcaatcctgtggctttggtgagagagtgtgcagagagcaatgatagcaaataatgtacgaatgttttttgcattcaaaggacatccacatctgttggaagacttttaagtgagtttttgttcttagataacccacattagatgaatgtgttaagtgaaatgatacttgtactccccctacccctttgtcaactgctgtgaatgctgtatggtgtgtgttctcttacccccttcacacgtgactgtggccacctcccgccaagctgatggcgtggagcaccatggacatagtttgtggtgcagctccgcaggggcacttgaagcggagttcaccaaggaggttaggagtcccaaaaaagggcgggagttctaaagccggatagccccccaggagaacaccgatgcccgggcccctgcgtctcgagatcggaggccatggataagggtcccccagggtgtttatttttccccacagccgttctttattggtttaaaa

SEQ ID NO: 353654 - DNA, 1428 bp, Homo sapiens
aataaccaaaaccaaggcaacatgcagagggagccaaaccaggccttcggttctggaaataactcttatagtggctctaattctggtgcagcaattggttggggatcagcatccaatgcagggtcgggcagtggttttaatggaggctttggctcaagcatggattctaagtcttctggctggggaatgtagacagtggggttgtggttggttggtatagaatggtgggaattcaaatttttctaaactcatggtaagtatattgtaaaatacatatgtactaagaattttcaaaattggtttgttcagtgtggagtatattcagcagtatttttgacatttttctttagaaaaaggaagagctaaaggaattttataagttttgttacatgaaaggttgaaatattgagtggttgaaagtgaactgctgtttgcctgattggtaaaccaacacactacaattgatatcaaaaggtttctcctgtaatattttatccctggacttgtcaagtgaattctttgcatgttcaaaacggaaaccattgattagaactacattctttaccccttgttttaattcgaaccccaccatatggatttttttccttaagaaaatctccttttaggagatcatggtgtcacagtgtttggttcttttgttttgttttttaacacttgtctcccctcatacacaaaagtacaatatgaagccttcatttaatctctgcagttcatctcatttcaaatgtttatggaagaagcacttcattgaaagtagtgctgtaaatattctgccataggaatactgtctacatgctttctcattcaagaattcgtcatcacgcatcacaggccgcgtctttgacgccctgaatgcaaagaattcatagcagttaattccccttttttgacccttttgagatggaactttcataaagtttcttggcagtagtttattttgcttcaaataaacttatttgaaaagttgtctcaagtcaaatggattcatcacctgtcatgcattgacacctgatacccagacttaattggtatttgttcttgcattggccaaagtgaaaatttttttttttcttttgaaatctagttttgaataagtctgggtgaccgcacctaaaatgcacttgcactattactcagcagcagtaacatggtaacacttaaaatggtactcggggacctccaaagactaaactgacaagccttcaaggagcccagggatgctggaaagttacctttaaaaattgagtctctaaagaaaaaagaaaataataaaaattgagtctcaagaagttgtacttcatatgcacaagagaaatgaggccaagactcacagtaagcttttacatggaatggtaacttttagttagactgaaaaacttgaatgttagctattaaaaccttttagga

SEQ ID NO: 353655 - DNA, 3063 bp, Homo sapiens
aataaccaaaaccaaggcaacatgcagagggagccaaaccaggccttcggttctggaaataactcttatagtggctctaattctggtgcagcaattggttggggatcagcatccaatgcagggtcgggcagtggttttaatggaggctttggctcaagcatggattctaagtcttctggctggggaatgtagacagtggggttgtggttggttggtatagaatggtgggaattcaaatttttctaaactcatggtaagtatattgtaaaatacatatgtactaagaattttcaaaattggtttgttcagtgtggagtatattcagcagtatttttgacatttttctttagaaaaaggaagagctaaaggaattttataagttttgttacatgaaaggttgaaatattgagtggttgaaagtgaactgctgtttgcctgattggtaaaccaacacactacaattgatatcaaaaggtttctcctgtaatattttatccctggacttgtcaagtgaattctttgcatgttcaaaacggaaaccattgattagaactacattctttaccccttgttttaattcgaaccccaccatatggatttttttccttaagaaaatctccttttaggagatcatggtgtcacagtgtttggttcttttgttttgttttttaacacttgtctcccctcatacacaaaagtacaatatgaagccttcatttaatctctgcagttcatctcatttcaaatgtttatggaagaagcacttcattgaaagtagtgctgtaaatattctgccataggaatactgtctacatgctttctcattcaagaattcgtcatcacgcatcacaggccgcgtctttgacggtgggtgtcccatttttatccgctactctttatttcatggagtcgtatcaacgctatgaacgcaaggctgtgatatggaaccagaaggctgtctgaacttttgaaaccttgtgtgggattgatggtggtgccgaggcatgaaaggctagtatgagcgagaaaaggagagagcgcgtgcagagacttggtggtgcataatggatattttttaacttggcgagatgtgtctctcaatcctgtggctttggtgagagagtgtgcagagagcaatgatagcaaataatgtacgaatgttttttgcattcaaaggacatccacatctgttggaagacttttaagtgagtttttgttcttagataacccacattagatgaatgtgttaagtgaaatgatacttgtactccccctacccctttgtcaactgctgtgaatgctgtatggtgtgtgttctcttctgttactgatatgtaagtgtggcaatgtgaactgaagctgatgggctgagaacatggactgagcttgtggtgtgctttgcaggaggacttgaagcagagttcaccagtgagctcaggtgtctcaaagaagggtggaagttctaatgtctgttagctacccataagaatgctgtttgctgcagttctgtgtcctgtgcttggatgctttttataagagttgtcattgttggaaattcttaaataaaactgatttaaataatatgtgtctttgttttgcagccctgaatgcaaagaattcatagcagttaattccccttttttgacccttttgagatggaactttcataaagtttcttggcagtagtttattttgcttcaaataaacttatttgaaaagttgtctcaagtcaaatggattcatcacctgtcatgcattgacacctgatacccagacttaattggtatttgttcttgcattggccaaagtgaaaatttttttttttcttttgaaatctagttttgaataagtctgggtgaccgcacctaaaatggtaagcagtaccctccggctttttcttagtgcctctgtgcatttgggtgatgttctatttacatggcctgtgtaaatctccattgggaagtcatgccttctaaaaagattcttatttgggggagtgggcaaaatgttgattattttctaatgctttgtagcaaagcatatcaattgaaaagggaatatcagcaccttcctagtttgggatttgaaaagtggaattaattgcagtagggataaagtagaagaaaccacaaattatcttgtgcctgaaatccattaagaggcctgatagctttaagaattagggtgggttgtctgtctggaagtgttaagtggaatgggctttgtcctccaggaggtgggggaatgtggtaacattgaatacagttgaataaaatcgcttacaaaactcacactctcacaatgcattgttaagtatgtaaaagcaataacattgattctctgttgtacttttttgtaactaattctgtgagagttgagctcattttctagttggaagaatgtgatatttgttgtgttggtagtttacctaatgcccttacctaattagattatgataaataggtttgtcattttgcaagttacatgttttaaacatttatcaatgaagtcatcctttagacttgtaatcgccacattgtttcattattcagtttcctctgtaaagggatcttgagttgttttaattttttttttctgcatctgaatctgcatgatttccaaaccctgtaccatctgaattttgcattttagcacttgcactattactcagcagcagtaacatggtaacacttaaaatggtactcggggacctccaaagactaaactgacaagccttcaaggagcccaggggtaagttaacttgtcaacggcatggtttaatcccttctttacacttgtgtaaatttcagttactggtcatagaaggctttcaatgttgagtggccttttattaacatgtttatggtactgcatagatacgggtatttattttaccctaagaagattttgaagtttaaaagtacttaaactatttggcaaagatttgtttttaaaaatctatttggtcaatctaaatgcattcattctaaaaaattttttgaaccagataaataaaatttttttttgacaccacaaaaaaaaaaagtcgacgcggccgcgaat

SEQ ID NO: 353656 - DNA, 5204 bp, Homo sapiens
ctcgcggctcggcgctgaaattcaaatttgaacggctgcagaggccgagtccgtcactggaagccgagaggagaggacagctggttgtgggagagttcccccgcctcagactcctggttttttccaggagacacactgagctgagactcacttttctcttcctgaatttgaaccaccgtttccatcgtctcgtagtccgacgcctggggcgatggatccgtttacggagaaactgctggagcgaacccgtgccaggcgagagaatcttcagagaaaaatggctgagaggcccacagcagctccaaggtctatgactcatgctaagcgagctagacagccactttcagaagcaagtaaccagcagcccctctctggtggtgaagagaaatcttgttcaaaaccatcgccatcaaaaaaacgctgttctgacaacactgaagtagaagtttctaacttggaaaataaacaaccagttgagtcgacatctgcaaaatcttgttctccaagtcctgtgtctcctcaggtgcagccacaagcagcagataccatcagtgattctgttgctgtcccggcatcactgctgggcatgaggagagggctgaactcaagattggaagcaactgcagcctcctcagttaaaacacgtatgcaaaaacttgcagagcaacggcgccgttgggataatgatgatatgacagatgacattcctgaaagctcactcttctcaccaatgccatcagaggaaaaggctgcttcccctcccaaacctctgctttcaaatgcctcggcaactccagttggcagaaggggccgtctggccaatcttgctgcaactatttgctcctgggaagatgatgtaaatcactcatttgcaaaacaaaacagtgtacaagaacagcctggtaccgcttgtttatccaaattttcctctgcaagtggagcatctgctaggatcaatagcagcagtgttaagcaggaagctacattctgttcccaaagggatggcgatgcctctttgaataaagccctatcctcaagtgctgatgatgcgtctttggttaatgcctcaatttccagctctgtgaaagctaccttctccagtgaaatctactacatctatcactgatgctaaaagttgtgagggacaaaatcctgagctacttccaaaaactcctattagtcctctgaaaacgggggtatcgaaaccaattgtgaagtcaactttatcccagacagttccatccaagggagaattaagtagagaaatttgtctgcaatctcaatctaaagacaaatctacgacaccaggaggaacaggaattaagcctttcctggaacgctttggagagcgttgtcaagaacatagcaaagaaagtccagctcgtagcacaccccacagaacccccattattactccaaatacaaaggccatccaagaaagattattcaagcaagacacatcttcatctactacccatttagcacaacagctcaagcaggaacgtcaaaaagaactagcatgtcttcgtggccgatttgacaagggcaatatatggagtgcagaaaaaggcggaaactcaaaaagcaaacaactagaaaccaaacaggaaactcactgtcagagcactcccctcaaaaaacaccaaggtgtttcaaaaactcagtcacttccagtaacagaaaaggtgaccgaaaaccagataccagccaaaaattctagtacagaacctaaaggtttcactgaatgcgaaatgacgaaatctagccctttgaaaataacattgtttttagaagaggacaaatccttaaaagtaacatcagacccaaaggttgagcagaaaattgaagtgatacgtgaaattgagatgagtgtggatgatgatgatatcaatagttcgaaagtaattaatgacctcttcagtgatgtcctagaggaaggtgaactagatatggagaagagccaagaggagatggatcaagcattagcagaaagcagcgaagaacaggaagatgcactgaatatctcctcaatgtctttacttgcaccattggcacaaacagttggtgtggtaagtccagagagtttagtgtccacacctagactggaattgaaagacaccagcagaagtgatgaaagtccaaaaccaggaaaattccaaagaactcgtgtccctcgagctgaatctggtgatagccttggttctgaagatcgtgatcttctttacagcattgatgcatatagatctcaaagattcaaagaaacagaacgtccatcaataaagcaggtgattgttcggaaggaagatgttacttcaaaactggatgaaaaaaataatgcctttccttgtcaagttaatatcaaacagaaaatgcaggaactcaataacgaaataaatatgcaacagacagtgatctatcaagctagccaggctcttaactgctgtgttgatgaagaacatggaaaagggtccctagaagaagctgaagcagaaagacttcttctaattgcaactgggaagagaacacttttgattgatgaattgaataaattgaagaacgaaggacctcagaggaagaataaggctagtccccaaagtgaatttatgccatccaaaggatcagttactttgtcagaaatccgcttgcctctaaaagcagattttgtctgcagtacggttcagaaaccagatgcagcaaattactattacttaattatactaaaagcaggagctgaaaatatggtagccacaccattagcaagtacttcaaactctcttaacggtgatgctctgacattcactactacatttactctgcaagatgtatccaatgactttgaaataaatattgaagtttacagcttggtgcaaaagaaagatccctcaggccttgataagaagaaaaaaacatccaagtccaaggctattactccaaagcgactcctcacatctataaccacaaaaagcaacattcattcttcagtcatggccagtccaggaggtcttagtgctgtgcgaaccagcaacttcgcccttgttggatcttacacattatcattgtcttcagtaggaaatactaagtttgttctggacaaggtcccctttttatcttctttggaaggtcatatttatttaaaaataaaatgtcaagtgaattccagtgttgaagaaagaggttttctaaccatatttgaagatgttagtggttttggtgcctggcatcgaagatggtgtgttctttctggaaactgtatatcttattggacttatccagatgatgagaaacgcaagaatcccataggaaggataaatctggctaattgtaccagtcgtcagatagaaccagccaacagagaattttgtgcaagacgcaacacttttgaattaattactgtccgaccacaaagagaagatgaccgagagactcttgtcagccaatgcagggacacactctgtgttaccaagaactggctgtctgcagatactaaagaagagcgggatctctggatgcaaaaactcaatcaagttcttgttgatattcgcctctggcaacctgatgcttgctacaaacctattggaaagccttaaaccgggaaatttccatgctatctagaggtttttgatgtcatcttaagaaacacacttaagagcatcagatttactgattgcattttatgctttaagtacgaaagggtttgtgccaatattcactacgtattatgcagtatttatatcttttgtatgtaaaactttaactgatttctgtcattcatcaatgagtagaagtaaatacattatagttgattttgctaaatcttaatttaaaagcctcattttcctagaaatctaattattcagttattcatgacaatatttttttaaaagtaagaaattctgagttgtcttcttggagctgtaggtcttgaagcagcaacgtctttcaggggttggagacagaaacccattctccaatctcagtagttttttcgaaaggctgtgatcatttattgatcgtgatatgacttgttactagggtactgaaaaaaatgtctaaggcctttacagaaacatttttagtaatgaggatgagaactttttcaaatagcaaatatatattggcttaaagcatgaggctgtcttcagaaaagtgatgtggacataggaggcaatgtgtgagacttgggggttcaatattttatatagaagagttaataagcacatggtttacatttactcagctactatatatgcagtgtggtgcacattttcacagaattctggcttcattaagatcattatttttgctgcgtagcttacagacttagcatattagttttttctactcctacaagtgtaaattgaaaaatctttatattaaaaaagtaaactgttatgaagctgctatgtactaataatactttgcttgccaaagtgtttgggttttgttgttgtttgtttgtttgtttgtttttggttcatgaacaacagtgtctagaaacccattttgaaagtggaaaattattaagtcacctatcacctttaaacgcctttttttaaaattataaaatattgtaaagcagggtctcaacttttaaatacactttgaacttcttctctgaattattaaagttctttatgacctcatttataaacactaaattctgtcacctcctgtcattttattttttattcattcaaatgtattttttcttgtgcatattataaaaatatattttatgagctcttactcaaataaatacctgtaaatgtctaaaggaaaaaaaacacaacaaccaacaaaaaaaaaaaacaacaaaacaaaacaaaaaaaaaaaaaaaaaaacaaaaaaaaaaggggggggccaaaaaaattcccccgggggccccatttggcccccttttttgtcacaaagaggctccactataagagacctctccttaaaaaaagacagaacgtcctgccatcatattataaacaacgtcgctatcagaggaaaaaaactctacctactgtaacaatctttgggaaaaaagcaccccacatttttctaagagagacacaaaatggggagacacacccatcagaaagattaacacatcactcagtgaaaataccaacattaagagattatagtgtataaaccactgtgtatttactccgccagaaacttttgcaagacgaattatcgaaaatttaacagggat

SEQ ID NO: 353657 - DNA, 5093 bp, Homo sapiens
ctcgcggctcggcgctgaaattcaaatttgaacggctgcagaggccgagtccgtcactggaagccgagaggagaggacagctggttgtgggagagttcccccgcctcagactcctggttttttccaggagacacactgagctgagactcacttttctcttcctgaatttgaaccaccgtttccatcgtctcgtagtccgacgcctggggcgatggatccgtttacggagaaactgctggagcgaacccgtgccaggcgagagaatcttcagagaaaaatggctgagaggcccacagcagctccaaggtctatgactcatgctaagcgagctagacagccactttcagaagcaagtaaccagcagcccctctctggtggtgaagagaaatcttgttcaaaaccatcgccatcaaaaaaacgctgttctgacaacactgaagtagaagtttctaacttggaaaataaacaaccagttgagtcgacatctgcaaaatcttgttctccaagtcctgtgtctcctcaggtgcagccacaagcagcagataccatcagtgattctgttgctgtcccggcatcactgctgggcatgaggagagggctgaactcaagattggaagcaactgcagcctcctcagttaaaacacgtatgcaaaaacttgcagagcaacggcgccgttgggataatgatgatatgacagatgacattcctgaaagctcactcttctcaccaatgccatcagaggaaaaggctgcttcccctcccaaacctctgctttcaaatgcctcggcaactccagttggcagaaggggccgtctggccaatcttgctgcaactatttgctcctgggaagatgatgtaaatcactcatttgcaaaacaaaacagtgtacaagaacagcctggtaccgcttgtttatccaaattttcctctgcaagtggagcatctgctaggatcaatagcagcagtgttaagcaggaagctacattctgttcccaaagggatggcgatgcctctttgaataaagccctatcctcaagtgctgatgatgcgtctttggttaatgcctcaatttccagctctgtgaaagctaccttctccagtgaaatctactacatctatcactgatgctaaaagttgtgagggacaaaatcctgagctacttccaaaaactcctattagtcctctgaaaacgggggtatcgaaaccaattgtgaagtcaactttatcccagacagttccatccaagggagaattaagtagagaaatttgtctgcaatctcaatctaaagacaaatctacgacaccaggaggaacaggaattaagcctttcctggaacgctttggagagcgttgtcaagaacatagcaaagaaagtccagctcgtagcacaccccacagaacccccattattactccaaatacaaaggccatccaagaaagattattcaagcaagacacatcttcatctactacccatttagcacaacagctcaagcaggaacgtcaaaaagaactagcatgtcttcgtggccgatttgacaagggcaatatatggagtgcagaaaaaggcggaaactcaaaaagcaaacaactagaaaccaaacaggaaactcactgtcagagcactcccctcaaaaaacaccaaggtgtttcaaaaactcagtcacttccagtaacagaaaaggtgaccgaaaaccagataccagccaaaaattctagtacagaacctaaagaagtgatacgtgaaattgagatgagtgtggatgatgatgatatcaatagttcgaaagtaattaatgacctcttcagtgatgtcctagaggaaggtgaactagatatggagaagagccaagaggagatggatcaagcattagcagaaagcagcgaagaacaggaagatgcactgaatatctcctcaatgtctttacttgcaccattggcacaaacagttggtgtggtaagtccagagagtttagtgtccacacctagactggaattgaaagacaccagcagaagtgatgaaagtccaaaaccaggaaaattccaaagaactcgtgtccctcgagctgaatctggtgatagccttggttctgaagatcgtgatcttctttacagcattgatgcatatagatctcaaagattcaaagaaacagaacgtccatcaataaagcaggtgattgttcggaaggaagatgttacttcaaaactggatgaaaaaaataatgcctttccttgtcaagttaatatcaaacagaaaatgcaggaactcaataacgaaataaatatgcaacagacagtgatctatcaagctagccaggctcttaactgctgtgttgatgaagaacatggaaaagggtccctagaagaagctgaagcagaaagacttcttctaattgcaactgggaagagaacacttttgattgatgaattgaataaattgaagaacgaaggacctcagaggaagaataaggctagtccccaaagtgaatttatgccatccaaaggatcagttactttgtcagaaatccgcttgcctctaaaagcagattttgtctgcagtacggttcagaaaccagatgcagcaaattactattacttaattatactaaaagcaggagctgaaaatatggtagccacaccattagcaagtacttcaaactctcttaacggtgatgctctgacattcactactacatttactctgcaagatgtatccaatgactttgaaataaatattgaagtttacagcttggtgcaaaagaaagatccctcaggccttgataagaagaaaaaaacatccaagtccaaggctattactccaaagcgactcctcacatctataaccacaaaaagcaacattcattcttcagtcatggccagtccaggaggtcttagtgctgtgcgaaccagcaacttcgcccttgttggatcttacacattatcattgtcttcagtaggaaatactaagtttgttctggacaaggtcccctttttatcttctttggaaggtcatatttatttaaaaataaaatgtcaagtgaattccagtgttgaagaaagaggttttctaaccatatttgaagatgttagtggttttggtgcctggcatcgaagatggtgtgttctttctggaaactgtatatcttattggacttatccagatgatgagaaacgcaagaatcccataggaaggataaatctggctaattgtaccagtcgtcagatagaaccagccaacagagaattttgtgcaagacgcaacacttttgaattaattactgtccgaccacaaagagaagatgaccgagagactcttgtcagccaatgcagggacacactctgtgttaccaagaactggctgtctgcagatactaaagaagagcgggatctctggatgcaaaaactcaatcaagttcttgttgatattcgcctctggcaacctgatgcttgctacaaacctattggaaagccttaaaccgggaaatttccatgctatctagaggtttttgatgtcatcttaagaaacacacttaagagcatcagatttactgattgcattttatgctttaagtacgaaagggtttgtgccaatattcactacgtattatgcagtatttatatcttttgtatgtaaaactttaactgatttctgtcattcatcaatgagtagaagtaaatacattatagttgattttgctaaatcttaatttaaaagcctcattttcctagaaatctaattattcagttattcatgacaatatttttttaaaagtaagaaattctgagttgtcttcttggagctgtaggtcttgaagcagcaacgtctttcaggggttggagacagaaacccattctccaatctcagtagttttttcgaaaggctgtgatcatttattgatcgtgatatgacttgttactagggtactgaaaaaaatgtctaaggcctttacagaaacatttttagtaatgaggatgagaactttttcaaatagcaaatatatattggcttaaagcatgaggctgtcttcagaaaagtgatgtggacataggaggcaatgtgtgagacttgggggttcaatattttatatagaagagttaataagcacatggtttacatttactcagctactatatatgcagtgtggtgcacattttcacagaattctggcttcattaagatcattatttttgctgcgtagcttacagacttagcatattagttttttctactcctacaagtgtaaattgaaaaatctttatattaaaaaagtaaactgttatgaagctgctatgtactaataatactttgcttgccaaagtgtttgggttttgttgttgtttgtttgtttgtttgtttttggttcatgaacaacagtgtctagaaacccattttgaaagtggaaaattattaagtcacctatcacctttaaacgcctttttttaaaattataaaatattgtaaagcagggtctcaacttttaaatacactttgaacttcttctctgaattattaaagttctttatgacctcatttataaacactaaattctgtcacctcctgtcattttattttttattcattcaaatgtattttttcttgtgcatattataaaaatatattttatgagctcttactcaaataaatacctgtaaatgtctaaaggaaaaaaaacacaacaaccaacaaaaaaaaaaaacaacaaaacaaaacaaaaaaaaaaaaaaaaaaacaaaaaaaaaaggggggggccaaaaaaattcccccgggggccccatttggcccccttttttgtcacaaagaggctccactataagagacctctccttaaaaaaagacagaacgtcctgccatcatattataaacaacgtcgctatcagaggaaaaaaactctacctactgtaacaatctttgggaaaaaagcaccccacatttttctaagagagacacaaaatggggagacacacccatcagaaagattaacacatcactcagtgaaaataccaacattaagagattatagtgtataaaccactgtgtatttactccgccagaaacttttgcaagacgaattatcgaaaatttaacagggat

SEQ ID NO: 353658 - DNA, 5151 bp, Homo sapiens
ctcgcggctcggcgctgaaattcaaatttgaacggctgcagaggccgagtccgtcactggaagccgagaggagaggacagctggttgtgggagagttcccccgcctcagactcctggttttttccaggagacacactgagctgagactcacttttctcttcctgaatttgaaccaccgtttccatcgtctcgtagtccgacgcctggggcgatggatccgtttacggagaaactgctggagcgaacccgtgccaggcgagagaatcttcagagaaaaatggctgagaggcccacagcagctccaaggtctatgactcatgctaagcgagctagacagccactttcagaagcaagtaaccagcagcccctctctggtggtgaagagaaatcttgttcaaaaccatcgccatcaaaaaaacgctgttctgacaacactgaagtagaagtttctaacttggaaaataaacaaccagttgagtcgacatctgcaaaatcttgttctccaagtcctgtgtctcctcaggtgcagccacaagcagcagataccatcagtgattctgttgctgtcccggcatcactgctgggcatgaggagagggctgaactcaagattggaagcaactgcagcctcctcagttaaaacacgtatgcaaaaacttgcagagcaacggcgccgttgggataatgatgatatgacagatgacattcctgaaagctcactcttctcaccaatgccatcagaggaaaaggctgcttcccctcccaaacctctgctttcaaatgcctcggcaactccagttggcagaaggggccgtctggccaatcttgctgcaactatttgctcctgggaagatgatgtaaatcactcatttgcaaaacaaaacagtgtacaagaacagcctggtaccgcttgtttatccaaattttcctctgcaagtggagcatctgctaggatcaatagcagcagtgttaagcaggaagctacattctgttcccaaagggatggcgatgcctctttgaataaagccctatcctcaagtgctgatgatgcgtctttggttaatgcctcaatttccagctctgtgaaagctaccttctccagtgaaatctactacatctatcactgatgctaaaagttgtgagggacaaaatcctgagctacttccaaaaactcctattagtcctctgaaaacgggggtatcgaaaccaattgtgaagtcaactttatcccagacagttccatccaagggagaattaagtagagaaatttgtctgcaatctcaatctaaagacaaatctacgacaccaggaggaacaggaattaagcctttcctggaacgctttggagagcgttgtcaagaacatagcaaagaaagtccagctcgtagcacaccccacagaacccccattattactccaaatacaaaggccatccaagaaagattattcaagcaagacacatcttcatctactacccatttagcacaacagctcaagcaggaacgtcaaaaagaactagcatgtcttcgtggccgatttgacaagggcaatatatggagtgcagaaaaaggcggaaactcaaaaagcaaacaactagaaaccaaacaggaaactcactgtcagagcactcccctcaaaaaacaccaaggtgtttcaaaaactcagtcacttccagtaacagaaaaggtgaccgaaaaccagataccagccaaaaattctagtacagaacctaaaggtttcactgaatgcgaaatgacgaaatctagccctttgaaaataacattgtttttagaagaggacaaatccttaaaagtaacatcagacccatgatgatatcaatagttcgaaagtaattaatgacctcttcagtgatgtcctagaggaaggtgaactagatatggagaagagccaagaggagatggatcaagcattagcagaaagcagcgaagaacaggaagatgcactgaatatctcctcaatgtctttacttgcaccattggcacaaacagttggtgtggtaagtccagagagtttagtgtccacacctagactggaattgaaagacaccagcagaagtgatgaaagtccaaaaccaggaaaattccaaagaactcgtgtccctcgagctgaatctggtgatagccttggttctgaagatcgtgatcttctttacagcattgatgcatatagatctcaaagattcaaagaaacagaacgtccatcaataaagcaggtgattgttcggaaggaagatgttacttcaaaactggatgaaaaaaataatgcctttccttgtcaagttaatatcaaacagaaaatgcaggaactcaataacgaaataaatatgcaacagacagtgatctatcaagctagccaggctcttaactgctgtgttgatgaagaacatggaaaagggtccctagaagaagctgaagcagaaagacttcttctaattgcaactgggaagagaacacttttgattgatgaattgaataaattgaagaacgaaggacctcagaggaagaataaggctagtccccaaagtgaatttatgccatccaaaggatcagttactttgtcagaaatccgcttgcctctaaaagcagattttgtctgcagtacggttcagaaaccagatgcagcaaattactattacttaattatactaaaagcaggagctgaaaatatggtagccacaccattagcaagtacttcaaactctcttaacggtgatgctctgacattcactactacatttactctgcaagatgtatccaatgactttgaaataaatattgaagtttacagcttggtgcaaaagaaagatccctcaggccttgataagaagaaaaaaacatccaagtccaaggctattactccaaagcgactcctcacatctataaccacaaaaagcaacattcattcttcagtcatggccagtccaggaggtcttagtgctgtgcgaaccagcaacttcgcccttgttggatcttacacattatcattgtcttcagtaggaaatactaagtttgttctggacaaggtcccctttttatcttctttggaaggtcatatttatttaaaaataaaatgtcaagtgaattccagtgttgaagaaagaggttttctaaccatatttgaagatgttagtggttttggtgcctggcatcgaagatggtgtgttctttctggaaactgtatatcttattggacttatccagatgatgagaaacgcaagaatcccataggaaggataaatctggctaattgtaccagtcgtcagatagaaccagccaacagagaattttgtgcaagacgcaacacttttgaattaattactgtccgaccacaaagagaagatgaccgagagactcttgtcagccaatgcagggacacactctgtgttaccaagaactggctgtctgcagatactaaagaagagcgggatctctggatgcaaaaactcaatcaagttcttgttgatattcgcctctggcaacctgatgcttgctacaaacctattggaaagccttaaaccgggaaatttccatgctatctagaggtttttgatgtcatcttaagaaacacacttaagagcatcagatttactgattgcattttatgctttaagtacgaaagggtttgtgccaatattcactacgtattatgcagtatttatatcttttgtatgtaaaactttaactgatttctgtcattcatcaatgagtagaagtaaatacattatagttgattttgctaaatcttaatttaaaagcctcattttcctagaaatctaattattcagttattcatgacaatatttttttaaaagtaagaaattctgagttgtcttcttggagctgtaggtcttgaagcagcaacgtctttcaggggttggagacagaaacccattctccaatctcagtagttttttcgaaaggctgtgatcatttattgatcgtgatatgacttgttactagggtactgaaaaaaatgtctaaggcctttacagaaacatttttagtaatgaggatgagaactttttcaaatagcaaatatatattggcttaaagcatgaggctgtcttcagaaaagtgatgtggacataggaggcaatgtgtgagacttgggggttcaatattttatatagaagagttaataagcacatggtttacatttactcagctactatatatgcagtgtggtgcacattttcacagaattctggcttcattaagatcattatttttgctgcgtagcttacagacttagcatattagttttttctactcctacaagtgtaaattgaaaaatctttatattaaaaaagtaaactgttatgaagctgctatgtactaataatactttgcttgccaaagtgtttgggttttgttgttgtttgtttgtttgtttgtttttggttcatgaacaacagtgtctagaaacccattttgaaagtggaaaattattaagtcacctatcacctttaaacgcctttttttaaaattataaaatattgtaaagcagggtctcaacttttaaatacactttgaacttcttctctgaattattaaagttctttatgacctcatttataaacactaaattctgtcacctcctgtcattttattttttattcattcaaatgtattttttcttgtgcatattataaaaatatattttatgagctcttactcaaataaatacctgtaaatgtctaaaggaaaaaaaacacaacaaccaacaaaaaaaaaaaacaacaaaacaaaacaaaaaaaaaaaaaaaaaaacaaaaaaaaaaggggggggccaaaaaaattcccccgggggccccatttggcccccttttttgtcacaaagaggctccactataagagacctctccttaaaaaaagacagaacgtcctgccatcatattataaacaacgtcgctatcagaggaaaaaaactctacctactgtaacaatctttgggaaaaaagcaccccacatttttctaagagagacacaaaatggggagacacacccatcagaaagattaacacatcactcagtgaaaataccaacattaagagattatagtgtataaaccactgtgtatttactccgccagaaacttttgcaagacgaattatcgaaaatttaacagggat

SEQ ID NO: 353659 - DNA, 4048 bp, Homo sapiens
gttctagacacaggagttactgacacacaattggtagtgacatcttcaggcagaacatattaattgaaaatagaaaagagtgtgaagaactaataaactagaattttaggatacatcaatatctcaatctaaagacaaatctacgacaccaggaggaacaggaattaagcctttcctggaacgctttggagagcgttgtcaagaacatagcaaagaaagtccagctcgtagcacaccccacagaacccccattattactccaaatacaaaggccatccaagaaagattattcaagcaagacacatcttcatctactacccatttagcacaacagctcaagcaggaacgtcaaaaagaactagcatgtcttcgtggccgatttgacaagggcaatatatggagtgcagaaaaaggcggaaactcaaaaagcaaacaactagaaaccaaacaggaaactcactgtcagagcactcccctcaaaaaacaccaaggtgtttcaaaaactcagtcacttccagtaacagaaaaggtgaccgaaaaccagataccagccaaaaattctagtacagaacctaaaggtttcactgaatgcgaaatgacgaaatctagccctttgaaaataacattgtttttagaagaggacaaatccttaaaagtaacatcagacccaaaggttgagcagaaaattgaagtgatacgtgaaattgagatgagtgtggatgatgatgatatcaatagttcgaaagtaattaatgacctcttcagtgatgtcctagaggaaggtgaactagatatggagaagagccaagaggagatggatcaagcattagcagaaagcagcgaagaacaggaagatgcactgaatatctcctcaatgtctttacttgcaccattggcacaaacagttggtgtggtaagtccagagagtttagtgtccacacctagactggaattgaaagacaccagcagaagtgatgaaagtccaaaaccaggaaaattccaaagaactcgtgtccctcgagctgaatctggtgatagccttggttctgaagatcgtgatcttctttacagcattgatgcatatagatctcaaagattcaaagaaacagaacgtccatcaataaagcaggtgattgttcggaaggaagatgttacttcaaaactggatgaaaaaaataatgcctttccttgtcaagttaatatcaaacagaaaatgcaggaactcaataacgaaataaatatgcaacagacagtgatctatcaagctagccaggctcttaactgctgtgttgatgaagaacatggaaaagggtccctagaagaagctgaagcagaaagacttcttctaattgcaactgggaagagaacacttttgattgatgaattgaataaattgaagaacgaaggacctcagaggaagaataaggctagtccccaaagtgaatttatgccatccaaaggatcagttactttgtcagaaatccgcttgcctctaaaagcagattttgtctgcagtacggttcagaaaccagatgcagcaaattactattacttaattatactaaaagcaggagctgaaaatatggtagccacaccattagcaagtacttcaaactctcttaacggtgatgctctgacattcactactacatttactctgcaagatgtatccaatgactttgaaataaatattgaagtttacagcttggtgcaaaagaaagatccctcaggccttgataagaagaaaaaaacatccaagtccaaggctattactccaaagcgactcctcacatctataaccacaaaaagcaacattcattcttcagtcatggccagtccaggaggtcttagtgctgtgcgaaccagcaacttcgcccttgttggatcttacacattatcattgtcttcagtaggaaatactaagtttgttctggacaaggtcccctttttatcttctttggaaggtcatatttatttaaaaataaaatgtcaagtgaattccagtgttgaagaaagaggttttctaaccatatttgaagatgttagtggttttggtgcctggcatcgaagatggtgtgttctttctggaaactgtatatcttattggacttatccagatgatgagaaacgcaagaatcccataggaaggataaatctggctaattgtaccagtcgtcagatagaaccagccaacagagaattttgtgcaagacgcaacacttttgaattaattactgtccgaccacaaagagaagatgaccgagagactcttgtcagccaatgcagggacacactctgtgttaccaagaactggctgtctgcagatactaaagaagagcgggatctctggatgcaaaaactcaatcaagttcttgttgatattcgcctctggcaacctgatgcttgctacaaacctattggaaagccttaaaccgggaaatttccatgctatctagaggtttttgatgtcatcttaagaaacacacttaagagcatcagatttactgattgcattttatgctttaagtacgaaagggtttgtgccaatattcactacgtattatgcagtatttatatcttttgtatgtaaaactttaactgatttctgtcattcatcaatgagtagaagtaaatacattatagttgattttgctaaatcttaatttaaaagcctcattttcctagaaatctaattattcagttattcatgacaatatttttttaaaagtaagaaattctgagttgtcttcttggagctgtaggtcttgaagcagcaacgtctttcaggggttggagacagaaacccattctccaatctcagtagttttttcgaaaggctgtgatcatttattgatcgtgatatgacttgttactagggtactgaaaaaaatgtctaaggcctttacagaaacatttttagtaatgaggatgagaactttttcaaatagcaaatatatattggcttaaagcatgaggctgtcttcagaaaagtgatgtggacataggaggcaatgtgtgagacttgggggttcaatattttatatagaagagttaataagcacatggtttacatttactcagctactatatatgcagtgtggtgcacattttcacagaattctggcttcattaagatcattatttttgctgcgtagcttacagacttagcatattagttttttctactcctacaagtgtaaattgaaaaatctttatattaaaaaagtaaactgttatgaagctgctatgtactaataatactttgcttgccaaagtgtttgggttttgttgttgtttgtttgtttgtttgtttttggttcatgaacaacagtgtctagaaacccattttgaaagtggaaaattattaagtcacctatcacctttaaacgcctttttttaaaattataaaatattgtaaagcagggtctcaacttttaaatacactttgaacttcttctctgaattattaaagttctttatgacctcatttataaacactaaattctgtcacctcctgtcattttattttttattcattcaaatgtattttttcttgtgcatattataaaaatatattttatgagctcttactcaaataaatacctgtaaatgtctaaaggaaaaaaaacacaacaaccaacaaaaaaaaaaaacaacaaaacaaaacaaaaaaaaaaaaaaaaaaacaaaaaaaaaaggggggggccaaaaaaattcccccgggggccccatttggcccccttttttgtcacaaagaggctccactataagagacctctccttaaaaaaagacagaacgtcctgccatcatattataaacaacgtcgctatcagaggaaaaaaactctacctactgtaacaatctttgggaaaaaagcaccccacatttttctaagagagacacaaaatggggagacacacccatcagaaagattaacacatcactcagtgaaaataccaacattaagagattatagtgtataaaccactgtgtatttactccgccagaaacttttgcaagacgaattatcgaaaatttaacagggat

SEQ ID NO: 353660 - DNA, 3532 bp, Homo sapiens
ctcgcggctcggcgctgaaattcaaatttgaacggctgcagaggccgagtccgtcactggaagccgagaggagaggacagctggttgtgggagagttcccccgcctcagactcctggttttttccaggagacacactgagctgagactcacttttctcttcctgaatttgaaccaccgtttccatcgtctcgtagtccgacgcctggggcgatggatccgtttacggagaaactgctggagcgaacccgtgccaggcgagagaatcttcagagaaaaatggctgagaggcccacagcagctccaaggtctatgactcatgctaagcgagctagacagccactttcagaagcaagtaaccagcagcccctctctggtggtgaagagaaatcttgttcaaaaccatcgccatcaaaaaaacgctgttctgacaacactgaagtagaagtttctaacttggaaaataaacaaccagttgagtcgacatctgcaaaatcttgttctccaagtcctgtgtctcctcaggtgcagccacaagcagcagataccatcagtgattctgttgctgtcccggcatcactgctgggcatgaggagagggctgaactcaagattggaagcaactgcagcctcctcagttaaaacacgtatgcaaaaacttgcagagcaacggcgccgttgggataatgatgatatgacagatgacattcctgaaagctcactcttctcaccaatgccatcagaggaaaaggctgcttcccctcccaaacctctgctttcaaatgcctcggcaactccagttggcagaaggggccgtctggccaatcttgctgcaactatttgctcctgggaagatgatgtaaatcactcatttgcaaaacaaaacagtgtacaagaacagcctggtaccgcttgtttatccaaattttcctctgcaagtggagcatctgctaggatcaatagcagcagtgttaagcaggaagctacattctgttcccaaagggatggcgatgcctctttgaataaagccctatcctcaagtgctgatgatgcgtctttggttaatgcctcaatttccagctctgtgaaagctaccttctccagtgaaatctactacatctatcactgatgctaaaagttgtgagggacaaaatcctgagctacttccaaaaactcctattagtcctctgaaaacgggggtatcgaaaccaattgtgaagtcaactttatcccagacagttccatccaagggagaattaagtagagaaatttgtctgcaatctcaatctaaagacaaatctacgacaccaggaggaacaggaattaagcctttcctggaacgctttggagagcgttgtcaagaacatagcaaagaaagtccagctcgtagcacaccccacagaacccccattattactccaaatacaaaggccatccaagaaagattattcaagcaagacacatcttcatctactacccatttagcacaacagctcaagcaggaacgtcaaaaagaactagcatgtcttcgtggccgatttgacaagggcaatatatggagtgcagaaaaaggcggaaactcaaaaagcaaacaactagaaaccaaacaggaaactcactgtcagagcactcccctcaaaaaacaccaaggtgtttcaaaaactcagtcacttccagtaacagaaaaggtgaccgaaaaccagataccagccaaaaattctagtacagaacctaaaggtttcactgaatgcgaaatgacgaaatctagccctttgaaaataacattgtttttagaagaggacaaatccttaaaagtaacatcagacccaaaggttgagcagaaaattgaagtgatacgtgaaattgagatgagtgtggatgatgatgatatcaatagttcgaaagtaattaatgacctcttcagtgatgtcctagaggaaggtgaactagatatggagaagagccaagaggagatggatcaagcattagcagaaagcagcgaagaacaggaagatgcactgaatatctcctcaatgtctttacttgcaccattggcacaaacagttggtgtggtaagtccagagagtttagtgtccacacctagactggaattgaaagacaccagcagaagtgatgaaagtccaaaaccaggaaaattccaaagaactcgtgtccctcgagctgaatctggtgatagccttggttctgaagatcgtgatcttctttacagcattgatgcatatagatctcaaagattcaaagaaacagaacgtccatcaataaagcaggtgattgttcggaaggaagatgttacttcaaaactggatgaaaaaaataatgcctttccttgtcaagttaatatcaaacagaaaatgcaggaactcaataacgaaataaatatgcaacagacagtgatctatcaagctagccaggctcttaactgctgtgttgatgaagaacatggaaaagggtccctagaagaagctgaagcagaaagacttcttctaattgcaactgggaagagaacacttttgattgatgaattgaataaattgaagaacgaaggacctcagaggaagaataaggctagtccccaaagtgaatttatgccatccaaaggatcagttactttgtcagaaatccgcttgcctctaaaagcagattttgtctgcagtacggttcagaaaccagatgcagcaaattactattacttaattatactaaaagcaggagctgaaaatatggtagccacaccattagcaagtacttcaaactctcttaacggtgatgctctgacattcactactacatttactctgcaagatgtatccaatgactttgaaataaatattgaagtttacagcttggtgcaaaagaaagatccctcaggccttgataagaagaaaaaaacatccaagtccaaggctattactccaaagcgactcctcacatctataaccacaaaaagcaacattcattcttcagtcatggccagtccaggaggtcttagtgctgtgcgaaccagcaacttcgcccttgttggatcttacacattatcattgtcttcagtaggaaatactaagtttgttctggacaaggtcccctttttatcttctttggaaggtcatatttatttaaaaataaaatgtcaagtgaattccagtgttgaagaaagaggttttctaaccatatttgaagatgttagtggttttggtgcctggcatcgaagatggtgtgttctttctggaaactgtatatcttattggacttatccagatgatgagaaacgcaagaatcccataggaaggataaatctggctaattgtaccagtcgtcagatagaaccagccaacagagaattttgtgcaagacgcaacacttttgaattaattactgtccgaccacaaagagaagatgaccgagagactcttgtcagccaatgcagggacacactctgtgttaccaagaactggctggcctgcagatacttataaaaaaaggggtaaaaaaagaggtaaaaaaaagtcccccccgc

SEQ ID NO: 353661 - DNA, 1476 bp, Homo sapiens
cataaacccacttacctttacacaaaacaggagttagcctatcccttctgccttaaattctggttctcacttccttgctaataaatgtcccttgtggctttcttttttcccccccagaatagggcacttttatctgaattaaaaatttgttcaggttgggcactgtagctcatacctacactcccaaagtgctgggattacaggtgtgaacactgtgcctggccaaaagtagaaaatttttatggtcttaattggctaataggtatattgctagatagatgaccctttgcttgttaattttgaaattataatacatttagcactgaaattatactgaatataataatatattttggaagactttttaaagttttttttttgttttgagatagagtctcactctgtcacccaagctggagtgcagtggcacgatctcggctcactacagcctccatctcccagtattttatatagaagagttaataagcacatggtttacatttactcagctactatatatgcagtgtggtgcacattttcacagaattctggcttcattaagatcattatttttgctgcgtagcttacagacttagcatattagttttttctactcctacaagtgtaaattgaaaaatctttatattaaaaaagtaaactgttatgaagctgctatgtactaataatactttgcttgccaaagtgtttgggttttgttgttgtttgtttgtttgtttgtttttggttcatgaacaacagtgtctagaaacccattttgaaagtggaaaattattaagtcacctatcacctttaaacgcctttttttaaaattataaaatattgtaaagcagggtctcaacttttaaatacactttgaacttcttctctgaattattaaagttctttatgacctcatttataaacactaaattctgtcacctcctgtcattttattttttattcattcaaatgtattttttcttgtgcatattataaaaatatattttatgagctcttactcaaataaatacctgtaaatgtctaaaggaaaaaaaacacaacaaccaacaaaaaaaaaaaacaacaaaacaaaacaaaaaaaaaaaaaaaaaaacaaaaaaaaaaggggggggccaaaaaaattcccccgggggccccatttggcccccttttttgtcacaaagaggctccactataagagacctctccttaaaaaaagacagaacgtcctgccatcatattataaacaacgtcgctatcagaggaaaaaaactctacctactgtaacaatctttgggaaaaaagcaccccacatttttctaagagagacacaaaatggggagacacacccatcagaaagattaacacatcactcagtgaaaataccaacattaagagattatagtgtataaaccactgtgtatttactccgccagaaacttttgcaagacgaattatcgaaaatttaacagggat

SEQ ID NO: 353662 - DNA, 2170 bp, Homo sapiens
ctcgcggctcggcgctgaaattcaaatttgaacggctgcagaggccgagtccgtcactggaagccgagaggagaggacagctggttgtgggagagttcccccgcctcagactcctggttttttccaggagacacactgagctgagactcacttttctcttcctgaatttgaaccaccgtttccatcgtctcgtagtccgacgcctggggcgatggatccgtttacggagaaactgctggagcgaacccgtgccaggcgagagaatcttcagagaaaaatggctgagaggcccacagcagctccaaggtctatgactcatgctaagcgagctagacagccactttcagaagcaagtaaccagcagcccctctctggtggtgaagagaaatcttgttcaaaaccatcgccatcaaaaaaacgctgttctgacaacactgaagtagaagtttctaacttggaaaataaacaaccagttgagtcgacatctgcaaaatcttgttctccaagtcctgtgtctcctcaggtgcagccacaagcagcagataccatcagtgattctgttgctgtcccggcatcactgctgggcatgaggagagggctgaactcaagattggaagcaactgcagcctcctcagttaaaacacgtatgcaaaaacttgcagagcaacggcgccgttgggataatgatgatatgacagatgacattcctgaaagctcactcttctcaccaatgccatcagaggaaaaggctgcttcccctcccaaacctctgctttcaaatgcctcggcaactccagttggcagaaggggccgtctggccaatcttgctgcaactatttgctcctgggaagatgatgtaaatcactcatttgcaaaacaaaacagtgtacaagaacagcctggtaccgcttgtttatccaaattttcctctgcaagtggagcatctgctaggatcaatagcagcagtgttaagcaggaagctacattctgttcccaaagggatggcgatgcctctttgaataaagccctatcctcaagtgctgatgatgcgtctttggttaatgcctcaatttccagctctgtgaaagctaccttctccagtgaaatctactacatctatcactgatgctaaaagttgtgagggacaaaatcctgagctacttccaaaaactcctattagtcctctgaaaacgggggtatcgaaaccaattgtgaagtcaactttatcccagacagttccatccaagggagaattaagtagagaaatttgtctgcaatctcaatctaaagacaaatctacgacaccaggaggaacaggaattaagcctttcctggaacgctttggagagcgttgtcaagaacatagcaaagaaagtccagctcgtagcacaccccacagaacccccattattactccaaatacaaaggccatccaagaaagattattcaagcagcaagatgtatccaatgactttgaaataaatattgaagtttacagcttggtgcaaaagaaagatccctcaggccttgataagaagaaaaaaacatccaagtccaaggctattactccaaagcgactcctcacatctataaccacaaaaagcaacattcattcttcagtcatggccagtccaggaggtcttagtgctgtgcgaaccagcaacttcgcccttgttggatcttacacattatcattgtcttcagtaggaaatactaagtttgttctggacaaggtcccctttttatcttctttggaaggtcatatttatttaaaaataaaatgtcaagtgaattccagtgttgaagaaagaggttttctaaccatatttgaagatgttagtggttttggtgcctggcatcgaagatggtgtgttctttctggaaactgtatatcttattggacttatccagatgatgagaaacgcaagaatcccataggaaggataaatctggctaattgtaccagtcgtcagatagaaccagccaacagagaattttgtgcaagacgcaacacttttgaattaattactgtccgaccacaaagagaagatgaccgagagactcttgtcagccaatgcagggacacactctgtgttaccaagaactggctggcctgcagatacttataaaaaaaggggtaaaaaaagaggtaaaaaaaagtcccccccgc

SEQ ID NO: 353663 - DNA, 465 bp, Homo sapiens
tctgcaatctcaatctaaagacaaatctacgacaccaggttacgtatttataaaaaatttagttattgctgattatattcaggatatctattctcagcattttaaatattcaattgtgaatggtacagcaatgatttgccagggccaatgcctgaatgttccaaatgagacctcagctttagttgattcaatgaatatttattaacgtagactagcctacttactggttaaaggacttaatatgttacattttaacagtttaaacatgctttttccaggatgatcatgctagattttttttctatattttttgattcagacaaagcatgtttaactggaaatcacattttaggggcataatggagaaacattcttgtagccaagtgtgcagagcagtgcttctcaatcttgagtatgaaggcacctctaatagcagagggaagtgaatgtgcatgcaaatgactc

SEQ ID NO: 353664 - DNA, 276 bp, Homo sapiens
atttttatgtctagctaggaacaataataaatgttaaatatgtttctctaagcccagtgtaactaaattttaacttttaaataatagctttttaatatttaatttgtaccaacttaaatgctgcttaatgcttactgacttaaatagtcttattttctactaatttctcttaatttgtttttaaagaatcccataggaaggataaatctggctaattgtaccagtcgtcagatagaaccagccaacagagaattttgtgcaagacgcaacactttt

SEQ ID NO: 353665 - DNA, 5156 bp, Homo sapiens
ctcgcggctcggcgctgaaattcaaatttgaacggctgcagaggccgagtccgtcactggaagccgagaggagaggacagctggttgtgggagagttcccccgcctcagactcctggttttttccaggagacacactgagctgagactcacttttctcttcctgaatttgaaccaccgtttccatcgtctcgtagtccgacgcctggggcgatggatccgtttacggagaaactgctggagcgaacccgtgccaggcgagagaatcttcagagaaaaatggctgagaggcccacagcagctccaaggtctatgactcatgctaagcgagctagacagccactttcagaagcaagtaaccagcagcccctctctggtggtgaagagaaatcttgttcaaaaccatcgccatcaaaaaaacgctgttctgacaacactgaagtagaagtttctaacttggaaaataaacaaccagttgagtcgacatctgcaaaatcttgttctccaagtcctgtgtctcctcaggtgcagccacaagcagcagataccatcagtgattctgttgctgtcccggcatcactgctgggcatgaggagagggctgaactcaagattggaagcaactgcagcctcctcagttaaaacacgtatgcaaaaacttgcagagcaacggcgccgttgggataatgatgatatgacagatgacattcctgaaagctcactcttctcaccaatgccatcagaggaaaaggctgcttcccctcccaaacctctgctttcaaatgcctcggcaactccagttggcagaaggggccgtctggccaatcttgctgcaactatttgctcctgggaagatgatgtaaatcactcatttgcaaaacaaaacagtgtacaagaacagcctggtaccgcttgtttatccaaattttcctctgcaagtggagcatctgctaggatcaatagcagcagtgttaagcaggaagctacattctgttcccaaagggatggcgatgcctctttgaataaagccctatcctcaagtgctgatgatgcgtctttggttaatgcctcaatttccagctctgtgaaagctaccttctccagtgaaatctactacatctatcactgatgctaaaagttgtgagggacaaaatcctgagctacttccaaaaactcctattagtcctctgaaaacgggggtatcgaaaccaattgtgaagtcaactttatcccagacagttccatccaagggagaattaagtagagaaatttgtctgcaatctcaatctaaagacaaatctacgacaccaggaggaacaggaattaagcctttcctggaacgctttggagagcgttgtcaagaacatagcaaagaaagtccagctcgtagcacaccccacagaacccccattattactccaaatacaaaggccatccaagaaagattattcaagcaagacacatcttcatctactacccatttagcacaacagctcaagcaggaacgtcaaaaagaactagcatgtcttcgtggccgatttgacaagggcaatatatggagtgcagaaaaaggcggaaactcaaaaagcaaacaactagaaaccaaacaggaaactcactgtcagagcactcccctcaaaaaacaccaaggtgtttcaaaaactcagtcacttccagtaacagaaaaggtgaccgaaaaccagataccagccaaaaattctagtacagaacctaaaggtttcactgaatgcgaaatgacgaaatctagccctttgaaaataacattgtttttagaagaggacaaatccttaaaagtaacatcagacccaaaggttgagcagaaaattgaagtgatacgtgaaattgagatgagtgtggatgatgatgatatcaatagttcgaaagtaattaatgacctcttcagtgatgtcctagaggaaggtgaactagatatggagaagagccaagaggagatggatcaagcattagcagaaagcagcgaagaacaggaagatgcactgaatatctcctcaatgtctttacttgcaccattggcacaaacagttggtgtggtaagtccagagagtttagtgtccacacctagactggaattgaaagacaccagcagaagtgatgaaagtccaaaaccaggaaaattccaaagaactcgtgtccctcgagctgaatctggtgatagccttggttctgaagatcgtgatcttctttacagcattgatgcatatagatctcaaagattcaaagaaacagaacgtccatcaataaagcaggtgattgttcggaaggaagatgttacttcaaaactggatgaaaaaaataatgcctttccttgtcaagttaatatcaaacagaaaatgcaggaactcaataacgaaataaatatgcaacagacagtgatctatcaagctagccaggctcttaactgctgtgttgatgaagaacatggaaaagggtccctagaagaagctgaagcagaaagacttcttctaattgcaactgggaagagaacacttttgattgatgaattgaataaattgaagaacgaaggacctcagaggaagaataaggctagtccccaaagtgaatttatgccatccaaaggatcagttactttgtcagaaatccgcttgcctctaaaagcagattttgtctgcagtacggttcagaaaccagatgcagcaaattactattacttaattatactaaaagcaggagctgaaaatatggtagccacaccattagcaagtacttcaaactctcttaacggtgatgctctgacattcactactacatttactctgcaagatgtatccaatgactttgaaataaatattgaagtttacagcttggtgcaaaagaaagatccctcaggccttgataagaagaaaaaaacatccaagtccaaggctattactccaaagcgactcctcacatctataaccacaaaaagcaacattcattcttcagtcatggccagtccaggaggtcttagtgctgtgcgaaccagcaacttcgcccttgttggatcttacacattatcattgtcttcagtaggaaatactaagtttgttctggacaaggtcccctttttatcttctttggaaggtcatatttatttaaaaataaaatgtcaagtgaattccagtgttgaagaaagaggttttctaaccatatttgaagatgttagtggttttggtgcctggcatcgaagatggtgtgttctttctggaaactgtatatcttattggacttatccagatgatgagaaacgcaagaatcccataggaaggataaatctggctaattgtaccagtcgtcagatagaaccagccaacagagaattttgtgcaagacgcaacacttttgaattaattactgtccgaccacaaagagaagatgaccgagagactcttgtcagccaatgcagggacacactctgtgttaccaagaactggctgtctgcagatactaaagaagagcgggatctctggatgcaaaaactcaatcaagttcttgttgatattcgcctctggcaacctgatgcttgctacaaacctattggaaagccttaaaccgggaaatttccatgctatctagaggtttttgatgtcatcttaagaaacacacttaagagcatcagatttactgattgcattttatgctttaagtacgaaagggtttgtgccaatattcactacgtattatgcagtatttatatcttttgtatgtaaaactttaactgatttctgtcattcatcaatgagtagaagtaaatacattatagttgattttgctaaatcttaatttaaaagcctcattttcctagaaatctaattattcagttattcatgacaatatttttttaaaagtaagaaattctgagttgtcttcttggagctgtaggtcttgaagcagcaacgtctttcaggggttggagacagaaacccattctccaatctcagtagttttttcgaaaggctgtgatcatttattgatcgtgatatgacttgttactagggtactgaaaaaaatgtctaaggcctttacagaaacatttttagtaatgaggatgagaactttttcaaatagcaaatatatattggcttaaagcatgaggctgtcttcagtattttatatagaagagttaataagcacatggtttacatttactcagctactatatatgcagtgtggtgcacattttcacagaattctggcttcattaagatcattatttttgctgcgtagcttacagacttagcatattagttttttctactcctacaagtgtaaattgaaaaatctttatattaaaaaagtaaactgttatgaagctgctatgtactaataatactttgcttgccaaagtgtttgggttttgttgttgtttgtttgtttgtttgtttttggttcatgaacaacagtgtctagaaacccattttgaaagtggaaaattattaagtcacctatcacctttaaacgcctttttttaaaattataaaatattgtaaagcagggtctcaacttttaaatacactttgaacttcttctctgaattattaaagttctttatgacctcatttataaacactaaattctgtcacctcctgtcattttattttttattcattcaaatgtattttttcttgtgcatattataaaaatatattttatgagctcttactcaaataaatacctgtaaatgtctaaaggaaaaaaaacacaacaaccaacaaaaaaaaaaaacaacaaaacaaaacaaaaaaaaaaaaaaaaaaacaaaaaaaaaaggggggggccaaaaaaattcccccgggggccccatttggcccccttttttgtcacaaagaggctccactataagagacctctccttaaaaaaagacagaacgtcctgccatcatattataaacaacgtcgctatcagaggaaaaaaactctacctactgtaacaatctttgggaaaaaagcaccccacatttttctaagagagacacaaaatggggagacacacccatcagaaagattaacacatcactcagtgaaaataccaacattaagagattatagtgtataaaccactgtgtatttactccgccagaaacttttgcaagacgaattatcgaaaatttaacagggat

SEQ ID NO: 353666 - DNA, 5150 bp, Homo sapiens
ctcgcggctcggcgctgaaattcaaatttgaacggctgcagaggccgagtccgtcactggaagccgagaggagaggacagctggttgtgggagagttcccccgcctcagactcctggttttttccaggagacacactgagctgagactcacttttctcttcctgaatttgaaccaccgtttccatcgtctcgtagtccgacgcctggggcgatggatccgtttacggagaaactgctggagcgaacccgtgccaggcgagagaatcttcagagaaaaatggctgagaggcccacagcagctccaaggtctatgactcatgctaagcgagctagacagccactttcagaagcaagtaaccagcagcccctctctggtggtgaagagaaatcttgttcaaaaccatcgccatcaaaaaaacgctgttctgacaacactgaagtagaagtttctaacttggaaaataaacaaccagttgagtcgacatctgcaaaatcttgttctccaagtcctgtgtctcctcaggtgcagccacaagcagcagataccatcagtgattctgttgctgtcccggcatcactgctgggcatgaggagagggctgaactcaagattggaagcaactgcagcctcctcagttaaaacacgtatgcaaaaacttgcagagcaacggcgccgttgggataatgatgatatgacagatgacattcctgaaagctcactcttctcaccaatgccatcagaggaaaaggctgcttcccctcccaaacctctgctttcaaatgcctcggcaactccagttggcagaaggggccgtctggccaatcttgctgcaactatttgctcctgggaagatgatgtaaatcactcatttgcaaaacaaaacagtgtacaagaacagcctggtaccgcttgtttatccaaattttcctctgcaagtggagcatctgctaggatcaatagcagcagtgttaagcaggaagctacattctgttcccaaagggatggcgatgcctctttgaataaagccctatcctcaagtgctgatgatgcgtctttggttaatgcctcaatttccagctctgtgaaagctaccttctccagtgaaatctactacatctatcactgatgctaaaagttgtgagggacaaaatcctgagctacttccaaaaactcctattagtcttccatccaagggagaattaagtagagaaatttgtctgcaatctcaatctaaagacaaatctacgacaccaggaggaacaggaattaagcctttcctggaacgctttggagagcgttgtcaagaacatagcaaagaaagtccagctcgtagcacaccccacagaacccccattattactccaaatacaaaggccatccaagaaagattattcaagcaagacacatcttcatctactacccatttagcacaacagctcaagcaggaacgtcaaaaagaactagcatgtcttcgtggccgatttgacaagggcaatatatggagtgcagaaaaaggcggaaactcaaaaagcaaacaactagaaaccaaacaggaaactcactgtcagagcactcccctcaaaaaacaccaaggtgtttcaaaaactcagtcacttccagtaacagaaaaggtgaccgaaaaccagataccagccaaaaattctagtacagaacctaaaggtttcactgaatgcgaaatgacgaaatctagccctttgaaaataacattgtttttagaagaggacaaatccttaaaagtaacatcagacccaaaggttgagcagaaaattgaagtgatacgtgaaattgagatgagtgtggatgatgatgatatcaatagttcgaaagtaattaatgacctcttcagtgatgtcctagaggaaggtgaactagatatggagaagagccaagaggagatggatcaagcattagcagaaagcagcgaagaacaggaagatgcactgaatatctcctcaatgtctttacttgcaccattggcacaaacagttggtgtggtaagtccagagagtttagtgtccacacctagactggaattgaaagacaccagcagaagtgatgaaagtccaaaaccaggaaaattccaaagaactcgtgtccctcgagctgaatctggtgatagccttggttctgaagatcgtgatcttctttacagcattgatgcatatagatctcaaagattcaaagaaacagaacgtccatcaataaagcaggtgattgttcggaaggaagatgttacttcaaaactggatgaaaaaaataatgcctttccttgtcaagttaatatcaaacagaaaatgcaggaactcaataacgaaataaatatgcaacagacagtgatctatcaagctagccaggctcttaactgctgtgttgatgaagaacatggaaaagggtccctagaagaagctgaagcagaaagacttcttctaattgcaactgggaagagaacacttttgattgatgaattgaataaattgaagaacgaaggacctcagaggaagaataaggctagtccccaaagtgaatttatgccatccaaaggatcagttactttgtcagaaatccgcttgcctctaaaagcagattttgtctgcagtacggttcagaaaccagatgcagcaaattactattacttaattatactaaaagcaggagctgaaaatatggtagccacaccattagcaagtacttcaaactctcttaacggtgatgctctgacattcactactacatttactctgcaagatgtatccaatgactttgaaataaatattgaagtttacagcttggtgcaaaagaaagatccctcaggccttgataagaagaaaaaaacatccaagtccaaggctattactccaaagcgactcctcacatctataaccacaaaaagcaacattcattcttcagtcatggccagtccaggaggtcttagtgctgtgcgaaccagcaacttcgcccttgttggatcttacacattatcattgtcttcagtaggaaatactaagtttgttctggacaaggtcccctttttatcttctttggaaggtcatatttatttaaaaataaaatgtcaagtgaattccagtgttgaagaaagaggttttctaaccatatttgaagatgttagtggttttggtgcctggcatcgaagatggtgtgttctttctggaaactgtatatcttattggacttatccagatgatgagaaacgcaagaatcccataggaaggataaatctggctaattgtaccagtcgtcagatagaaccagccaacagagaattttgtgcaagacgcaacacttttgaattaattactgtccgaccacaaagagaagatgaccgagagactcttgtcagccaatgcagggacacactctgtgttaccaagaactggctgtctgcagatactaaagaagagcgggatctctggatgcaaaaactcaatcaagttcttgttgatattcgcctctggcaacctgatgcttgctacaaacctattggaaagccttaaaccgggaaatttccatgctatctagaggtttttgatgtcatcttaagaaacacacttaagagcatcagatttactgattgcattttatgctttaagtacgaaagggtttgtgccaatattcactacgtattatgcagtatttatatcttttgtatgtaaaactttaactgatttctgtcattcatcaatgagtagaagtaaatacattatagttgattttgctaaatcttaatttaaaagcctcattttcctagaaatctaattattcagttattcatgacaatatttttttaaaagtaagaaattctgagttgtcttcttggagctgtaggtcttgaagcagcaacgtctttcaggggttggagacagaaacccattctccaatctcagtagttttttcgaaaggctgtgatcatttattgatcgtgatatgacttgttactagggtactgaaaaaaatgtctaaggcctttacagaaacatttttagtaatgaggatgagaactttttcaaatagcaaatatatattggcttaaagcatgaggctgtcttcagaaaagtgatgtggacataggaggcaatgtgtgagacttgggggttcaatattttatatagaagagttaataagcacatggtttacatttactcagctactatatatgcagtgtggtgcacattttcacagaattctggcttcattaagatcattatttttgctgcgtagcttacagacttagcatattagttttttctactcctacaagtgtaaattgaaaaatctttatattaaaaaagtaaactgttatgaagctgctatgtactaataatactttgcttgccaaagtgtttgggttttgttgttgtttgtttgtttgtttgtttttggttcatgaacaacagtgtctagaaacccattttgaaagtggaaaattattaagtcacctatcacctttaaacgcctttttttaaaattataaaatattgtaaagcagggtctcaacttttaaatacactttgaacttcttctctgaattattaaagttctttatgacctcatttataaacactaaattctgtcacctcctgtcattttattttttattcattcaaatgtattttttcttgtgcatattataaaaatatattttatgagctcttactcaaataaatacctgtaaatgtctaaaggaaaaaaaacacaacaaccaacaaaaaaaaaaaacaacaaaacaaaacaaaaaaaaaaaaaaaaaaacaaaaaaaaaaggggggggccaaaaaaattcccccgggggccccatttggcccccttttttgtcacaaagaggctccactataagagacctctccttaaaaaaagacagaacgtcctgccatcatattataaacaacgtcgctatcagaggaaaaaaactctacctactgtaacaatctttgggaaaaaagcaccccacatttttctaagagagacacaaaatggggagacacacccatcagaaagattaacacatcactcagtgaaaataccaacattaagagattatagtgtataaaccactgtgtatttactccgccagaaacttttgcaagacgaattatcgaaaatttaacagggat

SEQ ID NO: 353667 - DNA, 2319 bp, Homo sapiens
gttcttgataagaagaaaaacaacatccaagtccaaggctattactccaaagcgatcctcacatctataaccacaaaaagcaacattcattcttcagtcatggccagtccaggaggtcttagtgctgtgcgaaccagcaacttcgcccttgttggatcttacacattatcattgtcttcagtaggaaatactaagtttgttctggacaaggtcccctttttatcttctttggaaggtcatatttatttaaaaataaaatgtcaagtgaattccagtgttgaagaaagaggttttctaaccatatttgaagatgttagtggttttggtgcctggcatcgaagatggtgtgttctttctggaaactgtatatcttattggacttatccagatgatgagaaacgcaagaatcccataggaaggataaatctggctaattgtaccagtcgtcagatagaaccagccaacagagaattttgtgcaagacgcaacacttttgaattaattactgtccgaccacaaagagaagatgaccgagagactcttgtcagccaatgcagggacacactctgtgttaccaagaactggctgtctgcagatactaaagaagagcgggatctctggatgcaaaaactcaatcaagttcttgttgatattcgcctctggcaacctgatgcttgctacaaacctattggaaagccttaaaccgggaaatttccatgctatctagaggtttttgatgtcatcttaagaaacacacttaagagcatcagatttactgattgcattttatgctttaagtacgaaagggtttgtgccaatattcactacgtattatgcagtatttatatcttttgtatgtaaaactttaactgatttctgtcattcatcaatgagtagaagtaaatacattatagttgattttgctaaatcttaatttaaaagcctcattttcctagaaatctaattattcagttattcatgacaatatttttttaaaagtaagaaattctgagttgtcttcttggagctgtaggtcttgaagcagcaacgtctttcaggggttggagacagaaacccattctccaatctcagtagttttttcgaaaggctgtgatcatttattgatcgtgatatgacttgttactagggtactgaaaaaaatgtctaaggcctttacagaaacatttttagtaatgaggatgagaactttttcaaatagcaaatatatattggcttaaagcatgaggctgtcttcagaaaagtgatgtggacataggaggcaatgtgtgagacttgggggttcaatattttatatagaagagttaataagcacatggtttacatttactcagctactatatatgcagtgtggtgcacattttcacagaattctggcttcattaagatcattatttttgctgcgtagcttacagacttagcatattagttttttctactcctacaagtgtaaattgaaaaatctttatattaaaaaagtaaactgttatgaagctgctatgtactaataatactttgcttgccaaagtgtttgggttttgttgttgtttgtttgtttgtttgtttttggttcatgaacaacagtgtctagaaacccattttgaaagtggaaaattattaagtcacctatcacctttaaacgcctttttttaaaattataaaatattgtaaagcagggtctcaacttttaaatacactttgaacttcttctctgaattattaaagttctttatgacctcatttataaacactaaattctgtcacctcctgtcattttattttttattcattcaaatgtattttttcttgtgcatattataaaaatatattttatgagctcttactcaaataaatacctgtaaatgtctaaaggaaaaaaaacacaacaaccaacaaaaaaaaaaaacaacaaaacaaaacaaaaaaaaaaaaaaaaaaacaaaaaaaaaaggggggggccaaaaaaattcccccgggggccccatttggcccccttttttgtcacaaagaggctccactataagagacctctccttaaaaaaagacagaacgtcctgccatcatattataaacaacgtcgctatcagaggaaaaaaactctacctactgtaacaatctttgggaaaaaagcaccccacatttttctaagagagacacaaaatggggagacacacccatcagaaagattaacacatcactcagtgaaaataccaacattaagagattatagtgtataaaccactgtgtatttactccgccagaaacttttgcaagacgaattatcgaaaatttaacagggat

SEQ ID NO: 353668 - DNA, 1573 bp, Homo sapiens
ctcgcggctcggcgctgaaattcaaatttgaacggctgcagaggccgagtccgtcactggaagccgagaggagaggacagctggttgtgggagagttcccccgcctcagactcctggttttttccaggagacacactgagctgagactcacttttctcttcctgaatttgaaccaccgtttccatcgtctcgtagtccgacgcctggggcgatggatccgtttacggagaaactgctggagcgaacccgtgccaggcgagagaatcttcagagaaaaatggctgagaggcccacagcagctccaaggtctatgactcatgctaagcgagctagacagccactttcagaagcaagtaaccagcagcccctctctggtggtgaagagaaatcttgttcaaaaccatcgccatcaaaaaaacgctgttctgacaacactgaagtagaagtttctaacttggaaaataaacaaccagttgagtcgacatctgcaaaatcttgttctccaagtcctgtgtctcctcaggtgcagccacaagcagcagataccatcagtgattctgttgctgtcccggcatcactgctgggcatgaggagagggctgaactcaagattggaagcaactgcagcctcctcagttaaaacacgtatgcaaaaacttgcagagcaacggcgccgttgggataatgatgatatgacagatgacattcctgaaagctcactcttctcaccaatgccatcagaggaaaaggctgcttcccctcccaaacctctgctttcaaatgcctcggcaactccagttggcagaaggggccgtctggccaatcttgctgcaactatttgctcctgggaagatgatgtaaatcactcatttgcaaaacaaaacagtgtacaagaacagcctggtaccgcttgtttatccaaattttcctctgcaagtggagcatctgctaggatcaatagcagcagtgttaagcaggaagctacattctgttcccaaagggatggcgatgcctctttgaataaagccctatcctcaagtgctgatgatgcgtctttggttaatgcctcaatttccagctctgtgaaagctaccttctccagtgaaatctactacatctatcactgatgctaaaagttgtgagggacaaaatcctgagctacttccaaaaactcctattagtcctctgaaaacgggggtatcgaaaccaattgtgaagtcaactttatcccagacagttccatccaagggagaattaagtagagaaatttgtctgcaatctcaatctaaagacaaatctacgacaccaggaggaacaggaattaagcctttcctggaacgctttggagagcgttgtcaagaacatagcaaagaaagtccagctcgtagcacaccccacagaacccccattattactccaaatacaaaggccatccaagaaagattattcaagcaagacacatcttcatctactacccatttagcacaacagctcaagcagaacgtcaataataaggctgaaactcattaagcatacaactataaaccaaacatgatacgtactgtcataacact

SEQ ID NO: 353669 - DNA, 386 bp, Homo sapiens
gagtttgcccaaatcacctggggcattggagacaaaggaaaaccacttgaaaacagttccaacgggaagcacggctcatccttgtggccgtaaacgataaacaaacactataaatgggcaccacagacaaagccacatcagtgccagtttttatctttggggcctatctcctgttcatgtgcaaacctgtaggtcacagagacacctttgctgggacttgtgctgttttgggctacagggcagcctcttccagactgagctggggtccattgacagactcctccccgactgcaggagatactttgcctctccagtttggtgtctgagtgatcattcaacggtgcattattaatgtttgtttgtttatttatttatttttgatgaga

SEQ ID NO: 353670 - DNA, 3268 bp, Homo sapiens
tttttttgtaggacaggaatttttattccacgccaactcttccagagtcttgaagtcttcctgcagattgttaatgaacaattatagcaaaaaatgaatgaatgaattaacgaatgtataagtggatgaatgacgaatgaaccaacaatgaatgaatgtagagaaagcctcaagggggcccgagggtacgctgtgctgcggagcatgcccaccaggtggcgatgccagcggcgggcgggcctggccggattggccgcgccgctcttgccgtgggtgccgacggcggcgccgggacgggcgtggggggtagggcgagtcatatgatccgctcggcttcctgggtctggctgctgccgcccgccggtgtccgcccgtgtcgcgccggggcaccaaggagccgttggagggtccgggcggaggcccgctcgtgtggaagtcgtcgacgccgccgctcgtccgtcctcccgtccgttctcgctcccggccgccatcatgctggcgctcatctcccgcctgctggactggttccgttcgctcttctggaaggaagagatggagctgacgctcgtggggctgcagtactcgggcaagaccaccttcgtcaatgtcatcgcgtcaggtcaattcagtgaagatatgatacccacagtgggcttcaacatgaggaaggtaactaaaggtaacgtcacaataaagatctgggacataggaggacaaccccgatttcgaagcatgtgggagcggtattgcagaggagtcaatgctattgtttacatgatagatgctgcagatcgtgaaaagatagaagcttcccgaaatgagctacataatcttctagataaaccacagttacaaggaattccagtgctagtgcttggaaacaagagagatcttcctaatgccttggatgagaaacagctaattgaaaaaatgaatctgtctgctattcaggatagagaaatttgctgctattcaatttcttgcaaagaaaaggataatatagatatcacacttcagtggcttattcagcattcaaaatctagaagaagctgaagcatctcctgaagtcttccagtccttcttggctataatcctagaattattgtccgttcctctgaagtaattcccagaatacggtccttcctaaaccccagaaattgcctttttcagagtttatttctcatgtgcactgctgaagatgaatatccctaatccttcataaagaatcagctagagttgtcatgataaagtcagcacacacaaaaaggcttcttacacatacctgtcttaaaccatgtgtagagctttaaaaacagaaaaaaaaccccatatacttatgaccatcttaaatcaagaaaattgcatatttccattctggtctttctgggccagatttttatattggttttcagtaaatgtctatctataatatttcattatagagtccagtagcttaatactgacactgacttgatacagcatgaagtttctagtgccacacacagtatttagaaaacctttaggcgtgaatgactcatgtgggatatatgtaaacataatgtttattttatctcacaaatgcatgtgaaatgtataattacatcttaggaatccaaaatggtctgcagagagtgagcggaggcaccagatcaatgttggttctttgcactggtgagattctgcctgatgaatattaaagatatcctgctttctgagaactctatcaccagatggcagttgggatatgggaggaactaaagcatcctgttttgtatctgtccagatcattatttctgtctcttgttttttcttcctggttcaggatacttttttaaggggttgagaattgaagattttccaaaagcgttcatgaatttagagcattccacccaatataataaaacctgttaagaatgtcagtctttgttcaaacatctgtttgttctatctccagtcattaaatcagtgctgctgcatgacactcttaactcctgactttttatatccagtcataaagttgactttcagcacaaaagatacttataaacaaataaaaaatttttatttttctctcttactgatgtaagctttggcactcttttgactggtgccattagacatcttgattattgtgacaactctagacctgcctgctttatctaatgtaatcatgctcaatgtctacaggttgtttaataatcagtcacacagagaactgaggaactgatgctgtttgtttgcttctatgatacagagatgtctaaaaacttcaaatggacatgttttgtagtttagcgacttccgtatacataaagggacatattaatactggttcatttgtaaattattattcatatagaccactgtagtagataaaactctatggtacacctgcttatgtgttgcctcacactgtgtgtgattttgtttcttttgttaagcagcacttatgtagactgcatttccaaatgtgttgagcactcagagtgtagtcaacagtaagttcttttaatgaatatcagttttaatttatagactgccatggccttaaaaatattctgtacaatatactgcactgtgttgcacagacactacttgcttttctccattcatatttttatgagtagaatctgggcttttaaatttctcttcttattctttgaagcatgttgcatactaccctggtgggatggatggttctgtaaatgaagggatatttaaacttgctactgttgttcaacaccattaatggtcagtgtgaaccattacaaagaatgtggcaacttgcttgtgcctaaaaggaggaattggaactagaatgtgtgactctgtggggactgcataggtttgttaattgacctatagctaaaccttaatgtgtttgtgtgtctatacattgctttccgcatttcaagacatccagacgctattaccaacattttcctgtgcattaacctctgcatgtgaaaacttttaacagttactgaactatgtaaatatgtgaatttttttatttaggtggatgcattttttgtctgtttactgctcttctcagctttattcaataaacttgcattttaagggttgtattggcaattttaacttaaaatgtgcatcatgatggaaggtgcagacttttttggaagtttccgagaggagggtctatagaccatttgtcagaaatcagatcagccctcaaagaatggggtctgtgggctagttaaaatagaaataaacttttaaaatatccaaaaaaaaaaatattgtg

SEQ ID NO: 353671 - DNA, 3214 bp, Homo sapiens
tttttttgtaggacaggaatttttattccacgccaactcttccagagtcttgaagtcttcctgcagattgttaatgaacaattatagcaaaaaatgaatgaatgaattaacgaatgtataagtggatgaatgacgaatgaaccaacaatgaatgaatgtagagaaagcctcaagggggcccgagggtacgctgtgctgcggagcatgcccaccaggtggcgatgccagcggcgggcgggcctggccggattggccgcgccgctcttgccgtgggtgccgacggcggcgccgggacgggcgtggggggtagggcgagtcatatgatccgctcggcttcctgggtctggctgctgccgcccgccggtgtccgcccgtgtcgcgccggggcaccaaggagccgttggagggtccgggcggaggcccgctcgtgtggaagtcgtcgacgccgccgctcgtccgtcctcccgtccgttctcgctcccggccgccatcatgctggcgctcatctcccgcctgctggactggttccgttcgctcttctggaaggaagagatggagctgacgctcgtggggctgcagtactcgggcaagaccaccttcgtcaatgtcatcgcgtcaggtcaattcagtgaagatatgatacccacagtgggcttcaacatgaggaaggtaactaaaggtaacgtcacaataaagatctgggacataggaggacaaccccgatttcgaagcatgtgggagcggtattgcagaggagtcaatgctattgtttacatgatagatgctgcagatcgtgaaaagatagaagcttcccgaaatgagctacataatcttctagataaaccacagttacaaggaattccagtgctagtgcttggaaacaagagagatcttcctaatgccttggatgagaaacagctaattgaaaaaatgaatctgtctgctattcaggatagagaaatttgctgctattcaatttcttgcaaagaaaaggataatatagatatcacacttcagtggcttattcagcattcaaaatctagaagaagctgaagcatctcctgaagtcttccagtccttcttggctataatcctagaattattgtccgttcctctgaagtaattcccagaatacggtccttcctaaaccccagaaattgcctttttcagagtttatttctcatgtgcactgctgaagatgaatatccctaatccttcataaagaatcagctagagttgtcatgataaagtcagcacacacaaaaaggcttcttacacatacctgtcttaaaccatgtgtagagctttaaaaacagaaaaaaaaccccatatacttatgaccatcttaaatcaagaaaattgcatatttccattctggtctttctgggccagatttttatattggttttcagtaaatgtctatctataatatttcattatagagtccagtagcttaatactgacactgacttgatacagcatgaagtttctagtgccacacacagtatttagaaaacctttaggcgtgaatgactcatgtgggatatatgtaaacataatgtttattttatctcacaaatgcatgtgaaatgtataattacatcttaggaatccatggtgagattctgcctgatgaatattaaagatatcctgctttctgagaactctatcaccagatggcagttgggatatgggaggaactaaagcatcctgttttgtatctgtccagatcattatttctgtctcttgttttttcttcctggttcaggatacttttttaaggggttgagaattgaagattttccaaaagcgttcatgaatttagagcattccacccaatataataaaacctgttaagaatgtcagtctttgttcaaacatctgtttgttctatctccagtcattaaatcagtgctgctgcatgacactcttaactcctgactttttatatccagtcataaagttgactttcagcacaaaagatacttataaacaaataaaaaatttttatttttctctcttactgatgtaagctttggcactcttttgactggtgccattagacatcttgattattgtgacaactctagacctgcctgctttatctaatgtaatcatgctcaatgtctacaggttgtttaataatcagtcacacagagaactgaggaactgatgctgtttgtttgcttctatgatacagagatgtctaaaaacttcaaatggacatgttttgtagtttagcgacttccgtatacataaagggacatattaatactggttcatttgtaaattattattcatatagaccactgtagtagataaaactctatggtacacctgcttatgtgttgcctcacactgtgtgtgattttgtttcttttgttaagcagcacttatgtagactgcatttccaaatgtgttgagcactcagagtgtagtcaacagtaagttcttttaatgaatatcagttttaatttatagactgccatggccttaaaaatattctgtacaatatactgcactgtgttgcacagacactacttgcttttctccattcatatttttatgagtagaatctgggcttttaaatttctcttcttattctttgaagcatgttgcatactaccctggtgggatggatggttctgtaaatgaagggatatttaaacttgctactgttgttcaacaccattaatggtcagtgtgaaccattacaaagaatgtggcaacttgcttgtgcctaaaaggaggaattggaactagaatgtgtgactctgtggggactgcataggtttgttaattgacctatagctaaaccttaatgtgtttgtgtgtctatacattgctttccgcatttcaagacatccagacgctattaccaacattttcctgtgcattaacctctgcatgtgaaaacttttaacagttactgaactatgtaaatatgtgaatttttttatttaggtggatgcattttttgtctgtttactgctcttctcagctttattcaataaacttgcattttaagggttgtattggcaattttaacttaaaatgtgcatcatgatggaaggtgcagacttttttggaagtttccgagaggagggtctatagaccatttgtcagaaatcagatcagccctcaaagaatggggtctgtgggctagttaaaatagaaataaacttttaaaatatccaaaaaaaaaaatattgtg

SEQ ID NO: 353672 - DNA, 2906 bp, Homo sapiens
tgacatgattagaatcgagctggtacccctagtgttagaagttcaatagcagtatattagttaacaggcaaactattgcacataaaccaaatctttgcttaagcaaaattttagatgtattgtaaatgtattaaatacggacttcaagtttagaagtggccccaagaattcccatattaagagcttgtttgaggtcaagtctttcaggagcactttgcctctaacattgtagaaataaatatatcttcccgatctttctttttttctgttacttcctcttgcaatcatttaattaaaatatctttattaagaattgccttgttttgatttaaagatctgggacataggaggacaaccccgatttcgaagcatgtgggagcggtattgcagaggagtcaatgctattgtttacatgatagatgctgcagatcgtgaaaagatagaagcttcccgaaatgagctacataatcttctagataaaccacagttacaaggaattccagtgctagtgcttggaaacaagagagatcttcctaatgccttggatgagaaacagctaattgaaaaaatgaatctgtctgctattcaggatagagaaatttgctgctattcaatttcttgcaaagaaaaggataatatagatatcacacttcagtggcttattcagcattcaaaatctagaagaagctgaagcatctcctgaagtcttccagtccttcttggctataatcctagaattattgtccgttcctctgaagtaattcccagaatacggtccttcctaaaccccagaaattgcctttttcagagtttatttctcatgtgcactgctgaagatgaatatccctaatccttcataaagaatcagctagagttgtcatgataaagtcagcacacacaaaaaggcttcttacacatacctgtcttaaaccatgtgtagagctttaaaaacagaaaaaaaaccccatatacttatgaccatcttaaatcaagaaaattgcatatttccattctggtctttctgggccagatttttatattggttttcagtaaatgtctatctataatatttcattatagagtccagtagcttaatactgacactgacttgatacagcatgaagtttctagtgccacacacagtatttagaaaacctttaggcgtgaatgactcatgtgggatatatgtaaacataatgtttattttatctcacaaatgcatgtgaaatgtataattacatcttaggaatccaaaatggtctgcagagagtgagcggaggcaccagatcaatgttggttctttgcactggtgagattctgcctgatgaatattaaagatatcctgctttctgagaactctatcaccagatggcagttgggatatgggaggaactaaagcatcctgttttgtatctgtccagatcattatttctgtctcttgttttttcttcctggttcaggatacttttttaaggggttgagaattgaagattttccaaaagcgttcatgaatttagagcattccacccaatataataaaacctgttaagaatgtcagtctttgttcaaacatctgtttgttctatctccagtcattaaatcagtgctgctgcatgacactcttaactcctgactttttatatccagtcataaagttgactttcagcacaaaagatacttataaacaaataaaaaatttttatttttctctcttactgatgtaagctttggcactcttttgactggtgccattagacatcttgattattgtgacaactctagacctgcctgctttatctaatgtaatcatgctcaatgtctacaggttgtttaataatcagtcacacagagaactgaggaactgatgctgtttgtttgcttctatgatacagagatgtctaaaaacttcaaatggacatgttttgtagtttagcgacttccgtatacataaagggacatattaatactggttcatttgtaaattattattcatatagaccactgtagtagataaaactctatggtacacctgcttatgtgttgcctcacactgtgtgtgattttgtttcttttgttaagcagcacttatgtagactgcatttccaaatgtgttgagcactcagagtgtagtcaacagtaagttcttttaatgaatatcagttttaatttatagactgccatggccttaaaaatattctgtacaatatactgcactgtgttgcacagacactacttgcttttctccattcatatttttatgagtagaatctgggcttttaaatttctcttcttattctttgaagcatgttgcatactaccctggtgggatggatggttctgtaaatgaagggatatttaaacttgctactgttgttcaacaccattaatggtcagtgtgaaccattacaaagaatgtggcaacttgcttgtgcctaaaaggaggaattggaactagaatgtgtgactctgtggggactgcataggtttgttaattgacctatagctaaaccttaatgtgtttgtgtgtctatacattgctttccgcatttcaagacatccagacgctattaccaacattttcctgtgcattaacctctgcatgtgaaaacttttaacagttactgaactatgtaaatatgtgaatttttttatttaggtggatgcattttttgtctgtttactgctcttctcagctttattcaataaacttgcattttaagggttgtattggcaattttaacttaaaatgtgcatcatgatggaaggtgcagacttttttggaagtttccgagaggagggtctatagaccatttgtcagaaatcagatcagccctcaaagaatggggtctgtgggctagttaaaatagaaataaacttttaaaatatccaaaaaaaaaaatattgtg

SEQ ID NO: 353673 - DNA, 3075 bp, Homo sapiens
tttttttgtaggacaggaatttttattccacgccaactcttccagagtcttgaagtcttcctgcagattgttaatgaacaattatagcaaaaaatgaatgaatgaattaacgaatgtataagtggatgaatgacgaatgaaccaacaatgaatgaatgtagagaaagcctcaagggggcccgagggtacgctgtgctgcggagcatgcccaccaggtggcgatgccagcggcgggcgggcctggccggattggccgcgccgctcttgccgtgggtgccgacggcggcgccgggacgggcgtggggggtagggcgagtcatatgatccgctcggcttcctgggtctggctgctgccgcccgccggtgtccgcccgtgtcgcgccggggcaccaaggagccgttggagggtccgggcggaggcccgctcgtgtggaagtcgtcgacgccgccgctcgtccgtcctcccgtccgttctcgctcccggccgccatcatgctggcgctcatctcccgcctgctggactggttccgttcgctcttctggaaggaagagatggagctgacgctcgtggggctgcagtactcgggcaagaccaccttcgtcaatgtcatcgcgtcaggtcaattcagtgaagatatgatacccacagtgggcttcaacatgaggaaggtaactaaaggtaacgtcacaataaagatcttcctaatgccttggatgagaaacagctaattgaaaaaatgaatctgtctgctattcaggatagagaaatttgctgctattcaatttcttgcaaagaaaaggataatatagatatcacacttcagtggcttattcagcattcaaaatctagaagaagctgaagcatctcctgaagtcttccagtccttcttggctataatcctagaattattgtccgttcctctgaagtaattcccagaatacggtccttcctaaaccccagaaattgcctttttcagagtttatttctcatgtgcactgctgaagatgaatatccctaatccttcataaagaatcagctagagttgtcatgataaagtcagcacacacaaaaaggcttcttacacatacctgtcttaaaccatgtgtagagctttaaaaacagaaaaaaaaccccatatacttatgaccatcttaaatcaagaaaattgcatatttccattctggtctttctgggccagatttttatattggttttcagtaaatgtctatctataatatttcattatagagtccagtagcttaatactgacactgacttgatacagcatgaagtttctagtgccacacacagtatttagaaaacctttaggcgtgaatgactcatgtgggatatatgtaaacataatgtttattttatctcacaaatgcatgtgaaatgtataattacatcttaggaatccaaaatggtctgcagagagtgagcggaggcaccagatcaatgttggttctttgcactggtgagattctgcctgatgaatattaaagatatcctgctttctgagaactctatcaccagatggcagttgggatatgggaggaactaaagcatcctgttttgtatctgtccagatcattatttctgtctcttgttttttcttcctggttcaggatacttttttaaggggttgagaattgaagattttccaaaagcgttcatgaatttagagcattccacccaatataataaaacctgttaagaatgtcagtctttgttcaaacatctgtttgttctatctccagtcattaaatcagtgctgctgcatgacactcttaactcctgactttttatatccagtcataaagttgactttcagcacaaaagatacttataaacaaataaaaaatttttatttttctctcttactgatgtaagctttggcactcttttgactggtgccattagacatcttgattattgtgacaactctagacctgcctgctttatctaatgtaatcatgctcaatgtctacaggttgtttaataatcagtcacacagagaactgaggaactgatgctgtttgtttgcttctatgatacagagatgtctaaaaacttcaaatggacatgttttgtagtttagcgacttccgtatacataaagggacatattaatactggttcatttgtaaattattattcatatagaccactgtagtagataaaactctatggtacacctgcttatgtgttgcctcacactgtgtgtgattttgtttcttttgttaagcagcacttatgtagactgcatttccaaatgtgttgagcactcagagtgtagtcaacagtaagttcttttaatgaatatcagttttaatttatagactgccatggccttaaaaatattctgtacaatatactgcactgtgttgcacagacactacttgcttttctccattcatatttttatgagtagaatctgggcttttaaatttctcttcttattctttgaagcatgttgcatactaccctggtgggatggatggttctgtaaatgaagggatatttaaacttgctactgttgttcaacaccattaatggtcagtgtgaaccattacaaagaatgtggcaacttgcttgtgcctaaaaggaggaattggaactagaatgtgtgactctgtggggactgcataggtttgttaattgacctatagctaaaccttaatgtgtttgtgtgtctatacattgctttccgcatttcaagacatccagacgctattaccaacattttcctgtgcattaacctctgcatgtgaaaacttttaacagttactgaactatgtaaatatgtgaatttttttatttaggtggatgcattttttgtctgtttactgctcttctcagctttattcaataaacttgcattttaagggttgtattggcaattttaacttaaaatgtgcatcatgatggaaggtgcagacttttttggaagtttccgagaggagggtctatagaccatttgtcagaaatcagatcagccctcaaagaatggggtctgtgggctagttaaaatagaaataaacttttaaaatatccaaaaaaaaaaatattgtg

SEQ ID NO: 353674 - DNA, 2558 bp, Homo sapiens
tgccttcctggcaatttgcatgcaacacctgattgattgtgtgggcaacacataaaaggtggcaccagccgtcctatacacaacttaatttttaaatcagaaaacgcttcagtctctgataattcctcatattctcttgaagttcgggtaatggagtatggtaatgcagatgcagaaaagcagcagaggtcaggcatagtgtgtgccttgaattagctgccttttaaatattgtctctgtttgatgtttagttttttaactttaatgtcttcacttttcccctctatctttagatatcacacttcagtggcttattcagcattcaaaatctagaagaagctgaagcatctcctgaagtcttccagtccttcttggctataatcctagaattattgtccgttcctctgaagtaattcccagaatacggtccttcctaaaccccagaaattgcctttttcagagtttatttctcatgtgcactgctgaagatgaatatccctaatccttcataaagaatcagctagagttgtcatgataaagtcagcacacacaaaaaggcttcttacacatacctgtcttaaaccatgtgtagagctttaaaaacagaaaaaaaaccccatatacttatgaccatcttaaatcaagaaaattgcatatttccattctggtctttctgggccagatttttatattggttttcagtaaatgtctatctataatatttcattatagagtccagtagcttaatactgacactgacttgatacagcatgaagtttctagtgccacacacagtatttagaaaacctttaggcgtgaatgactcatgtgggatatatgtaaacataatgtttattttatctcacaaatgcatgtgaaatgtataattacatcttaggaatccaaaatggtctgcagagagtgagcggaggcaccagatcaatgttggttctttgcactggtgagattctgcctgatgaatattaaagatatcctgctttctgagaactctatcaccagatggcagttgggatatgggaggaactaaagcatcctgttttgtatctgtccagatcattatttctgtctcttgttttttcttcctggttcaggatacttttttaaggggttgagaattgaagattttccaaaagcgttcatgaatttagagcattccacccaatataataaaacctgttaagaatgtcagtctttgttcaaacatctgtttgttctatctccagtcattaaatcagtgctgctgcatgacactcttaactcctgactttttatatccagtcataaagttgactttcagcacaaaagatacttataaacaaataaaaaatttttatttttctctcttactgatgtaagctttggcactcttttgactggtgccattagacatcttgattattgtgacaactctagacctgcctgctttatctaatgtaatcatgctcaatgtctacaggttgtttaataatcagtcacacagagaactgaggaactgatgctgtttgtttgcttctatgatacagagatgtctaaaaacttcaaatggacatgttttgtagtttagcgacttccgtatacataaagggacatattaatactggttcatttgtaaattattattcatatagaccactgtagtagataaaactctatggtacacctgcttatgtgttgcctcacactgtgtgtgattttgtttcttttgttaagcagcacttatgtagactgcatttccaaatgtgttgagcactcagagtgtagtcaacagtaagttcttttaatgaatatcagttttaatttatagactgccatggccttaaaaatattctgtacaatatactgcactgtgttgcacagacactacttgcttttctccattcatatttttatgagtagaatctgggcttttaaatttctcttcttattctttgaagcatgttgcatactaccctggtgggatggatggttctgtaaatgaagggatatttaaacttgctactgttgttcaacaccattaatggtcagtgtgaaccattacaaagaatgtggcaacttgcttgtgcctaaaaggaggaattggaactagaatgtgtgactctgtggggactgcataggtttgttaattgacctatagctaaaccttaatgtgtttgtgtgtctatacattgctttccgcatttcaagacatccagacgctattaccaacattttcctgtgcattaacctctgcatgtgaaaacttttaacagttactgaactatgtaaatatgtgaatttttttatttaggtggatgcattttttgtctgtttactgctcttctcagctttattcaataaacttgcattttaagggttgtattggcaattttaacttaaaatgtgcatcatgatggaaggtgcagacttttttggaagtttccgagaggagggtctatagaccatttgtcagaaatcagatcagccctcaaagaatggggtctgtgggctagttaaaatagaaataaacttttaaaatatccaaaaaaaaaaatattgtg

SEQ ID NO: 353675 - DNA, 391 bp, Homo sapiens
ttatacaagaaaaacacctatgtggaaatgttggctacttatttacaggataatttcaaaaggttaggcattaatgtagaacaaatcagacgattaagacttaatagattctgaattgttgttttctgtcttggcattcaaatctggatggtgcatggtcctgtagcttttaaattgttatcataaagacatatgttttcaataatagaagtatattagttaacaggcaaactattgcacataaaccaaatctttgcttaagcaaaattttagatgtattgtaaatgtattaaatacggacttcaagtttagaagtggccccaagaattcccatattaagagcttgtttgaggtcaagtctttcaggagcactttgcctctaacattgtag

SEQ ID NO: 353676 - DNA, 3086 bp, Homo sapiens
tttttttgtaggacaggaatttttattccacgccaactcttccagagtcttgaagtcttcctgcagattgttaatgaacaattatagcaaaaaatgaatgaatgaattaacgaatgtataagtggatgaatgacgaatgaaccaacaatgaatgaatgtagagaaagcctcaagggggcccgagggtacgctgtgctgcggagcatgcccaccaggtggcgatgccagcggcgggcgggcctggccggattggccgcgccgctcttgccgtgggtgccgacggcggcgccgggacgggcgtggggggtagggcgagtcatatgatccgctcggcttcctgggtctggctgctgccgcccgccggtgtccgcccgtgtcgcgccggggcaccaaggagccgttggagggtccgggcggaggcccgctcgtgtggaagtcgtcgacgccgccgctcgtccgtcctcccgtccgttctcgctcccggccgccatcatgctggcgctcatctcccgcctgctggactggttccgttcgctcttctggaaggaagagatggagctgacgctcgtggggctgcagtactcgggcaagaccaccttcgtcaatgtcatcgcgtcaggtcaattcagtgaagatatgatacccacagtgggcttcaacatgaggaaggtaactaaaggtaacgtcacaataaagatctgggacataggaggacaaccccgatttcgaagcatgtgggagcggtattgcagaggagtcaatgctattgtttacatgatagatgctgcagatcgtgaaaagatagaagcttcccgaaatgagctacataatcttctagataaaccacagttacaaggaattccagtgctagtgcttggaaacaagagagatcttcctaatgccttggatgagaaacagctaattgaaaaaatgaatctgtctgctattcaggatagagaaatttgctgctattcaatttcttgcaaagaaaaggataatatagatatcacacttcagtggcttattcagcattcaaaatctagaagaagctgaagcatctcctgaagtcttccagtccttcttggctataatcctagaattattgtccgttcctctgaagtaattcccagaatacggtccttcctaaaccccagaaattgcctttttcagagtttatttctcatgtgcactgctgaagatgaatatccctaatccttcataaagaatcagctagagttgtcatgataaagtcagcacacacaaaaaggcttcttacacatacctgtcttaaaccatgtgtagagctttaaaaacagaaaaaaaaccccatatacttatgaccatcttaaatcaagaaaattgcatatttccattctggtctttctgggccagatttttatattggttttcagtaaatgtctatctataatatttcattatagagtccagtagcttaatactgacactgacttgatacagcatgaagtttctagtgccacacacagtatttagaaaacctttaggcgtgaatgactcatgtgggatatatgtaaacataatgtttattttatctcacaaatgcatgtgaaatgtataattacatcttaggaatccaaaatggtctgcagagagtgagcggaggcaccagatcaatgttggttctttgcactggtgagattctgcctgatgaatattaaagatatcctgctttctgagaactctatcaccagatggcagttgggatatgggaggaactaaagcatcctgttttgtatctgtccagatcattatttctgtctcttgttttttcttcctggttcaggatacttttttaaggggttgagaattgaagattttccaaaagcgttcatgaatttagagcattccacccaatataataaaacctgttaagaatgtcagtctttgttcaaacatctgtttgttctatctccagtcattaaatcagtgctgctgcatgacactcttaactcctgactttttatatccagtcataaagttgactttcagcacaaaagatacttataaacaaataaaaaatttttatttttctctcttactgatgtaagctttggcactcttttgactggtgccattagacatcttgattattgtgacaactctagacctgcctgctttatctaatgtaatcatgctcaatgtctacaggttgtttaataatcagtcacacagagaactgaggaactgatgctgtttgtttgcttctatgatacagagatgtctaaaaacttcaaatggacatgttttgtagtttagcgacttccgtatacataaagggacatattaatactggttcatttgtaaattattattcatatagaccactgtagtagataaaactctatggtacacctgcttatgtgttgcctcacactgtgtgtgattttgtttcttttgttaagcagcacttatgtagactgcatttccaaatgtgttgagcactcagagtgtagtcaacagtaagttcttttaatgaatatcagttttaatttatagactgccatggccttaaaaatattctgtacaatatactgcactgtgttgcacagacactacttgcttttctccattcatatttttatgagtagaatctgggcttttaaatttctcttcttattctttgaagcatgttgcatactaccctggtgggatggatggttctgtaaatgaagggatatttaaacttgctactgttgttcaacaccattaatggtcagtgtgaaccattacaaagaatgtggcaacttgcttgtgcctaaaaggaggaattggaactagaatgtgtgactctgtggggactgcataggtttgttaattgacctatagctaaaccttaatgtgtttgtgtgtctatacattgctttccgcatttcaagacatccagacgctattaccaacattttcctgtgcattaacctctgcatgtgaaaacttttaacagttactgaactatgtaaatatgtgaatttttttatttaggtggatgcattttttgtctgtttactgctcttctcagctttattcaataaacttgcattttaagggtt

SEQ ID NO: 353677 - DNA, 3393 bp, Homo sapiens
tttttttgtaggacaggaatttttattccacgccaactcttccagagtcttgaagtcttcctgcagattgttaatgaacaattatagcaaaaaatgaatgaatgaattaacgaatgtataagtggatgaatgacgaatgaaccaacaatgaatgaatgtagagaaagcctcaagggggcccgagggtacgctgtgctgcggagcatgcccaccaggtggcgatgccagcggcgggcgggcctggccggattggccgcgccgctcttgccgtgggtgccgacggcggcgccgggacgggcgtggggggtagggcgagtcatatgatccgctcggcttcctgggtctggctgctgccgcccgccggtgtccgcccgtgtcgcgccggggcaccaaggagccgttggagggtccgggcggaggcccgctcgtgtggaagtcgtcgacgccgccgctcgtccgtcctcccgtccgttctcgctcccggccgccatcatgctggcgctcatctcccgcctgctggactggttccgttcgctcttctggaaggaagagatggagctgacgctcgtggggctgcagtactcgggcaagaccaccttcgtcaatgtcatcgcgaccaagaatcttgaaagccaaatgttctcattaagaagctgttagagtgcaataatgcattctaaatgcctgtcttagaagatatttcacaagttaatggattttttaagtttttcaaagatatatcaggtcaattcagtgaagatatgatacccacagtgggcttcaacatgaggaaggtaactaaaggtaacgtcacaataaagatctgggacataggaggacaaccccgatttcgaagcatgtgggagcggtattgcagaggagtcaatgctattgtttacatgatagatgctgcagatcgtgaaaagatagaagcttcccgaaatgagctacataatcttctagataaaccacagttacaaggaattccagtgctagtgcttggaaacaagagagatcttcctaatgccttggatgagaaacagctaattgaaaaaatgaatctgtctgctattcaggatagagaaatttgctgctattcaatttcttgcaaagaaaaggataatatagatatcacacttcagtggcttattcagcattcaaaatctagaagaagctgaagcatctcctgaagtcttccagtccttcttggctataatcctagaattattgtccgttcctctgaagtaattcccagaatacggtccttcctaaaccccagaaattgcctttttcagagtttatttctcatgtgcactgctgaagatgaatatccctaatccttcataaagaatcagctagagttgtcatgataaagtcagcacacacaaaaaggcttcttacacatacctgtcttaaaccatgtgtagagctttaaaaacagaaaaaaaaccccatatacttatgaccatcttaaatcaagaaaattgcatatttccattctggtctttctgggccagatttttatattggttttcagtaaatgtctatctataatatttcattatagagtccagtagcttaatactgacactgacttgatacagcatgaagtttctagtgccacacacagtatttagaaaacctttaggcgtgaatgactcatgtgggatatatgtaaacataatgtttattttatctcacaaatgcatgtgaaatgtataattacatcttaggaatccaaaatggtctgcagagagtgagcggaggcaccagatcaatgttggttctttgcactggtgagattctgcctgatgaatattaaagatatcctgctttctgagaactctatcaccagatggcagttgggatatgggaggaactaaagcatcctgttttgtatctgtccagatcattatttctgtctcttgttttttcttcctggttcaggatacttttttaaggggttgagaattgaagattttccaaaagcgttcatgaatttagagcattccacccaatataataaaacctgttaagaatgtcagtctttgttcaaacatctgtttgttctatctccagtcattaaatcagtgctgctgcatgacactcttaactcctgactttttatatccagtcataaagttgactttcagcacaaaagatacttataaacaaataaaaaatttttatttttctctcttactgatgtaagctttggcactcttttgactggtgccattagacatcttgattattgtgacaactctagacctgcctgctttatctaatgtaatcatgctcaatgtctacaggttgtttaataatcagtcacacagagaactgaggaactgatgctgtttgtttgcttctatgatacagagatgtctaaaaacttcaaatggacatgttttgtagtttagcgacttccgtatacataaagggacatattaatactggttcatttgtaaattattattcatatagaccactgtagtagataaaactctatggtacacctgcttatgtgttgcctcacactgtgtgtgattttgtttcttttgttaagcagcacttatgtagactgcatttccaaatgtgttgagcactcagagtgtagtcaacagtaagttcttttaatgaatatcagttttaatttatagactgccatggccttaaaaatattctgtacaatatactgcactgtgttgcacagacactacttgcttttctccattcatatttttatgagtagaatctgggcttttaaatttctcttcttattctttgaagcatgttgcatactaccctggtgggatggatggttctgtaaatgaagggatatttaaacttgctactgttgttcaacaccattaatggtcagtgtgaaccattacaaagaatgtggcaacttgcttgtgcctaaaaggaggaattggaactagaatgtgtgactctgtggggactgcataggtttgttaattgacctatagctaaaccttaatgtgtttgtgtgtctatacattgctttccgcatttcaagacatccagacgctattaccaacattttcctgtgcattaacctctgcatgtgaaaacttttaacagttactgaactatgtaaatatgtgaatttttttatttaggtggatgcattttttgtctgtttactgctcttctcagctttattcaataaacttgcattttaagggttgtattggcaattttaacttaaaatgtgcatcatgatggaaggtgcagacttttttggaagtttccgagaggagggtctatagaccatttgtcagaaatcagatcagccctcaaagaatggggtctgtgggctagttaaaatagaaataaacttttaaaatatccaaaaaaaaaaatattgtg

SEQ ID NO: 353678 - DNA, 1919 bp, Homo sapiens
tttttttgtaggacaggaatttttattccacgccaactcttccagagtcttgaagtcttcctgcagattgttaatgaacaattatagcaaaaaatgaatgaatgaattaacgaatgtataagtggatgaatgacgaatgaaccaacaatgaatgaatgtagagaaagcctcaagggggcccgagggtacgctgtgctgcggagcatgcccaccaggtggcgatgccagcggcgggcgggcctggccggattggccgcgccgctcttgccgtgggtgccgacggcggcgccgggacgggcgtggggggtagggcgagtcatatgatccgctcggcttcctgggtctggctgctgccgcccgccggtgtccgcccgtgtcgcgccggggcaccaaggagccgttggagggtccgggcggaggcccgctcgtgtggaagtcgtcgacgccgccgctcgtccgtcctcccgtccgttctcgctcccggccgccatcatgctggcgctcatctcccgcctgctggactggttccgttcgctcttctggaaggaagagatggagctgacgctcgtggggctgcagtactcgggcaagaccaccttcgtcaatgtcatcgcgtcaggtcaattcagtgaagatatgatacccacagtgggcttcaacatgaggaaggtaactaaaggtaacgtcacaataaagatctgggacataggaggacaaccccgatttcgaagcatgtgggagcggtattgcagaggagtcaatgctattgtttacatgatagatgctgcagatcgtgaaaagatagaagcttcccgaaatgagctacataatcttctagataaaccacagttacaaggaattccagtgctagtgcttggaaacaagagagatcttcctaatgccttggatgagaaacagctaattgaaaaaatgaatctgtctgctattcaggatagagaaatttgctgctattcaatttcttgcaaagaaaaggataatatagatatcacacttcagtggcttattcagcattcaaaatctagaagaagctgaagcatctcctgaagtcttccagtccttcttggctataatcctagaattattgtccgttcctctgaagtaattcccagaatacggtccttcctaaaccccagaaattgcctttttcagagtttatttctcatgtgcactgctgaagatgaatatccctaatccttcataaagaatcagctagagttgtcatgataaagtcagcacacacaaaaaggcttcttacacatacctgtcttaaaccatgtgtagagctttaaaaacagaaaaaaaaccccatatacttatgaccatcttaaatcaagaaaattgcatatttccattctggtctttctgggccagatttttatattggttttcagtaaatgtctatctataatatttcattatagagtccagtagcttaatactgacactgacttgatacagcatgaagtttctagtgccacacacagtatttagaaaacctttaggcgtgaatgactcatgtgggatatatgtaaacataatgtttattttatctcacaaatgcatgtgaaatgtataattacatcttaggaatccaaaatggtctgcagagagtgagcggaggcaccagatcaatgttggttctttgcactggtgagattctgcctgatgaatattaaagatatcctgctttctgagaactctatcaccagatggcagttgggatatgggaggaactaaagcatcctgttttgtatctgtccagatcattatttctgtctcttgttttttcttcctggttcaggatacttttttaaggggttgagaattgaagattttccaaaagcgttcatgaatttagagcattccacccaatataataaaacctgttaagaatgtca

SEQ ID NO: 353679 - DNA, 2185 bp, Homo sapiens
tgccacatgtgccccacgcctgcccccagcactctaggtggtggttagtgagctctgagaaatgaattctttgtggcttggagggcattcattttcacaatcctaggatgcccaccatttattgtgtgtgtgagcggggagtgggtcatgcatgtgtatcaagtgtgtgtttcttgtgtggcattgttgctcttgggtatgacaaatggttttgtaaatcacctacaatgtgaattcttagggattgattgtttggaaactctgtattttaaaaacttttcccccattttattttaggaaaacatcatatattttgatgttatattagcattcctgttgctgattttctgtcttgagggaaaaagttattcaggagagtatgttgatcttggttcataatccatctccattaatctaatttagttgttaaatataaaggtattttctatgtcatagttttagtcaacctaaatttttcctactttctttaagtgtggtcatcaggtcaaagggaaataggggttactctcgttcttttttcgcagaaaaactgcagcatataatctatgtttgcattggaatgtgatggtgctcactttgggcattatttgggaactgactttggctgctttttcttagggacacagcaggtcaggagagattcaacagcattacctcagcttattacagaagtgccaaggggatcatattagtatatgatatcactaagaaggagacatttgatgatttgccgaaatggatgaagatgattgataagtatgcttcagaagatgcagagcttctcttagttggaaataagttggactgtgaaacggacagagaaatcaccaggcagcagggggaaaagtttgcacagcagatcactgggatgcggttctgtgaagcaagtgccaaggataacttcaatgtggacgagatatttttgaaacttgtcgatgacattctgaaaaagatgcctctggatattttaaggaatgagttgtccaatagtatcctgtcgttacaaccagagcctgagataccgccagaactgcctccaccaagaccacatgtccgatgctgttgatttcctactttggagacaaagtggaaatgattcctggaaaggggaaaaaacgttctattctgcactacaatcattttgacaatttcctttcgcactttgtaatccaagtcagagctatacactaacttgtaaatatgcatatatgcaatcctgggtaagttttggttataagttacctatttccctccaaattattatatttcattcattaccccagtgtctagtgtacatacactgggaaacctagtacttctaatatgaagaatgggagaaatgaaaggtataatgtttcttgaaataaataatataattgtccttattaattatattatgaggacagaagatattctgataagagagaacgtggtgctttgcttaccgttttaaagaaaatttgtaaaactaaagactttttgaaaaaaagctatcttaagtgctttttctttatttacaagacatttcccccagtggtagcatctgaagtattggagtgtttctgccacgaagcaaagctccattcatggccgtcatggaaggttatttattaatgttacataatggtagaatattactagttagagggttggatttgacttggtcctaaggccacagaatctctctcatggcttcctaagggatgtacctttatgcttttaagaactacaaagattcaataaagaaagaaatgtttttgaaactatagaaaaagattttaaaacacgctgctgtcctaaacaaatcctgtttaaaggaattttaaagagatgcattttactatatcaaagaacatacgtgtatttgcctaaacactctgtacctttgtaatgataaaacttcccccttctttacggtgaagcttattctgattaagcctagactgtgttctttttttttttttttttttttttggtctgatgatgaatttgtgaactctttctttggtatatcttttattaaactgcactgttttgtttagtcaaggtaattaagtaattatgtatttgaataacttggtgtgtcttgagtgttgtggtatgaaaagcattgtggtctttctacactaatgaagtgcaaataaaattttgtatttatgaatga

SEQ ID NO: 353680 - DNA, 817 bp, Homo sapiens
  misc_feature (9)..(9): n is a, c, g, or t
cccctcgcntctaccttgtctgaagagttggaaatcaaacacacagttattctagtctaaatattctgtaaatttaaggctaccatttagtaaattttcattctttactttgtcagtttgttaaaatgaaacaaacctaagtttaaatttccttgttttttctgtctcggctctacatttcccccagtggtagcatctgaagtattggagtgtttctgccacgaagcaaagctccattcatggccgtcatggaaggttatttattaatgttacataatggtagaatattactagttagagggttggatttgacttggtcctaaggccacagaatctctctcatggcttcctaagggatgtacctttatgcttttaagaactacaaagattcaataaagaaagaaatgtttttgaaactatagaaaaagattttaaaacacgctgctgtcctaaacaaatcctgtttaaaggaattttaaagagatgcattttactatatcaaagaacatacgtgtatttgcctaaacactctgtacctttgtaatgataaaacttcccccttctttacggtgaagcttattctgattaagcctagactgtgttctttttttttttttttttttttttggtctgatgatgaatttgtgaactctttctttggtatatcttttattaaactgcactgttttgtttagtcaaggtaattaagtaattatgtatttgaataacttggtgtgtcttgagtgttgtggtatgaaaagcattgtggtctttctacactaatgaagtgcaaataaaattttgtatttatgaatga

SEQ ID NO: 353681 - DNA, 484 bp, Homo sapiens
taccagccagccccccaactctttgtggacccaccagctccttgggggaggaggcttccttcttgtcccctgtgtctcctgcaagctctgtccacttccgcactgcccaggcagcccaagagctcagggagccagggaccccaaggggagtccttggacaaggaggcctgggccctgagatcctccacggtcagcgccggggcccggagatggagctgggacgagtgtgtggacaggggggatggctggcccccacgagcagctccaggctggagttctggttcttccaggtggctcccgctgaggcagcggtctctgggggatcccccagctgaaggaggctggcaggagttggcaagagaaccccctgccctgtccaggtgggaagctgagtcccagtgctgggggactgtggcctgggctgatcttgagccttaactggacatgaggggcatgagaataaagctgaactgcagcctcctga

SEQ ID NO: 353682 - DNA, 2622 bp, Homo sapiens
tgcttgaacctgggaggaggaggttgcagtgagccgagatcacaccactgcactccagcccgggtgacagagtgtgactccgtctcaaaaaaacccaaaaaaacaaaaaaaaccctaaaaattagccaggcgtggtggcccacatctgtaatcccagctactcgggaggctaaggcaggagaattgcttgaacccgggaggcagaggttgcagtgagcccagatcacacctctgcactcctggctgggtggcagagtgagactctgtctcaaaacaaaaacaaaaaaccaaagagtcttagaggagtagtgggatggagaagtgttatgagcagaaggctctgccgcagacagacagaagttgagaagggcagggtggtgacggtggagcttcaggaaccaggagcagggacttgtgggatccaagggaaggcatgggattggggcggggtggactaggctaaatgctgctggcagggcaggtccataagcgcaggtccttgaggcatccccaaggcactgcggctgtcccgcatgacctcccagggactctccttgcagctgcgccagggccccgcggggctggggcccaaaaagcgtgcggagcctcagctggtggagacccagaatgtgcggcttattgaggtggagcgcagtgtgagtgtgggcccacagtgggccctggggaggtgccccgtgcagtgtgagtgtgggtccacggtggaccctgggctggggggtatcccgtgcagtgtgagtgtggactcacagtgggcccgggggtgggggtgccccatgcagtgtgagtgtgggcctgtggtaggcactagggggtgcccccgccacctggctattgctaacccccacttctgggcagaatgcgatgctggtggcagagaaggcagctttgcaggggcagctgcagcacctggaggggcagctggggagcctgcagggccgtgcccaggagctgctgctgcagagccagcgggcgcaggagcacagcagccgcctgcaggccgagaagtctgtgctggagattcagggccaggagctgcaccggaagctggaggtgctggaggaggaggtgcgggcggcacggcagtcccaggaggagacccgcgggcagcagcaggccctgcttcgggaccacaaggccctggcacagctgcagcggcggcaggaggccgagctagagggactgctggtgcggcaccgagacctcaaggccaacatgcgggcactggagctggcccaccgggagctgcagggccggcacgagcagctgcaggcccagcgggccagcgtggaggcacaggaggtggccctgctggcagagcgtgaacgcctgatgcaagatgggcatcggcagcggggcctggaggaggagctgcggaggcttcagagcgagcacgacagggctcagatgctgctggcagagttgtctcgggagcggggtgagctgcagggtgaacgcggggagctacggggccggctggcgcggctggagctggagcgggcacagctggagatgcagagccagcagctgcgcgagtccaaccagcagctggacctgagcgcctgccggctgaccacgcagtgtgagctattgacacagctgcgaagtgcccaggaagaggagaaccggcagctgctggctgaagttcaggccctgagccgggagaacagggagctcctggagcgcagcctggagagtcgggaccacctgcaccgcgaacagcgggagtacctggaccagcttaatgccctgcgccgcgagaagcagaagctcgtggagaagatcatggaccaataccgcgtgctggagcctgtgcccctgccccggaccaaggtccccttccccggcacccatgcgccgggcccagagctccctctgcctgcgggatgagaccttggcaggcgggcagcggcggaaactcagctcaaggttcccggtggggcgaagctctgagtcattcagccctggggacacccctaggcaacgattccgacagcgccatccaggccccctgggggcgcccgtctcccacagcaaaggacctggtgtgggatgggagaactccgctgagaccctgcaggaacacgaaacagatgccaaccgagagggccctgaggtacaggaaccggagaaacgtcccctcaccccatccctcagccagtgacaccgtgggaacagcaggcttgggagtgcagccttctcggcactggagtgtcagcggaggccccaggcagcccaagagctcagggagccagggaccccaaggggagtccttggacaaggaggcctgggccctgagatcctccacggtcagcgccggggcccggagatggagctgggacgagtgtgtggacaggggggatggctggcccccacgagcagctccaggctggagttctggttcttccaggtggctcccgctgaggcagcggtctctgggggatcccccagctgaaggaggctggcaggagttggcaagagaaccccctgccctgtccaggtgggaagctgagtcccagtgctgggggactgtggcctgggctgatcttgagccttaactggacatgaggggcatgagaataaagctgaactgcagcctcctga

SEQ ID NO: 353683 - DNA, 2136 bp, Homo sapiens
ttggaggaggctgagagggagcgccgggagaaggaggccctccaggcggagctggagaaagctgtggtgcggggcaaggagttgggggcccggctggagcatttgcagcgtgagctggagcaggcggctctcgagcgccaggaatttctgcgagaaaaggaaagccagcaccagaggtaccagggcttggagcagcggctggaagctgagctgcaggcggcggcgaccagcaaggaggaggcgctgatggagctcaagaccagggccctgcagctggaagaggagctgttccagctgcgccagggccccgcggggctggggcccaaaaagcgtgcggagcctcagctggtggagacccagaatgtgcggcttattgaggtggagcgcagtaatgcgatgctggtggcagagaaggcagctttgcaggggcagctgcagcacctggaggggcagctggggagcctgcagggccgtgcccaggagctgctgctgcagagccagcgggcgcaggagcacagcagccgcctgcaggccgagaagtctgtgctggagattcagggccaggagctgcaccggaagctggaggtgctggaggaggaggtgcgggcggcacggcagtcccaggaggagacccgcgggcagcagcaggccctgcttcgggaccacaaggccctggcacagctgcagcggcggcaggaggccgagctagagggactgctggtgcggcaccgagacctcaaggccaacatgcgggcactggagctggcccaccgggagctgcagggccggcacgagcagctgcaggcccagcgggccagcgtggaggcacaggaggtggccctgctggcagagcgtgaacgcctgatgcaagatgggcatcggcagcggggcctggaggaggagctgcggaggcttcagagcgagcacgacagggctcagatgctgctggcagagttgtctcgggagcggggtgagctgcagggtgaacgcggggagctacggggccggctggcgcggctggagctggagcgggcacagctggagatgcagagccagcagctgcgcgagtccaaccagcagctggacctgagcgcctgccggctgaccacgcagtgtgagctattgacacagctgcgaagtgcccaggaagaggagaaccggcagctgctggctgaagttcaggccctgagccgggagaacagggagctcctggagcgcagcctggagagtcgggaccacctgcaccgcgaacagcgggagtacctggaccagcttaatgccctgcgccgcgagaagcagaagctcgtggagaagatcatggaccaataccgcgtgctggagcctgtgcccctgccccggaccaaggtccccttccccggcacccatgcgccgggcccagagctccctctgcctgcgggatgagaccttggcaggcgggcagcggcggaaactcagctcaaggttcccggtggggcgaagctctgagtcattcagccctggggacacccctaggcaacgattccgacagcgccatccaggccccctgggggcgcccgtctcccacagcaaaggacctggtgtgggatgggagaactccgctgagaccctgcaggaacacgaaacagatgccaaccgagagggccctgaggtacaggaaccggagaaacgtcccctcaccccatccctcagccagtgacaccgtgggaacagcaggcttgggagtgcagccttctcggcactggagtgtcagcggaggccccaggcagcccaagagctcagggagccagggaccccaaggggagtccttggacaaggaggcctgggccctgagatcctccacggtcagcgccggggcccggagatggagctgggacgagtgtgtggacaggggggatggctggcccccacgagcagctccaggctggagttctggttcttccaggtggctcccgctgaggcagcggtctctgggggatcccccagctgaaggaggctggcaggagttggcaagagaaccccctgccctgtccaggtgggaagctgagtcccagtgctgggggactgtggcctgggctgatcttgagccttaactggacatgaggggcatgagaataaagctgaactgcagcctcctga

SEQ ID NO: 353684 - DNA, 1453 bp, Homo sapiens
tggcaggctggtactggtcggaggcttggttcagaaggcaagggatggaggcccccaggccttggacttggctcccccggcattagactcagtgctcgaggcatcagctgagtgtccccaggcacctgattcagacccacaggaggcagagagtccccttcaggcagctgccatggacccccaggcctcagactggtccccgcaagagtcaggctctcctgtggagacacaggagtccccggagaaggctggccgtagatcctctctccagagccctgcctctgtggccccacctcagggtccagggaccaaaattcaggccccgcagttgctgggaggagagacagagggaagagaggctccccaaggcgagttggtgcctgaggcctgggggttgagacaggagggccctgagcacaagccagggccttcggagcccagctctgtgcagctggaggagcaggagggcccaaaccagggcctggacctggccacgggacaagcagaggccagagagcatgaccagaggctggaagggacggtcagggacccagcctggcaaaaaccacagcagaagtcagaaggggctcttgaggtccaggtctgggaaggcccaatcccaggggagagcctggccagtggtgtcgcagagcaggaggccctcagggaggaggtggcacaggtccccttccccggcacccatgcgccgggcccagagctccctctgcctgcgggatgagaccttggcaggcgggcagcggcggaaactcagctcaaggttcccggtggggcgaagctctgagtcattcagccctggggacacccctaggcaacgattccgacagcgccatccaggccccctgggggcgcccgtctcccacagcaaaggacctggtgtgggatgggagaactccgctgagaccctgcaggaacacgaaacagatgccaaccgagagggccctgaggtacaggaaccggagaaacgtcccctcaccccatccctcagccagtgacaccgtgggaacagcaggcttgggagtgcagccttctcggcactggagtgtcagcggaggccccaggcagcccaagagctcagggagccagggaccccaaggggagtccttggacaaggaggcctgggccctgagatcctccacggtcagcgccggggcccggagatggagctgggacgagtgtgtggacaggggggatggctggcccccacgagcagctccaggctggagttctggttcttccaggtggctcccgctgaggcagcggtctctgggggatcccccagctgaaggaggctggcaggagttggcaagagaaccccctgccctgtccaggtgggaagctgagtcccagtgctgggggactgtggcctgggctgatcttgagccttaactggacatgaggggcatgagaataaagctgaactgcagcctcctga

SEQ ID NO: 353685 - DNA, 2511 bp, Homo sapiens
tgcttgaacctgggaggaggaggttgcagtgagccgagatcacaccactgcactccagcccgggtgacagagtgtgactccgtctcaaaaaaacccaaaaaaacaaaaaaaaccctaaaaattagccaggcgtggtggcccacatctgtaatcccagctactcgggaggctaaggcaggagaattgcttgaacccgggaggcagaggttgcagtgagcccagatcacacctctgcactcctggctgggtggcagagtgagactctgtctcaaaacaaaaacaaaaaaccaaagagtcttagaggagtagtgggatggagaagtgttatgagcagaaggctctgccgcagacagacagaagttgagaagggcagggtggtgacggtggagcttcaggaaccaggagcagggacttgtgggatccaagggaaggcatgggattggggcggggtggactaggctaaatgctgctggcagggcaggtccataagcgcaggtccttgaggcatccccaaggcactgcggctgtcccgcatgacctcccagggactctccttgcagctgcgccagggccccgcggggctggggcccaaaaagcgtgcggagcctcagctggtggagacccagaatgtgcggcttattgaggtggagcgcagtgtgagtgtgggcccacagtgggccctggggaggtgccccgtgcagtgtgagtgtgggtccacggtggaccctgggctggggggtatcccgtgcagtgtgagtgtggactcacagtgggcccgggggtgggggtgccccatgcagtgtgagtgtgggcctgtggtaggcactagggggtgcccccgccacctggctattgctaacccccacttctgggcagaatgcgatgctggtggcagagaaggcagctttgcaggggcagctgcagcacctggaggggcagctggggagcctgcagggccgtgcccaggagctgctgctgcagagccagcgggcgcaggagcacagcagccgcctgcaggccgagaagtctgtgctggagattcagggccaggagctgcaccggaagctggaggtgctggaggaggaggtgcgggcggcacggcagtcccaggaggagacccgcgggcagcagcaggccctgcttcgggaccacaaggccctggcacagctgcagcggcggcaggaggccgagctagagggactgctggtgcggcaccgagacctcaaggccaacatgcgggcactggagctggcccaccgggagctgcagggccggcacgagcagctgcaggcccagcgggccagcgtggaggcacaggaggtggccctgctggcagagcgtgaacgcctgatgcaagatgggcatcggcagcggggcctggaggaggagctgcggaggcttcagagcgagcacgacagggctcagatgctgctggcagagttgtctcgggagcggggtgagctgcagggtgaacgcggggagctacggggccggctggcgcggctggagctggagcgggcacagctggagatgcagagccagcagctgcgcgagtccaaccagcagctggacctgagcgcctgccggctgaccacgcagtgtgagctattgacacagctgcgaagtgcccaggaagaggagaaccggcagctgctggctgaagttcaggccctgagccgggagaacagggagctcctggagcgcagcctggagagtcgggaccacctgcaccgcgaacagcgggagtacctggaccagcttaatgccctgcgccgcgagaagcagaagctcgtggagaagatcatggaccaataccgcgtgctggagcctgtgcccctgccccggaccaaggtccccttccccggcacccatgcgccgggcccagagctccctctgcctgcgggatgagaccttggcaggcgggcagcggcggaaactcagctcaaggttcccggtggggcgaagctctgagtcattcagccctggggacacccctaggcaacgattccgacagcgccatccaggccccctgggggcgcccgtctcccacagcaaaggacctggtgtgggatgggagaactccgctgagaccctgcaggaacacgaaacagatgccaaccgagagggccctgaggtacaggaaccggagaaacgtcccctcaccccatccctcagccagtgacaccgtgggaacagcaggcttgggagtgcagccttctcggcactggagtgtcagcggaggccccaggcagcccaagagctcagggagccagggaccccaaggggagtccttggacaaggaggcctgggccctgagatcctccacggtcagcgccggggcccggagatggagctgggacgagtgtgtggacaggggggatggctggcccccacgagcagctccaggctggagttctggttcttccaggtggctcccgctgaggcagcggtctctgggggatccggccatagggcctgatttcgagccgggcacggttccagcttttgttc

SEQ ID NO: 353686 - DNA, 226 bp, Homo sapiens
acaggaggtggccctgctggcagagcgtgaacgcctgatgcaagatgggcatcggcagcggggcctggaggaggagctgcggaggcttcagagcgagcacgacaggtgccgcccctgccacagcctctagcagctctcagtggccccatcctgaaagtgggttgggggtgtggggtcctgtctggcctcccctccccggcataacttctctggccagcactcggac

SEQ ID NO: 353687 - DNA, 314 bp, Homo sapiens
tgtagcatcggaatttctgcgagaaaaggaagctgcacagaggtaccagggcttggagcagcggctggaagctgagctgcaggcggcggcgaccagcaaggaggaggcgctgatggagctcaagaccagggccctgcagctggaagaggagctgttccaggtgatgcctgcccgcctgggagctgggggccatgccaccctgccctccatcccatgagcagatgccagggtcatctgtcctcctagtcttgcctctggattcttggctagctacttgcctcactccccatgtggggcctgttggagagagcact

SEQ ID NO: 353688 - DNA, 2310 bp, Homo sapiens
ctggcagcatcctggcgccccctgcccccccagcccccactgtcagctcctgacttcctgtccctccagccctccgtggccttttccctgtagccaaggtctctcacccgacccacctctgctgagcctctctagctgtctcgctgtcacatggctggggtggcagcccaccgggcgcatccacctttcactgcgcacatgaagaaccgtgggctcagagaggagctggagaaagctgtggtgcggggcaaggagttgggggcccggctggagcatttgcagcgtgagctggagcaggcggctctcgagcgccaggaatttctgcgagaaaaggaaagccagcaccagaggtaccagggcttggagcagcggctggaagctgagctgcaggcggcggcgaccagcaaggaggaggcgctgatggagctcaagaccagggccctgcagctggaagaggagctgttccagctgcgccagggccccgcggggctggggcccaaaaagcgtgcggagcctcagctggtggagacccagaatgtgcggcttattgaggtggagcgcagtaatgcgatgctggtggcagagaaggcagctttgcaggggcagctgcagcacctggaggggcagctggggagcctgcagggccgtgcccaggagctgctgctgcagagccagcgggcgcaggagcacagcagccgcctgcaggccgagaagtctgtgctggagattcagggccaggagctgcaccggaagctggaggtgctggaggaggaggtgcgggcggcacggcagtcccaggaggagacccgcgggcagcagcaggccctgcttcgggaccacaaggccctggcacagctgcagcggcggcaggaggccgagctagagggactgctggtgcggcaccgagacctcaaggccaacatgcgggcactggagctggcccaccgggagctgcagggccggcacgagcagctgcaggcccagcgggccagcgtggaggcacaggaggtggccctgctggcagagcgtgaacgcctgatgcaagatgggcatcggcagcggggcctggaggaggagctgcggaggcttcagagcgagcacgacagggctcagatgctgctggcagagttgtctcgggagcggggtgagctgcagggtgaacgcggggagctacggggccggctggcgcggctggagctggagcgggcacagctggagatgcagagccagcagctgcgcgagtccaaccagcagctggacctgagcgcctgccggctgaccacgcagtgtgagctattgacacagctgcgaagtgcccaggaagaggagaaccggcagctgctggctgaagttcaggccctgagccgggagaacagggagctcctggagcgcagcctggagagtcgggaccacctgcaccgcgaacagcgggagtacctggaccagcttaatgccctgcgccgcgagaagcagaagctcgtggagaagatcatggaccaataccgcgtgctggagcctgtgcccctgccccggaccaaggtccccttccccggcacccatgcgccgggcccagagctccctctgcctgcgggatgagaccttggcaggcgggcagcggcggaaactcagctcaaggttcccggtggggcgaagctctgagtcattcagccctggggacacccctaggcaacgattccgacagcgccatccaggccccctgggggcgcccgtctcccacagcaaaggacctggtgtgggatgggagaactccgctgagaccctgcaggaacacgaaacagatgccaaccgagagggccctgaggtacaggaaccggagaaacgtcccctcaccccatccctcagccagtgacaccgtgggaacagcaggcttgggagtgcagccttctcggcactggagtgtcagcggaggccccaggcagcccaagagctcagggagccagggaccccaaggggagtccttggacaaggaggcctgggccctgagatcctccacggtcagcgccggggcccggagatggagctgggacgagtgtgtggacaggggggatggctggcccccacgagcagctccaggctggagttctggttcttccaggtggctcccgctgaggcagcggtctctgggggatcccccagctgaaggaggctggcaggagttggcaagagaaccccctgccctgtccaggtgggaagctgagtcccagtgctgggggactgtggcctgggctgatcttgagccttaactggacatgaggggcatgagaataaagctgaactgcagcctcctga

SEQ ID NO: 353689 - DNA, 994 bp, Homo sapiens
ctggtacggtccggaggtcctttggattggagcctgtgcccctgccccgtgacaagaagggcagctggctggcagacaaggtgaagaggctgatgcggccccggcgggaggggggcccccctggggggctgcgcctgggggccgatggggctggcagcaccgagagcctggggggccccccggagacggagcttcctgagggcagggaggcagatgggacagggtccccttccccggcacccatgcgccgggcccagagctccctctgcctgcgggatgagaccttggcaggcgggcagcggcggaaactcagctcaaggttcccggtggggcgaagctctgagtcattcagccctggggacacccctaggcaacgattccgacagcgccatccaggccccctgggggcgcccgtctcccacagcaaaggacctggtgtgggatgggagaactccgctgagaccctgcaggaacacgaaacagatgccaaccgagagggccctgaggtacaggaaccggagaaacgtcccctcaccccatccctcagccagtgacaccgtgggaacagcaggcttgggagtgcagccttctcggcactggagtgtcagcggaggccccaggcagcccaagagctcagggagccagggaccccaaggggagtccttggacaaggaggcctgggccctgagatcctccacggtcagcgccggggcccggagatggagctgggacgagtgtgtggacaggggggatggctggcccccacgagcagctccaggctggagttctggttcttccaggtggctcccgctgaggcagcggtctctgggggatcccccagctgaaggaggctggcaggagttggcaagagaaccccctgccctgtccaggtgggaagctgagtcccagtgctgggggactgtggcctgggctgatcttgagccttaactggacatgaggggcatgagaataaagctgaactgcagcctcctga

SEQ ID NO: 353690 - DNA, 1873 bp, Homo sapiens
tgcttgaacctgggaggaggaggttgcagtgagccgagatcacaccactgcactccagcccgggtgacagagtgtgactccgtctcaaaaaaacccaaaaaaacaaaaaaaaccctaaaaattagccaggcgtggtggcccacatctgtaatcccagctactcgggaggctaaggcaggagaattgcttgaacccgggaggcagaggttgcagtgagcccagatcacacctctgcactcctggctgggtggcagagtgagactctgtctcaaaacaaaaacaaaaaaccaaagagtcttagaggagtagtgggatggagaagtgttatgagcagaaggctctgccgcagacagacagaagttgagaagggcagggtggtgacggtggagcttcaggaaccaggagcagggacttgtgggatccaagggaaggcatgggattggggcggggtggactaggctaaatgctgctggcagggcaggtccataagcgcaggtccttgaggcatccccaaggcactgcggctgtcccgcatgacctcccagggactctccttgcagctgcgccagggccccgcggggctggggcccaaaaagcgtgcggagcctcagctggtggagacccagaatgtgcggcttattgaggtggagcgcagtgtgagtgtgggcccacagtgggccctggggaggtgccccgtgcagtgtgagtgtgggtccacggtggaccctgggctggggggtatcccgtgcagtgtgagtgtggactcacagtgggcccgggggtgggggtgccccatgcagtgtgagtgtgggcctgtggtaggcactagggggtgcccccgccacctggctattgctaacccccacttctgggcagaatgcgatgctggtggcagagaaggcagctttgcaggggcagctgcagcacctggaggggcagctggggagcctgcagggccgtgcccaggagctgctgctgcagagccagcgggcgcaggagcacagcagccgcctgcaggccgagaagtctgtgctggagattcagggccaggagctgcaccggaagctggaggtgctggaggaggaggtgcgggcggcacggcagtcccaggaggagacccgcgggcagcagcaggccctgcttcgggaccacaaggccctggcacagctgcagcggcggcaggaggccgagctagagggactgctggtgcggcaccgagacctcaaggccaacatgcgggcactggagctggcccaccgggagctgcagggccggcacgagcagctgcaggcccagcgggccagcgtggaggcacaggaggtggccctgctggcagagcgtgaacgcctgatgcaagatgggcatcggcagcggggcctggaggaggagctgcggaggcttcagagcgagcacgacagggctcagatgctgctggcagagttgtctcgggagcggggtgagctgcagggtgaacgcggggagctacggggccggctggcgcggctggagctggagcgggcacagctggagatgcagagccagcagctgcgcgagtccaaccagcagctggacctgagcgcctgccggctgaccacgcagtgtgagctattgacacagctgcgaagtgcccaggaagaggagaaccggcagctgctggctgaagttcaggccctgagccgggagaacagggagctcctggagcgcagcctggagagtcgggaccacctgcaccgcgaacagcgggagtacctggaccagcttaatgccctgcgccgcgagaagcagaagctcgtggagaagatcatggaccaataccgcgtgctggagcctgtgcccctgccccggaccaagaagggcagcctggctgtcacct

SEQ ID NO: 353691 - DNA, 8469 bp, Homo sapiens
atggcggcggcggcgggcggcggcagttgccccgggcctggctccgcgcggggccgcttcccgggccggccgcggggcgccggcgggggcgggggccgcggcggacggggcaacggggccgaaagagtgcgggtagctctgcggcgcggcggtggcgcgacggggccgggcggagccgagcccggggaggacacggccctgctccgtttgctggggctccgccggggcctgcgccggctccgccgcctgtgggccggcccgcgggtccagcggggccggggacggggtcggggccggggctggggcccgagtcgaggctgcgtgccggaggaggagagcagtgacggggaatccgacgaggaggagtttcagggttttcattcagatgaagatgtggcccccagttccctgcgctctgcgctccgatcccagcgaggtcgagcgccccgaggtcggggtcgcaagcataagacgaccccccttcctcctcctcgcctagcagatgtggctcctacccccccaaagacccctgcccggaaacggggtgaggaaggcacagaacggatggtgcaggcactgactgaacttctccggcgggcccaggcaccccaagcaccccggagccgggcatgtgagccctccaccccccggcggtctcggggacggcccccaggacggccagcaggcccctgcaggaggaagcagcaagcagtagtggtggcagaagcagctgtgacaatccccaaacctgagcccccacctcctgtggttccagtgaaacatcagactggcagctggaaatgcaaggaggggcccggtccaggacctgggacccccaggcgtggaggacagtcaagccgtggaggccgtggaggcaggggccgcggccgaggtggtgggctcccctttgtgatcaagtttgtttcaagggccaaaaaagtaaagatgggacaattgtccttgggactcgaatcaggtcaaggtcaaggtcaacatgaggaaagttggcaggatgtcccccaaagaagagttggatctggacagggagggagcccttgctggaaaaagcaggaacagaagctggatgacgaggaagaagagaagaaagaagaagaagaaaaagacaaggagggagaagagaaggaagaaagagctgtagctgaggagatgatgccagctgcggaaaaggaagaggcaaagctgccaccaccgcctctgactcctccagccccttcacctcctccacccctcccacccccttcgacatctcctccacccccactctgccctccaccaccacccccagtgtccccaccacctctaccatcccctccaccgcctcctgcccaagaggagcaggaggaatcccctcctcctgtggtcccagctacgtgctccaggaagaggggccggcctcccctgactcccagccagcgggcggagcgggaagctgctcgggcagggccagagggcacctctcctcccactccaacccccagcaccgccacgggaggccctccggaagacagtcccaccgtggcccccaaaagcaccaccttcctgaagaatatccggcagtttattatgcctgtggtgagtgcccgctcctcccgtgtcatcaagacaccccggcgatttatggatgaagacccccccaaacccccaaaggtggaggtctcacctgtcctgcgacctcccattaccacctccccacctgttccccaggagccagcaccagtcccctctccaccacgtgccccaactcctccatctaccccagttccactccctgagaagagacggtccatcctaagggaacccacatttcgctggacctcactgacccgggagctgccccctcctcccccagcccctccacctcccccggccccctccccaccccctgctcctgccacctcctcccggaggcccctactccttcgggcccctcagtttaccccaagcgaagcccacctgaagatctacgaatcggtgcttactcctcctcctcttggggctcctgaagcccctgagccagagcctcctcctgccgatgactctccagctgagcctgagcctcgggcagtgggccgcaccaaccacctcagcctgcctcgattcgcccctgtggtcaccactcctgttaaggccgaggtgtcccctcacggggctccagctctgagcaacgggccacagacacaggctcagctactgcagcccctgcaggccttgcaaacccagctcctgccccaggcactaccgccaccacagccacagctgcagccaccgccgtcaccacagcagatgcctcccctggaaaaagcccggattgcgggcgtgggttccttgccgctgtctggggtagaggagaagatgttcagcctcctcaagagagccaaagtgcagctattcaagatcgatcagcagcagcagcagaaggtggcagcttccatgccgctgagccctggagggcagatggaggaggtggccggggctgtcaagcagatctccgacagaggccctgtccggtctgaagatgagtcggtggaagctaagagagagcggccctcaggtcccgagtcccctgtgcaaggtccccgcatcaaacatgtctgccgtcatgctgctgtggccctgggtcaggcccgggccatggtgcctgaagatgtccctcgcctcagtgccctccctctccgggatcggcaggacctcgccacagaggatacatcatcggcgtccgagactgagagtgtcccgtcacggtcccggcggggaaaggtggaggcagcaggccctgggggagaatcagagcccacaggttctggagggaccctggcccacacaccccggcgctcactgccctcccatcacggcaagaagatgcgcatggctcgatgtggacactgtcggggctgcctacgtgtgcaggactgtgggtcctgtgtcaactgcctagacaagcccaagtttgggggccctaacaccaagaagcagtgctgtgtataccggaagtgtgacaaaatagaggctcggaagatggaacgactggctaaaaaaggccggacgatagtgaagacgctgttgccctgggattccgatgaatctcctgaggcctcccctggtcctccaggcccacgccggggggcgggagctggggggccccgggaggaggtggtggcccacccagggcccgaggagcaggactccctcctgcagcgcaagtcagctcggcgctgcgtcaaacagcgaccctcctatgatatcttcgaggattcggatgactcggagcccgggggcccccctgctcctcggcgtcggaccccccgagaaaatgagctgccactgccagaacctgaggagcagagccggccccgcaaacctaccctgcagcctgtgttgcagctcaaggcccgaaggcgcctggacaaggatgctttggcccctggcccctttgcttcttttcccaatggctggactggaaagcagaagtctcccgatggtgtgcaccgcgtccgtgtggattttaaggaggattgtgatttagagaacgtgtggctgatggggggcctgagtgtgctcacctctgtgccagggggccccccgatggtgtgcttgctgtgtgccagcaaaggactccacgagctggtgttctgtcaagtctgctgtgacccattccacccattctgcctggaggaggccgagcggcccctgccccagcatcacgacacctggtgctgccgtcgctgcaaattctgccacgtctgtggacgcaaaggtcgtggatccaagcacctcctggagtgcgagcgctgccgccatgcataccacccggcctgtctggggcccagctatccaacccgggccacgcgcaaacggcgccactggatctgttcagcctgtgtgcgctgtaagagctgtggggcaactccaggcaagaactgggacgtcgagtggtctggagattacagcctctgccccaggtgcacccagctatatgagaaaggaaactactgcccgatctgtacacgctgctatgaagacaacgactatgagagcaagatgatgcagtgcgcacagtgcgatcactgggtgcatgccaagtgcgaggggctctcagatgaagactacgagatcctttcaggactgccagactcggtgctgtacacctgcggaccgtgtgctggggcagcgcagccccgctggcgagaggccctgagcggggccctccaggggggcctgcgccaggtgctccagggcctgctgagctccaaggtggtgggcccactgctgctctgcacccagtgtgggccagatgggaagcaactgcacccaggaccctgcggcctgcaagctgtgagtcagcgcttcgaggatggccactacaagtctgtgcacagcttcatggaggacatggtgggcatcctcatgcggcactcggaggagggagagaccccggaccgccgggctggaggccagatgaaggggctcctgctgaagctgctagaatctgcgttcggctggttcgacgcccacgaccccaagtactggcgacggagtacccggctgccaaacggagtccttcccaatgcggtgttgcccccatccctggatcatgtctatgcgcagtggagacagcaggaaccagagaccccagaatcagggcagcctccaggggatccctcagcagcattccagggcaaggatccggctgccttctcacacctggaggacccccgtcagtgtgcactctgcctcaaatacggggatgcagactccaaggaggcggggcggctcttgtacatcgggcagaacgagtggacacacgtcaactgtgccatctggtcggcggaagtcttcgaggagaacgacggctccctcaagaatgtgcatgctgctgtggcccgagggaggcagatgcgctgcgagctctgcctgaagcctggcgccacggtgggctgctgcctgtcctcctgcctcagcaacttccacttcatgtgtgcccgggccagctactgcatcttccaggatgacaagaaagtcttctgccagaaacacactgatctcctggatggcaaggaaattgtgaaccccgatggttttgatgttctccgccgagtctatgtggacttcgagggcatcaacttcaagcggaagttcttgacggggcttgaacccgatgccatcaacgtgctcattggttccatccgcattgactccctgggtactctgtctgatctctcggactgcgagggacggctcttccccattggctaccagtgctcccgtctgtactggagcacagtggatgctcggaggcgctgctggtatcggtgccgaattctggagtatcggccatgggggccgagggaagagccagctcacctggaggctgcagaggagaaccagaccattgtgcacagccccgccccttcctcagagcccccaggtggtgaggaccccccactggacacagatgttcttgtccctggagctcctgagcgccactcgcccattcagaacctggaccctccactgcggccagattcaggcagcgcccctcctccagccccccgttctttttcgggggctcgaatcaaagtgcccaactactcgccatcccggaggcccttggggggtgtctcctttggccccctgccctcccctggaagtccatcttcactgacccaccacatccccacagtgggagacccggacttcccagctccccccagacgttcccgtcgtcccagccctttggctcccaggccgcctccatcacggtgggcctcccctcctctaaaaacctcccctcagctcagggtgccccctcctacctcagtcgtcacagccctcacacctacctcaggggagctggctccccctggcccggccccatctccaccaccccctgaagacctgggcccagacttcgaggacatggaggtggtgtcaggactgagtgctgctgacctggacttcgcggccagcctgctggggactgagcccttccaggaagagattgtagccgctggggccatggggagcagccacgggggcccgggggacagctccgaggaggagtccagccccacctcccgctacatccacttccctgtgactgtggtgtccgcccctggtctggcccccagcgctacccctggagccccccgcattgaacagctggacggcgtggacgacggcactgacagtgaggctgaggcggtgcagcagcctcggggccagggcacgcctccttcggggccaggagtagtccgggcaggggtccttggggctgcaggggacagggcccggcctcctgaggacctgccatcggaaattgtggattttgtgttgaagaacctagggggtcctggggatggaggtgctggccctagagaggagtcactccccccggcgcctcccctggctaatggcagccagccctcccaaggcctgaccgccagcccagctgaccccacccgcacatttgcctggctcccaggggccccaggggtccgggtgttaagccttggccctgcccctgagccccccaaacccgccacatccaaaatcatacttgtcaacaagctggggcaagtatttgtgaagatggctggggagggtgaacctgtcccacccccagtgaagcagccacctttgccccccaccatttcccccacggctcccacctcctggactctgcccccaggccccctcctcggcgtgctgcccgtggtcggagtggtccgccctgccccgcccccgccaccccctcccctgacgctggtgctgagcagtgggccagccagcccgccccgccaggccatccgcgtcaagagggtgtccactttctccggccggtccccgccagcacctcccccatacaaagccccccggctggatgaagatggagaggcctcagaggatacccctcaggttccagggcttggcagtggcgggtttagccgtgtgaggatgaaaacccccacagtgcgtggggtccttgacctggatcggcctggggagcccgctggggaagaaagtcctgggcccctccaggaacggtcccctttgctgccacttccggaagatggtcctccccaggtccccgatggtcccccagacctgctgcttgagtcccagtggcaccactattcaggtgaggcttcgagctctgaggaagagcctccatccccagatgataaagagaaccaggccccaaaacggactggcccacatctgcgcttcgagatcagcagtgaggatgggttcagcgttgaggcagagagcttggagggggcgtggagaactctgatcgagaaagtgcaagaggcccgagggcatgcccgactcagacatctctcctttagtggaatgagtggggcgagactcctgggcatccaccatgatgctgtcatcttcctggccgagcagctccccggagcccagcgttgccagcactataagttccgttaccaccagcagggagagggccaggaggagccgcccctgaatccccatggggctgctcgggcagaggtctatctccggaagtgcacctttgacatgttcaacttcctggcctcccagcaccgggtgctccctgagggggccacctgtgatgaggaagaggatgaggtgcagctcaggtcaaccagacgtgccaccagcctggagctgcccatggccatgcgttttcgtcaccttaagaagacgtccaaagaagctgtgggtgtctacagatcagccatccacgggcgaggcctgttctgtaagcgcaacatcgacgcgggggagatggtcatcgagtactctggcattgtcatccgctcggtgttgactgacaagcgggagaagttctacgatgggaagggcatcgggtgctatatgttccgcatggatgactttgatgtagtggacgccacgatgcatggcaatgccgcccgcttcatcaaccactcctgtgagcccaactgcttctctcgggtcatccacgtggagggccagaaacacattgttatcttcgccctgcgccgcatcctgcgtggtgaggagctcacctacgactacaagttccccatcgaggatgccagcaacaagctgccctgcaactgtggcgccaagcgctgccgtcggttccttaactgaggccgtggctgcccaccacgacccctcacacctcctgctgccgtcgctgccatcttgcccctagcctgggggctccctagcccctcccagagcatctcacccccaccctcatgttcagggtggatgtgggcatgcaggtgacaagggccctgcctccacccctccagcccatccagcaatcgccccctttctgccctgggggcccaggatgtagatattgtacaaaggtttctaaatcccttcttttctatgcacttttttatttaagaggtggggtcccaggtgggaacccccccacaataaagtctgtcaatgtttgga

SEQ ID NO: 353692 - DNA, 1435 bp, Homo sapiens
gggaagggtgatcttcactccaacctgcttcttgggaccaggtgaggcttcgagctctgaggaagagcctccatccccagatgataaagagaaccaggccccaaaacggactggcccacatctgcgcttcgagatcagcagtgaggatgggttcagcgttgaggcagagagcttggagggtgagtggggggagtgcagtggcaggagggagagtgtccataaaacaccatcctgactcagctctggctctgctgtctccccaggggcgtggagaactctgatcgagaaagtgcaagaggcccgagggcatgcccgactcagacatctctcctttagtggaatgagtggggcgagactcctgggcatccaccatgatgctgtcatcttcctggccgagcagctccccggagcccagcgttgccagcactataagttccgttaccaccagcagggagagggccaggaggagccgcccctgaatccccatggggctgctcgggcagaggtctatctccggaagtgcacctttgacatgttcaacttcctggcctcccagcaccgggtgctccctgagggggccacctgtgatgaggaagaggatgaggtgcagctcaggtcaaccagacgtgccaccagcctggagctgcccatggccatgcgttttcgtcaccttaagaagacgtccaaagaagctgtgggtgtctacagatcagccatccacgggcgaggcctgttctgtaagcgcaacatcgacgcgggggagatggtcatcgagtactctggcattgtcatccgctcggtgttgactgacaagcgggagaagttctacgatgggaagggcatcgggtgctatatgttccgcatggatgactttgatgtagtggacgccacgatgcatggcaatgccgcccgcttcatcaaccactcctgtgagcccaactgcttctctcgggtcatccacgtggagggccagaaacacattgttatcttcgccctgcgccgcatcctgcgtggtgaggagctcacctacgactacaagttccccatcgaggatgccagcaacaagctgccctgcaactgtggcgccaagcgctgccgtcggttccttaactgaggccgtggctgcccaccacgacccctcacacctcctgctgccgtcgctgccatcttgcccctagcctgggggctccctagcccctcccagagcatctcacccccaccctcatgttcagggtggatgtgggcatgcaggtgacaagggccctgcctccacccctccagcccatccagcaatcgccccctttctgccctgggggcccaggatgtagatattgtacaaaggtttctaaatcccttcttttctatgcacttttttatttaagaggtggggtcccaggtgggaacccccccacaataaagtctgtcaatgtttgga

SEQ ID NO: 353693 - DNA, 586 bp, Homo sapiens
  misc_feature (549)..(549): n is a, c, g, or t
gagagagtttggtgtgcacctgggcctggatgcggctggggagaggctgcgcctagggagagcctttgccgtgccaggctagacagggacccatgcagactcagtgacagtggtgcctggcgcccagccccagccctggcttctcccctgagctgccctcccctacgcagcgctgcgagctctgcctgaagcctggcgccacggtgggctgctgcctgtcctcctgcctcagcaacttccacttcatgtgtgcccgggccagctactgcatcttccaggatgacaagaaagtcttctgccagaaacacactgatctcctggatggcaaggtgggccagaactgtggggtacacggttccttccccacctctcttcctgttcacttagggacccccgtggcccccaggcctggccctactgcctctcagtgtctcctcatctgttttcccagaggcctttaggccaagcccctgactgttcagacttcctggcaattctgtttacatgaaatggggagaaagtaccgaaatgggtccgccgcccccactncattcagttcctgacgctgtaactgtaatccttggtc

SEQ ID NO: 353694 - DNA, 8036 bp, Homo sapiens
atggcggcggcggcgggcggcggcagttgccccgggcctggctccgcgcggggccgcttcccgggccggccgcggggcgccggcgggggcgggggccgcggcggacggggcaacggggccgaaagagtgcgggtagctctgcggcgcggcggtggcgcgacggggccgggcggagccgagcccggggaggacacggccctgctccgtttgctggggctccgccggggcctgcgccggctccgccgcctgtgggccggcccgcgggtccagcggggccggggacggggtcggggccggggctggggcccgagtcgaggctgcgtgccggaggaggagagcagtgacggggaatccgacgaggaggagtttcagggttttcattcagatgaagatgtggcccccagttccctgcgctctgcgctccgatcccagcgaggtcgagcgccccgaggtcggggtcgcaagcataagacgaccccccttcctcctcctcgcctagcagatgtggctcctacccccccaaagacccctgcccggaaacggggtgaggaaggcacagaacggatggtgcaggcactgactgaacttctccggcgggcccaggcaccccaagcaccccggagccgggcatgtgagccctccaccccccggcggtctcggggacggcccccaggacggccagcaggcccctgcaggaggaagcagcaagcagtagtggtggcagaagcagctgtgacaatccccaaacctgagcccccacctcctgtggttccagtgaaacatcagactggcagctggaaatgcaaggaggggcccggtccaggacctgggacccccaggcgtggaggacagtcaagccgtggaggccgtggaggcaggggccgcggccgaggtggtgggctcccctttgtgatcaagtttgtttcaagggccaaaaaagtaaagatgggacaattgtccttgggactcgaatcaggtcaaggtcaaggtcaacatgaggaaagttggcaggatgtcccccaaagaagagttggatctggacagggagggagcccttgctggaaaaagcaggaacagaagctggatgacgaggaagaagagaagaaagaagaagaagaaaaagacaaggagggagaagagaaggaagaaagagctgtagctgaggagatgatgccagctgcggaaaaggaagaggcaaagctgccaccaccgcctctgactcctccagccccttcacctcctccacccctcccacccccttcgacatctcctccacccccactctgccctccaccaccacccccagtgtccccaccacctctaccatcccctccaccgcctcctgcccaagaggagcaggaggaatcccctcctcctgtggtcccagctacgtgctccaggaagaggggccggcctcccctgactcccagccagcgggcggagcgggaagctgctcgggcagggccagagggcacctctcctcccactccaacccccagcaccgccacgggaggccctccggaagacagtcccaccgtggcccccaaaagcaccaccttcctgaagaatatccggcagtttattatgcctgtgcccctgagccagagcctcctcctgccgatgactctccagctgagcctgagcctcgggcagtgggccgcaccaaccacctcagcctgcctcgattcgcccctgtggtcaccactcctgttaaggccgaggtgtcccctcacggggctccagctctgagcaacgggccacagacacaggctcagctactgcagcccctgcaggccttgcaaacccagctcctgccccaggcactaccgccaccacagccacagctgcagccaccgccgtcaccacagcagatgcctcccctggaaaaagcccggattgcgggcgtgggttccttgccgctgtctggggtagaggagaagatgttcagcctcctcaagagagccaaagtgcagctattcaagatcgatcagcagcagcagcagaaggtggcagcttccatgccgctgagccctggagggcagatggaggaggtggccggggctgtcaagcagatctccgacagaggccctgtccggtctgaagatgagtcggtggaagctaagagagagcggccctcaggtcccgagtcccctgtgcaaggtccccgcatcaaacatgtctgccgtcatgctgctgtggccctgggtcaggcccgggccatggtgcctgaagatgtccctcgcctcagtgccctccctctccgggatcggcaggacctcgccacagaggatacatcatcggcgtccgagactgagagtgtcccgtcacggtcccggcggggaaaggtggaggcagcaggccctgggggagaatcagagcccacaggttctggagggaccctggcccacacaccccggcgctcactgccctcccatcacggcaagaagatgcgcatggctcgatgtggacactgtcggggctgcctacgtgtgcaggactgtgggtcctgtgtcaactgcctagacaagcccaagtttgggggccctaacaccaagaagcagtgctgtgtataccggaagtgtgacaaaatagaggctcggaagatggaacgactggctaaaaaaggccggacgatagtgaagacgctgttgccctgggattccgatgaatctcctgaggcctcccctggtcctccaggcccacgccggggggcgggagctggggggccccgggaggaggtggtggcccacccagggcccgaggagcaggactccctcctgcagcgcaagtcagctcggcgctgcgtcaaacagcgaccctcctatgatatcttcgaggattcggatgactcggagcccgggggcccccctgctcctcggcgtcggaccccccgagaaaatgagctgccactgccagaacctgaggagcagagccggccccgcaaacctaccctgcagcctgtgttgcagctcaaggcccgaaggcgcctggacaaggatgctttggcccctggcccctttgcttcttttcccaatggctggactggaaagcagaagtctcccgatggtgtgcaccgcgtccgtgtggattttaaggaggattgtgatttagagaacgtgtggctgatggggggcctgagtgtgctcacctctgtgccagggggccccccgatggtgtgcttgctgtgtgccagcaaaggactccacgagctggtgttctgtcaagtctgctgtgacccattccacccattctgcctggaggaggccgagcggcccctgccccagcatcacgacacctggtgctgccgtcgctgcaaattctgccacgtctgtggacgcaaaggtcgtggatccaagcacctcctggagtgcgagcgctgccgccatgcataccacccggcctgtctggggcccagctatccaacccgggccacgcgcaaacggcgccactggatctgttcagcctgtgtgcgctgtaagagctgtggggcaactccaggcaagaactgggacgtcgagtggtctggagattacagcctctgccccaggtgcacccagctatatgagaaaggaaactactgcccgatctgtacacgctgctatgaagacaacgactatgagagcaagatgatgcagtgcgcacagtgcgatcactgggtgcatgccaagtgcgaggggctctcagatgaagactacgagatcctttcaggactgccagactcggtgctgtacacctgcggaccgtgtgctggggcagcgcagccccgctggcgagaggccctgagcggggccctccaggggggcctgcgccaggtgctccagggcctgctgagctccaaggtggtgggcccactgctgctctgcacccagtgtgggccagatgggaagcaactgcacccaggaccctgcggcctgcaagctgtgagtcagcgcttcgaggatggccactacaagtctgtgcacagcttcatggaggacatggtgggcatcctcatgcggcactcggaggagggagagaccccggaccgccgggctggaggccagatgaaggggctcctgctgaagctgctagaatctgcgttcggctggttcgacgcccacgaccccaagtactggcgacggagtacccggctgccaaacggagtccttcccaatgcggtgttgcccccatccctggatcatgtctatgcgcagtggagacagcaggaaccagagaccccagaatcagggcagcctccaggggatccctcagcagcattccagggcaaggatccggctgccttctcacacctggaggacccccgtcagtgtgcactctgcctcaaatacggggatgcagactccaaggaggcggggcggctcttgtacatcgggcagaacgagtggacacacgtcaactgtgccatctggtcggcggaagtcttcgaggagaacgacggctccctcaagaatgtgcatgctgctgtggcccgagggaggcagatgcgctgcgagctctgcctgaagcctggcgccacggtgggctgctgcctgtcctcctgcctcagcaacttccacttcatgtgtgcccgggccagctactgcatcttccaggatgacaagaaagtcttctgccagaaacacactgatctcctggatggcaaggaaattgtgaaccccgatggttttgatgttctccgccgagtctatgtggacttcgagggcatcaacttcaagcggaagttcttgacggggcttgaacccgatgccatcaacgtgctcattggttccatccgcattgactccctgggtactctgtctgatctctcggactgcgagggacggctcttccccattggctaccagtgctcccgtctgtactggagcacagtggatgctcggaggcgctgctggtatcggtgccgaattctggagtatcggccatgggggccgagggaagagccagctcacctggaggctgcagaggagaaccagaccattgtgcacagccccgccccttcctcagagcccccaggtggtgaggaccccccactggacacagatgttcttgtccctggagctcctgagcgccactcgcccattcagaacctggaccctccactgcggccagattcaggcagcgcccctcctccagccccccgttctttttcgggggctcgaatcaaagtgcccaactactcgccatcccggaggcccttggggggtgtctcctttggccccctgccctcccctggaagtccatcttcactgacccaccacatccccacagtgggagacccggacttcccagctccccccagacgttcccgtcgtcccagccctttggctcccaggccgcctccatcacggtgggcctcccctcctctaaaaacctcccctcagctcagggtgccccctcctacctcagtcgtcacagccctcacacctacctcaggggagctggctccccctggcccggccccatctccaccaccccctgaagacctgggcccagacttcgaggacatggaggtggtgtcaggactgagtgctgctgacctggacttcgcggccagcctgctggggactgagcccttccaggaagagattgtagccgctggggccatggggagcagccacgggggcccgggggacagctccgaggaggagtccagccccacctcccgctacatccacttccctgtgactgtggtgtccgcccctggtctggcccccagcgctacccctggagccccccgcattgaacagctggacggcgtggacgacggcactgacagtgaggctgaggcggtgcagcagcctcggggccagggcacgcctccttcggggccaggagtagtccgggcaggggtccttggggctgcaggggacagggcccggcctcctgaggacctgccatcggaaattgtggattttgtgttgaagaacctagggggtcctggggatggaggtgctggccctagagaggagtcactccccccggcgcctcccctggctaatggcagccagccctcccaaggcctgaccgccagcccagctgaccccacccgcacatttgcctggctcccaggggccccaggggtccgggtgttaagccttggccctgcccctgagccccccaaacccgccacatccaaaatcatacttgtcaacaagctggggcaagtatttgtgaagatggctggggagggtgaacctgtcccacccccagtgaagcagccacctttgccccccaccatttcccccacggctcccacctcctggactctgcccccaggccccctcctcggcgtgctgcccgtggtcggagtggtccgccctgccccgcccccgccaccccctcccctgacgctggtgctgagcagtgggccagccagcccgccccgccaggccatccgcgtcaagagggtgtccactttctccggccggtccccgccagcacctcccccatacaaagccccccggctggatgaagatggagaggcctcagaggatacccctcaggttccagggcttggcagtggcgggtttagccgtgtgaggatgaaaacccccacagtgcgtggggtccttgacctggatcggcctggggagcccgctggggaagaaagtcctgggcccctccaggaacggtcccctttgctgccacttccggaagatggtcctccccaggtccccgatggtcccccagacctgctgcttgagtcccagtggcaccactattcaggtgaggcttcgagctctgaggaagagcctccatccccagatgataaagagaaccaggccccaaaacggactggcccacatctgcgcttcgagatcagcagtgaggatgggttcagcgttgaggcagagagcttggagggggcgtggagaactctgatcgagaaagtgcaagaggcccgagggcatgcccgactcagacatctctcctttagtggaatgagtggggcgagactcctgggcatccaccatgatgctgtcatcttcctggccgagcagctccccggagcccagcgttgccagcactataagttccgttaccaccagcagggagagggccaggaggagccgcccctgaatccccatggggctgctcgggcagaggtctatctccggaagtgcacctttgacatgttcaacttcctggcctcccagcaccgggtgctccctgagggggccacctgtgatgaggaagaggatgaggtgcagctcaggtcaaccagacgtgccaccagcctggagctgcccatggccatgcgttttcgtcaccttaagaagacgtccaaagaagctgtgggtgtctacagatcagccatccacgggcgaggcctgttctgtaagcgcaacatcgacgcgggggagatggtcatcgagtactctggcattgtcatccgctcggtgttgactgacaagcgggagaagttctacgatgggaagggcatcgggtgctatatgttccgcatggatgactttgatgtagtggacgccacgatgcatggcaatgccgcccgcttcatcaaccactcctgtgagcccaactgcttctctcgggtcatccacgtggagggccagaaacacattgttatcttcgccctgcgccgcatcctgcgtggtgaggagctcacctacgactacaagttccccatcgaggatgccagcaacaagctgccctgcaactgtggcgccaagcgctgccgtcggttccttaactgaggccgtggctgcccaccacgacccctcacacctcctgctgccgtcgctgccatcttgcccctagcctgggggctccctagcccctcccagagcatctcacccccaccctcatgttcagggtggatgtgggcatgcaggtgacaagggccctgcctccacccctccagcccatccagcaatcgccccctttctgccctgggggcccaggatgtagatattgtacaaaggtttctaaatcccttcttttctatgcacttttttatttaagaggtggggtcccaggtgggaacccccccacaataaagtctgtcaatgtttgga

SEQ ID NO: 353695 - DNA, 8523 bp, Homo sapiens
atggcggcggcggcgggcggcggcagttgccccgggcctggctccgcgcggggccgcttcccgggccggccgcggggcgccggcgggggcgggggccgcggcggacggggcaacggggccgaaagagtgcgggtagctctgcggcgcggcggtggcgcgacggggccgggcggagccgagcccggggaggacacggccctgctccgtttgctggggctccgccggggcctgcgccggctccgccgcctgtgggccggcccgcgggtccagcggggccggggacggggtcggggccggggctggggcccgagtcgaggctgcgtgccggaggaggagagcagtgacggggaatccgacgaggaggagtttcagggttttcattcagatgaagatgtggcccccagttccctgcgctctgcgctccgatcccagcgaggtcgagcgccccgaggtcggggtcgcaagcataagacgaccccccttcctcctcctcgcctagcagatgtggctcctacccccccaaagacccctgcccggaaacggggtgaggaaggcacagaacggatggtgcaggcactgactgaacttctccggcgggcccaggcaccccaagcaccccggagccgggcatgtgagccctccaccccccggcggtctcggggacggcccccaggacggccagcaggcccctgcaggaggaagcagcaagcagtagtggtggcagaagcagctgtgacaatccccaaacctgagcccccacctcctgtggttccagtgaaacatcagactggcagctggaaatgcaaggaggggcccggtccaggacctgggacccccaggcgtggaggacagtcaagccgtggaggccgtggaggcaggggccgcggccgaggtggtgggctcccctttgtgatcaagtttgtttcaagggccaaaaaagtaaagatgggacaattgtccttgggactcgaatcaggtcaaggtcaaggtcaacatgaggaaagttggcaggatgtcccccaaagaagagttggatctggacagggagggagcccttgctggaaaaagcaggaacagaagctggatgacgaggaagaagagaagaaagaagaagaagaaaaagacaaggagggagaagagaaggaagaaagagctgtagctgaggagatgatgccagctgcggaaaaggaagaggcaaagctgccaccaccgcctctgactcctccagccccttcacctcctccacccctcccacccccttcgacatctcctccacccccactctgccctccaccaccacccccagtgtccccaccacctctaccatcccctccaccgcctcctgcccaagaggagcaggaggaatcccctcctcctgtggtcccagctacgtgctccaggaagaggggccggcctcccctgactcccagccagcgggcggagcgggaagctgctcgggcagggccagagggcacctctcctcccactccaacccccagcaccgccacgggaggccctccggaagacagtcccaccgtggcccccaaaagcaccaccttcctgaagaatatccggcagtttattatgcctgtggtgagtgcccgctcctcccgtgtcatcaagacaccccggcgatttatggatgaagacccccccaaacccccaaaggtggaggtctcacctgtcctgcgacctcccattaccacctccccacctgttccccaggagccagcaccagtcccctctccaccacgtgccccaactcctccatctaccccagttccactccctgagaagagacggtccatcctaagggaacccacatttcgctggacctcactgacccgggagctgccccctcctcccccagcccctccacctcccccggccccctccccaccccctgctcctgccacctcctcccggaggcccctactccttcgggcccctcagtttaccccaagcgaagcccacctgaagatctacgaatcggtgcttactcctcctcctcttggggctcctgaagcccctgagccagagcctcctcctgccgatgactctccagctgagcctgagcctcgggcagtgggccgcaccaaccacctcagcctgcctcgattcgcccctgtggtcaccactcctgttaaggccgaggtgtcccctcacggggctccagctctgagcaacgggccacagacacaggctcagctactgcagcccctgcaggccttgcaaacccagctcctgccccaggcactaccgccaccacagccacagctgcagccaccgccgtcaccacagcagatgcctcccctggaaaaagcccggattgcgggcgtgggttccttgccgctgtctggggtagaggagaagatgttcagcctcctcaagagagccaaagtgcagctattcaagatcgatcagcagcagcagcagaaggtggcagcttccatgccgctgagccctggagggcagatggaggaggtggccggggctgtcaagcagatctccgacagaggccctgtccggtctgaagatgagtcggtggaagctaagagagagcggccctcaggtcccgagtcccctgtgcaaggtccccgcatcaaacatgtctgccgtcatgctgctgtggccctgggtcaggcccgggccatggtgcctgaagatgtccctcgcctcagtgccctccctctccgggatcggcaggacctcgccacagaggatacatcatcggcgtccgagactgagagtgtcccgtcacggtcccggcggggaaaggtggaggcagcaggccctgggggagaatcagagcccacaggttctggagggaccctggcccacacaccccggcgctcactgccctcccatcacggcaagaagatgcgcatggctcgatgtggacactgtcggggctgcctacgtgtgcaggactgtgggtcctgtgtcaactgcctagacaagcccaagtttgggggccctaacaccaagaagcagtgctgtgtataccggaagtgtgacaaaatagaggctcggaagatggaacgactggctaaaaaaggccggacgatagtgaagacgctgttgccctgggattccgatgaatctcctgaggcctcccctggtcctccaggcccacgccggggggcgggagctggggggccccgggaggaggtggtggcccacccagggcccgaggagcaggactccctcctgcagcgcaagtcagctcggcgctgcgtcaaacagcgaccctcctatgatatcttcgaggattcggatgactcggagcccgggggcccccctgctcctcggcgtcggaccccccgagaaaatgagctgccactgccagaacctgaggagcagagccggccccgcaaacctaccctgcagcctgtgttgcagctcaaggcccgaaggcgcctggacaaggatgctttggcccctggcccctttgcttcttttcccaatggctggactggaaagcagaagtctcccgatggtgtgcaccgcgtccgtgtggattttaaggaggattgtgatttagagaacgtgtggctgatggggggcctgagtgtgctcacctctgtgccagggggccccccgatggtgtgcttgctgtgtgccagcaaaggactccacgagctggtgttctgtcaagtctgctgtgacccattccacccattctgcctggaggaggccgagcggcccctgccccagcatcacgacacctggtgctgccgtcgctgcaaattctgccacgtctgtggacgcaaaggtcgtggatccaagcacctcctggagtgcgagcgctgccgccatgcataccacccggcctgtctggggcccagctatccaacccgggccacgcgcaaacggcgccactggatctgttcagcctgtgtgcgctgtaagagctgtggggcaactccaggcaagaactgggacgtcgagtggtctggagattacagcctctgccccaggtgcacccagctatatgagaaaggaaactactgcccgatctgtacacgctgctatgaagacaacgactatgagagcaagatgatgcagtgcgcacagtgcgatcactgggtgcatgccaagtgcgaggggctctcagatgaagactacgagatcctttcaggactgccagactcggtgctgtacacctgcggaccgtgtgctggggcagcgcagccccgctggcgagaggccctgagcggggccctccaggggggcctgcgccaggtgctccagggcctgctgagctccaaggtggtgggcccactgctgctctgcacccagtgtgggccagatgggaagcaactgcacccaggaccctgcggcctgcaagctgtgagtcagcgcttcgaggatggccactacaagtctgtgcacagcttcatggaggacatggtgggcatcctcatgcggcactcggaggagggagagaccccggaccgccgggctggaggccagatgaaggggctcctgctgaagctgctagaatctgcgttcggctggttcgacgcccacgaccccaagtactggcgacggagtacccggctgccaaacggagtccttcccaatgcggtgttgcccccatccctggatcatgtctatgcgcagtggagacagcaggaaccagagaccccagaatcagggcagcctccaggggatccctcagcagcattccagggcaaggatccggctgccttctcacacctggaggacccccgtcagtgtgcactctgcctcaaatacggggatgcagactccaaggaggcggggcggctcttgtacatcgggcagaacgagtggacacacgtcaactgtgccatctggtcggcggaagtcttcgaggagaacgacggctccctcaagaatgtgcatgctgctgtggcccgagggaggcagatgcgctgcgagctctgcctgaagcctggcgccacggtgggctgctgcctgtcctcctgcctcagcaacttccacttcatgtgtgcccgggccagctactgcatcttccaggatgacaagaaagtcttctgccagaaacacactgatctcctggatggcaaggaaattgtgaaccccgatggttttgatgttctccgccgagtctatgtggacttcgagggcatcaacttcaagcggaagttcttgacggggcttgaacccgatgccatcaacgtgctcattggttccatccgcattgactccctgggtactctgtctgatctctcggactgcgagggacggctcttccccattggctaccagtgctcccgtctgtactggagcacagtggatgctcggaggcgctgctggtatcggtgccgaattctggagtatcggccatgggggccgagggaagagccagctcacctggaggctgcagaggagaaccagaccattgtgcacagccccgccccttcctcagagcccccaggtggtgaggaccccccactggacacagatgttcttgtccctggagctcctgagcgccactcgcccattcagaacctggaccctccactgcggccagattcaggcagcgcccctcctccagccccccgttctttttcgggggctcgaatcaaagtgcccaactactcgccatcccggaggcccttggggggtgtctcctttggccccctgccctcccctggaagtccatcttcactgacccaccacatccccacagtgggagacccggacttcccagctccccccagacgttcccgtcgtcccagccctttggctcccaggccgcctccatcacggtgggcctcccctcctctaaaaacctcccctcagctcagggtgccccctcctacctcagtcgtcacagccctcacacctacctcaggggagctggctccccctggcccggccccatctccaccaccccctgaagacctgggcccagacttcgaggacatggaggtggtgtcaggactgagtgctgctgacctggacttcgcggccagcctgctggggactgagcccttccaggaagagattgtagccgctggggccatggggagcagccacgggggcccgggggacagctccgaggaggagtccagccccacctcccgctacatccacttccctgtgactgtggtgtccgcccctggtctggcccccagcgctacccctggagccccccgcattgaacagctggacggcgtggacgacggcactgacagtgaggctgaggcggtgcagcagcctcggggccagggcacgcctccttcggggccaggagtagtccgggcaggggtccttggggctgcaggggacagggcccggcctcctgaggacctgccatcggaaattgtggattttgtgttgaagaacctagggggtcctggggatggaggtgctggccctagagaggagtcactccccccggcgcctcccctggctaatggcagccagccctcccaaggcctgaccgccagcccagctgaccccacccgcacatttgcctggctcccaggggccccaggggtccgggtgttaagccttggccctgcccctgagccccccaaacccgccacatccaaaatcatacttgtcaacaagctggggcaagtatttgtgaagatggctggggagggtgaacctgtcccacccccagtgaagcagccacctttgccccccaccatttcccccacggctcccacctcctggactctgcccccaggccccctcctcggcgtgctgcccgtggtcggagtggtccgccctgccccgcccccgccaccccctcccctgacgctggtgctgagcagtgggccagccagcccgccccgccaggccatccgcgtcaagagggtgtccactttctccggccggtccccgccagcacctcccccatacaaagccccccggctggatgaagatggagaggcctcagaggatacccctcaggttccagggcttggcagtggcgggtttagccgtgtgaggatgaaaacccccacagtgcgtggggtccttgacctggatcggcctggggagcccgctggggaagaaagtcctgggcccctccaggaacggtcccctttgctgccacttccggaagatggtcctccccaggtccccgatggtcccccagacctgctgcttgagtcccagtggcaccactattcaggtgaggcttcgagctctgaggaagagcctccatccccagatgataaagagaaccaggccccaaaacggactggcccacatctgcgcttcgagatcagcagtgaggatgggttcagcgttgaggcagagagcttggagggggcgtggagaactctgatcgagaaagtgcaagaggcccgagggcatgcccgactcagacatctctcctttagtggaatgagtggggcgagactcctgggcatccaccatgatgctgtcatcttcctggccgagcagctccccggagcccagcgttgccagcactataagttccgttaccaccagcagggagagggccaggaggagccgcccctgaatccccatggggctgctcgggcagaggtctatctccggaagtgcacctttgacatgttcaacttcctggcctcccagcaccgggtgctccctgagggggccacctgtgatgaggaagaggatgaggtgcagctcaggtcaaccagacgtgccaccagcctggagctgcccatggccatgcgttttcgtcaccttaagaagacgtccaaagaagctgtgggtgtctacagatcagccatccacgggcgaggcctgttctgtaagcgcaacatcgacgcgggggagatggtcatcgagtactctggcattgtcatccgctcggtgttgactgacaagcgggagaagttctacgatgggaagggcatcgggtgctatatgttccgcatggatgactttgatgtagtggacgccacgatgcatggcaatgccgcccgcttcatcaaccactcctgtgagcccaactgcttctctcgggtcatccacgtggagggccagaaacacattgttatcttcgccctgcgccgcatcctgcgtggtgaggagctcacctacgactacaagttccccatcgaggatgccagcaacaagctgccctgcaactgtggcgccaagcgctgccgtcggttccttaactgaggccgtggctgcccaccacgacccctcacacctcctgctgccgtcgctgccatcttgcccctagcctgggggctccctagcccctcccagagcatctcacccccaccctcatgttcagggtggatgtgggcatgcaggtgacaagggccctgcctccacccctccagcccatccagcaatcgccccctttctgccctgggggcccaggatgtagatattgtacaaaggtttctaaatcccttcttttctatgcacttttttatttaagaggtggggtcccaggtgggaacccccccacaataaagtctgtcaatgtttggaaaaaaaaaaaccggggtttttggggggaaaggtaaatggaggcaggtcggaccg

SEQ ID NO: 353696 - DNA, 8431 bp, Homo sapiens
  misc_feature (8421)..(8421): n is a, c, g, or t
atggcggcggcggcgggcggcggcagttgccccgggcctggctccgcgcggggccgcttcccgggccggccgcggggcgccggcgggggcgggggccgcggcggacggggcaacggggccgaaagagtgcgggtagctctgcggcgcggcggtggcgcgacggggccgggcggagccgagcccggggaggacacggccctgctccgtttgctggggctccgccggggcctgcgccggctccgccgcctgtgggccggcccgcgggtccagcggggccggggacggggtcggggccggggctggggcccgagtcgaggctgcgtgccggaggaggagagcagtgacggggaatccgacgaggaggagtttcagggttttcattcagatgaagatgtggcccccagttccctgcgctctgcgctccgatcccagcgaggtcgagcgccccgaggtcggggtcgcaagcataagacgaccccccttcctcctcctcgcctagcagatgtggctcctacccccccaaagacccctgcccggaaacggggtgaggaaggcacagaacggatggtgcaggcactgactgaacttctccggcgggcccaggcaccccaagcaccccggagccgggcatgtgagccctccaccccccggcggtctcggggacggcccccaggacggccagcaggcccctgcaggaggaagcagcaagcagtagtggtggcagaagcagctgtgacaatccccaaacctgagcccccacctcctgtggttccagtgaaacatcagactggcagctggaaatgcaaggaggggcccggtccaggacctgggacccccaggcgtggaggacagtcaagccgtggaggccgtggaggcaggggccgcggccgaggtggtgggctcccctttgtgatcaagtttgtttcaagggccaaaaaagtaaagatgggacaattgtccttgggactcgaatcaggtcaaggtcaaggtcaacatgaggaaagttggcaggatgtcccccaaagaagagttggatctggacagggagggagcccttgctggaaaaagcaggaacagaagctggatgacgaggaagaagagaagaaagaagaagaagaaaaagacaaggagggagaagagaaggaagaaagagctgtagctgaggagatgatgccagctgcggaaaaggaagaggcaaagctgccaccaccgcctctgactcctccagccccttcacctcctccacccctcccacccccttcgacatctcctccacccccactctgccctccaccaccacccccagtgtccccaccacctctaccatcccctccaccgcctcctgcccaagaggagcaggaggaatcccctcctcctgtggtcccagctacgtgctccaggaagaggggccggcctcccctgactcccagccagcgggcggagcgggaagctgctcgggcagggccagagggcacctctcctcccactccaacccccagcaccgccacgggaggccctccggaagacagtcccaccgtggcccccaaaagcaccaccttcctgaagaatatccggcagtttattatgcctgtggtgagtgcccgctcctcccgtgtcatcaagacaccccggcgatttatggatgaagacccccccaaacccccaaaggtggaggtctcacctgtcctgcgacctcccattaccacctccccacctgttccccaggagccagcaccagtcccctctccaccacgtgccccaactcctccatctaccccagttccactccctgagaagagacggtccatcctaagggaacccacatttcgctggacctcactgacccgggagctgccccctcctcccccagcccctccacctcccccggccccctccccaccccctgctcctgccacctcctcccggaggcccctactccttcgggcccctcagtttaccccaagcgaagcccacctgaagatctacgaatcggtgcttactcctcctcctcttggggctcctgaagcccctgagccagagcctcctcctgccgatgactctccagctgagcctgagcctcgggcagtgggccgcaccaaccacctcagcctgcctcgattcgcccctgtggtcaccactcctgttaaggccgaggtgtcccctcacggggctccagctctgagcaacgggccacagacacaggctcagctactgcagcccctgcaggccttgcaaacccagctcctgccccaggcactaccgccaccacagccacagctgcagccaccgccgtcaccacagcagatgcctcccctggaaaaagcccggattgcgggcgtgggttccttgccgctgtctggggtagaggagaagatgttcagcctcctcaagagagccaaagtgcagctattcaagatcgatcagcagcagcagcagaaggtggcagcttccatgccgctgagccctggagggcagatggaggaggtggccggggctgtcaagcagatctccgacagaggccctgtccggtctgaagatgagtcggtggaagctaagagagagcggccctcaggtcccgagtcccctgtgcaaggtccccgcatcaaacatgtctgccgtcatgctgctgtggccctgggtcaggcccgggccatggtgcctgaagatgtccctcgcctcagtgccctccctctccgggatcggcaggacctcgccacagaggatacatcatcggcgtccgagactgagagtgtcccgtcacggtcccggcggggaaaggtggaggcagcaggccctgggggagaatcagagcccacaggttctggagggaccctggcccacacaccccggcgctcactgccctcccatcacggcaagaagatgcgcatggctcgatgtggacactgtcggggctgcctacgtgtgcaggactgtgggtcctgtgtcaactgcctagacaagcccaagtttgggggccctaacaccaagaagcagtgctgtgtataccggaagtgtgacaaaatagaggctcggaagatggaacgactggctaaaaaaggccggacgatagtgaagacgctgttgccctgggattccgatgaatctcctgaggcctcccctggtcctccaggcccacgccggggggcgggagctggggggccccgggaggaggtggtggcccacccagggcccgaggagcaggactccctcctgcagcgcaagtcagctcggcgctgcgtcaaacagcgaccctcctatgatatcttcgaggattcggatgactcggagcccgggggcccccctgctcctcggcgtcggaccccccgagaaaatgagctgccactgccagaacctgaggagcagagccggccccgcaaacctaccctgcagcctgtgttgcagctcaaggcccgaaggcgcctggacaaggatgctttggcccctggcccctttgcttcttttcccaatggctggactggaaagcagaagtctcccgatggtgtgcaccgcgtccgtgtggattttaaggaggattgtgatttagagaacgtgtggctgatggggggcctgagtgtgctcacctctgtgccagggggccccccgatggtgtgcttgctgtgtgccagcaaaggactccacgagctggtgttctgtcaagtctgctgtgacccattccacccattctgcctggaggaggccgagcggcccctgccccagcatcacgacacctggtgctgccgtcgctgcaaattctgccacgtctgtggacgcaaaggtcgtggatccaagcacctcctggagtgcgagcgctgccgccatgcataccacccggcctgtctggggcccagctatccaacccgggccacgcgcaaacggcgccactggatctgttcagcctgtgtgcgctgtaagagctgtggggcaactccaggcaagaactgggacgtcgagtggtctggagattacagcctctgccccaggtgcacccagctatatgagaaaggaaactactgcccgatctgtacacgctgctatgaagacaacgactatgagagcaagatgatgcagtgcgcacagtgcgatcactgggtgcatgccaagtgcgaggggctctcagatgaagactacgagatcctttcaggactgccagactcggtgctgtacacctgcggaccgtgtgctggggcagcgcagccccgctggcgagaggccctgagcggggccctccaggggggcctgcgccaggtgctccagggcctgctgagctccaaggtggtgggcccactgctgctctgcacccagtgtgggccagatgggaagcaactgcacccaggaccctgcggcctgcaagctgtgagtcagcgcttcgaggatggccactacaagtctgtgcacagcttcatggaggacatggtgggcatcctcatgcggcactcggaggagggagagaccccggaccgccgggctggaggccagatgaaggggctcctgctgaagctgctagaatctgcgttcggctggttcgacgcccacgaccccaagtactggcgacggagtacccggctgccaaacggagtccttcccaatgcggtgttgcccccatccctggatcatgtctatgcgcagtggagacagcaggaaccagagaccccagaatcagggcagcctccaggggatccctcagcagcattccagggcaaggatccggctgccttctcacacctggaggacccccgtcagtgtgcactctgcctcaaatacggggatgcagactccaaggaggcggggcggctcttgtacatcgggcagaacgagtggacacacgtcaactgtgccatctggtcggcggaagtcttcgaggagaacgacggctccctcaagaatgtgcatgctgctgtggcccgagggaggcagatgcgctgcgagctctgcctgaagcctggcgccacggtgggctgctgcctgtcctcctgcctcagcaacttccacttcatgtgtgcccgggccagctactgcatcttccaggatgacaagaaagtcttctgccagaaacacactgatctcctggatggcaaggaaattgtgaaccccgatggttttgatgttctccgccgagtctatgtggacttcgagggcatcaacttcaagcggaagttcttgacggggcttgaacccgatgccatcaacgtgctcattggttccatccgcattgactccctgggtactctgtctgatctctcggactgcgagggacggctcttccccattggctaccagtgctcccgtctgtactggagcacagtggatgctcggaggcgctgctggtatcggtgccgaattctggagtatcggccatgggggccgagggaagagccagctcacctggaggctgcagaggagaaccagaccattgtgcacagccccgccccttcctcagagcccccaggtggtgaggaccccccactggacacagatgttcttgtccctggagctcctgagcgccactcgcccattcagaacctggaccctccactgcggccagattcaggcagcgcccctcctccagccccccgttctttttcgggggctcgaatcaaagtgcccaactactcgccatcccggaggcccttggggggtgtctcctttggccccctgccctcccctggaagtccatcttcactgacccaccacatccccacagtgggagacccggacttcccagctccccccagacgttcccgtcgtcccagccctttggctcccaggccgcctccatcacggtgggcctcccctcctctaaaaacctcccctcagctcagggtgccccctcctacctcagtcgtcacagccctcacacctacctcaggggagctggctccccctggcccggccccatctccaccaccccctgaagacctgggcccagacttcgaggacatggaggtggtgtcaggactgagtgctgctgacctggacttcgcggccagcctgctggggactgagcccttccaggaagagattgtagccgctggggccatggggagcagccacgggggcccgggggacagctccgaggaggagtccagccccacctcccgctacatccacttccctgtgactgtggtgtccgcccctggtctggcccccagcgctacccctggagccccccgcattgaacagctggacggcgtggacgacggcactgacagtgaggctgaggcggtgcagcagcctcggggccagggcacgcctccttcggggccaggagtagtccgggcaggggtccttggggctgcaggggacagggcccggcctcctgaggacctgccatcggaaattgtggattttgtgttgaagaacctagggggtcctggggatggaggtgctggccctagagaggagtcactccccccggcgcctcccctggctaatggcagccagccctcccaaggcctgaccgccagcccagctgaccccacccgcacatttgcctggctcccaggggccccaggggtccgggtgttaagccttggccctgcccctgagccccccaaacccgccacatccaaaatcatacttgtcaacaagctggggcaagtatttgtgaagatggctggggagggtgaacctgtcccacccccagtgaagcagccacctttgccccccaccatttcccccacggctcccacctcctggactctgcccccaggccccctcctcggcgtgctgcccgtggtcggagtggtccgccctgccccgcccccgccaccccctcccctgacgctggtgctgagcagtgggccagccagcccgccccgccaggccatccgcgtcaagagggtgtccactttctccggccggtccccgccagcacctcccccatacaaagccccccggctggatgaagatggagaggcctcagaggatacccctcaggttccagggcttggcagtggcgggtttagccgtgtgaggatgaaaacccccacagtgcgtggggtccttgacctggatcggcctggggagcccgctggggaagaaagtcctgggcccctccaggaacggtcccctttgctgccacttccggaagatggtcctccccaggtccccgatggtcccccagacctgctgcttgagtcccagtggcaccactattcaggtgaggcttcgagctctgaggaagagcctccatccccagatgataaagagaaccaggccccaaaacggactggcccacatctgcgcttcgagatcagcagtgaggatgggttcagcgttgaggcagagagcttggagggggcgtggagaactctgatcgagaaagtgcaagaggcccgagggcatgcccgactcagacatctctcctttagtggaatgagtggggcgagactcctgggcatccaccatgatgctgtcatcttcctggccgagcagctccccggagcccagcgttgccagcactataagttccgttaccaccagcagggagagggccaggaggagccgcccctgaatccccatggggctgctcgggcagaggtctatctccggaagtgcacctttgacatgttcaacttcctggcctcccagcaccgggtgctccctgagggggccacctgtgatgaggaagaggatgaggtgcagctcaggtcaaccagacgtgccaccagcctggagctgcccatggccatgcgttttcgtcaccttaagaagacgtccaaagaagctgtgggtgtctacagatcagccatccacgggcgaggcctgttctgtaagcgcaacatcgacgcgggggagatggtcatcgagtactctggcattgtcatccgctcggtgttgactgacaagcgggagaagttctacgatgggaagggcatcgggtgctatatgttccgcatggatgactttgatgtagtggacgccacgatgcatggcaatgccgcccgcttcatcaaccactcctgtgagcccaactgcttctctcgggtcatccacgtggagggccagaaacacattgttatcttcgccctgcgccgcatcctgcgtggtgaggagctcacctacgactacaagttccccatcgaggatgccagcaacaagctgccctgcaactgtggcgccaagcgctgccgtcggttccttaactgaggccgtggctgcccaccacgacccctcacacctcctgctgccgtcgctgccatcttgcccctagcctgggggctccctagcccctcccagagcatctcacccccaccctcatgttcagggtggatgtgggcatgcaggtgacaagggccctgcctccacccctccagcccatccagcaatcgccccctttctgccctgggggcccaggatgtagatattgtacaaaggtttctaaatcccttcttcgtcttctccccttctgtcgtcttctanggatcctgca

SEQ ID NO: 353697 - DNA, 344 bp, Homo sapiens
caaaagttagttgtatgtggtggcacgcatctgtggtctcagctgctcaggaggctgaggcaggaggatcgtctgagcctgggagttcaaggctgcggtgggctatgggtcacgccactgcattccagtctgggcaacagagcgagaccctgcctcaaaaaacaagaaaaagaatcgtcctggcgggtcttggttagttaaagaaggccctgggaatccaggtaacatttggggttgtagaagaagaggggcgtggaaggggagtgacctcactgctcattgtgtcctgcctagagctgccactgccagaacctgaggagcagagccggccccgcaaacctacc

SEQ ID NO: 353698 - DNA, 488 bp, Homo sapiens
gtttgggcccaagggctggccagggtgggtggaggcctgaaggtgagggcatccctgtgccagcaggtttcgccatctctgtctccacatccaacagcacctcctggagtgcgagcgctgccgccatgcataccacccggcctgtctggggcccagctatccaacccgggccacgcgcaaacggcgccactgggtgagagatgaggttcacccacttgctttgtctctaatgaatatcaccaccacccccaaacttgctctaggctggggctctcaggaggagcagaggttggggatcctcttaagaattgattagtaatgtttcctcttcaaaaatttcacataggtcagatttatattcagaatttgcatggagtggttttaggggcttatgaatctcacattccgtgggctcagaatcccctgctatagcctgatgtcctctcctgccctcatgttcctcctccgtgtctgtcctgcgtgttttc

SEQ ID NO: 353699 - DNA, 478 bp, Homo sapiens
cagtgggtgaagcgagcctgtccgcggggacagagcacctgatctccccacctcatccctgcagggcatcgggtgctatatgttccgcatggatgactttgatgtagtggacgccacgatgcatggcaatgccgcccgcttcatcaaccactcctgtgagcccaactgcttctctcgggtcatccacgtggagggccagaaacacattgttatcttcgccctgcgccgcatcctgcgtggtgaggagctcacctacgactacaagttccccatcgaggatgccagcaacaagctgccctgcaactgtggcgccaagcgctgccgtcggttccttaactgaggccgtggctgcccaccacgacccctcacacctcctgctgccgtcgctgccatcttgcccctagcctgggggctccctagcccctcccagagcatctcacccccaccctcatgttcagggtggatgtgggcatgcagg

SEQ ID NO: 353700 - DNA, 8307 bp, Homo sapiens
atggcggcggcggcgggcggcggcagttgccccgggcctggctccgcgcggggccgcttcccgggccggccgcggggcgccggcgggggcgggggccgcggcggacggggcaacggggccgaaagagtgcgggtagctctgcggcgcggcggtggcgcgacggggccgggcggagccgagcccggggaggacacggccctgctccgtttgctggggctccgccggggcctgcgccggctccgccgcctgtgggccggcccgcgggtccagcggggccggggacggggtcggggccggggctggggcccgagtcgaggctgcgtgccggaggaggagagcagtgacggggaatccgacgaggaggagtttcagggttttcattcagatgaagatgtggcccccagttccctgcgctctgcgctccgatcccagcgaggtcgagcgccccgaggtcggggtcgcaagcataagacgaccccccttcctcctcctcgcctagcagatgtggctcctacccccccaaagacccctgcccggaaacggggtgaggaaggcacagaacggatggtgcaggcactgactgaacttctccggcgggcccaggcaccccaagcaccccggagccgggcatgtgagccctccaccccccggcggtctcggggacggcccccaggacggccagcaggcccctgcaggaggaagcagcaagcagtagtggtggcagaagcagctgtgacaatcccctttgtgatcaagtttgtttcaagggccaaaaaagtaaagatgggacaattgtccttgggactcgaatcaggtcaaggtcaaggtcaacatgaggaaagttggcaggatgtcccccaaagaagagttggatctggacagggagggagcccttgctggaaaaagcaggaacagaagctggatgacgaggaagaagagaagaaagaagaagaagaaaaagacaaggagggagaagagaaggaagaaagagctgtagctgaggagatgatgccagctgcggaaaaggaagaggcaaagctgccaccaccgcctctgactcctccagccccttcacctcctccacccctcccacccccttcgacatctcctccacccccactctgccctccaccaccacccccagtgtccccaccacctctaccatcccctccaccgcctcctgcccaagaggagcaggaggaatcccctcctcctgtggtcccagctacgtgctccaggaagaggggccggcctcccctgactcccagccagcgggcggagcgggaagctgctcgggcagggccagagggcacctctcctcccactccaacccccagcaccgccacgggaggccctccggaagacagtcccaccgtggcccccaaaagcaccaccttcctgaagaatatccggcagtttattatgcctgtggtgagtgcccgctcctcccgtgtcatcaagacaccccggcgatttatggatgaagacccccccaaacccccaaaggtggaggtctcacctgtcctgcgacctcccattaccacctccccacctgttccccaggagccagcaccagtcccctctccaccacgtgccccaactcctccatctaccccagttccactccctgagaagagacggtccatcctaagggaacccacatttcgctggacctcactgacccgggagctgccccctcctcccccagcccctccacctcccccggccccctccccaccccctgctcctgccacctcctcccggaggcccctactccttcgggcccctcagtttaccccaagcgaagcccacctgaagatctacgaatcggtgcttactcctcctcctcttggggctcctgaagcccctgagccagagcctcctcctgccgatgactctccagctgagcctgagcctcgggcagtgggccgcaccaaccacctcagcctgcctcgattcgcccctgtggtcaccactcctgttaaggccgaggtgtcccctcacggggctccagctctgagcaacgggccacagacacaggctcagctactgcagcccctgcaggccttgcaaacccagctcctgccccaggcactaccgccaccacagccacagctgcagccaccgccgtcaccacagcagatgcctcccctggaaaaagcccggattgcgggcgtgggttccttgccgctgtctggggtagaggagaagatgttcagcctcctcaagagagccaaagtgcagctattcaagatcgatcagcagcagcagcagaaggtggcagcttccatgccgctgagccctggagggcagatggaggaggtggccggggctgtcaagcagatctccgacagaggccctgtccggtctgaagatgagtcggtggaagctaagagagagcggccctcaggtcccgagtcccctgtgcaaggtccccgcatcaaacatgtctgccgtcatgctgctgtggccctgggtcaggcccgggccatggtgcctgaagatgtccctcgcctcagtgccctccctctccgggatcggcaggacctcgccacagaggatacatcatcggcgtccgagactgagagtgtcccgtcacggtcccggcggggaaaggtggaggcagcaggccctgggggagaatcagagcccacaggttctggagggaccctggcccacacaccccggcgctcactgccctcccatcacggcaagaagatgcgcatggctcgatgtggacactgtcggggctgcctacgtgtgcaggactgtgggtcctgtgtcaactgcctagacaagcccaagtttgggggccctaacaccaagaagcagtgctgtgtataccggaagtgtgacaaaatagaggctcggaagatggaacgactggctaaaaaaggccggacgatagtgaagacgctgttgccctgggattccgatgaatctcctgaggcctcccctggtcctccaggcccacgccggggggcgggagctggggggccccgggaggaggtggtggcccacccagggcccgaggagcaggactccctcctgcagcgcaagtcagctcggcgctgcgtcaaacagcgaccctcctatgatatcttcgaggattcggatgactcggagcccgggggcccccctgctcctcggcgtcggaccccccgagaaaatgagctgccactgccagaacctgaggagcagagccggccccgcaaacctaccctgcagcctgtgttgcagctcaaggcccgaaggcgcctggacaaggatgctttggcccctggcccctttgcttcttttcccaatggctggactggaaagcagaagtctcccgatggtgtgcaccgcgtccgtgtggattttaaggaggattgtgatttagagaacgtgtggctgatggggggcctgagtgtgctcacctctgtgccagggggccccccgatggtgtgcttgctgtgtgccagcaaaggactccacgagctggtgttctgtcaagtctgctgtgacccattccacccattctgcctggaggaggccgagcggcccctgccccagcatcacgacacctggtgctgccgtcgctgcaaattctgccacgtctgtggacgcaaaggtcgtggatccaagcacctcctggagtgcgagcgctgccgccatgcataccacccggcctgtctggggcccagctatccaacccgggccacgcgcaaacggcgccactggatctgttcagcctgtgtgcgctgtaagagctgtggggcaactccaggcaagaactgggacgtcgagtggtctggagattacagcctctgccccaggtgcacccagctatatgagaaaggaaactactgcccgatctgtacacgctgctatgaagacaacgactatgagagcaagatgatgcagtgcgcacagtgcgatcactgggtgcatgccaagtgcgaggggctctcagatgaagactacgagatcctttcaggactgccagactcggtgctgtacacctgcggaccgtgtgctggggcagcgcagccccgctggcgagaggccctgagcggggccctccaggggggcctgcgccaggtgctccagggcctgctgagctccaaggtggtgggcccactgctgctctgcacccagtgtgggccagatgggaagcaactgcacccaggaccctgcggcctgcaagctgtgagtcagcgcttcgaggatggccactacaagtctgtgcacagcttcatggaggacatggtgggcatcctcatgcggcactcggaggagggagagaccccggaccgccgggctggaggccagatgaaggggctcctgctgaagctgctagaatctgcgttcggctggttcgacgcccacgaccccaagtactggcgacggagtacccggctgccaaacggagtccttcccaatgcggtgttgcccccatccctggatcatgtctatgcgcagtggagacagcaggaaccagagaccccagaatcagggcagcctccaggggatccctcagcagcattccagggcaaggatccggctgccttctcacacctggaggacccccgtcagtgtgcactctgcctcaaatacggggatgcagactccaaggaggcggggcggctcttgtacatcgggcagaacgagtggacacacgtcaactgtgccatctggtcggcggaagtcttcgaggagaacgacggctccctcaagaatgtgcatgctgctgtggcccgagggaggcagatgcgctgcgagctctgcctgaagcctggcgccacggtgggctgctgcctgtcctcctgcctcagcaacttccacttcatgtgtgcccgggccagctactgcatcttccaggatgacaagaaagtcttctgccagaaacacactgatctcctggatggcaaggaaattgtgaaccccgatggttttgatgttctccgccgagtctatgtggacttcgagggcatcaacttcaagcggaagttcttgacggggcttgaacccgatgccatcaacgtgctcattggttccatccgcattgactccctgggtactctgtctgatctctcggactgcgagggacggctcttccccattggctaccagtgctcccgtctgtactggagcacagtggatgctcggaggcgctgctggtatcggtgccgaattctggagtatcggccatgggggccgagggaagagccagctcacctggaggctgcagaggagaaccagaccattgtgcacagccccgccccttcctcagagcccccaggtggtgaggaccccccactggacacagatgttcttgtccctggagctcctgagcgccactcgcccattcagaacctggaccctccactgcggccagattcaggcagcgcccctcctccagccccccgttctttttcgggggctcgaatcaaagtgcccaactactcgccatcccggaggcccttggggggtgtctcctttggccccctgccctcccctggaagtccatcttcactgacccaccacatccccacagtgggagacccggacttcccagctccccccagacgttcccgtcgtcccagccctttggctcccaggccgcctccatcacggtgggcctcccctcctctaaaaacctcccctcagctcagggtgccccctcctacctcagtcgtcacagccctcacacctacctcaggggagctggctccccctggcccggccccatctccaccaccccctgaagacctgggcccagacttcgaggacatggaggtggtgtcaggactgagtgctgctgacctggacttcgcggccagcctgctggggactgagcccttccaggaagagattgtagccgctggggccatggggagcagccacgggggcccgggggacagctccgaggaggagtccagccccacctcccgctacatccacttccctgtgactgtggtgtccgcccctggtctggcccccagcgctacccctggagccccccgcattgaacagctggacggcgtggacgacggcactgacagtgaggctgaggcggtgcagcagcctcggggccagggcacgcctccttcggggccaggagtagtccgggcaggggtccttggggctgcaggggacagggcccggcctcctgaggacctgccatcggaaattgtggattttgtgttgaagaacctagggggtcctggggatggaggtgctggccctagagaggagtcactccccccggcgcctcccctggctaatggcagccagccctcccaaggcctgaccgccagcccagctgaccccacccgcacatttgcctggctcccaggggccccaggggtccgggtgttaagccttggccctgcccctgagccccccaaacccgccacatccaaaatcatacttgtcaacaagctggggcaagtatttgtgaagatggctggggagggtgaacctgtcccacccccagtgaagcagccacctttgccccccaccatttcccccacggctcccacctcctggactctgcccccaggccccctcctcggcgtgctgcccgtggtcggagtggtccgccctgccccgcccccgccaccccctcccctgacgctggtgctgagcagtgggccagccagcccgccccgccaggccatccgcgtcaagagggtgtccactttctccggccggtccccgccagcacctcccccatacaaagccccccggctggatgaagatggagaggcctcagaggatacccctcaggttccagggcttggcagtggcgggtttagccgtgtgaggatgaaaacccccacagtgcgtggggtccttgacctggatcggcctggggagcccgctggggaagaaagtcctgggcccctccaggaacggtcccctttgctgccacttccggaagatggtcctccccaggtccccgatggtcccccagacctgctgcttgagtcccagtggcaccactattcaggtgaggcttcgagctctgaggaagagcctccatccccagatgataaagagaaccaggccccaaaacggactggcccacatctgcgcttcgagatcagcagtgaggatgggttcagcgttgaggcagagagcttggagggggcgtggagaactctgatcgagaaagtgcaagaggcccgagggcatgcccgactcagacatctctcctttagtggaatgagtggggcgagactcctgggcatccaccatgatgctgtcatcttcctggccgagcagctccccggagcccagcgttgccagcactataagttccgttaccaccagcagggagagggccaggaggagccgcccctgaatccccatggggctgctcgggcagaggtctatctccggaagtgcacctttgacatgttcaacttcctggcctcccagcaccgggtgctccctgagggggccacctgtgatgaggaagaggatgaggtgcagctcaggtcaaccagacgtgccaccagcctggagctgcccatggccatgcgttttcgtcaccttaagaagacgtccaaagaagctgtgggtgtctacagatcagccatccacgggcgaggcctgttctgtaagcgcaacatcgacgcgggggagatggtcatcgagtactctggcattgtcatccgctcggtgttgactgacaagcgggagaagttctacgatgggaagggcatcgggtgctatatgttccgcatggatgactttgatgtagtggacgccacgatgcatggcaatgccgcccgcttcatcaaccactcctgtgagcccaactgcttctctcgggtcatccacgtggagggccagaaacacattgttatcttcgccctgcgccgcatcctgcgtggtgaggagctcacctacgactacaagttccccatcgaggatgccagcaacaagctgccctgcaactgtggcgccaagcgctgccgtcggttccttaactgaggccgtggctgcccaccacgacccctcacacctcctgctgccgtcgctgccatcttgcccctagcctgggggctccctagcccctcccagagcatctcacccccaccctcatgttcagggtggatgtgggcatgcaggtgacaagggccctgcctccacccctccagcccatccagcaatcgccccctttctgccctgggggcccaggatgtagatattgtacaaaggtttctaaatcccttcttttctatgcacttttttatttaagaggtggggtcccaggtgggaacccccccacaataaagtctgtcaatgtttgga

SEQ ID NO: 353701 - DNA, 7606 bp, Homo sapiens
atggcggcggcggcgggcggcggcagttgccccgggcctggctccgcgcggggccgcttcccgggccggccgcggggcgccggcgggggcgggggccgcggcggacggggcaacggggccgaaagagtgcgggtagctctgcggcgcggcggtggcgcgacggggccgggcggagccgagcccggggaggacacggccctgctccgtttgctggggctccgccggggcctgcgccggctccgccgcctgtgggccggcccgcgggtccagcggggccggggacggggtcggggccggggctggggcccgagtcgaggctgcgtgccggaggaggagagcagtgacggggaatccgacgaggaggagtttcagggttttcattcagatgaagatgtggcccccagttccctgcgctctgcgctccgatcccagcgaggtcgagcgccccgaggtcggggtcgcaagcataagacgaccccccttcctcctcctcgcctagcagatgtggctcctacccccccaaagacccctgcccggaaacggggtgaggaaggcacagaacggatggtgcaggcactgactgaacttctccggcgggcccaggcaccccaagcaccccggagccgggcatgtgagccctccaccccccggcggtctcggggacggcccccaggacggccagcaggcccctgcaggaggaagcagcaagcagtagtggtggcagaagcagctgtgacaatccccaaacctgagcccccacctcctgtggttccagtgaaacatcagactggcagctggaaatgcaaggaggggcccggtccaggacctgggacccccaggcgtggaggacagtcaagccgtggaggccgtggaggcaggggccgcggccgaggtggtgggctcccctttgtgatcaagtttgtttcaagggccaaaaaagtaaagatgggacaattgtccttgggactcgaatcaggtcaaggtcaaggtcaacatgaggaaagttggcaggatgtcccccaaagaagagttggatctggacagggagggagcccttgctggaaaaagcaggaacagaagctggatgacgaggaagaagagaagaaagaagaagaagaaaaagacaaggagggagaagagaaggaagaaagagctgtagctgaggagatgatgccagctgcggaaaaggaagaggcaaagctgccaccaccgcctctgactcctccagccccttcacctcctccacccctcccacccccttcgacatctcctccacccccactctgccctccaccaccacccccagtgtccccaccacctctaccatcccctccaccgcctcctgcccaagaggagcaggaggaatcccctcctcctgtggtcccagctacgtgctccaggaagaggggccggcctcccctgactcccagccagcgggcggagcgggaagctgctcgggcagggccagagggcacctctcctcccactccaacccccagcaccgccacgggaggccctccggaagacagtcccaccgtggcccccaaaagcaccaccttcctgaagaatatccggcagtttattatgcctgtggtgagtgcccgctcctcccgtgtcatcaagacaccccggcgatttatggatgaagacccccccaaacccccaaaggtggaggtctcacctgtcctgcgacctcccattaccacctccccacctgttccccaggagccagcaccagtcccctctccaccacgtgccccaactcctccatctaccccagttccactccctgagaagagacggtccatcctaagggaacccacatttcgctggacctcactgacccgggagctgccccctcctcccccagcccctccacctcccccggccccctccccaccccctgctcctgccacctcctcccggaggcccctactccttcgggcccctcagtttaccccaagcgaagcccacctgaagatctacgaatcggtgcttactcctcctcctcttggggctcctgaagcccctgagccagagcctcctcctgccgatgactctccagctgagcctgagcctcgggcagtgggccgcaccaaccacctcagcctgcctcgattcgcccctgtggtcaccactcctgttaaggccgaggtgtcccctcacggggctccagctctgagcaacgggccacagacacaggctcagctactgcagcccctgcaggccttgcaaacccagctcctgccccaggcactaccgccaccacagccacagctgcagccaccgccgtcaccacagcagatgcctcccctggaaaaagcccggattgcgggcgtgggttccttgccgctgtctggggtagaggagaagatgttcagcctcctcaagagagccaaagtgcagctattcaagatcgatcagcagcagcagcagaaggtggcagcttccatgccgctgagccctggagggcagatggaggaggtggccggggctgtcaagcagatctccgacagaggccctgtccggtctgaagatgagtcggtggaagctaagagagagcggccctcaggtcccgagtcccctgtgcaaggtccccgcatcaaacatgtctgccgtcatgctgctgtggccctgggtcaggcccgggccatggtgcctgaagatgtccctcgcctcagtgccctccctctccgggatcggcaggacctcgccacagaggatacatcatcggcgtccgagactgagagtgtcccgtcacggtcccggcggggaaaggtggaggcagcaggccctgggggagaatcagagcccacaggttctggagggaccctggcccacacaccccggcgctcactgccctcccatcacggcaagaagatgcgcatggctcgatgtggacactgtcggggctgcctacgtgtgcaggactgtgggtcctgtgtcaactgcctagacaagcccaagtttgggggccctaacaccaagaagcagtgctgtgtataccggaagtgtgacaaaatagaggctcggaagatggaacgactggctaaaaaaggccggacgatagtgaagacgctgttgccctgggattccgatgaatctcctgaggcctcccctggtcctccaggcccacgccggggggcgggagctggggggccccgggaggaggtggtggcccacccagggcccgaggagcaggactccctcctgcagcgcaagtcagctcggcgctgcgtcaaacagcgaccctcctatgatatcttcgaggattcggatgactcggagcccgggggcccccctgctcctcggcgtcggaccccccgagaaaatgagctgccactgccagaacctgaggagcagagccggccccgcaaacctaccctgcagcctgtgttgcagctcaaggcccgaaggcgcctggacaaggatgctttggcccctggcccctttgcttcttttcccaatggctggactggaaagcagaagtctcccgatggtgtgcaccgcgtccgtgtggattttaaggaggattgtgatttagagaacgtgtggctgatggggggcctgagtgtgctcacctctgtgccagggggccccccgatggtgtgcttgctgtgtgccagcaaaggactccacgagctggtgttctgtcaagtctgctgtgacccattccacccattctgcctggaggaggccgagcggcccctgccccagcatcacgacacctggtgctgccgtcgctgcaaattctgccacgtctgtggacgcaaaggtcgtggatccaagcacctcctggagtgcgagcgctgccgccatgcataccacccggcctgtctggggcccagctatccaacccgggccacgcgcaaacggcgccactggatctgttcagcctgtgtgcgctgtaagagctgtggggcaactccaggcaagaactgggacgtcgagtggtctggagattacagcctctgccccaggtgcacccagctatatgagaaaggaaactactgcccgatctgtacacgctgctatgaagacaacgactatgagagcaagatgatgcagtgcgcacagtgcgatcactgggtgcatgccaagtgcgaggggctctcagatgaagactacgagatcctttcaggactgccagactcggtgctgtacacctgcggaccgtgtgctggggcagcgcagccccgctggcgagaggccctgagcggggccctccaggggggcctgcgccaggtgctccagggcctgctgagctccaaggtggtgggcccactgctgctctgcacccagtgtgggccagatgggaagcaactgcacccaggaccctgcggcctgcaagctgtgagtcagcgcttcgaggatggccactacaagtctgtgcacagcttcatggaggacatggtgggcatcctcatgcggcactcggaggagggagagaccccggaccgccgggctggaggccagatgaaggggctcctgctgaagctgctagaatctgcgttcggctggttcgacgcccacgaccccaagtactggcgacggagtacccggctgccaaacggagtccttcccaatgcggtgttgcccccatccctggatcatgtctatgcgcagtggagacagcaggaaccagagaccccagaatcagggcagcctccaggggatccctcagcagcattccagggcaaggatccggctgccttctcacacctggaggacccccgtcagtgtgcactctgcctcaaatacggggatgcagactccaaggaggcggggcggctcttgtacatcgggcagaacgagtggacacacgtcaactgtgccatctggtcggcggaagtcttcgaggagaacgacggctccctcaagaatgtgcatgctgctgtggcccgagggaggcagatgcgctgcgagctctgcctgaagcctggcgccacggtgggctgctgcctgtcctcctgcctcagcaacttccacttcatgtgtgcccgggccagctactgcatcttccaggatgacaagaaagtcttctgccagaaacacactgatctcctggatggcaaggaaattgtgaaccccgatggttttgatgttctccgccgagtctatgtggacttcgagggcatcaacttcaagcggaagttcttgacggggcttgaacccgatgccatcaacgtgctcattggttccatccgcattgactccctgggtactctgtctgatctctcggactgcgagggacggctcttccccattggctaccagtgctcccgtctgtactggagcacagtggatgctcggaggcgctgctggtatcggtgccgaattctggagtatcggccatgggggccgagggaagagccagctcacctggaggctgcagaggagaaccagaccattgtgcacagccccgccccttcctcagagcccccaggtggtgaggaccccccactggacacagatgttcttgtccctggagctcctgagcgccactcgcccattcagaacctggaccctccactgcggccagattcaggcagcgcccctcctccagccccccgttctttttcgggggctcgaatcaaagtgcccaactactcgccatcccggaggcccttggggggtgtctcctttggccccctgccctcccctggaagtccatcttcactgacccaccacatccccacagtgggagacccggacttcccagctccccccagacgttcccgtcgtcccagccctttggctcccaggccgcctccatcacggtgggcctcccctcctctaaaaacctcccctcagctcagggtgccccctcctacctcagtcgtcacagccctcacacctacctcaggggagctggctccccctggcccggccccatctccaccacccccctcccctgacgctggtgctgagcagtgggccagccagcccgccccgccaggccatccgcgtcaagagggtgtccactttctccggccggtccccgccagcacctcccccatacaaagccccccggctggatgaagatggagaggcctcagaggatacccctcaggttccagggcttggcagtggcgggtttagccgtgtgaggatgaaaacccccacagtgcgtggggtccttgacctggatcggcctggggagcccgctggggaagaaagtcctgggcccctccaggaacggtcccctttgctgccacttccggaagatggtcctccccaggtccccgatggtcccccagacctgctgcttgagtcccagtggcaccactattcaggtgaggcttcgagctctgaggaagagcctccatccccagatgataaagagaaccaggccccaaaacggactggcccacatctgcgcttcgagatcagcagtgaggatgggttcagcgttgaggcagagagcttggagggggcgtggagaactctgatcgagaaagtgcaagaggcccgagggcatgcccgactcagacatctctcctttagtggaatgagtggggcgagactcctgggcatccaccatgatgctgtcatcttcctggccgagcagctccccggagcccagcgttgccagcactataagttccgttaccaccagcagggagagggccaggaggagccgcccctgaatccccatggggctgctcgggcagaggtctatctccggaagtgcacctttgacatgttcaacttcctggcctcccagcaccgggtgctccctgagggggccacctgtgatgaggaagaggatgaggtgcagctcaggtcaaccagacgtgccaccagcctggagctgcccatggccatgcgttttcgtcaccttaagaagacgtccaaagaagctgtgggtgtctacagatcagccatccacgggcgaggcctgttctgtaagcgcaacatcgacgcgggggagatggtcatcgagtactctggcattgtcatccgctcggtgttgactgacaagcgggagaagttctacgatgggaagggcatcgggtgctatatgttccgcatggatgactttgatgtagtggacgccacgatgcatggcaatgccgcccgcttcatcaaccactcctgtgagcccaactgcttctctcgggtcatccacgtggagggccagaaacacattgttatcttcgccctgcgccgcatcctgcgtggtgaggagctcacctacgactacaagttccccatcgaggatgccagcaacaagctgccctgcaactgtggcgccaagcgctgccgtcggttccttaactgaggccgtggctgcccaccacgacccctcacacctcctgctgccgtcgctgccatcttgcccctagcctgggggctccctagcccctcccagagcatctcacccccaccctcatgttcagggtggatgtgggcatgcaggtgacaagggccctgcctccacccctccagcccatccagcaatcgccccctttctgccctgggggcccaggatgtagatattgtacaaaggtttctaaatcccttcttttctatgcacttttttatttaagaggtggggtcccaggtgggaacccccccacaataaagtctgtcaatgtttgga

SEQ ID NO: 353702 - DNA, 9104 bp, Homo sapiens
atggcggcggcggcgggcggcggcagttgccccgggcctggctccgcgcggggccgcttcccgggccggccgcggggcgccggcgggggcgggggccgcggcggacggggcaacggggccgaaagagtgcgggtagctctgcggcgcggcggtggcgcgacggggccgggcggagccgagcccggggaggacacggccctgctccgtttgctggggctccgccggggcctgcgccggctccgccgcctgtgggccggcccgcgggtccagcggggccggggacggggtcggggccggggctggggcccgagtcgaggctgcgtgccggaggaggagagcagtgacggggaatccgacgaggaggagtttcagggttttcattcagatgaagatgtggcccccagttccctgcgctctgcgctccgatcccagcgaggtcgagcgccccgaggtcggggtcgcaagcataagacgaccccccttcctcctcctcgcctagcagatgtggctcctacccccccaaagacccctgcccggaaacggggtgaggaaggcacagaacggatggtgcaggcactgactgaacttctccggcgggcccaggcaccccaagcaccccggagccgggcatgtgagccctccaccccccggcggtctcggggacggcccccaggacggccagcaggcccctgcaggaggaagcagcaagcagtagtggtggcagaagcagctgtgacaatccccaaacctgagcccccacctcctgtggttccagtgaaacatcagactggcagctggaaatgcaaggaggggcccggtccaggacctgggacccccaggcgtggaggacagtcaagccgtggaggccgtggaggcaggggccgcggccgaggtggtgggctcccctttgtgatcaagtttgtttcaagggccaaaaaagtaaagatgggacaattgtccttgggactcgaatcaggtcaaggtcaaggtcaacatgaggaaagttggcaggatgtcccccaaagaagagttggatctggacagggagggagcccttgctggaaaaagcaggaacagaagctggatgacgaggaagaagagaagaaagaagaagaagaaaaagacaaggagggagaagagaaggaagaaagagctgtagctgaggagatgatgccagctgcggaaaaggaagaggcaaagctgccaccaccgcctctgactcctccagccccttcacctcctccacccctcccacccccttcgacatctcctccacccccactctgccctccaccaccacccccagtgtccccaccacctctaccatcccctccaccgcctcctgcccaagaggagcaggaggaatcccctcctcctgtggtcccagctacgtgctccaggaagaggggccggcctcccctgactcccagccagcgggcggagcgggaagctgctcgggcagggccagagggcacctctcctcccactccaacccccagcaccgccacgggaggccctccggaagacagtcccaccgtggcccccaaaagcaccaccttcctgaagaatatccggcagtttattatgcctgtggtgagtgcccgctcctcccgtgtcatcaagacaccccggcgatttatggatgaagacccccccaaacccccaaaggtggaggtctcacctgtcctgcgacctcccattaccacctccccacctgttccccaggagccagcaccagtcccctctccaccacgtgccccaactcctccatctaccccagttccactccctgagaagagacggtccatcctaagggaacccacatttcgctggacctcactgacccgggagctgccccctcctcccccagcccctccacctcccccggccccctccccaccccctgctcctgccacctcctcccggaggcccctactccttcgggcccctcagtttaccccaagcgaagcccacctgaagatctacgaatcggtgcttactcctcctcctcttggggctcctgaagcccctgagccagagcctcctcctgccgatgactctccagctgagcctgagcctcgggcagtgggccgcaccaaccacctcagcctgcctcgattcgcccctgtggtcaccactcctgttaaggccgaggtgtcccctcacggggctccagctctgagcaacgggccacagacacaggctcagctactgcagcccctgcaggccttgcaaacccagctcctgccccaggcactaccgccaccacagccacagctgcagccaccgccgtcaccacagcagatgcctcccctggaaaaagcccggattgcgggcgtgggttccttgccgctgtctggggtagaggagaagatgttcagcctcctcaagagagccaaagtgcagctattcaagatcgatcagcagcagcagcagaaggtggcagcttccatgccgctgagccctggagggcagatggaggaggtggccggggctgtcaagcagatctccgacagaggccctgtccggtctgaagatgagtcggtggaagctaagagagagcggccctcaggtcccgagtcccctgtgcaaggtccccgcatcaaacatgtctgccgtcatgctgctgtggccctgggtcaggcccgggccatggtgcctgaagatgtccctcgcctcagtgccctccctctccgggatcggcaggacctcgccacagaggatacatcatcggcgtccgagactgagagtgtcccgtcacggtcccggcggggaaaggtggaggcagcaggccctgggggagaatcagagcccacaggttctggagggaccctggcccacacaccccggcgctcactgccctcccatcacggcaagaagatgcgcatggctcgatgtggacactgtcggggctgcctacgtgtgcaggactgtgggtcctgtgtcaactgcctagacaagcccaagtttgggggccctaacaccaagaagcagtgctgtgtataccggaagtgtgacaaaatagaggctcggaagatggaacgactggctaaaaaaggccggacgatagtgaagacgctgttgccctgggattccgatgaatctcctgaggcctcccctggtcctccaggcccacgccggggggcgggagctggggggccccgggaggaggtggtggcccacccagggcccgaggagcaggactccctcctgcagcgcaagtcagctcggcgctgcgtcaaacagcgaccctcctatgatatcttcgaggattcggatgactcggagcccgggggcccccctgctcctcggcgtcggaccccccgagaaaatgagctgccactgccagaacctgaggagcagagccggccccgcaaacctaccctgcagcctgtgttgcagctcaaggcccgaaggcgcctggacaaggatgctttggcccctggcccctttgcttcttttcccaatggctggactggaaagcagaagtctcccgatggtgtgcaccgcgtccgtgtggattttaaggaggattgtgatttagagaacgtgtggctgatggggggcctgagtgtgctcacctctgtgccagggggccccccgatggtgtgcttgctgtgtgccagcaaaggactccacgagctggtgttctgtcaagtctgctgtgacccattccacccattctgcctggaggaggccgagcggcccctgccccagcatcacgacacctggtgctgccgtcgctgcaaattctgccacgtctgtggacgcaaaggtcgtggatccaagcacctcctggagtgcgagcgctgccgccatgcataccacccggcctgtctggggcccagctatccaacccgggccacgcgcaaacggcgccactggatctgttcagcctgtgtgcgctgtaagagctgtggggcaactccaggcaagaactgggacgtcgagtggtctggagattacagcctctgccccaggtgcacccagctatatgagaaaggaaactactgcccgatctgtacacgctgctatgaagacaacgactatgagagcaagatgatgcagtgcgcacagtgcgatcactgggtgcatgccaagtgcgaggggctctcagatgaagactacgagatcctttcaggactgccagactcggtgctgtacacctgcggaccgtgtgctggggcagcgcagccccgctggcgagaggccctgagcggggccctccaggggggcctgcgccaggtgctccagggcctgctgagctccaaggtggtgggcccactgctgctctgcacccagtgtgggccagatgggaagcaactgcacccaggaccctgcggcctgcaagctgtgagtcagcgcttcgaggatggccactacaagtctgtgcacagcttcatggaggacatggtgggcatcctcatgcggcactcggaggagggagagaccccggaccgccgggctggaggccagatgaaggggctcctgctgaagctgctagaatctgcgttcggctggttcgacgcccacgaccccaagtactggcgacggagtacccggctgccaaacggagtccttcccaatgcggtgttgcccccatccctggatcatgtctatgcgcagtggagacagcaggaaccagagaccccagaatcagggcagcctccaggggatccctcagcagcattccagggcaaggatccggctgccttctcacacctggaggacccccgtcagtgtgcactctgcctcaaatacggggatgcagactccaaggaggcggggcggctcttgtacatcgggcagaacgagtggacacacgtcaactgtgccatctggtcggcggaagtcttcgaggagaacgacggctccctcaagaatgtgcatgctgctgtggcccgagggaggcagatgcgctgcgagctctgcctgaagcctggcgccacggtgggctgctgcctgtcctcctgcctcagcaacttccacttcatgtgtgcccgggccagctactgcatcttccaggatgacaagaaagtcttctgccagaaacacactgatctcctggatggcaaggaaattgtgaaccccgatggttttgatgttctccgccgagtctatgtggacttcgagggcatcaacttcaagcggaagttcttgacggggcttgaacccgatgccatcaacgtgctcattggttccatccgcattgactccctgggtactctgtctgatctctcggactgcgagggacggctcttccccattggctaccagtgctcccgtctgtactggagcacagtggatgctcggaggcgctgctggtatcggtgccgaattctggagtatcggccatgggggccgagggaagagccagctcacctggaggctgcagaggagaaccagaccattgtgcacagccccgccccttcctcagagcccccaggtggtgaggaccccccactggacacagatgttcttgtccctggagctcctgagcgccactcgcccattcagaacctggaccctccactgcggccagattcaggcagcgcccctcctccagccccccgttctttttcgggggctcgaatcaaagtgcccaactactcgccatcccggaggcccttggggggtgtctcctttggccccctgccctcccctggaagtccatcttcactgacccaccacatccccacagtgggagacccggacttcccagctccccccagacgttcccgtcgtcccagccctttggctcccaggccgcctccatcacggtgggcctcccctcctctaaaaacctcccctcagctcagggtgccccctcctacctcagtcgtcacagccctcacacctacctcaggggagctggctccccctggcccggccccatctccaccaccccctgaagacctgggcccagacttcgaggacatggaggtggtgtcaggactgagtgctgctgacctggacttcgcggccagcctgctggggactgagcccttccaggaagagattgtagccgctggggccatggggagcagccacgggggcccgggggacagctccgaggaggagtccagccccacctcccgctacatccacttccctgtgactgtggtgtccgcccctggtctggcccccagcgctacccctggagccccccgcattgaacagctggacggcgtggacgacggcactgacagtgaggctgaggcggtgcagcagcctcggggccagggcacgcctccttcggggccaggagtagtccgggcaggggtccttggggctgcaggggacagggcccggcctcctgaggacctgccatcggaaattgtggattttgtgttgaagaacctagggggtcctggggatggaggtgctggccctagagaggagtcactccccccggcgcctcccctggctaatggcagccagccctcccaaggcctgaccgccagcccagctgaccccacccgcacatttgcctggctcccaggggccccaggggtccgggtgttaagccttggccctgcccctgagccccccaaacccgccacatccaaaatcatacttgtcaacaagctggggcaagtatttgtgaagatggctggggagggtgaacctgtcccacccccagtgaagcagccacctttgccccccaccatttcccccacggctcccacctcctggactctgcccccaggccccctcctcggcgtgctgcccgtggtcggagtggtccgccctgccccgcccccgccaccccctcccctgacgctggtgctgagcagtgggccagccagcccgccccgccaggccatccgcgtcaagagggtgtccactttctccggccggtccccgccagcacctcccccatacaaagccccccggctggatgaagatggagaggcctcagaggatacccctcaggttccagggcttggcagtggcgggtttagccgtgtgaggatgaaaacccccacagtgcgtggggtccttgacctggatcggcctggggagcccgctggggaagaaagtcctgggcccctccaggaacggtcccctttgctgccacttccggaagatggtcctccccaggtccccgatggtcccccagacctgctgcttgagtcccagtggcaccactattcaggtgaggcttcgagctctgaggaagagcctccatccccagatgataaagagaaccaggccccaaaacggactggcccacatctgcgcttcgagatcagcagtgaggatgggttcagcgttgaggcagagagcttggagggggcgtggagaactctgatcgagaaagtgcaagaggcccgagggcatgcccgactcagacatctctcctttagtggaatgagtggggcgagactcctgggcatccaccatgatgctgtcatcttcctggccgagcagctccccggagcccagcgttgccagcactataagttccgttaccaccagcagggagagggccaggaggagccgcccctgaatccccatggggctgctcgggcagaggtctatctccggaagtgcacctttgacatgttcaacttcctggcctcccagcaccgggtgctccctgagggggccacctgtgatgaggaagaggatgaggtgcagctcaggtcaaccagacgtgccaccagcctggagctgcccatggccatgcgttttcgtcaccttaagaagacgtccaaagaagctgtgggtgtctacagatcagccatccacgggcgaggcctgttctgtaagcgcaacatcgacgcgggggagatggtcatcgagtactctggcattgtcatccgctcggtgttgactgacaagcgggagaagttctacgatgggaagggcatcgggtgctatatgttccgcatggatgactttgatgtagtggacgccacgatgcatggcaatgccgcccgcttcatcaaccactcctgtgagcccaactgcttctctcgggtcatccacgtggagggccagaaacacattgttatcttcgccctgcgccgcatcctgcgtggtgaggagctcacctacgactacaagttccccatcgaggatgccagcaacaagctgccctgcaactgtggcgccaagcgctgccgtcggttccttaactgaggccgtggctgcccaccacgacccctcacacctcctgctgccgtcgctgccatcttgcccctagcctgggggctccctagcccctcccagagcatctcacccccaccctcatgttcagggtggatgtgggcatgcaggtgacaagggccctgcctccacccctccagcccatccagcaatcgccccctttctgccctgggggcccaggatgtagatattgtacaaaggtttctaaatcccttcttttctatgcacttttttatttaagaggtggggtcccaggtgggaacccccccacaataaagtctgtcaatgtttggagaggtggtcttcccatttgtaggctgtgggggcaggtaggaaccccacttctacacacccacccatcatgacccaaggaagttcatcagcctcaacaggtaggtgaggccatcattcagaattagaagtcagtcatggggtctgttacggcttcagaacaacacaacacagcaactgtctgtagcagggttgtttcccagaggggattctggtggcccagaggcacctggggtcagccctcccacatgtggccctgtgtgtatgttggaataggcccttctagggcgaagagcagtgaggctatctgttgggtctttgcccaattaggattgtacttcaagaagtacttcagtgctaattgtatactgggcttagtagtcagcaaagttctttattgggtgttaagcccagcaaaccccagatgagccaagcttggacagcacccgcaatgcatctgcccgccctagctgggcgaggtgtgtgccaagctggcccagggaggcagagggctcccttgccaccaccatctcaatcagagcccgcagcggcgagcgactcggcctcagcgaataggcaaaggtggaccaggcagcaggcagcccatatcttgcggccaggtgtcgagtagtgccatg

SEQ ID NO: 353703 - DNA, 1351 bp, Homo sapiens
gggaagggtgatcttcactccaacctgcttcttgggaccaggtgaggcttcgagctctgaggaagagcctccatccccagatgataaagagaaccaggccccaaaacggactggcccacatctgcgcttcgagatcagcagtgaggatgggttcagcgttgaggcagagagcttggagggggcgtggagaactctgatcgagaaagtgcaagaggcccgagggcatgcccgactcagacatctctcctttagtggaatgagtggggcgagactcctgggcatccaccatgatgctgtcatcttcctggccgagcagctccccggagcccagcgttgccagcactataagttccgttaccaccagcagggagagggccaggaggagccgcccctgaatccccatggggctgctcgggcagaggtctatctccggaagtgcacctttgacatgttcaacttcctggcctcccagcaccgggtgctccctgagggggccacctgtgatgaggaagaggatgaggtgcagctcaggtcaaccagacgtgccaccagcctggagctgcccatggccatgcgttttcgtcaccttaagaagacgtccaaagaagctgtgggtgtctacagatcagccatccacgggcgaggcctgttctgtaagcgcaacatcgacgcgggggagatggtcatcgagtactctggcattgtcatccgctcggtgttgactgacaagcgggagaagttctacgatgggaagggcatcgggtgctatatgttccgcatggatgactttgatgtagtggacgccacgatgcatggcaatgccgcccgcttcatcaaccactcctgtgagcccaactgcttctctcgggtcatccacgtggagggccagaaacacattgttatcttcgccctgcgccgcatcctgcgtggtgaggagctcacctacgactacaagttccccatcgaggatgccagcaacaagctgccctgcaactgtggcgccaagcgctgccgtcggttccttaactgaggccgtggctgcccaccacgacccctcacacctcctgctgccgtcgctgccatcttgcccctagcctgggggctccctagcccctcccagagcatctcacccccaccctcatgttcagggtggatgtgggcatgcaggtgacaagggccctgcctccacccctccagcccatccagcaatcgccccctttctgccctgggggcccaggatgtagatattgtacaaaggtttctaaatcccttcttttctatgcacttttttatttaagaggtggggtcccaggtgggaacccccccacaataaagtctgtcaatgtttgga

SEQ ID NO: 353704 - DNA, 386 bp, Homo sapiens
atcagtttagttttcgacaaatttgataagagtatcagacatcgatatagtggtgtcaagtaggcagttgtgtatctataaaggcttagtgtatgcacatcttaattgtgtatcgtaaaacagttctccaaactggttgtacctatttacatttcatgttgcagtcacaacacgtgtattgtcaggattttttcattttgatgatctgatggtattatctggtatctcattgctgactatattctttaacaacaacgatactcctgggctaagccatctggatcttcactttacaagcactgaatattcataaactattggctagtggtgctgttgctacattttccgaaaccaaatcagccaaaagatgggagataccatatttt

SEQ ID NO: 353705 - DNA, 297 bp, Homo sapiens
ggaaatggatttgctagactcatcatattttcagtcttagcatcaagaaatgagtgattatttgcaatgaagttggcaagacaggaaactgagttaaaatttatcaatcgtttatttctaggtaaaacttttttttaagggagaaaactccctctagtattttatccctttttgtaatactgtatttttactgttcaccttgaatcttcagatttcttagaaataagatggatttttaaaaatgcagccgggccaagtgtggtggctcatgcctataatcccagcattttggggggc

SEQ ID NO: 353706 - DNA, 489 bp, Homo sapiens
atcattatgcagtgtcaactaggttaatgtggttgccactcagttatcctccatagtaaaattaatgacatttattctttctgtgatttctcaatgtacttgaccagtggttcctaaagagaagtgtttatgtatcttgtcccaatttgtcctttcttggccatactgtatttatttttatctgtctacacttaaagatctaaatttgcagccgggcgcagtggctcacgcctgtaatcccagcagtttgggaggccgaaggcgggcggatcacctgaggtcgggagttggagaccagcctgacaaacatggagaaacccgtctcttctaaaaatacaaaattagccgggcgtggtggcgcatgcctgtaaccccacctacttgggaggctgaggcaggagaatcgcttgaacccgggagatggaggttgcagtgagttgagatcacaccattgcactccagcctgggcaacaggagcgaactccttct

SEQ ID NO: 353707 - DNA, 332 bp, Homo sapiens
gacttgcatgttaatgtttagattatacctagaaacttgcaaatttccttgatcaatcagtttttttgacaggattgcattcttgagaaactaaatgacaagtagtaagttctgactttatagttcactaattattttggttaataagttagtagtaatttttaactttggtgtttttttgttttttttttttgctaatatcacaatgtaatacaactgttagtttcatgtcttctgctttcagttttatcctgtataatacttagaaatcttagtttccttttcattatccaagataaatttttagttggtaaattttcttggacgtgtcc

SEQ ID NO: 353708 - DNA, 339 bp, Homo sapiens
ctcctctgacatgcgacgtacacccctaatgcaacacatccgaaactgagctctgggtctccttccaaaagacacttgcttctgccactgaagctctgagtgtggttaattccatcacttctatcttcaccagaaaggtccacctcccctttcattctcctcttcctcctcctgaatagcttgtaagtcaccaagtgatgttgagtgtttctctcagatgcttctggaaccatttccatcgttggcatcccactgccaagcaacttttgcatgggaacgtcttactgggctatggcagcagcagctgaactggttttcctaccacacctttccctagta

SEQ ID NO: 353709 - DNA, 473 bp, Homo sapiens
tgttaaggatatgaaagtaaaggaaagactgaggaactgtttcagactaaaggcgactaaggaaagatgacaaataattgcaatgtgtggttctgaactggaatcctttgctataaattatacattattgagcaatggagaaacttgactggggtatgaagattagatcgcaatgtatcaatgttaattttccaattttgctgtttgtactgcagttatgtaggggaatgtctctgttgaagaaatactaagatatttggggatgatggggaaatcaaattgacatcttcctttcaaatggttcaggggaaaagaaggtctttgtactttacttgcaacttttctgaaaaattgagattgtctcaaaatgtactttttttaaagtttaataagaagggagtatcattacgagaactgtagtatagtcacatgaataaactttatgcagacattaaaaatgtttttggaaaata

SEQ ID NO: 353710 - DNA, 838 bp, Homo sapiens
tgtgagaggaagcaaagaaggacctgggctttgggaagatctaaagacccaggaaggtctctgggtgggataaagccaagatgaaactccccctacttctggctcttctatttggggcagtttctgctcttcatctaaggtctgagacttccacctttgagacccctttgggtgctaagacgctgcctgaggatgaggagacaccagagcaggagatggaggagaccccttgcagggagctggaggaagaggagtgaagatgcctccaagaaagatggggctgttgagtctatctcagtgccagatatggtggacaaaaaccttacgtgtcctgaggaagaggacacagtaaaagtggtgggcatccctgggtgccagacctgccgctacctcctggtgagaagtcttcagacgtttagtcaagcttggtttacttgccggaggtgctacaggggcaacctggtttccatccacaacttcaatattaattatcgaatccagtgttctgtcagcgcgctcaaccagggtcaagtctggattggaggcaggatcacaggctcgggtcgctgcagacgctttcagtgggttgacggcagccgctggaactttgcgtactgggctgctcaccagccctggtcccgcggtggtcactgcgtggccctgtgtacccgaggaggctactggcgtcgagcccactgcctcagaagacttcctttcatctgttcctactgagctggtcccagccagcagttcagagctgccctctcctgggcagctgcctcccctcctctgcttgccatccctccctccacctccctgcaataaaatgggttttact

SEQ ID NO: 353711 - DNA, 1632 bp, Homo sapiens
aatattctgcttttcctgttatgtgtttcagatttttctacaccaccgccacactcatcatagccttcacctctgcaggctcagccgtgctgctcttcctggccatgccaatgctcaccattgggggaatcctgtttctcatcaccaacctgcagattgggaacctatttggccaacaccgttcgaccatcatcactctgtacaatggagcatttgactcttcctcggcagtcttccttattattaagcttctttatgaaaaaggcatcagcctcagggcctccttcatcttcatctctgtctgcagtacctggcatgtagcacgcactttcctcctgatgccccgggggcacatcccatacccactgccccccaactacagcataggcctgtgccctgggaatggcaccacaaaggaagagaaggaaacagctgagcatgaaaacagggagctacagtcaaaggagttcctttcagcgaaggaagagacccaggggcagggcagaagcaggaactccgctccttctggagctacgctttctctcggcgctttgcctggcacctggtgtggctgtctgtgatacagttgtggcactacctcttcattggcactctcaactccttgctgccaacatggccggtgggacatggcacgagtcagcacctacacaaatgcctttgccttcactcagttcggagtgctgtgtgccccctggaatggcctgctcatggaccggcttaaacagaagtaccagaaggaagcaagaaagacagggtcttttaacatccgaggaccacattctttatactttccaaatcatcacctgccccatgcaacttacagggataaagccaagatgaaactccccctacttctggctcttctatttggggcagtttctgctcttcatctaaggtctgagacttccacctttgagacccctttgggtgctaagacgctgcctgaggatgaggagacaccagagcaggagatggaggagaccccttgcagggagctggaggaagaggaggagtggggctctggaagtgaagatgcctccaagaaagatggggctgttgagtctatctcagtgccagatatggtggacaaaaaccttacgtgtcctgaggaagaggacacagtaaaagtggtgggcatccctgggtgccagacctgccgctacctcctggtgagaagtcttcagacgtttagtcaagcttggtttacttgccggaggtgctacaggggcaacctggtttccatccacaacttcaatattaattatcgaatccagtgttctgtcagcgcgctcaaccagggtcaagtctggattggaggcaggatcacaggctcgggtcgctgcagacgctttcagtgggttgacggcagccgctggaactttgcgtactgggctgctcaccagccctggtcccgcggtggtcactgcgtggccctgtgtacccgaggaggctactggcgtcgagcccactgcctcagaagacttcctttcatctgttcctactgagctggtcccagccagcagttcagagctgccctctcctgggcagctgcctcccctcctctgcttgccatccctccctccacctccctgcaataaaatgggttttact

SEQ ID NO: 353712 - DNA, 845 bp, Homo sapiens
aaaactaccaactcacccacgtgggaagatctaaagacccaggaaggtctctgggtgggataaagccaagatgaaactccccctacttctggctcttctatttggggcagtttctgctcttcatctaaggtctgagacttccacctttgagacccctttgggtgctaagacgctgcctgaggatgaggagacaccagagcaggagatggaggagaccccttgcagggagctggaggaagaggaggagtggggctctggaagtgaagatgcctccaagaaagatggggctgttgagtctatctcagtgccagatatggtggacaaaaaccttacgtgtcctgaggaagaggacacagtaaaagtggtgggcatccctgggtgccagacctgccgctacctcctggtgagaagtcttcagacgtttagtcaagcttggtttacttgccggaggtgctacaggggcaacctggtttccatccacaacttcaatattaattatcgaatccagtgttctgtcagcgcgctcaaccagggtcaagtctggattggaggcaggatcacaggctcgggtcgctgcagacgctttcagtgggttgacggcagccgctggaactttgcgtactgggctgctcaccagccctggtcccgcggtggtcactgcgtggccctgtgtacccgaggaggctactggcgtcgagcccactgcctcagaagacttcctttcatctgttcctactgagctggtcccagccagcagttcagagctgccctctcctgggcagctgcctcccctcctctgcttgccatccctccctccacctccctgcaataaaatgggttttact

SEQ ID NO: 353713 - DNA, 774 bp, Homo sapiens
tgtgagaggaagcaaagaaggacctgggctttgggaagatctaaagacccaggaaggtctctgggtgggataaagccaagatgaaactccccctacttctggctcctgaggatgaggagacaccagagcaggagatggaggagaccccttgcagggagctggaggaagaggaggagtggggctctggaagtgaagatgcctccaagaaagatggggctgttgagtctatctcagtgccagatatggtggacaaaaaccttacgtgtcctgaggaagaggacacagtaaaagtggtgggcatccctgggtgccagacctgccgctacctcctggtgagaagtcttcagacgtttagtcaagcttggtttacttgccggaggtgctacaggggcaacctggtttccatccacaacttcaatattaattatcgaatccagtgttctgtcagcgcgctcaaccagggtcaagtctggattggaggcaggatcacaggctcgggtcgctgcagacgctttcagtgggttgacggcagccgctggaactttgcgtactgggctgctcaccagccctggtcccgcggtggtcactgcgtggccctgtgtacccgaggaggctactggcgtcgagcccactgcctcagaagacttcctttcatctgttcctactgagctggtcccagccagcagttcagagctgccctctcctgggcagctgcctcccctcctctgcttgccatccctccctccacctccctgcaataaaatgggttttact

SEQ ID NO: 353714 - DNA, 495 bp, Homo sapiens
gccatcccagttgcatctcttccgtggatacttttgttgatgccaggggcctgggggagcgggctggttgttcccacacatgggtgtgtggatgggccctgcacatgcgccttatgactggttgtgggtagcaagcacagaatgatcctgtttttctgccaaggaacccccggcgtgggtcgctgcagacgctttcagtgggttgacggcagccgctggaactttgcgtactgggctgctcaccagccctggtcccgcggtggtcactgcgtggccctgtgtacccgaggaggctactggcgtcgagcccactgcctcagaagacttcctttcatctgttcctactgagctggtcccagccagcagttcagagctgccctctcctgggcagctgcctcccctcctctgcaaggaacccacgcacttcgctccgcccggcaccgtcagctcctttgtggccaagcttttcatctttgtgtctgcaaggaacccacg

SEQ ID NO: 353715 - DNA, 1176 bp, Homo sapiens
tgtgagaggaagcaaagaaggacctgggctttgggaagatctaaagacccaggaaggtctctgggtgggataaagccaagatgaaactccccctacttctggctcttctatttggggcagtttctgctcttcatctaaggtctgagacttccacctttgagacccctttgggtgctaagacgctgcctgaggatgaggagacaccagagcaggagatggaggagaccccttgcagggagctggaggaagaggaggagtggggctctggaagtgaagatgcctccaagaaagatggggctgttgagtctatctcagtgccagatatggtggacaaaaaccttacgtgtcctgaggaagaggacacagtaaaagtggtgggcatccctgggtgccagacctgccgctacctcctggtgagaagtcttcagacgtttagtcaagcttggtttacttgccggaggtgctacaggggcaacctggtttccatccacaacttcaatattaattatcgaatccagtgttctgtcagcgcgctcaaccagggtcaagtctggattggaggcaggatcacaggctcgggtcgctgcagacgctttcagtgggttgacggcagccgctggaactttgcgtactgggctgctcaccagccctggtcccgcggtggtcactgcgtggccctgtgtacccgaggaggctactggcgtcgagcccactgcctcagaagacttcctttcatctgttcctactgagctggtcccagccagcagttcagagctgccctctcctgggcagctgcctcccctcctctgcaaggaacccacgcgcgtgggttccttgcagaaaaggtgccagggggtccagtgacctggaagtcaggatgaactccccccaaacaaggtgcaggtgggggctggtaagagctggtccaaaaggaagttgggaaactattccgctggcttgagagagctgagctgtctgtatcgaatcccaggctgtgccgtatgtctactgttccttgtggggctcagcccaatgatggggtagcagaggtgactgtagttggttctgtctttgtgatgtcacactggggagcaggaatcctggccgcatgcactgaaggcatcagcagaggcccataggatggtcccgggcagagccgcaggagggtgtgatggt

SEQ ID NO: 353716 - DNA, 896 bp, Homo sapiens
tgtgagaggaagcaaagaaggacctgggctttgggaagatctaaagacccaggaaggtctctgggtgggataaagccaagatgaaactccccctacttctggctcttctatttggggcagtttctgctcttcatctaaggtctgagacttccacctttgagacccctttgggtgctaagacgctgcctgaggatgaggagacaccagagcaggagatggaggagaccccttgcagggagctggaggaagaggaggagtggggctctggaagtgaagatgcctccaagaaagatggggctgttgagtctatctcagtgccagatatggtggacaaaaaccttacgtgtcctgaggaagaggacacagtaaaagtggtgggcatccctgggtgccagacctgccgctacctcctggtgagaagtcttcagacgtttagtcaagcttggtttacttgccggaggtgctacaggggcaacctggtttccatccacaacttcaatattaattatcgaatccagtgttctgtcagcgcgctcaaccagggtcaagtctggattggaggcaggatcacaggctcgggtcgctgcagacgctttcagtgggttgacggcagccgctggaactttgcgtactgggctgctcaccagccctggtcccgcggtggtcactgcgtggccctgtgtacccgaggaggctactggcgtcgagcccactgcctcagaagacttcctttcatctgttcctactgagctggtcccagccagcagttcagagctgccctctcctgggcagctgcctcccctcctctgcaaggaacccacgcacttcgctccgcccggcaccgtcagctcctttgtggccaagcttttcatctttgtgtctgcaaggaacccacg

SEQ ID NO: 353717 - DNA, 1555 bp, Homo sapiens
tgtgagaggaagcaaagaaggacctgggctttgggaagatctaaagacccaggaaggtctctgggtgggtgagtgctttctctgctgtggtggagctggtgacagtttattctcccaggaggtccctggctgtggctgacagtttctggagggctggcaggcgtctacctgtggctttcaggataaagccaagatgaaactccccctacttctggctcttctatttggggcagtttctgctcttcatctaaggtctgagacttccacctttgagacccctttgggtgctaagacgctgcctgaggatgaggagacaccagagcaggagatggaggagaccccttgcagggagctggaggaagaggaggagtggggctctggaagtgaagatgcctccaagaaagatggggctgttgagtctatctcagtgccagatatggtggacaaaaaccttacgtgtcctgaggaagaggacacagtaaaagtggtgggcatccctgggtgccagacctgccgctacctcctggtgagaagtcttcagacgtttagtcaagcttggtttacttgccggaggtgctacaggggcaacctggtttccatccacaacttcaatattaattatcgaatccagtgttctgtcagcgcgctcaaccagggtcaagtctggattggaggcaggatcacaggctcgggtcgctgcagacgctttcagtgggttgacggcagccgctggaactttgcgtactgggctgctcaccagccctggtcccgcggtggtcactgcgtggccctgtgtacccgaggaggctactggcgtcgagcccactgcctcagaagacttcctttcatctgttcctactgagctggtcccagccagcagttcagagctgccctctcctgggcagctgcctcccctcctctgcttgccatccctccctccacctccctgcaataaaatgggttttactgaaatggatttattttctcctctgatcgcggatccactctgcttagccctcattgaaacttcttccttatcatctctccccacaccacaactttcatagaagtgtcagaagctactactccttgaggaggaggatggagggtggagttgggtctatggagccttttggagatggaggaatgggctcagctagttctcttcatagaacacctgattactgggcacctgcatagtgctgccaggacctttcaaggttgtaggtagactcccaatggcccagtttgcatctctgtaaccaaaggccttttctctgtctctctccaaccccagaactgtggttggttttatatgtaaggaagttaacatgtccctgggaacagtccacaacattcaggaatgaatgtataagtaccgcaatccccggcccctcaagtggaataaatctaacatgtattgggcaccatttcccagtggcctgctgtggtagttggccttattccatgcatttttatgggctgccttcccttcctcaactgcattctctgctccttcctactctctgcaactcccaaataaacacttgtacgc

SEQ ID NO: 353718 - DNA, 1374 bp, Homo sapiens
aaaactaccaactcacccacgtgggaagatctaaagacccaggaaggtctctgggtgggataaagccaagatgaaactccccctacttctggctcccctttgggtgctaagacgctgcctgaggatgaggagacaccagagcaggagatggaggagaccccttgcagggagctggaggaagaggaggagtggggctctggaagtgaagatgcctccaagaaagatggggctgttgagtctatctcagtgccagatatggtggacaaaaaccttacgtgtcctgaggaagaggacacagtaaaagtggtgggcatccctgggtgccagacctgccgctacctcctggtgagaagtcttcagacgtttagtcaagcttggtttacttgccggaggtgctacaggggcaacctggtttccatccacaacttcaatattaattatcgaatccagtgttctgtcagcgcgctcaaccagggtcaagtctggattggaggcaggatcacaggctcgggtcgctgcagacgctttcagtgggttgacggcagccgctggaactttgcgtactgggctgctcaccagccctggtcccgcggtggtcactgcgtggccctgtgtacccgaggaggctactggcgtcgagcccactgcctcagaagacttcctttcatctgttcctactgagctggtcccagccagcagttcagagctgccctctcctgggcagctgcctcccctcctctgcttgccatccctccctccacctccctgcaataaaatgggttttactgaaatggatttattttctcctctgatcgcggatccactctgcttagccctcattgaaacttcttccttatcatctctccccacaccacaactttcatagaagtgtcagaagctactactccttgaggaggaggatggagggtggagttgggtctatggagccttttggagatggaggaatgggctcagctagttctcttcatagaacacctgattactgggcacctgcatagtgctgccaggacctttcaaggttgtaggtagactcccaatggcccagtttgcatctctgtaaccaaaggccttttctctgtctctctccaaccccagaactgtggttggttttatatgtaaggaagttaacatgtccctgggaacagtccacaacattcaggaatgaatgtataagtaccgcaatccccggcccctcaagtggaataaatctaacatgtattgggcaccatttcccagtggcctgctgtggtagttggccttattccatgcatttttatgggctgccttcccttcctcaactgcattctctgctccttcctactctctgcaactcccaaataaacacttgtacgc

SEQ ID NO: 353719 - DNA, 1425 bp, Homo sapiens
tgtgagaggaagcaaagaaggacctgggctttgggaagatctaaagacccaggaaggtctctgggtgggataaagccaagatgaaactccccctacttctggctcttctatttggggcagtttctgctcttcatctaaggtctgagacttccacctttgagacccctttgggtgctaagacgctgcctgaggatgaggagacaccagagcaggagatggaggagaccccttgcagggagctggaggaagaggagtgaagatgcctccaagaaagatggggctgttgagtctatctcagtgccagatatggtggacaaaaaccttacgtgtcctgaggaagaggacacagtaaaagtggtgggcatccctgggtgccagacctgccgctacctcctggtgagaagtcttcagacgtttagtcaagcttggtttacttgccggaggtgctacaggggcaacctggtttccatccacaacttcaatattaattatcgaatccagtgttctgtcagcgcgctcaaccagggtcaagtctggattggaggcaggatcacaggctcgggtcgctgcagacgctttcagtgggttgacggcagccgctggaactttgcgtactgggctgctcaccagccctggtcccgcggtggtcactgcgtggccctgtgtacccgaggaggctactggcgtcgagcccactgcctcagaagacttcctttcatctgttcctactgagctggtcccagccagcagttcagagctgccctctcctgggcagctgcctcccctcctctgcttgccatccctccctccacctccctgcaataaaatgggttttactgaaatggatttattttctcctctgatcgcggatccactctgcttagccctcattgaaacttcttccttatcatctctccccacaccacaactttcatagaagtgtcagaagctactactccttgaggaggaggatggagggtggagttgggtctatggagccttttggagatggaggaatgggctcagctagttctcttcatagaacacctgattactgggcacctgcatagtgctgccaggacctttcaaggttgtaggtagactcccaatggcccagtttgcatctctgtaaccaaaggccttttctctgtctctctccaaccccagaactgtggttggttttatatgtaaggaagttaacatgtccctgggaacagtccacaacattcaggaatgaatgtataagtaccgcaatccccggcccctcaagtggaataaatctaacatgtattgggcaccatttcccagtggcctgctgtggtagttggccttattccatgcatttttatgggctgccttcccttcctcaactgcattctctgctccttcctactctctgcaactcccaaataaacacttgtacgc

SEQ ID NO: 353720 - DNA, 1293 bp, Homo sapiens
tgtgagaggaagcaaagaaggacctgggctttgggaagatctaaagacccaggaaggtctctgggtgggataaagccaagatgaaactccccctacttctggctcgagtggggctctggaagtgaagatgcctccaagaaagatggggctgttgagtctatctcagtgccagatatggtggacaaaaaccttacgtgtcctgaggaagaggacacagtaaaagtggtgggcatccctgggtgccagacctgccgctacctcctggtgagaagtcttcagacgtttagtcaagcttggtttacttgccggaggtgctacaggggcaacctggtttccatccacaacttcaatattaattatcgaatccagtgttctgtcagcgcgctcaaccagggtcaagtctggattggaggcaggatcacaggctcgggtcgctgcagacgctttcagtgggttgacggcagccgctggaactttgcgtactgggctgctcaccagccctggtcccgcggtggtcactgcgtggccctgtgtacccgaggaggctactggcgtcgagcccactgcctcagaagacttcctttcatctgttcctactgagctggtcccagccagcagttcagagctgccctctcctgggcagctgcctcccctcctctgcttgccatccctccctccacctccctgcaataaaatgggttttactgaaatggatttattttctcctctgatcgcggatccactctgcttagccctcattgaaacttcttccttatcatctctccccacaccacaactttcatagaagtgtcagaagctactactccttgaggaggaggatggagggtggagttgggtctatggagccttttggagatggaggaatgggctcagctagttctcttcatagaacacctgattactgggcacctgcatagtgctgccaggacctttcaaggttgtaggtagactcccaatggcccagtttgcatctctgtaaccaaaggccttttctctgtctctctccaaccccagaactgtggttggttttatatgtaaggaagttaacatgtccctgggaacagtccacaacattcaggaatgaatgtataagtaccgcaatccccggcccctcaagtggaataaatctaacatgtattgggcaccatttcccagtggcctgctgtggtagttggccttattccatgcatttttatgggctgccttcccttcctcaactgcattctctgctccttcctactctctgcaactcccaaataaacacttgtacgc

SEQ ID NO: 353721 - DNA, 1151 bp, Homo sapiens
gagttgagtggcgcgcccatcctggcgcctgtgcagtggacaaaaaccttacgtgtcctgaggaagaggacacagtaaaagtggtgggcatccctgggtgccagacctgccgctacctcctggtgagaagtcttcagacgtttagtcaagcttggtttacttgccggaggtgctacaggggcaacctggtttccatccacaacttcaatattaattatcgaatccagtgttctgtcagcgcgctcaaccagggtcaagtctggattggaggcaggatcacaggctcgggtcgctgcagacgctttcagtgggttgacggcagccgctggaactttgcgtactgggctgctcaccagccctggtcccgcggtggtcactgcgtggccctgtgtacccgaggaggctactggcgtcgagcccactgcctcagaagacttcctttcatctgttcctactgagctggtcccagccagcagttcagagctgccctctcctgggcagctgcctcccctcctctgcttgccatccctccctccacctccctgcaataaaatgggttttactgaaatggatttattttctcctctgatcgcggatccactctgcttagccctcattgaaacttcttccttatcatctctccccacaccacaactttcatagaagtgtcagaagctactactccttgaggaggaggatggagggtggagttgggtctatggagccttttggagatggaggaatgggctcagctagttctcttcatagaacacctgattactgggcacctgcatagtgctgccaggacctttcaaggttgtaggtagactcccaatggcccagtttgcatctctgtaaccaaaggccttttctctgtctctctccaaccccagaactgtggttggttttatatgtaaggaagttaacatgtccctgggaacagtccacaacattcaggaatgaatgtataagtaccgcaatccccggcccctcaagtggaataaatctaacatgtattgggcaccatttcccagtggcctgctgtggtagttggccttattccatgcatttttatgggctgccttcccttcctcaactgcattctctgctccttcctactctctgcaactcccaaataaacacttgtacgc

SEQ ID NO: 353722 - DNA, 1388 bp, Homo sapiens
tgtgagaggaagcaaagaaggacctgggctttgggaagatctaaagacccaggaaggtctctgggtgggataaagccaagatgaaactccccctacttctggctcttctatttggggcagtttctgctcttcatctaaggtctgagacttccacctttgagacccctttgggtgctaagacgctgcctgaggatgaggagacaccagagcaggagatggaggagaccccttgcagggagctggaggaagaggaggagtggggctctggaagtgaagatgcctccaagaaagatggggctgttgagtctatctcagtgccagatatggtggacaaaaaccttacgtgtcctgaggaagaggacacagttcttcagacgtttagtcaagcttggtttacttgccggaggtgctacaggggcaacctggtttccatccacaacttcaatattaattatcgaatccagtgttctgtcagcgcgctcaaccagggtcaagtctggattggaggcaggatcacaggctcgggtcgctgcagacgctttcagtgggttgacggcagccgctggaactttgcgtactgggctgctcaccagccctggtcccgcggtggtcactgcgtggccctgtgtacccgaggaggctactggcgtcgagcccactgcctcagaagacttcctttcatctgttcctactgagctggtcccagccagcagttcagagctgccctctcctgggcagctgcctcccctcctctgcttgccatccctccctccacctccctgcaataaaatgggttttactgaaatggatttattttctcctctgatcgcggatccactctgcttagccctcattgaaacttcttccttatcatctctccccacaccacaactttcatagaagtgtcagaagctactactccttgaggaggaggatggagggtggagttgggtctatggagccttttggagatggaggaatgggctcagctagttctcttcatagaacacctgattactgggcacctgcatagtgctgccaggacctttcaaggttgtaggtagactcccaatggcccagtttgcatctctgtaaccaaaggccttttctctgtctctctccaaccccagaactgtggttggttttatatgtaaggaagttaacatgtccctgggaacagtccacaacattcaggaatgaatgtataagtaccgcaatccccggcccctcaagtggaataaatctaacatgtattgggcaccatttcccagtggcctgctgtggtagttggccttattccatgcatttttatgggctgccttcccttcctcaactgcattctctgctccttcctactctctgcaactcccaaataaacacttgtacgc

SEQ ID NO: 353723 - DNA, 1352 bp, Homo sapiens
tgtccgtagcagactccacaacaccccagcttcctcttccaggacaagagggtgtcctggtccctggtctacctccccaccatccagagctgctggaactacggcttctcctgctcctcggacgagctccctgtcctgggcctcaccaagtctggcggctcagatcgcaccattgcctacgaaaacaaagccctgatgctctgcgaagggctcttcgtggcagacgtcaccgatttcgagggctggaaggctgcgattcccagtgccctggacaccaacagctcgaagagcacctcctccttcccctgcccggcagggcacttcaacggcttccgcacggtcatccgccccttctacctgaccaactcctcaggtgtggactagacggcgtggcccaggggtggtgagaacgggagaaccccaggacgccctcactgcaggctcccctcccgggcttccttcctctctgcaaggaacccacgcgcgtgggtcgctgcagacgctttcagtgggttgacggcagccgctggaactttgcgtactgggctgctcaccagccctggtcccgcggtggtcactgcgtggccctgtgtacccgaggaggctactggcgtcgagcccactgcctcagaagacttcctttcatctgttcctactgagctggtcccagccagcagttcagagctgccctctcctgggcagctgcctcccctcctctgcttgccatccctccctccacctccctgcaataaaatgggttttactgaaatggatttattttctcctctgatcgcggatccactctgcttagccctcattgaaacttcttccttatcatctctccccacaccacaactttcatagaagtgtcagaagctactactccttgaggaggaggatggagggtggagttgggtctatggagccttttggagatggaggaatgggctcagctagttctcttcatagaacacctgattactgggcacctgcatagtgctgccaggacctttcaaggttgtaggtagactcccaatggcccagtttgcatctctgtaaccaaaggccttttctctgtctctctccaaccccagaactgtggttggttttatatgtaaggaagttaacatgtccctgggaacagtccacaacattcaggaatgaatgtataagtaccgcaatccccggcccctcaagtggaataaatctaacatgtattgggcaccatttcccagtggcctgctgtggtagttggccttattccatgcatttttatgggctgccttcccttcctcaactgcattctctgctccttcctactctctgcaactcccaaataaacacttgtacgc

SEQ ID NO: 353724 - DNA, 1041 bp, Homo sapiens
gccatcccagttgcatctcttccgtggatacttttgttgatgccaggggcctgggggagcgggctggttgttcccacacatgggtgtgtggatgggccctgcacatgcgccttatgactggttgtgggtagcaagcacagaatgatcctgtttttctgccaaggaacccccggcgtgggtcgctgcagacgctttcagtgggttgacggcagccgctggaactttgcgtactgggctgctcaccagccctggtcccgcggtggtcactgcgtggccctgtgtacccgaggaggctactggcgtcgagcccactgcctcagaagacttcctttcatctgttcctactgagctggtcccagccagcagttcagagctgccctctcctgggcagctgcctcccctcctctgcttgccatccctccctccacctccctgcaataaaatgggttttactgaaatggatttattttctcctctgatcgcggatccactctgcttagccctcattgaaacttcttccttatcatctctccccacaccacaactttcatagaagtgtcagaagctactactccttgaggaggaggatggagggtggagttgggtctatggagccttttggagatggaggaatgggctcagctagttctcttcatagaacacctgattactgggcacctgcatagtgctgccaggacctttcaaggttgtaggtagactcccaatggcccagtttgcatctctgtaaccaaaggccttttctctgtctctctccaaccccagaactgtggttggttttatatgtaaggaagttaacatgtccctgggaacagtccacaacattcaggaatgaatgtataagtaccgcaatccccggcccctcaagtggaataaatctaacatgtattgggcaccatttcccagtggcctgctgtggtagttggccttattccatgcatttttatgggctgccttcccttcctcaactgcattctctgctccttcctactctctgcaactcccaaataaacacttgtacgc

SEQ ID NO: 353725 - DNA, 1086 bp, Homo sapiens
tgtccgtagcagactccacaacaccccagcttcctcttccaggacaagagggtgtcctggtccctggtctacctccccaccatccagagctgctggaactacggcttctcctgctcctcggacgagctccctgtcctgggcctcaccaagtctggcggctcagatcgcaccattgcctacgaaaacaaagccctgatgctctgcgaagggctcttcgtggcagacgtcaccgatttcgagggctggaaggctgcgattcccagtgccctggacaccaacagctcgaagagcacctcctccttcccctgcccggcagggcacttcaacggcttccgcacggtcatccgccccttctacctgaccaactcctcaggtgtggactagacggcgtggcccaggggtggtgagaacgggagaaccccaggacgccctcactgcaggctcccctcccgggcttccttcctctctgcaaggaacccacgcgcgtgggtcgctgcagacgctttcagtgggttgacggcagccgctggaactttgcgtactgggctgctcaccagccctggtcccgcggtggtcactgcgtggccctgtgtacccgaggaggctactggcgtcgagcccactgcctcagaagacttcctttcatctgttcctactgagctggtcccagccagcagttcagagctgccctctcctgggcagctgcctcccctcctctgcaaggaacccacgcgcgtgggttccttgcagaaaaggtgccagggggtccagtgacctggaagtcaggatgaactccccccaaacaaggtgcaggtgggggctggtaagagctggtccaaaaggaagttgggaaactattccgctggcttgagagagctgagctgtctgtatcgaatcccaggctgtgccgtatgtctactgttccttgtggggctcagcccaatgatggggtagcagaggtgactgtagttggttctgtctttgtgatgtcacactggggagcaggaatcctggccgcatgcactgaaggcatcagcagaggcccataggatggtcccgggcagagccgcaggagggtgtgatggt

SEQ ID NO: 353726 - DNA, 482 bp, Homo sapiens
tgaattcatgtaggaaggatgctccattctttgtcttttatcctgccctgtagtttacttgccggaggtgctacaggggcaacctggtttccatccacaacttcaatattaattatcgaatccagtgttctgtcagcgcgctcaaccagggtcaagtctggattggaggcaggatcacaggctcggtaagagaagtgtgaacactaaatggggtgcacctgctgatctcagccagcactcagcttgcatcagatttgtctgtttttctcctgtataatctccagaagaaccagggatagatggacacccacagacaacactgagggggctgcctgggcattcagggaagagctaaggatttagaatcaggaggtttgggtccaagttcctttccatctctcactatctatgtaacttaagttagctgggcatggtggtgcatgtctgtaatcctagctacttgggaggctgaggcaggagag

SEQ ID NO: 353727 - DNA, 1442 bp, Homo sapiens
tgtgagaggaagcaaagaaggacctgggctttgggaagatctaaagacccaggaaggtctctgggtgggataaagccaagatgaaactccccctacttctggctcttctatttggggcagtttctgctcttcatctaaggtctgagacttccacctttgagacccctttgggtgctaagacgctgcctgaggatgaggagacaccagagcaggagatggaggagaccccttgcagggagctggaggaagaggaggagtggggctctggaagtgaagatgcctccaagaaagatggggctgttgagtctatctcagtgccagatatggtggacaaaaaccttacgtgtcctgaggaagaggacacagtaaaagtggtgggcatccctgggtgccagacctgccgctacctcctggtgagaagtcttcagacgtttagtcaagcttggtttacttgccggaggtgctacaggggcaacctggtttccatccacaacttcaatattaattatcgaatccagtgttctgtcagcgcgctcaaccagggtcaagtctggattggaggcaggatcacaggctcgggtcgctgcagacgctttcagtgggttgacggcagccgctggaactttgcgtactgggctgctcaccagccctggtcccgcggtggtcactgcgtggccctgtgtacccgaggaggctactggcgtcgagcccactgcctcagaagacttcctttcatctgttcctactgagctggtcccagccagcagttcagagctgccctctcctgggcagctgcctcccctcctctgcttgccatccctccctccacctccctgcaataaaatgggttttactgaaatggatttattttctcctctgatcgcggatccactctgcttagccctcattgaaacttcttccttatcatctctccccacaccacaactttcatagaagtgtcagaagctactactccttgaggaggaggatggagggtggagttgggtctatggagccttttggagatggaggaatgggctcagctagttctcttcatagaacacctgattactgggcacctgcatagtgctgccaggacctttcaaggttgtaggtagactcccaatggcccagtttgcatctctgtaaccaaaggccttttctctgtctctctccaaccccagaactgtggttggttttatatgtaaggaagttaacatgtccctgggaacagtccacaacattcaggaatgaatgtataagtaccgcaatccccggcccctcaagtggaataaatctaacatgtattgggcaccatttcccagtggcctgctgtggtagttggccttattccatgcatttttatgggctgccttcccttcctcaactgcattctctgctccttcctactctctgcaactcccaaataaacacttgtacgc

SEQ ID NO: 353728 - DNA, 855 bp, Homo sapiens
tgtgagaggaagcaaagaaggacctgggctttgggaagatctaaagacccaggaaggtctctgggtgggataaagccaagatgaaactccccctacttctggctcttctatttggggcagtttctgctcttcatctaaggtctgagacttccacctttgagacccctttgggtgctaagacgctgcctgaggatgaggagacaccagagcaggagatggaggagaccccttgcagggagctggaggaagaggaggagtggggctctggaagtgaagatgcctccaagaaagatggggctgttgagtctatctcagtgccagatatggtggacaaaaaccttacgtgtcctgaggaagaggacacagtaaaagtggtgggcatccctgggtgccagacctgccgctacctcctggtgagaagtcttcagacgtttagtcaagcttggtttacttgccggaggtgctacaggggcaacctggtttccatccacaacttcaatattaattatcgaatccagtgttctgtcagcgcgctcaaccagggtcaagtctggattggaggcaggatcacaggctcgggtcgctgcagacgctttcagtgggttgacggcagccgctggaactttgcgtactgggctgctcaccagccctggtcccgcggtggtcactgcgtggccctgtgtacccgaggaggctactggcgtcgagcccactgcctcagaagacttcctttcatctgttcctactgagctggtcccagccagcagttcagagctgccctctcctgggcagctgcctcccctcctctgcttgccatccctccctccacctccctgcaataaaatgggttttact

SEQ ID NO: 353729 - DNA, 818 bp, Homo sapiens
tgtgagaggaagcaaagaaggacctgggctttgggaagatctaaagacccaggaaggtctctgggtgggataaagccaagatgaaactccccctacttctggctcttctatttggggcagtttctgctcttcatctaaggtctgagacttccacctttgagacccctttgggtgctaagacgctgcctgaggatgaggagacaccagagcaggagatggaggagaccccttgcagggagctggaggaagaggaggagtggggctctggaagtgaagatgcctccaagaaagatggggctgttgagtctatctcagtgccagatatggtggacaaaaaccttacgtgtcctgaggaagaggacacagtaaaagtggtgggcatccctgggtgccagacctgccgctacctcctggtgagaagtcttcagacgtttagtcaagcttggtttacttgccggaggtgctacaggggcaacctggtttccatccacaacttcaatattaattatcgaatccagtgttctgtcagcgcgctcaaccagggtcaagtctggattggaggcaggatcacaggctcgggtcgctgcagacgctttcagtgggttgacggcagccgctggaactttgcgtactgggctgctcaccagccctggtcccgcggtggtcactgcgtggccctgtgtacccgagagggtactggggtggccccctcgctcaaaaactccttttattggcctaccgagcggggccagccacaatttggcccttcctgggaggggccccccccttggttggcatccccctccacccctgcaggg

SEQ ID NO: 353730 - DNA, 300 bp, Homo sapiens
gggctgtgctgaggtgactctgaggatcccgcgtgggtcgctgcagacgctttcagtgggttgacggcagccgctggaactttgcgtactgggctgctcaccagccctggtcccgcggtggtcactgcgtggccctgtgtacccgaggaggctactggcgtcgagcccactgcctcagaagacttcctttcatctgttcctactgagctggtcccagccagcagttcagagctgccctctcctgggcagctgcctcccctcctctgcaaggaacccacgcgggatccttagatagaaaca

SEQ ID NO: 353731 - DNA, 1283 bp, Homo sapiens
  misc_feature (962)..(962): n is a, c, g, or t
  misc_feature (979)..(979): n is a, c, g, or t
  misc_feature (984)..(984): n is a, c, g, or t
  misc_feature (987)..(987): n is a, c, g, or t
  misc_feature (999)..(999): n is a, c, g, or t
  misc_feature (1014)..(1014): n is a, c, g, or t
  misc_feature (1022)..(1022): n is a, c, g, or t
  misc_feature (1033)..(1033): n is a, c, g, or t
  misc_feature (1037)..(1037): n is a, c, g, or t
  misc_feature (1044)..(1044): n is a, c, g, or t
  misc_feature (1054)..(1055): n is a, c, g, or t
  misc_feature (1060)..(1060): n is a, c, g, or t
  misc_feature (1066)..(1066): n is a, c, g, or t
  misc_feature (1075)..(1075): n is a, c, g, or t
  misc_feature (1081)..(1081): n is a, c, g, or t
  misc_feature (1083)..(1084): n is a, c, g, or t
  misc_feature (1095)..(1095): n is a, c, g, or t
  misc_feature (1102)..(1102): n is a, c, g, or t
  misc_feature (1105)..(1105): n is a, c, g, or t
  misc_feature (1112)..(1112): n is a, c, g, or t
  misc_feature (1114)..(1114): n is a, c, g, or t
  misc_feature (1121)..(1121): n is a, c, g, or t
  misc_feature (1123)..(1124): n is a, c, g, or t
  misc_feature (1128)..(1129): n is a, c, g, or t
  misc_feature (1135)..(1135): n is a, c, g, or t
  misc_feature (1137)..(1138): n is a, c, g, or t
  misc_feature (1145)..(1145): n is a, c, g, or t
  misc_feature (1150)..(1151): n is a, c, g, or t
  misc_feature (1158)..(1158): n is a, c, g, or t
  misc_feature (1160)..(1160): n is a, c, g, or t
  misc_feature (1174)..(1174): n is a, c, g, or t
  misc_feature (1179)..(1179): n is a, c, g, or t
  misc_feature (1191)..(1191): n is a, c, g, or t
  misc_feature (1194)..(1194): n is a, c, g, or t
  misc_feature (1197)..(1197): n is a, c, g, or t
  misc_feature (1202)..(1203): n is a, c, g, or t
  misc_feature (1205)..(1205): n is a, c, g, or t
  misc_feature (1212)..(1212): n is a, c, g, or t
  misc_feature (1235)..(1236): n is a, c, g, or t
  misc_feature (1250)..(1250): n is a, c, g, or t
  misc_feature (1270)..(1270): n is a, c, g, or t
  misc_feature (1272)..(1272): n is a, c, g, or t
  misc_feature (1280)..(1280): n is a, c, g, or t
tgtgagaggaagcaaagaaggacctgggctttgggaagatctaaagacccaggaaggtctctgggtgggataaagccaagatgaaactccccctacttctggctcttctatttggggcagtttctgctcttcatctaaggtctgagacttccacctttgagacccctttgggtgctaagacgctgcctgaggatgaggagacaccagagcaggagatggaggagaccccttgcagggagctggaggaagaggaggagtggggctctggaagtgaagatgcctccaagaaagatggggctgttgagtctatctcagtgccagatatggtggacaaaaaccttacgtgtcctgaggaagaggacacagtaaaagtggtgggcatccctgggtgccagacctgccgctacctcctggtgagaagtcttcagacgtttagtcaagcttggtttacttgccggaggtgctacaggggcaacctggtttccatccacaacttcaatattaattatcgaatccagtgttctgtcagcgcgctcaaccagggtcaagtctggattggaggcaggatcacaggctcgggtcgctgcagacgctttcagtgggttgacggcagccgctggaactttgcgtactgggctgctcaccagccctggtcccgcggtggtcactgcgtggccctgtgtacccgaggaggctactggcgtcgagcccactgcctcagaagacttcctttcatctgttcctactgagctggtcccagccagcagttcagagctgccctctcctgggcagctgcctcccctcctctgcttgccatccctccctccacctccctgcaataaaatgggttttactaaaaaaaaaaaaaaaaaaaaaaaaaaaaaaaaaaaaaaaaaaaaaaaaaaaaaaaaaaaaaaaaaaaaaaaaaaaaaaaaaaaaaaaacccttgtgggccgcttggnccaagtcaattttaaantgganaangtttatgcttgnggccgaatttggggntaattggnccaattccccntatngggagcngtttaaaatnnatggnccgggntttaacaangtgggnannggaaaaccctnggggtanccnaattaantngcttggnannaaanncccttntnncaagtgnggtannaggaaangncccgaccgacgccnttccnaaagttgccccnctnaanggcanngnaaattgnaaccctaatatttgtaaaaatcnnggtaaattttggtnaacaagctatttttaaccananggccaatnggg

SEQ ID NO: 353732 - DNA, 843 bp, Homo sapiens
tgtgagaggaagcaaagaaggacctgggctttgggaagatctaaagacccaggaaggtctctgggtgggataaagccaagatgaaactccccctacttctggctcttctatttggggcagtttctgctcttcatctaaggtctgagacttccacctttgagacccctttgggtgctaagacgctgcctgaggatgaggagacaccagagcaggagatggaggagaccccttgcagggagctggaggaagaggaggagtggggctctggaagtgaagatgcctccaagaaagatggggctgttgagtctatctcagtgccagatatggtggacaaaaaccttacgtgtcctgaggaagaggacacagtaaaagtggtgggcatccctgggtgccagacctgccgctacctcctggtgagaagtcttcagacgtttagtcaagcttggtttacttgccggaggtgctacaggggcaacctggtttccatccacaacttcaatattaattatcgaatccagtgttctgtcagcgcgctcaaccagggtcaagtctggattggaggcaggatcacaggctcgggtcgctgcagacgctttcagtgggttgacggcagccgctggaactttgcgtactgggctgctcaccagccctggtcccgcggtggtcactgcgtggccctgtgtacccgaggaggctactggcgtcgagcccactgcctcagaagacttcctttcatctgttcctactgagctggtcccagccagcagttcagagctgccctctcctgggcagctgcctcccctcctctgcaaggaacccacgcgggatccttagatagaaaca

SEQ ID NO: 353733 - DNA, 1421 bp, Homo sapiens
ccatcttcaccctcatcaaaggctcccttcagaatgacccattttacgataaagccaagatgaaactccccctacttctggctcttctatttggggcagtttctgctcttcatctaaggtctgagacttccacctttgagacccctttgggtgctaagacgctgcctgaggatgaggagacaccagagcaggagatggaggagaccccttgcagggagctggaggaagaggaggagtggggctctggaagtgaagatgcctccaagaaagatggggctgttgagtctatctcagtgccagatatggtggacaaaaaccttacgtgtcctgaggaagaggacacagtaaaagtggtgggcatccctgggtgccagacctgccgctacctcctggtgagaagtcttcagacgtttagtcaagcttggtttacttgccggaggtgctacaggggcaacctggtttccatccacaacttcaatattaattatcgaatccagtgttctgtcagcgcgctcaaccagggtcaagtctggattggaggcaggatcacaggctcgggtcgctgcagacgctttcagtgggttgacggcagccgctggaactttgcgtactgggctgctcaccagccctggtcccgcggtggtcactgcgtggccctgtgtacccgaggaggctactggcgtcgagcccactgcctcagaagacttcctttcatctgttcctactgagctggtcccagccagcagttcagagctgccctctcctgggcagctgcctcccctcctctgcttgccatccctccctccacctccctgcaataaaatgggttttactgaaatggatttattttctcctctgatcgcggatccactctgcttagccctcattgaaacttcttccttatcatctctccccacaccacaactttcatagaagtgtcagaagctactactccttgaggaggaggatggagggtggagttgggtctatggagccttttggagatggaggaatgggctcagctagttctcttcatagaacacctgattactgggcacctgcatagtgctgccaggacctttcaaggttgtaggtagactcccaatggcccagtttgcatctctgtaaccaaaggccttttctctgtctctctccaaccccagaactgtggttggttttatatgtaaggaagttaacatgtccctgggaacagtccacaacattcaggaatgaatgtataagtaccgcaatccccggcccctcaagtggaataaatctaacatgtattgggcaccatttcccagtggcctgctgtggtagttggccttattccatgcatttttatgggctgccttcccttcctcaactgcattctctgctccttcctactctctgcaactcccaaataaacacttgtacgc

SEQ ID NO: 353734 - DNA, 1034 bp, Homo sapiens
cgtatgagaggtgaaggtcatgagggtggagcccacatgaattggattggtgcctctgtaagaaggggtaccagacggctttttagctctctttctgctatgtgagaatacagcaaaagttggcaaagacccttgccagaacctgtctctgcaaggaacccacgcgcgtgggtcgctgcagacgctttcagtgggttgacggcagccgctggaactttgcgtactgggctgctcaccagccctggtcccgcggtggtcactgcgtggccctgtgtacccgaggaggctactggcgtcgagcccactgcctcagaagacttcctttcatctgttcctactgagctggtcccagccagcagttcagagctgccctctcctgggcagctgcctcccctcctctgcttgccatccctccctccacctccctgcaataaaatgggttttactgaaatggatttattttctcctctgatcgcggatccactctgcttagccctcattgaaacttcttccttatcatctctccccacaccacaactttcatagaagtgtcagaagctactactccttgaggaggaggatggagggtggagttgggtctatggagccttttggagatggaggaatgggctcagctagttctcttcatagaacacctgattactgggcacctgcatagtgctgccaggacctttcaaggttgtaggtagactcccaatggcccagtttgcatctctgtaaccaaaggccttttctctgtctctctccaaccccagaactgtggttggttttatatgtaaggaagttaacatgtccctgggaacagtccacaacattcaggaatgaatgtataagtaccgcaatccccggcccctcaagtggaataaatctaacatgtattgggcaccatttcccagtggcctgctgtggtagttggccttattccatgcatttttatgggctgccttcccttcctcaactgcattctctgctccttcctactctctgcaactcccaaataaacacttgtacgc

SEQ ID NO: 353735 - DNA, 1058 bp, Homo sapiens
ccctaaggcgcctcatgttacagtgagtctgcacacctaccacatttttttcccataggccttcaccaactgcatagggcccaaacactaaagccaggcagccctggaagaaatgcactgtagtggccctcctaaggctagagataggacaacagggtggagaatgatctctctgcaaggaacccacgcgcgtgggtcgctgcagacgctttcagtgggttgacggcagccgctggaactttgcgtactgggctgctcaccagccctggtcccgcggtggtcactgcgtggccctgtgtacccgaggaggctactggcgtcgagcccactgcctcagaagacttcctttcatctgttcctactgagctggtcccagccagcagttcagagctgccctctcctgggcagctgcctcccctcctctgcttgccatccctccctccacctccctgcaataaaatgggttttactgaaatggatttattttctcctctgatcgcggatccactctgcttagccctcattgaaacttcttccttatcatctctccccacaccacaactttcatagaagtgtcagaagctactactccttgaggaggaggatggagggtggagttgggtctatggagccttttggagatggaggaatgggctcagctagttctcttcatagaacacctgattactgggcacctgcatagtgctgccaggacctttcaaggttgtaggtagactcccaatggcccagtttgcatctctgtaaccaaaggccttttctctgtctctctccaaccccagaactgtggttggttttatatgtaaggaagttaacatgtccctgggaacagtccacaacattcaggaatgaatgtataagtaccgcaatccccggcccctcaagtggaataaatctaacatgtattgggcaccatttcccagtggcctgctgtggtagttggccttattccatgcatttttatgggctgccttcccttcctcaactgcattctctgctccttcctactctctgcaactcccaaataaacacttgtacgc

SEQ ID NO: 353736 - DNA, 633 bp, Homo sapiens
actcaatgtctgggctccaaaccatgcataatatccacaactaaaatggccatgtcaccaagagagcttcctctatttctcagattactggaagattcatgcccaggagtatccataatttagcattcctgggatccggacattctctctatcccaatttttaatcatctgagtctgtattaactgcttgccagcagttaatacagactcagcattgtgacacttcccaagaaggccaaacctctaaccgacattcctgaaatacgtggcattattcttttttggatttctcatttatggaaggctaaccctctgttgaccgtaagccttttggtttgggctgtattgaaatcctttctaaattgcatgaataggctctgctaacgtgatgagacaaactgaaaattattgcaagcattgactataattatgcagtacgttctcaggatgcatccaggggttcattttcatgagcctgtccaggttagtttactcctgaccactaatagcattgtcatttgggctttctgttgaatgaatcaacaaaccacaatacttcctgggaccttttgtactttatttgaactatgagtctgtattaactgcttggggatccttagagtcgagccagca

SEQ ID NO: 353737 - DNA, 636 bp, Homo sapiens
  misc_feature (50)..(51): n is a, c, g, or t
  misc_feature (56)..(57): n is a, c, g, or t
  misc_feature (63)..(63): n is a, c, g, or t
  misc_feature (80)..(80): n is a, c, g, or t
  misc_feature (114)..(114): n is a, c, g, or t
  misc_feature (144)..(144): n is a, c, g, or t
  misc_feature (146)..(146): n is a, c, g, or t
  misc_feature (188)..(188): n is a, c, g, or t
atggataagtttatactagtgttggcacatggcggcatgtatagatatannaggannacctanttgtattccttgtatgnaaaagcgtccctggtactacaataagtctttcgngaaaggagtgtaatcctaacaacaactcangnaagtattttgaaaagaatacttggataaggaaaaacctgcanctactcctgctatttcaagacattgctacaagtggttggtgtggtctctgtggctgtggccgtgattccttggatcgcaatacccttggttccccttggaatcattttcatttttcttcggcgatattttttggaaacgtcaagagatgtgaagcgcctggaatctacaagtgagtatggaaactcgggttggtatagacatgctagctagtttccatttatgccataaattacagagaccccctgaaattcggcagactctgtcttccagaatttctctaacattaggtaattgaacgtattggccattatgaatcattgtgtcccttagagcatgtggaattgatagcctgcaacgtgtaactttgcatttggaataaggaaggagtgaaggccatatggggagtaatattctacaggaatgtcagcactgtgaagacagggactc

SEQ ID NO: 353738 - DNA, 703 bp, Homo sapiens
caagcagggcatgagttcaccaccccagtaacaacagtgcattacaatacttaataatggaacaaggagagtagtattttagtctcaaaagcattggcacttacaacctattgctttgtttttagtggtttccagctgtggttgcattgcacgtagaaagtggaataatgtaatgggctttgaaaccataataatgaatgtctgaataatgacattatttcttgcgtttgtaatactgttaattaaatctatgtcgatcctgttggaattcataaaatcatctaaaaatttttctaaatatacagtgttgttttccccattgtatcttgatctcaagcaacaaatggtaaaagtatagctattaatgtcattaaatgtgaattgtttcaacattatgaagggttcctcttggtaagtggcagaaggagccaggcttaggtttgaagtgagactgactttattcccttcttcctccttacgtagctctggatgccgggcaggttggtttggcactgtcctatgccctcacgctcatggggatgtttcagtggtgtgttcgacaaagtgctgaagttgagaatatgatgcctgtaatcccagctactagagaggctgaggcaggagaatcgcttgaacctgggaggcggaggttgtggtgagccgagatctcacaattgcactccagcctgggcaacaagagtga

SEQ ID NO: 353739 - DNA, 5833 bp, Homo sapiens
ggacaggcgtggcggccggagccccagcatccctgcttgaggtccaggagcggagcccgcggccaccgccgcctgatcagcgcgaccccggcccgcgcccgccccgcccggcaagatgctgcccgtgtaccaggaggtgaagcccaacccgctgcaggacgcgaacatctgctcacgcgtgttcttctggtggctcaatcccttgtttaaaattggccataaacggagattagaggaagatgatatgtattcagtgctgccagaagaccgctcacagcaccttggagaggagttgcaagggttctgggataaagaagttttaagagctgagaatgacgcacagaagccttctttaacaagagcaatcataaagtgttactggaaatcttatttagttttgggaatttttacgttaattgaggaaagtgccaaagtaatccagcccatatttttgggaaaaattattaattattttgaaaattatgatcccatggattctgtggctttgaacacagcgtacgcctatgccacggtgctgactttttgcacgctcattttggctatactgcatcacttatatttttatcacgttcagtgtgctgggatgaggttacgagtagccatgtgccatatgatttatcggaaggcacttcgtcttagtaacatggccatggggaagacaaccacaggccagatagtcaatctgctgtccaatgatgtgaacaagtttgatcaggtgacagtgttcttacacttcctgtgggcaggaccactgcaggcgatcgcagtgactgccctactctggatggagataggaatatcgtgccttgctgggatggcagttctaatcattctcctgcccttgcaaagctgttttgggaagttgttctcatcactgaggagtaaaactgcaactttcacggatgccaggatcaggaccatgaatgaagttataactggtataaggataataaaaatgtacgcctgggaaaagtcattttcaaatcttattaccaatttgagaaagaaggagatttccaagattctgagaagttcctgcctcagggggatgaatttggcttcgtttttcagtgcaagcaaaatcatcgtgtttgtgaccttcaccacctacgtgctcctcggcagtgtgatcacagccagccgcgtgttcgtggcagtgacgctgtatggggctgtgcggctgacggttaccctcttcttcccctcagccattgagagggtgtcagaggcaatcgtcagcatccgaagaatccagacctttttgctacttgatgagatatcacagcgcaaccgtcagctgccgtcagatggtaaaaagatggtgcatgtgcaggattttactgctttttgggataaggcatcagagaccccaactctacaaggcctttcctttactgtcagacctggcgaattgttagctgtggtcggccccgtgggagcagggaagtcatcactgttaagtgccgtgctcggggaattggccccaagtcacgggctggtcagcgtgcatggaagaattgcctatgtgtctcagcagccctgggtgttctcgggaactctgaggagtaatattttatttgggaagaaatatgaaaaggaacgatatgaaaaagtcataaaggcttgtgctctgaaaaaggatttacagctgttggaggatggtgatctgactgtgataggagatcggggaaccacgctgagtggagggcagaaagcacgggtaaaccttgcaagagcagtgtatcaagatgctgacatctatctcctggacgatcctctcagtgcagtagatgcggaagttagcagacacttgttcgaactgtgtatttgtcaaattttgcatgagaagatcacaattttagtgactcatcagttgcagtacctcaaagctgcaagtcagattctgatattgaaagatggtaaaatggtgcagaaggggacttacactgagttcctaaaatctggtatagattttggctcccttttaaagaaggataatgaggaaagtgaacaacctccagttccaggaactcccacactaaggaatcgtaccttctcagagtcttcggtttggtctcaacaatcttctagaccctccttgaaagatggtgctctggagagccaagatacagagaatgtcccagttacactatcagaggagaaccgttctgaaggaaaagttggttttcaggcctataagaattacttcagagctggtgctcactggattgtcttcattttccttattctcctaaacactgcagctcaggttgcctatgtgcttcaagattggtggctttcatactgggcaaacaaacaaagtatgctaaatgtcactgtaaatggaggaggaaatgtaaccgagaagctagatcttaactggtacttaggaatttattcaggtttaactgtagctaccgttctttttggcatagcaagatctctattggtattctacgtccttgttaactcttcacaaactttgcacaacaaaatgtttgagtcaattctgaaagctccggtattattctttgatagaaatccaataggaagaattttaaatcgtttctccaaagacattggacacttggatgatttgctgccgctgacgtttttagatttcatccagacattgctacaagtggttggtgtggtctctgtggctgtggccgtgattccttggatcgcaatacccttggttccccttggaatcattttcatttttcttcggcgatattttttggaaacgtcaagagatgtgaagcgcctggaatctacaactcggagtccagtgttttcccacttgtcatcttctctccaggggctctggaccatccgggcatacaaagcagaagagaggtgtcaggaactgtttgatgcacaccaggatttacattcagaggcttggttcttgtttttgacaacgtcccgctggttcgccgtccgtctggatgccatctgtgccatgtttgtcatcatcgttgcctttgggtccctgattctggcaaaaactctggatgccgggcaggttggtttggcactgtcctatgccctcacgctcatggggatgtttcagtggtgtgttcgacaaagtgctgaagttgagaatatgatgatctcagtagaaagggtcattgaatacacagaccttgaaaaagaagcaccttgggaatatcagaaacgcccaccaccagcctggccccatgaaggagtgataatctttgacaatgtgaacttcatgtacagtccaggtgggcctctggtactgaagcatctgacagcactcattaaatcacaagaaaaggttggcattgtgggaagaaccggagctggaaaaagttccctcatctcagccctttttagattgtcagaacccgaaggtaaaatttggattgataagatcttgacaactgaaattggacttcacgatttaaggaagaaaatgtcaatcatacctcaggaacctgttttgttcactggaacaatgaggaaaaacctggatccctttaatgagcacacggatgaggaactgtggaatgccttacaagaggtacaacttaaagaaaccattgaagatcttcctggtaaaatggatactgaattagcagaatcaggatccaattttagtgttggacaaagacaactggtgtgccttgccagggcaattctcaggaaaaatcagatattgattattgatgaagcgacggcaaatgtggatccaagaactgatgagttaatacaaaaaaaaatccgggagaaatttgcccactgcaccgtgctaaccattgcacacagattgaacaccattattgacagcgacaagataatggttttagattcaggaagactgaaagaatatgatgagccgtatgttttgctgcaaaataaagagagcctattttacaagatggtgcaacaactgggcaaggcagaagccgctgccctcactgaaacagcaaaacaggtatacttcaaaagaaattatccacatattggtcacactgaccacatggttacaaacacttccaatggacagccctcgaccttaactattttcgagacagcactgtgaatccaaccaaaatgtcaagtccgttccgaaggcattttccactagtttttggactatgtaaaccacattgtacttttttttactttggcaacaaatatttatacatacaagatgctagttcatttgaatatttctcccaacttatccaaggatctccagctctaacaaaatggtttatttttatttaaatgtcaatagttgttttttaaaatccaaatcagaggtgcaggccaccagttaaatgccgtctatcaggttttgtgccttaagagactacagagtcaaagctcatttttaaaggagtaggacaaagttgtcacaggtttttgttgttgtttttattgcccccaaaattacatgttaatttccatttatatcagggattctatttacttgaagactgtgaagttgccattttgtctcattgttttctttgacataactaggatccattatttcccctgaaggcttcttgttagaaaatagtacagttacaaccaataggaacaacaaaaagaaaaagtttgtgacattgtagtagggagtgtgtaccccttactccccatcaaaaaaaaaaatggatacatggttaaaggatagaagggcaatattttatcatatgttctaaaagagaaggaagagaaaatactactttctcaaaatggaagcccttaaaggtgctttgatactgaaggacacaaatgtgaccgtccatcctcctttagagttgcatgacttggacacggtaactgttgcagttttagactcagcattgtgacacttcccaagaaggccaaacctctaaccgacattcctgaaatacgtggcattattcttttttggatttctcatttatggaaggctaaccctctgttgaccgtaagccttttggtttgggctgtattgaaatcctttctaaattgcatgaataggctctgctaacgtgatgagacaaactgaaaattattgcaagcattgactataattatgcagtacgttctcaggatgcatccaggggttcattttcatgagcctgtccaggttagtttactcctgaccactaatagcattgtcatttgggctttctgttgaatgaatcaacaaaccacaatacttcctgggaccttttgtactttatttgaactatgagtctttaatttttcctgatgatggtggctgtaatatgttgagttcagtttactaaaggttttactattatggtttgaagtggagtctcatgacctctcagaataaggtgtcacctccctgaaattgcatatatgtatatagacatgcacacgtgtgcatttgtttgtatacatatatttgtccttcgtatagcaagttttttgctcatcagcagagagcaacagatgttttattgagtgaagccttaaaaagcacacaccacacacagctaactgccaaaatacattgaccgtagtagctgttcaactcctagtacttagaaatacacgtatggttaatgttcagtccaacaaaccacacacagtaaatgtttattaatagtcatggttcgtattttaggtgactgaaattgcaacagtgatcataatgaggtttgttaaaacgatagctatattcaaaatgtctatatgtttatttggacttttgaggttaaagacagtcatataaacgtcctgtttctgttttaatgttatcatagaattttttaatgaaactaaattcaattgaaataaatgatagttttcatctcca

SEQ ID NO: 353740 - DNA, 5271 bp, Homo sapiens
ggacaggcgtggcggccggagccccagcatccctgcttgaggtccaggagcggagcccgcggccaccgccgcctgatcagcgcgaccccggcccgcgcccgccccgcccggcaagatgctgcccgtgtaccaggaggtgaagcccaacccgctgcaggacgcgaacatctgctcacgcgtgttcttctggtggctcaatcccttgtttaaaattggccataaacggagattagaggaagatgatatgtattcagtgctgccagaagaccgctcacagcaccttggagaggagttgcaagggttctgggataaagaagttttaagagctgagaatgacgcacagaagccttctttaacaagagcaatcataaagtgttactggaaatcttatttagttttgggaatttttacgttaattgaggaaagtgccaaagtaatccagcccatatttttgggaaaaattattaattattttgaaaattatgatcccatggattctgtggctttgaacacagcgtacgcctatgccacggtgctgactttttgcacgctcattttggctatactgcatcacttatatttttatcacgttcagtgtgctgggatgaggttacgagtagccatgtgccatatgatttatcggaaggcacttcgtcttagtaacatggccatggggaagacaaccacaggccagatagtcaatctgctgtccaatgatgtgaacaagtttgatcaggtgacagtgttcttacacttcctgtgggcaggaccactgcaggcgatcgcagtgactgccctactctggatggagataggaatatcgtgccttgctgggatggcagttctaatcattctcctgcccttgcaaagctgttttgggaagttgttctcatcactgaggagtaaaactgcaactttcacggatgccaggatcaggaccatgaatgaagttataactggtataaggataataaaaatgtacgcctgggaaaagtcattttcaaatcttattaccaatttgagaaagaaggagatttccaagattctgagaagttcctgcctcagggggatgaatttggcttcgtttttcagtgcaagcaaaatcatcgtgtttgtgaccttcaccacctacgtgctcctcggcagtgtgatcacagccagccgcgtgttcgtggcagtgacgctgtatggggctgtgcggctgacggttaccctcttcttcccctcagccattgagagggtgtcagaggcaatcgtcagcatccgaagaatccagacctttttgctacttgatgagatatcacagcgcaaccgtcagctgccgtcagatggtaaaaagatggtgcatgtgcaggattttactgctttttgggataaggcatcagagaccccaactctacaaggcctttcctttactgtcagacctggcgaattgttagctgtggtcggccccgtgggagcagggaagtcatcactgttaagtgccgtgctcggggaattggccccaagtcacgggctggtcagcgtgcatggaagaattgcctatgtgtctcagcagccctgggtgttctcgggaactctgaggagtaatattttatttgggaagaaatatgaaaaggaacgatatgaaaaagtcataaaggcttgtgctctgaaaaaggatttacagctgttggaggatggtgatctgactgtgataggagatcggggaaccacgctgagtggagggcagaaagcacgggtaaaccttgcaagagcagtgtatcaagatgctgacatctatctcctggacgatcctctcagtgcagtagatgcggaagttagcagacacttgttcgaactgtgtatttgtcaaattttgcatgagaagatcacaattttagtgactcatcagttgcagtacctcaaagctgcaagtcagattctgatattgaaagatggtaaaatggtgcagaaggggacttacactgagttcctaaaatctggtatagattttggctcccttttaaagaaggataatgaggaaagtgaacaacctccagttccaggaactcccacactaaggaatcgtaccttctcagagtcttcggtttggtctcaacaatcttctagaccctccttgaaagatggtgctctggagagccaagatacagagaatgtcccagttacactatcagaggagaaccgttctgaaggaaaagttggttttcaggcctataagaattacttcagagctggtgctcactggattgtcttcattttccttattctcctaaacactgcagctcaggttgcctatgtgcttcaagattggtggctttcatactgggcaaacaaacaaagtatgctaaatgtcactgtaaatggaggaggaaatgtaaccgagaagctagatcttaactggtacttaggaatttattcaggtttaactgtagctaccgttctttttggcatagcaagatctctattggtattctacgtccttgttaactcttcacaaactttgcacaacaaaatgtttgagtcaattctgaaagctccggtattattctttgatagaaatccaataggaagaattttaaatcgtttctccaaagacattggacacttggatgatttgctgccgctgacgtttttagatttcatccagacattgctacaagtggttggtgtggtctctgtggctgtggccgtgattccttggatcgcaatacccttggttccccttggaatcattttcatttttcttcggcgatattttttggaaacgtcaagagatgtgaagcgcctggaatctacaactcggagtccagtgttttcccacttgtcatcttctctccaggggctctggaccatccgggcatacaaagcagaagagaggtgtcaggaactgtttgatgcacaccaggatttacattcagaggcttggttcttgtttttgacaacgtcccgctggttcgccgtccgtctggatgccatctgtgccatgtttgtcatcatcgttgcctttgggtccctgattctggcaaaaactctggatgccgggcaggttggtttggcactgtcctatgccctcacgctcatggggatgtttcagtggtgtgttcgacaaagtgctgaagttgagaatatgatgatctcagtagaaagggtcattgaatacacagaccttgaaaaagaagcaccttgggaatatcagaaacgcccaccaccagcctggccccatgaaggagtgataatctttgacaatgtgaacttcatgtacagtccaggtgggcctctggtactgaagcatctgacagcactcattaaatcacaagaaaaggttggcattgtgggaagaaccggagctggaaaaagttccctcatctcagccctttttagattgtcagaacccgaaggtaaaatttggattgataagatcttgacaactgaaattggacttcacgatttaaggaagaaaatgtcaatcatacctcaggaacctgttttgttcactggaacaatgaggaaaaacctggatccctttaatgagcacacggatgaggaactgtggaatgccttacaagaggtacaacttaaagaaaccattgaagatcttcctggtaaaatggatactgaattagcagaatcaggatccaattttagtgttggacaaagacaactggtgtgccttgccagggcaattctcaggaaaaatcagatattgattattgatgaagcgacggcaaatgtggatccaagaactgatgagttaatacaaaaaaaaatccgggagaaatttgcccactgcaccgtgctaaccattgcacacagattgaacaccattattgacagcgacaagataatggttttagattcaggaagactgaaagaatatgatgagccgtatgttttgctgcaaaataaagagagcctattttacaagatggtgcaacaactgggcaaggcagaagccgctgccctcactgaaacagcaaaacaggtatacttcaaaagaaattatccacatattggtcacactgaccacatggttacaaacacttccaatggacagccctcgaccttaactattttcgagacagcactgtgaatccaaccaaaatgtcaagtccgttccgaaggcattttccactagtttttggactatgtaaaccacattgtacttttttttactttggcaacaaatatttatacatacaagatgctagttcatttgaatatttctcccaacttatccaaggatctccagctctaacaaaatggtttatttttatttaaatgtcaatagttgttttttaaaatccaaatcagaggtgcaggccaccagttaaatgccgtctatcaggttttgtgccttaagagactacagagtcaaagctcatttttaaaggagtaggacaaagttgtcacaggtttttgttgttgtttttattgcccccaaaattacatgttaatttccatttatatcagggattctatttacttgaagactgtgaagttgccattttgtctcattgttttctttgacataactaggatccattatttcccctgaaggcttcttgttagaaaatagtacagttacaaccaataggaacaacaaaaagaaaaagtttgtgacattgtagtagggagtgtgtaccccttactccccatcaaaaaaaaaaatggatacatggttaaaggatagaagggcaatattttatcatatgttctaaaagagaaggaagagaaaatactactttctcaaaatggaagcccttaaaggtgctttgatactgaaggacacaaatgtgaccgtccatcctcctttagagttgcatgacttggacacggtaactgttgcagttttagactcagcattgtgacacttcccaagaaggccaaacctctaaccgacattcctgaaatacgtggcattattcttttttggatttctcatttatggaaggctaaccctctgttgaccgtaagccttttggtttgggctgtattgaaatcctttctaaattgcatgaataggctctgctaacgtgatgagacaaactgaaaattattgcaagcattgactataattatgcagtacgttctcaggatgcatccaggggttcattttcatgagcctgtccaggttagtttactcctgaccactaatagcattgtcatttgggctttctgttgaatgaatcaacaaaccacaatacttcctgggaccttttgtactttatttgaactatgagtctgtattaactgcttggggtaccgagc

SEQ ID NO: 353741 - DNA, 5284 bp, Homo sapiens
ggacaggcgtggcggccggagccccagcatccctgcttgaggtccaggagcggagcccgcggccaccgccgcctgatcagcgcgaccccggcccgcgcccgccccgcccggcaagatgctgcccgtgtaccaggaggtgaagcccaacccgctgcaggacgcgaacatctgctcacgcgtgttcttctggtggctcaatcccttgtttaaaattggccataaacggagattagaggaagatgatatgtattcagtgctgccagaagaccgctcacagcaccttggagaggagttgcaagggttctgggataaagaagttttaagagctgagaatgacgcacagaagccttctttaacaagagcaatcataaagtgttactggaaatcttatttagttttgggaatttttacgttaattgaggaaagtgccaaagtaatccagcccatatttttgggaaaaattattaattattttgaaaattatgatcccatggattctgtggctttgaacacagcgtacgcctatgccacggtgctgactttttgcacgctcattttggctatactgcatcacttatatttttatcacgttcagtgtgctgggatgaggttacgagtagccatgtgccatatgatttatcggaaggcacttcgtcttagtaacatggccatggggaagacaaccacaggccagatagtcaatctgctgtccaatgatgtgaacaagtttgatcaggtgacagtgttcttacacttcctgtgggcaggaccactgcaggcgatcgcagtgactgccctactctggatggagataggaatatcgtgccttgctgggatggcagttctaatcattctcctgcccttgcaaagctgttttgggaagttgttctcatcactgaggagtaaaactgcaactttcacggatgccaggatcaggaccatgaatgaagttataactggtataaggataataaaaatgtacgcctgggaaaagtcattttcaaatcttattaccaatttgagaaagaaggagatttccaagattctgagaagttcctgcctcagggggatgaatttggcttcgtttttcagtgcaagcaaaatcatcgtgtttgtgaccttcaccacctacgtgctcctcggcagtgtgatcacagccagccgcgtgttcgtggcagtgacgctgtatggggctgtgcggctgacggttaccctcttcttcccctcagccattgagagggtgtcagaggcaatcgtcagcatccgaagaatccagacctttttgctacttgatgagatatcacagcgcaaccgtcagctgccgtcagatggtaaaaagatggtgcatgtgcaggattttactgctttttgggataaggcatcagagaccccaactctacaaggcctttcctttactgtcagacctggcgaattgttagctgtggtcggccccgtgggagcagggaagtcatcactgttaagtgccgtgctcggggaattggccccaagtcacgggctggtcagcgtgcatggaagaattgcctatgtgtctcagcagccctgggtgttctcgggaactctgaggagtaatattttatttgggaagaaatatgaaaaggaacgatatgaaaaagtcataaaggcttgtgctctgaaaaaggatttacagctgttggaggatggtgatctgactgtgataggagatcggggaaccacgctgagtggagggcagaaagcacgggtaaaccttgcaagagcagtgtatcaagatgctgacatctatctcctggacgatcctctcagtgcagtagatgcggaagttagcagacacttgttcgaactgtgtatttgtcaaattttgcatgagaagatcacaattttagtgactcatcagttgcagtacctcaaagctgcaagtcagattctgatattgaaagatggtaaaatggtgcagaaggggacttacactgagttcctaaaatctggtatagattttggctcccttttaaagaaggataatgaggaaagtgaacaacctccagttccaggaactcccacactaaggaatcgtaccttctcagagtcttcggtttggtctcaacaatcttctagaccctccttgaaagatggtgctctggagagccaagatacagagaatgtcccagttacactatcagaggagaaccgttctgaaggaaaagttggttttcaggcctataagaattacttcagagctggtgctcactggattgtcttcattttccttattctcctaaacactgcagctcaggttgcctatgtgcttcaagattggtggctttcatactgggcaaacaaacaaagtatgctaaatgtcactgtaaatggaggaggaaatgtaaccgagaagctagatcttaactggtacttaggaatttattcaggtttaactgtagctaccgttctttttggcatagcaagatctctattggtattctacgtccttgttaactcttcacaaactttgcacaacaaaatgtttgagtcaattctgaaagctccggtattattctttgatagaaatccaataggaagaattttaaatcgtttctccaaagacattggacacttggatgatttgctgccgctgacgtttttagatttcatccagacattgctacaagtggttggtgtggtctctgtggctgtggccgtgattccttggatcgcaatacccttggttccccttggaatcattttcatttttcttcggcgatattttttggaaacgtcaagagatgtgaagcgcctggaatctacaactcggagtccagtgttttcccacttgtcatcttctctccaggggctctggaccatccgggcatacaaagcagaagagaggtgtcaggaactgtttgatgcacaccaggatttacattcagaggcttggttcttgtttttgacaacgtcccgctggttcgccgtccgtctggatgccatctgtgccatgtttgtcatcatcgttgcctttgggtccctgattctggcaaaaactctggatgccgggcaggttggtttggcactgtcctatgccctcacgctcatggggatgtttcagtggtgtgttcgacaaagtgctgaagttgagaatatgatgatctcagtagaaagggtcattgaatacacagaccttgaaaaagaagcaccttgggaatatcagaaacgcccaccaccagcctggccccatgaaggagtgataatctttgacaatgtgaacttcatgtacagtccaggtgggcctctggtactgaagcatctgacagcactcattaaatcacaagaaaaggttggcattgtgggaagaaccggagctggaaaaagttccctcatctcagccctttttagattgtcagaacccgaaggtaaaatttggattgataagatcttgacaactgaaattggacttcacgatttaaggaagaaaatgtcaatcatacctcaggaacctgttttgttcactggaacaatgaggaaaaacctggatccctttaatgagcacacggatgaggaactgtggaatgccttacaagaggtacaacttaaagaaaccattgaagatcttcctggtaaaatggatactgaattagcagaatcaggatccaattttagtgttggacaaagacaactggtgtgccttgccagggcaattctcaggaaaaatcagatattgattattgatgaagcgacggcaaatgtggatccaagaactgatgagttaatacaaaaaaaaatccgggagaaatttgcccactgcaccgtgctaaccattgcacacagattgaacaccattattgacagcgacaagataatggttttagattcaggaagactgaaagaatatgatgagccgtatgttttgctgcaaaataaagagagcctattttacaagatggtgcaacaactgggcaaggcagaagccgctgccctcactgaaacagcaaaacaggtatacttcaaaagaaattatccacatattggtcacactgaccacatggttacaaacacttccaatggacagccctcgaccttaactattttcgagacagcactgtgaatccaaccaaaatgtcaagtccgttccgaaggcattttccactagtttttggactatgtaaaccacattgtacttttttttactttggcaacaaatatttatacatacaagatgctagttcatttgaatatttctcccaacttatccaaggatctccagctctaacaaaatggtttatttttatttaaatgtcaatagttgttttttaaaatccaaatcagaggtgcaggccaccagttaaatgccgtctatcaggttttgtgccttaagagactacagagtcaaagctcatttttaaaggagtaggacaaagttgtcacaggtttttgttgttgtttttattgcccccaaaattacatgttaatttccatttatatcagggattctatttacttgaagactgtgaagttgccattttgtctcattgttttctttgacataactaggatccattatttcccctgaaggcttcttgttagaaaatagtacagttacaaccaataggaacaacaaaaagaaaaagtttgtgacattgtagtagggagtgtgtaccccttactccccatcaaaaaaaaaaatggatacatggttaaaggatagaagggcaatattttatcatatgttctaaaagagaaggaagagaaaatactactttctcaaaatggaagcccttaaaggtgctttgatactgaaggacacaaatgtgaccgtccatcctcctttagagttgcatgacttggacacggtaactgttgcagttttagactcagcattgtgacacttcccaagaaggccaaacctctaaccgacattcctgaaatacgtggcattattcttttttggatttctcatttatggaaggctaaccctctgttgaccgtaagccttttggtttgggctgtattgaaatcctttctaaattgcatgaataggctcttggcttaaacccggttgaatgagacaaactgagacaactttaaatttggcccaaaggccaaactttgtcgggaacgccctttttccgtgcacaacaccgacgacccccacccttttctacaaacccaaacaacgtgtacaacctttcgggccccaacgcacagcccctcccaccgcgccgcccacgaccgcactaacgccccggccacttctacaactcccctctcccccacaaggggcggacaacttggggca

SEQ ID NO: 353742 - DNA, 3200 bp, Homo sapiens
ggcagggtcccctcaggctattgggaacatttatttttccttgaaacatgaagcctcctaggaggcctgcgtgtgctgtttggtggatacgtgaccatggagcttgggaggccgcaggtttttctgcacccagcctcactgagctgttttctctgtctgtttccccagctcggagtccagtgttttcccacttgtcatcttctctccaggggctctggaccatccgggcatacaaagcagaagagaggtgtcaggaactgtttgatgcacaccaggatttacattcagaggcttggttcttgtttttgacaacgtcccgctggttcgccgtccgtctggatgccatctgtgccatgtttgtcatcatcgttgcctttgggtccctgattctggcaaaaactctggatgccgggcaggttggtttggcactgtcctatgccctcacgctcatggggatgtttcagtggtgtgttcgacaaagtgctgaagttgagaatatgatgatctcagtagaaagggtcattgaatacacagaccttgaaaaagaagcaccttgggaatatcagaaacgcccaccaccagcctggccccatgaaggagtgataatctttgacaatgtgaacttcatgtacagtccaggtgggcctctggtactgaagcatctgacagcactcattaaatcacaagaaaaggttggcattgtgggaagaaccggagctggaaaaagttccctcatctcagccctttttagattgtcagaacccgaaggtaaaatttggattgataagatcttgacaactgaaattggacttcacgatttaaggaagaaaatgtcaatcatacctcaggaacctgttttgttcactggaacaatgaggaaaaacctggatccctttaatgagcacacggatgaggaactgtggaatgccttacaagaggtacaacttaaagaaaccattgaagatcttcctggtaaaatggatactgaattagcagaatcaggatccaattttagtgttggacaaagacaactggtgtgccttgccagggcaattctcaggaaaaatcagatattgattattgatgaagcgacggcaaatgtggatccaagaactgatgagttaatacaaaaaaaaatccgggagaaatttgcccactgcaccgtgctaaccattgcacacagattgaacaccattattgacagcgacaagataatggttttagattcaggaagactgaaagaatatgatgagccgtatgttttgctgcaaaataaagagagcctattttacaagatggtgcaacaactgggcaaggcagaagccgctgccctcactgaaacagcaaaacaggtatacttcaaaagaaattatccacatattggtcacactgaccacatggttacaaacacttccaatggacagccctcgaccttaactattttcgagacagcactgtgaatccaaccaaaatgtcaagtccgttccgaaggcattttccactagtttttggactatgtaaaccacattgtacttttttttactttggcaacaaatatttatacatacaagatgctagttcatttgaatatttctcccaacttatccaaggatctccagctctaacaaaatggtttatttttatttaaatgtcaatagttgttttttaaaatccaaatcagaggtgcaggccaccagttaaatgccgtctatcaggttttgtgccttaagagactacagagtcaaagctcatttttaaaggagtaggacaaagttgtcacaggtttttgttgttgtttttattgcccccaaaattacatgttaatttccatttatatcagggattctatttacttgaagactgtgaagttgccattttgtctcattgttttctttgacataactaggatccattatttcccctgaaggcttcttgttagaaaatagtacagttacaaccaataggaacaacaaaaagaaaaagtttgtgacattgtagtagggagtgtgtaccccttactccccatcaaaaaaaaaaatggatacatggttaaaggatagaagggcaatattttatcatatgttctaaaagagaaggaagagaaaatactactttctcaaaatggaagcccttaaaggtgctttgatactgaaggacacaaatgtgaccgtccatcctcctttagagttgcatgacttggacacggtaactgttgcagttttagactcagcattgtgacacttcccaagaaggccaaacctctaaccgacattcctgaaatacgtggcattattcttttttggatttctcatttatggaaggctaaccctctgttgaccgtaagccttttggtttgggctgtattgaaatcctttctaaattgcatgaataggctctgctaacgtgatgagacaaactgaaaattattgcaagcattgactataattatgcagtacgttctcaggatgcatccaggggttcattttcatgagcctgtccaggttagtttactcctgaccactaatagcattgtcatttgggctttctgttgaatgaatcaacaaaccacaatacttcctgggaccttttgtactttatttgaactatgagtctttaatttttcctgatgatggtggctgtaatatgttgagttcagtttactaaaggttttactattatggtttgaagtggagtctcatgacctctcagaataaggtgtcacctccctgaaattgcatatatgtatatagacatgcacacgtgtgcatttgtttgtatacatatatttgtccttcgtatagcaagttttttgctcatcagcagagagcaacagatgttttattgagtgaagccttaaaaagcacacaccacacacagctaactgccaaaatacattgaccgtagtagctgttcaactcctagtacttagaaatacacgtatggttaatgttcagtccaacaaaccacacacagtaaatgtttattaatagtcatggttcgtattttaggtgactgaaattgcaacagtgatcataatgaggtttgttaaaacgatagctatattcaaaatgtctatatgtttatttggacttttgaggttaaagacagtcatataaacgtcctgtttctgttttaatgttatcatagaattttttaatgaaactaaattcaattgaaataaatgatagttttcatctcca

SEQ ID NO: 353743 - DNA, 2420 bp, Homo sapiens
aagatcttatcaatccaaattttaccttcgggttctgacgatttaaggaagaaaatgtcaatcataccgaacctgttttgttcactggaacaatgaggaaaaacctggatccctttaatgagcacacggatgaggaactgtggaatgccttacaagaggtacaacttaaagaaaccattgaagatcttcctggtaaaatggatactgaattagcagaatcaggatccaattttagtgttggacaaagacaactggtgtgccttgccagggcaattctcaggaaaaatcagatattgattattgatgaagcgacggcaaatgtggatccaagaactgatgagttaatacaaaaaaaaatccgggagaaatttgcccactgcaccgtgctaaccattgcacacagattgaacaccattattgacagcgacaagataatggttttagattcaggaagactgaaagaatatgatgagccgtatgttttgctgcaaaataaagagagcctattttacaagatggtgcaacaactgggcaaggcagaagccgctgccctcactgaaacagcaaaacaggtatacttcaaaagaaattatccacatattggtcacactgaccacatggttacaaacacttccaatggacagccctcgaccttaactattttcgagacagcactgtgaatccaaccaaaatgtcaagtccgttccgaaggcattttccactagtttttggactatgtaaaccacattgtacttttttttactttggcaacaaatatttatacatacaagatgctagttcatttgaatatttctcccaacttatccaaggatctccagctctaacaaaatggtttatttttatttaaatgtcaatagttgttttttaaaatccaaatcagaggtgcaggccaccagttaaatgccgtctatcaggttttgtgccttaagagactacagagtcaaagctcatttttaaaggagtaggacaaagttgtcacaggtttttgttgttgtttttattgcccccaaaattacatgttaatttccatttatatcagggattctatttacttgaagactgtgaagttgccattttgtctcattgttttctttgacataactaggatccattatttcccctgaaggcttcttgttagaaaatagtacagttacaaccaataggaacaacaaaaagaaaaagtttgtgacattgtagtagggagtgtgtaccccttactccccatcaaaaaaaaaaatggatacatggttaaaggatagaagggcaatattttatcatatgttctaaaagagaaggaagagaaaatactactttctcaaaatggaagcccttaaaggtgctttgatactgaaggacacaaatgtgaccgtccatcctcctttagagttgcatgacttggacacggtaactgttgcagttttagactcagcattgtgacacttcccaagaaggccaaacctctaaccgacattcctgaaatacgtggcattattcttttttggatttctcatttatggaaggctaaccctctgttgaccgtaagccttttggtttgggctgtattgaaatcctttctaaattgcatgaataggctctgctaacgtgatgagacaaactgaaaattattgcaagcattgactataattatgcagtacgttctcaggatgcatccaggggttcattttcatgagcctgtccaggttagtttactcctgaccactaatagcattgtcatttgggctttctgttgaatgaatcaacaaaccacaatacttcctgggaccttttgtactttatttgaactatgagtctttaatttttcctgatgatggtggctgtaatatgttgagttcagtttactaaaggttttactattatggtttgaagtggagtctcatgacctctcagaataaggtgtcacctccctgaaattgcatatatgtatatagacatgcacacgtgtgcatttgtttgtatacatatatttgtccttcgtatagcaagttttttgctcatcagcagagagcaacagatgttttattgagtgaagccttaaaaagcacacaccacacacagctaactgccaaaatacattgaccgtagtagctgttcaactcctagtacttagaaatacacgtatggttaatgttcagtccaacaaaccacacacagtaaatgtttattaatagtcatggttcgtattttaggtgactgaaattgcaacagtgatcataatgaggtttgttaaaacgatagctatattcaaaatgtctatatgtttatttggacttttgaggttaaagacagtcatataaacgtcctgtttctgttttaatgttatcatagaattttttaatgaaactaaattcaattgaaataaatgatagttttcatctcca

SEQ ID NO: 353744 - DNA, 1688 bp, Homo sapiens
tcacagaaagccacggtaccattgtgtatgtgtatcgtatattgcctgtatcacttagctttctggaatctaaaggttccttgggtgtgcaactttggtgccctactccacgtaaaaatcttctgtagctcaactgagcaaaacacactcgcacattcatctacttattcatcatgcttattaccgttctcaaagtctatcaggttttgtgccttaagagactacagagtcaaagctcatttttaaaggagtaggacaaagttgtcacaggtttttgttgttgtttttattgcccccaaaattacatgttaatttccatttatatcagggattctatttacttgaagactgtgaagttgccattttgtctcattgttttctttgacataactaggatccattatttcccctgaaggcttcttgttagaaaatagtacagttacaaccaataggaacaacaaaaagaaaaagtttgtgacattgtagtagggagtgtgtaccccttactccccatcaaaaaaaaaaatggatacatggttaaaggatagaagggcaatattttatcatatgttctaaaagagaaggaagagaaaatactactttctcaaaatggaagcccttaaaggtgctttgatactgaaggacacaaatgtgaccgtccatcctcctttagagttgcatgacttggacacggtaactgttgcagttttagactcagcattgtgacacttcccaagaaggccaaacctctaaccgacattcctgaaatacgtggcattattcttttttggatttctcatttatggaaggctaaccctctgttgaccgtaagccttttggtttgggctgtattgaaatcctttctaaattgcatgaataggctctgctaacgtgatgagacaaactgaaaattattgcaagcattgactataattatgcagtacgttctcaggatgcatccaggggttcattttcatgagcctgtccaggttagtttactcctgaccactaatagcattgtcatttgggctttctgttgaatgaatcaacaaaccacaatacttcctgggaccttttgtactttatttgaactatgagtctttaatttttcctgatgatggtggctgtaatatgttgagttcagtttactaaaggttttactattatggtttgaagtggagtctcatgacctctcagaataaggtgtcacctccctgaaattgcatatatgtatatagacatgcacacgtgtgcatttgtttgtatacatatatttgtccttcgtatagcaagttttttgctcatcagcagagagcaacagatgttttattgagtgaagccttaaaaagcacacaccacacacagctaactgccaaaatacattgaccgtagtagctgttcaactcctagtacttagaaatacacgtatggttaatgttcagtccaacaaaccacacacagtaaatgtttattaatagtcatggttcgtattttaggtgactgaaattgcaacagtgatcataatgaggtttgttaaaacgatagctatattcaaaatgtctatatgtttatttggacttttgaggttaaagacagtcatataaacgtcctgtttctgttttaatgttatcatagaattttttaatgaaactaaattcaattgaaataaatgatagttttcatctcca

SEQ ID NO: 353745 - DNA, 1182 bp, Homo sapiens
actcaatgtctgggctccaaaccatgcataatatccacaactaaaatggccatgtcaccaagagagcttcctctatttctcagattactggaagattcatgcccaggagtatccataatttagcattcctgggatccggacattctctctatcccaatttttaatcatctgagtctgtattaactgcttgccagcagttaatacagactcagcattgtgacacttcccaagaaggccaaacctctaaccgacattcctgaaatacgtggcattattcttttttggatttctcatttatggaaggctaaccctctgttgaccgtaagccttttggtttgggctgtattgaaatcctttctaaattgcatgaataggctctgctaacgtgatgagacaaactgaaaattattgcaagcattgactataattatgcagtacgttctcaggatgcatccaggggttcattttcatgagcctgtccaggttagtttactcctgaccactaatagcattgtcatttgggctttctgttgaatgaatcaacaaaccacaatacttcctgggaccttttgtactttatttgaactatgagtctttaatttttcctgatgatggtggctgtaatatgttgagttcagtttactaaaggttttactattatggtttgaagtggagtctcatgacctctcagaataaggtgtcacctccctgaaattgcatatatgtatatagacatgcacacgtgtgcatttgtttgtatacatatatttgtccttcgtatagcaagttttttgctcatcagcagagagcaacagatgttttattgagtgaagccttaaaaagcacacaccacacacagctaactgccaaaatacattgaccgtagtagctgttcaactcctagtacttagaaatacacgtatggttaatgttcagtccaacaaaccacacacagtaaatgtttattaatagtcatggttcgtattttaggtgactgaaattgcaacagtgatcataatgaggtttgttaaaacgatagctatattcaaaatgtctatatgtttatttggacttttgaggttaaagacagtcatataaacgtcctgtttctgttttaatgttatcatagaattttttaatgaaactaaattcaattgaaataaatgatagttttcatctcca

SEQ ID NO: 353746 - DNA, 1118 bp, Homo sapiens
taaactagtccaggttcccacagctcgtaagctgctgtctcttgtctcccaggtctcagctcagctgtgtctttgggacatctttccagaccattcactctgtaggagccacctaccgctgagtctgtagcagttaatacagactcagcattgtgacacttcccaagaaggccaaacctctaaccgacattcctgaaatacgtggcattattcttttttggatttctcatttatggaaggctaaccctctgttgaccgtaagccttttggtttgggctgtattgaaatcctttctaaattgcatgaataggctctgctaacgtgatgagacaaactgaaaattattgcaagcattgactataattatgcagtacgttctcaggatgcatccaggggttcattttcatgagcctgtccaggttagtttactcctgaccactaatagcattgtcatttgggctttctgttgaatgaatcaacaaaccacaatacttcctgggaccttttgtactttatttgaactatgagtctttaatttttcctgatgatggtggctgtaatatgttgagttcagtttactaaaggttttactattatggtttgaagtggagtctcatgacctctcagaataaggtgtcacctccctgaaattgcatatatgtatatagacatgcacacgtgtgcatttgtttgtatacatatatttgtccttcgtatagcaagttttttgctcatcagcagagagcaacagatgttttattgagtgaagccttaaaaagcacacaccacacacagctaactgccaaaatacattgaccgtagtagctgttcaactcctagtacttagaaatacacgtatggttaatgttcagtccaacaaaccacacacagtaaatgtttattaatagtcatggttcgtattttaggtgactgaaattgcaacagtgatcataatgaggtttgttaaaacgatagctatattcaaaatgtctatatgtttatttggacttttgaggttaaagacagtcatataaacgtcctgtttctgttttaatgttatcatagaattttttaatgaaactaaattcaattgaaataaatgatagttttcatctcca

SEQ ID NO: 353747 - DNA, 1531 bp, Homo sapiens
  misc_feature (1411)..(1411): n is a, c, g, or t
  misc_feature (1441)..(1441): n is a, c, g, or t
  misc_feature (1477)..(1477): n is a, c, g, or t
  misc_feature (1498)..(1498): n is a, c, g, or t
  misc_feature (1515)..(1515): n is a, c, g, or t
caagcagggcatgagttcaccaccccagtaacaacagtgcattacaatacttaataatggaacaaggagagtagtattttagtctcaaaagcattggcacttacaacctattgctttgtttttagtggtttccagctgtggttgcattgcacgtagaaagtggaataatgtaatgggctttgaaaccataataatgaatgtctgaataatgacattatttcttgcgtttgtaatactgttaattaaatctatgtcgatcctgttggaattcataaaatcatctaaaaatttttctaaatatacagtgttgttttccccattgtatcttgatctcaagcaacaaatggtaaaagtatagctattaatgtcattaaatgtgaattgtttcaacattatgaagggttcctcttggtaagtggcagaaggagccaggcttaggtttgaagtgagactgactttattcccttcttcctccttacgtagctctggatgccgggcaggttggtttggcactgtcctatgccctcacgctcatggggatgtttcagtggtgtgttcgacaaagtgctgaagttgagaatatgatgatctcagtagaaagggtcattgaatacacagaccttgaaaaagaagcaccttgggaatatcagaaacgcccaccaccagcctggccccatgaaggagtgataatctttgacaatgtgaacttcatgtacagtccaggtgggcctctggtactgaagcatctgacagcactcattaaatcacaagaaaaggttggcattgtgggaagaaccggagctggaaaaagttccctcatctcagccctttttagattgtcagaacccgaaggtaaaatttggattgataagatcttgacaactgaaattggacttcacgatttaaggaagaaaatgtcaatcatacctcaggaacctgttttgttcactggaacaatgaggaaaaacctggatccctttaatgagcacacggatgaggaactgtggaatgccttacaagaggtacaacttaaagaaaccattgaagatcttcctggtaaaatggatactgaattagcagaatcaggatccaattttagtgttggacaaagacaactggtgtgccttgccagggcaattctcaggaaaaatcagatattgattattgatgaagcgacggcaaatgtggatccaagaactgatgagttaatacaaaaaaaaatccgggagaaatttgcccactgcaccgtgctaaccattgcacacagattgaacaccattattgacagcgacaagataatggttttagattcaggaagactgaaagaatatgatgagccgtatgttttgctgcaaaataaagagagcctattttttacaaggtgggtggccaaccacttggggccagggcnggaggccgcttgcccttcacttggaaaccngccaaaccgggttttactttcccaaagggatttttnccccctttttgggttcaccantggaccccttggggttnccaaccctttcccttt

SEQ ID NO: 353748 - DNA, 1019 bp, Homo sapiens
  misc_feature (998)..(998): n is a, c, g, or t
  misc_feature (1005)..(1006): n is a, c, g, or t
ggacaggcgtggcggccggagccccagcatccctgcttgaggtccaggagcggagcccgcggccaccgccgcctgatcagcgcgaccccggcccgcgcccgccccgcccggcaagatgctgcccgtgtaccaggaggtgaagcccaacccgctgcaggacgcgaacatctgctcacgcgtgttcttctggtggctcaatcccttgtttaaaattggccataaacggagattagaggaagatgatatgtattcagtgctgccagaagaccgctcacagcaccttggagaggagttgcaagggttctgggataaagaagttttaagagctgagaatgacgcacagaagccttctttaacaagagcaatcataaagtgttactggaaatcttatttagttttgggaatttttacgttaattgaggaaagtgccaaagtaatccagcccatatttttgggaaaaattattaattattttgaaaattatgatcccatggattctgtggctttgaacacagcgtacgcctatgccacggtgctgactttttgcacgctcattttggctatactgcatcacttatatttttatcacgttcagtgtgctgggatgaggttacgagtagccatgtgccatatgatttatcggaaggcacttcgtcttagtaacatggccatggggaagacaaccacaggccagatagtcaatctgctgtccaatgatgtgaacaagtttgatcaggtgacagtgttcttacacttcctgtgggcaggaccactgcaggcgatcgcagtgactgccctactctggatggagataggaatatcgtgccttgctgggatggcagttctaatcattctcctgcccttgcaaagctgttttgggaagttgttctcatcactgaggagtaaaactgcaactttcacggatgccaggatcaggaccatgaatgaagttataactggtataaggataataaaaatgtacgcctgtggtaagacgngatcctnngagtcactcgcag

SEQ ID NO: 353749 - DNA, 377 bp, Homo sapiens
tttgctgctagtggttttgaggacctagccggctttattggcttatatttgtatttagtttgtatttaacctctagatctttgactactgtgttgtctttgactacggtttcaaaatgtatgtttttcaatgtggagcaccccattcatgcattttttcaccctgtgccttttacatttataggtgtatttgtcaaattttgcatgagaagatcacaattttagtgactcatcagttgcagtacctcaaagctgcaagtcagattctgatattgaaagatgtaagtagtttctagaggtctcccgaacttgcaagtacttgggtgtgttgaatccccttcttcttcctccatttcatgttcctttcttctcagagct

SEQ ID NO: 353750 - DNA, 5862 bp, Homo sapiens
ggacaggcgtggcggccggagccccagcatccctgcttgaggtccaggagcggagcccgcggccaccgccgcctgatcagcgcgaccccggcccgcgcccgccccgcccggcaagatgctgcccgtgtaccaggaggtgaagcccaacccgctgcaggacgcgaacatctgctcacgcgtgttcttctggtggctcaatcccttgtttaaaattggccataaacggagattagaggaagatgatatgtattcagtgctgccagaagaccgctcacagcaccttggagaggagttgcaagggttctgggataaagaagttttaagagctgagaatgacgcacagaagccttctttaacaagagcaatcataaagtgttactggaaatcttatttagttttgggaatttttacgttaattgaggaaagtgccaaagtaatccagcccatatttttgggaaaaattattaattattttgaaaattatgatcccatggattctgtggctttgaacacagcgtacgcctatgccacggtgctgactttttgcacgctcattttggctatactgcatcacttatatttttatcacgttcagtgtgctgggatgaggttacgagtagccatgtgccatatgatttatcggaaggcacttcgtcttagtaacatggccatggggaagacaaccacaggccagatagtcaatctgctgtccaatgatgtgaacaagtttgatcaggtgacagtgttcttacacttcctgtgggcaggaccactgcaggcgatcgcagtgactgccctactctggatggagataggaatatcgtgccttgctgggatggcagttctaatcattctcctgcccttgcaaagctgttttgggaagttgttctcatcactgaggagtaaaactgcaactttcacggatgccaggatcaggaccatgaatgaagttataactggtataaggataataaaaatgtacgcctgggaaaagtcattttcaaatcttattaccaatttgagaaagaaggagatttccaagattctgagaagttcctgcctcagggggatgaatttggcttcgtttttcagtgcaagcaaaatcatcgtgtttgtgaccttcaccacctacgtgctcctcggcagtgtgatcacagccagccgcgtgttcgtggcagtgacgctgtatggggctgtgcggctgacggttaccctcttcttcccctcagccattgagagggtgtcagaggcaatcgtcagcatccgaagaatccagacctttttgctacttgatgagatatcacagcgcaaccgtcagctgccgtcagatggtaaaaagatggtgcatgtgcaggattttactgctttttgggataaggcatcagagaccccaactctacaaggcctttcctttactgtcagacctggcgaattgttagctgtggtcggccccgtgggagcagggaagtcatcactgttaagtgccgtgctcggggaattggccccaagtcacgggctggtcagcgtgcatggaagaattgcctatgtgtctcagcagccctgggtgttctcgggaactctgaggagtaatattttatttgggaagaaatatgaaaaggaacgatatgaaaaagtcataaaggcttgtgctctgaaaaaggatttacagctgttggaggatggtgatctgactgtgataggagatcggggaaccacgctgagtggagggcagaaagcacgggtaaaccttgcaagagcagtgtatcaagatgctgacatctatctcctggacgatcctctcagtgcagtagatgcggaagttagcagacacttgttcgaactgtgtatttgtcaaattttgcatgagaagatcacaattttagtgactcatcagttgcagtacctcaaagctgcaagtcagattctgatattgaaagatggtaaaatggtgcagaaggggacttacactgagttcctaaaatctggtatagattttggctcccttttaaagaaggataatgaggaaagtgaacaacctccagttccaggaactcccacactaaggaatcgtaccttctcagagtcttcggtttggtctcaacaatcttctagaccctccttgaaagatggtgctctggagagccaagatacagagaatgtcccagttacactatcagaggagaaccgttctgaaggaaaagttggttttcaggcctataagaattacttcagagctggtgctcactggattgtcttcattttccttattctcctaaacactgcagctcaggttgcctatgtgcttcaagattggtggctttcatactgggcaaacaaacaaagtatgctaaatgtcactgtaaatggaggaggaaatgtaaccgagaagctagatcttaactggtacttaggaatttattcaggtttaactgtagctaccgttctttttggcatagcaagatctctattggtattctacgtccttgttaactcttcacaaactttgcacaacaaaatgtttgagtcaattctgaaagctccggtattattctttgatagaaatccaataggaagaattttaaatcgtttctccaaagacattggacacttggatgatttgctgccgctgacgtttttagatttcatccagacattgctacaagtggttggtgtggtctctgtggctgtggccgtgattccttggatcgcaatacccttggttccccttggaatcattttcatttttcttcggcgatattttttggaaacgtcaagagatgtgaagcgcctggaatctacaactcggagtccagtgttttcccacttgtcatcttctctccaggggctctggaccatccgggcatacaaagcagaagagaggtgtcaggaactgtttgatgcacaccaggatttacattcagaggcttggttcttgtttttgacaacgtcccgctggttcgccgtccgtctggatgccatctgtgccatgtttgtcatcatcgttgcctttgggtccctgattctggcaaaaactctggatgccgggcaggttggtttggcactgtcctatgccctcacgctcatggggatgtttcagtggtgtgttcgacaaagtgctgaagttgagaatatgatgatctcagtagaaagggtcattgaatacacagaccttgaaaaagaagcaccttgggaatatcagaaacgcccaccaccagcctggccccatgaaggagtgataatctttgacaatgtgaacttcatgtacagtccaggtgggcctctggtactgaagcatctgacagcactcattaaatcacaagaaaaggttggcattgtgggaagaaccggagctggaaaaagttccctcatctcagccctttttagattgtcagaacccgaaggtaaaatttggattgataagatcttgacaactgaaattggacttcacgatttaaggaagaaaatgtcaatcatacctcaggaacctgttttgttcactggaacaatgaggaaaaacctggatccctttaatgagcacacggatgaggaactgtggaatgccttacaagaggtacaacttaaagaaaccattgaagatcttcctggtaaaatggatactgaattagcagaatcaggatccaattttagtgttggacaaagacaactggtgtgccttgccagggcaattctcaggaaaaatcagatattgattattgatgaagcgacggcaaatgtggatccaagaactgatgagttaatacaaaaaaaaatccgggagaaatttgcccactgcaccgtgctaaccattgcacacagattgaacaccattattgacagcgacaagataatggttttagattcaggaagactgaaagaatatgatgagccgtatgttttgctgcaaaataaagagagcctattttacaagatggtgcaacaactgggcaaggcagaagccgctgccctcactgaaacagcaaaacaggtatacttcaaaagaaattatccacatattggtcacactgaccacatggttacaaacacttccaatggacagccctcgaccttaactattttcgagacagcactgtgaatccaaccaaaatgtcaagtccgttccgaaggcattttccactagtttttggactatgtaaaccacattgtacttttttttactttggcaacaaatatttatacatacaagatgctagttcatttgaatatttctcccaacttatccaaggatctccagctctaacaaaatggtttatttttatttaaatgtcaatagttgttttttaaaatccaaatcagaggtgcaggccaccagttaaatgccgtctatcaggttttgtgccttaagagactacagagtcaaagctcatttttaaaggagtaggacaaagttgtcacaggtttttgttgttgtttttattgcccccaaaattacatgttaatttccatttatatcagggattctatttacttgaagactgtgaagttgccattttgtctcattgttttctttgacataactaggatccattatttcccctgaaggcttcttgttagaaaatagtacagttacaaccaataggaacaacaaaaagaaaaagtttgtgacattgtagtagggagtgtgtaccccttactccccatcaaaaaaaaaaatggatacatggttaaaggatagaagggcaatattttatcatatgttctaaaagagaaggaagagaaaatactactttctcaaaatggaagcccttaaaggtgctttgatactgaaggacacaaatgtgaccgtccatcctcctttagagttgcatgacttggacacggtaactgttgcagttttagactcagcattgtgacacttcccaagaaggccaaacctctaaccgacattcctgaaatacgtggcattattcttttttggatttctcatttatggaaggctaaccctctgttgaccgtaagccttttggtttgggctgtattgaaatcctttctaaattgcatgaataggctctgctaacgtgatgagacaaactgaaaattattgcaagcattgactataattatgcagtacgttctcaggatgcatccaggggttcattttcatgagcctgtccaggttagtttactcctgaccactaatagcattgtcatttgggctttctgttgaatgaatcaacaaaccacaatacttcctgggaccttttgtactttatttgaactatgagtctttaatttttcctgatgatggtggctgtaatatgttgagttcagtttactaaaggttttactattatggtttgaagtggagtctcatgacctctcagaataaggtgtcacctccctgaaattgcatatatgtatatagacatgcacacgtgtgcatttgtttgtatacatatatttgtccttcgtatagcaagttttttgctcatcagcagagagcaacagatgttttattgagtgaagccttaaaaagcacacaccacacacagctaactgccaaaatacattgaccgtagtagctgttcaactcctagtacttagaaatacacgtatggttaatgttcagtccaacaaaccacacacagtaaatgtttattaatagtcatggttcgtattttaggtgactgaaattgcaacagtgatcataatgaggtttgttaaaacgatagctatattcaaaatgtctatatgtttatttggacttttgaggttacatgcagtgacattcaggtcgcgtttcggttgtcatgagatcagagggtttttgatccagacccacccccgccccaccccgcgcgcctttgctgcctcttccagagacccagcttgcagagcggccgc

SEQ ID NO: 353751 - DNA, 3284 bp, Homo sapiens
caagcagggcatgagttcaccaccccagtaacaacagtgcattacaatacttaataatggaacaaggagagtagtattttagtctcaaaagcattggcacttacaacctattgctttgtttttagtggtttccagctgtggttgcattgcacgtagaaagtggaataatgtaatgggctttgaaaccataataatgaatgtctgaataatgacattatttcttgcgtttgtaatactgttaattaaatctatgtcgatcctgttggaattcataaaatcatctaaaaatttttctaaatatacagtgttgttttccccattgtatcttgatctcaagcaacaaatggtaaaagtatagctattaatgtcattaaatgtgaattgtttcaacattatgaagggttcctcttggtaagtggcagaaggagccaggcttaggtttgaagtgagactgactttattcccttcttcctccttacgtagctctggatgccgggcaggttggtttggcactgtcctatgccctcacgctcatggggatgtttcagtggtgtgttcgacaaagtgctgaagttgagaatatgatgatctcagtagaaagggtcattgaatacacagaccttgaaaaagaagcaccttgggaatatcagaaacgcccaccaccagcctggccccatgaaggagtgataatctttgacaatgtgaacttcatgtacagtccaggtgggcctctggtactgaagcatctgacagcactcattaaatcacaagaaaaggttggcattgtgggaagaaccggagctggaaaaagttccctcatctcagccctttttagattgtcagaacccgaaggtaaaatttggattgataagatcttgacaactgaaattggacttcacgatttaaggaagaaaatgtcaatcatacctcaggaacctgttttgttcactggaacaatgaggaaaaacctggatccctttaatgagcacacggatgaggaactgtggaatgccttacaagaggtacaacttaaagaaaccattgaagatcttcctggtaaaatggatactgaattagcagaatcaggatccaattttagtgttggacaaagacaactggtgtgccttgccagggcaattctcaggaaaaatcagatattgattattgatgaagcgacggcaaatgtggatccaagaactgatgagttaatacaaaaaaaaatccgggagaaatttgcccactgcaccgtgctaaccattgcacacagattgaacaccattattgacagcgacaagataatggttttagattcaggaagactgaaagaatatgatgagccgtatgttttgctgcaaaataaagagagcctattttacaagatggtgcaacaactgggcaaggcagaagccgctgccctcactgaaacagcaaaacaggtatacttcaaaagaaattatccacatattggtcacactgaccacatggttacaaacacttccaatggacagccctcgaccttaactattttcgagacagcactgtgaatccaaccaaaatgtcaagtccgttccgaaggcattttccactagtttttggactatgtaaaccacattgtacttttttttactttggcaacaaatatttatacatacaagatgctagttcatttgaatatttctcccaacttatccaaggatctccagctctaacaaaatggtttatttttatttaaatgtcaatagttgttttttaaaatccaaatcagaggtgcaggccaccagttaaatgccgtctatcaggttttgtgccttaagagactacagagtcaaagctcatttttaaaggagtaggacaaagttgtcacaggtttttgttgttgtttttattgcccccaaaattacatgttaatttccatttatatcagggattctatttacttgaagactgtgaagttgccattttgtctcattgttttctttgacataactaggatccattatttcccctgaaggcttcttgttagaaaatagtacagttacaaccaataggaacaacaaaaagaaaaagtttgtgacattgtagtagggagtgtgtaccccttactccccatcaaaaaaaaaaatggatacatggttaaaggatagaagggcaatattttatcatatgttctaaaagagaaggaagagaaaatactactttctcaaaatggaagcccttaaaggtgctttgatactgaaggacacaaatgtgaccgtccatcctcctttagagttgcatgacttggacacggtaactgttgcagttttagactcagcattgtgacacttcccaagaaggccaaacctctaaccgacattcctgaaatacgtggcattattcttttttggatttctcatttatggaaggctaaccctctgttgaccgtaagccttttggtttgggctgtattgaaatcctttctaaattgcatgaataggctctgctaacgtgatgagacaaactgaaaattattgcaagcattgactataattatgcagtacgttctcaggatgcatccaggggttcattttcatgagcctgtccaggttagtttactcctgaccactaatagcattgtcatttgggctttctgttgaatgaatcaacaaaccacaatacttcctgggaccttttgtactttatttgaactatgagtctttaatttttcctgatgatggtggctgtaatatgttgagttcagtttactaaaggttttactattatggtttgaagtggagtctcatgacctctcagaataaggtgtcacctccctgaaattgcatatatgtatatagacatgcacacgtgtgcatttgtttgtatacatatatttgtccttcgtatagcaagttttttgctcatcagcagagagcaacagatgttttattgagtgaagccttaaaaagcacacaccacacacagctaactgccaaaatacattgaccgtagtagctgttcaactcctagtacttagaaatacacgtatggttaatgttcagtccaacaaaccacacacagtaaatgtttattaatagtcatggttcgtattttaggtgactgaaattgcaacagtgatcataatgaggtttgttaaaacgatagctatattcaaaatgtctatatgtttatttggacttttgaggttaaagacagtcatataaacgtcctgtttctgttttaatgttatcatagaattttttaatgaaactaaattcaattgaaataaatgatagttttcatctcca

SEQ ID NO: 353752 - DNA, 2602 bp, Homo sapiens
cctccacctcctgggttcaagtgattctcctgtctcagcctcccgagtagctggaattacaggcgcaccccaccctgcctggctactttttgtatttttagtagagatgggatttcaccatgttggccaggctggtcttgaacttctgaccaccagtgaaccacctgcctcggcctcccaaagtgctgggattacaggcatgagccaccacacccagcctggtcacatgtttaatatcagcttgtcttatgaacctgttttgttcactggaacaatgaggaaaaacctggatccctttaatgagcacacggatgaggaactgtggaatgccttacaagaggtacaacttaaagaaaccattgaagatcttcctggtaaaatggatactgaattagcagaatcaggatccaattttagtgttggacaaagacaactggtgtgccttgccagggcaattctcaggaaaaatcagatattgattattgatgaagcgacggcaaatgtggatccaagaactgatgagttaatacaaaaaaaaatccgggagaaatttgcccactgcaccgtgctaaccattgcacacagattgaacaccattattgacagcgacaagataatggttttagattcaggaagactgaaagaatatgatgagccgtatgttttgctgcaaaataaagagagcctattttacaagatggtgcaacaactgggcaaggcagaagccgctgccctcactgaaacagcaaaacaggtatacttcaaaagaaattatccacatattggtcacactgaccacatggttacaaacacttccaatggacagccctcgaccttaactattttcgagacagcactgtgaatccaaccaaaatgtcaagtccgttccgaaggcattttccactagtttttggactatgtaaaccacattgtacttttttttactttggcaacaaatatttatacatacaagatgctagttcatttgaatatttctcccaacttatccaaggatctccagctctaacaaaatggtttatttttatttaaatgtcaatagttgttttttaaaatccaaatcagaggtgcaggccaccagttaaatgccgtctatcaggttttgtgccttaagagactacagagtcaaagctcatttttaaaggagtaggacaaagttgtcacaggtttttgttgttgtttttattgcccccaaaattacatgttaatttccatttatatcagggattctatttacttgaagactgtgaagttgccattttgtctcattgttttctttgacataactaggatccattatttcccctgaaggcttcttgttagaaaatagtacagttacaaccaataggaacaacaaaaagaaaaagtttgtgacattgtagtagggagtgtgtaccccttactccccatcaaaaaaaaaaatggatacatggttaaaggatagaagggcaatattttatcatatgttctaaaagagaaggaagagaaaatactactttctcaaaatggaagcccttaaaggtgctttgatactgaaggacacaaatgtgaccgtccatcctcctttagagttgcatgacttggacacggtaactgttgcagttttagactcagcattgtgacacttcccaagaaggccaaacctctaaccgacattcctgaaatacgtggcattattcttttttggatttctcatttatggaaggctaaccctctgttgaccgtaagccttttggtttgggctgtattgaaatcctttctaaattgcatgaataggctctgctaacgtgatgagacaaactgaaaattattgcaagcattgactataattatgcagtacgttctcaggatgcatccaggggttcattttcatgagcctgtccaggttagtttactcctgaccactaatagcattgtcatttgggctttctgttgaatgaatcaacaaaccacaatacttcctgggaccttttgtactttatttgaactatgagtctttaatttttcctgatgatggtggctgtaatatgttgagttcagtttactaaaggttttactattatggtttgaagtggagtctcatgacctctcagaataaggtgtcacctccctgaaattgcatatatgtatatagacatgcacacgtgtgcatttgtttgtatacatatatttgtccttcgtatagcaagttttttgctcatcagcagagagcaacagatgttttattgagtgaagccttaaaaagcacacaccacacacagctaactgccaaaatacattgaccgtagtagctgttcaactcctagtacttagaaatacacgtatggttaatgttcagtccaacaaaccacacacagtaaatgtttattaatagtcatggttcgtattttaggtgactgaaattgcaacagtgatcataatgaggtttgttaaaacgatagctatattcaaaatgtctatatgtttatttggacttttgaggttaaagacagtcatataaacgtcctgtttctgttttaatgttatcatagaattttttaatgaaactaaattcaattgaaataaatgatagttttcatctcca

SEQ ID NO: 353753 - DNA, 3521 bp, Homo sapiens
ggacaggcgtggcggccggagccccagcatccctgcttgaggtccaggagcggagcccgcggccaccgccgcctgatcagcgcgaccccggcccgcgcccgccccgcccggcaagatgctgcccgtgtaccaggaggtgaagcccaacccgctgcaggacgcgaacatctgctcacgcgtgttcttctggtggctcaatcccttgtttaaaattggccataaacggagattagaggaagatgatatgtattcagtgctgccagaagaccgctcacagcaccttggagaggagttgcaagggttctgggataaagaagttttaagagctgagaatgacgcacagaagccttctttaacaagagcaatcataaagtgttactggaaatcttatttagttttgggaatttttacgttaattgaggaaagtgccaaagtaatccagcccatatttttgggaaaaattattaattattttgaaaattatgatcccatggattctgtggctttgaacacagcgtacgcctatgccacggtgctgactttttgcacgctcattttggctatactgcatcacttatatttttatcacgttcagtgtgctgggatgaggttacgagtagccatgtgccatatgatttatcggaaggcacttcgtcttagtaacatggccatggggaagacaaccacaggccagatagtcaatctgctgtccaatgatgtgaacaagtttgatcaggtgacagtgttcttacacttcctgtgggcaggaccactgcaggcgatcgcagtgactgccctactctggatggagataggaatatcgtgccttgctgggatggcagttctaatcattctcctgcccttgcaaagctgttttgggaagttgttctcatcactgaggagtaaaactgcaactttcacggatgccaggatcaggaccatgaatgaagttataactggtataaggataataaaaatgtacgcctgggaaaagtcattttcaaatcttattaccaatttgagaaagaaggagatttccaagattctgagaagttcctgcctcagggggatgaatttggcttcgtttttcagtgcaagcaaaatcatcgtgtttgtgaccttcaccacctacgtgctcctcggcagtgtgatcacagccagccgcgtgttcgtggcagtgacgctgtatggggctgtgcggctgacggttaccctcttcttcccctcagccattgagagggtgtcagaggcaatcgtcagcatccgaagaatccagacctttttgctacttgatgagatatcacagcgcaaccgtcagctgccgtcagatggtaaaaagatggtgcatgtgcaggattttactgctttttgggataaggcatcagagaccccaactctacaaggcctttcctttactgtcagacctggcgaattgttagctgtggtcggccccgtgggagcagggaagtcatcactgttaagtgccgtgctcggggaattggccccaagtcacgggctggtcagcgtgcatggaagaattgcctatgtgtctcagcagccctgggtgttctcgggaactctgaggagtaatattttatttgggaagaaatatgaaaaggaacgatatgaaaaagtcataaaggcttgtgctctgaaaaaggatttacagctgttggaggatggtgatctgactgtgataggagatcggggaaccacgctgagtggagggcagaaagcacgggtaaaccttgcaagagcagtgtatcaagatgctgacatctatctcctggacgatcctctcagtgcagtagatgcggaagttagcagacacttgttcgaactgtgtatttgtcaaattttgcatgagaagatcacaattttagtgactcatcagttgcagtacctcaaagctgcaagtcagattctgatattgaaagatggtaaaatggtgcagaaggggacttacactgagttcctaaaatctggtatagattttggctcccttttaaagaaggataatgaggaaagtgaacaacctccagttccaggaactcccacactaaggaatcgtaccttctcagagtcttcggtttggtctcaacaatcttctagaccctccttgaaagatggtgctctggagagccaagatacagagaatgtcccagttacactatcagaggagaaccgttctgaaggaaaagttggttttcaggcctataagaattacttcagagctggtgctcactggattgtcttcattttccttattctcctaaacactgcagctcaggttgcctatgtgcttcaagattggtggctttcatactgggcaaacaaacaaagtatgctaaatgtcactgtaaatggaggaggaaatgtaaccgagaagctagatcttaactggtacttaggaatttattcaggtttaactgtagctaccgttctttttggcatagcaagatctctattggtattctacgtccttgttaactcttcacaaactttgcacaacaaaatgtttgagtcaattctgaaagctccggtattattctttgatagaaatccaataggaagaattttaaatcgtttctccaaagacattggacacttggatgatttgctgccgctgacgtttttagatttcatccagacattgctacaagtggttggtgtggtctctgtggctgtggccgtgattccttggatcgcaatacccttggttccccttggaatcattttcatttttcttcggcgatattttttggaaacgtcaagagatgtgaagcgcctggaatctacaactcggagtccagtgttttcccacttgtcatcttctctccaggggctctggaccatccgggcatacaaagcagaagagaggtgtcaggaactgtttgatgcacaccaggatttacattcaggtctgtctatttctggaaatggtttcaaaggacaggatctgctgctttttctggcttaacctccctggtcagatgagcttgttggcaggcacctcagggcccagccccacatcctgctttttttgcgcatcttcgtctccttccccatccccttcttctgggcttggactcctctcggaatcgctgctgcacgttccctctttgtgccccctgactggcttgtggggtctttctctcaccatgcatggcctgtggctctgtcagcaaacgttttctgcaaaaggccacctagtaagtgttttaggcattgtgtgccattattgtctctgttgtgattaatcacctttgccattgtagcacaaaagcagatgtcaatacattggcaaatggctgtgactatgtttcaataaaactttatttacaaaaataggtgctggctcacgtgctgtagtttgctgaccccttgcatcagtgaagattttttcaatatggaaatttcagaatttccaccaaatctacaaaattcagatccgtcattccaatctttattttatcttgctgattaaatggcactttaaaaaccacatgctaaaaggaaaa

SEQ ID NO: 353754 - DNA, 406 bp, Homo sapiens
tgcgcatgcgcagtcccccttgaacgcacctcaggatggcccgtactttggaaccactagcaaagaagatctttaaaggagtttggtagccgaacttgtaggcgtttttggagcatattttttgtttagcaagatgcacacaagccaagatttcaggcaaacaatgagcaagaaatatcccttcatcttggaagtttattacaaatccactgagaagtctggaatgtatggaatcagagagctagatcaaaaaacatggttgaacagcaaaaattagatcactttgggaggccgaggtggagtgatcatcagcctgggcaacacggcaagaccctatctctattaaaaaaaaaaaaaaaacaaaaacaacaacaacaaaaaaaaaaacaaaaaaaaaacgagccgg

SEQ ID NO: 353755 - DNA, 415 bp, Homo sapiens
agagtgcagtggcgcgatctcactcactgcaacctctgcctcctgggctcaagcaatcctccatctcagcctcccaagtagctgggaccacagcggtgcaccaccatgcccggctaatttttgtattttttgtagagacaggggtctcactatgttgccaaggctggtcttgaactcctgggctcaagcgatccctcccttggcctcccaaagtgctgggattacaggcgtgagccactgcgcccagccatttttgattttttgtagagatggggtctcattgtgttgcccaggctgattaaagtttctataaggtatgtttattcttaaggatatctactctaacacctgtaaatgtagggtgatcaattagtaaattaataaatctgaatcaattaataaatctgtttaaaat

SEQ ID NO: 353756 - DNA, 3106 bp, Homo sapiens
tgcgcatgcgcagtcccccttgaacgcacctcaggatggcccgtactttggaaccactagcaaagaagatctttaaaggagtttggtagccgaacttgtaggcgtttttggagcatattttttgtttagcaagatgcacacaagccaagatttcaggcaaacaatgagcaagaaatatcccttcatcttggaagtttattacaaatccactgagaagtctggaatgtatggaatcagagagctagatcaaaaaacatggttgaacagcaaaaattagatccagtcatcacgttcagcctcccatctaagctgtttgagacctttgagagaagaagaaaagatgagtgtactaccacactgtagactcttggtggtcccacagaacatgctgctgagtcacaggaacttctagcctgccttggcctgtggtttcccacccactatacaaacccactgcttgtttgttgcttttcttctcatatttattgtcaaagataaatgtttcaaaaagaaatgactaaggaaggaaaagaaacaaatgctctaaagattttctctccccaagcacttttactggtgaaataaaaaccagtaacaatcaatatgtaaaaacggcccacttccctaaaaaaaagtaatttttgtagtctgcaaggttttttttttttttgctttagtctaaatacttgttaatcttacatgttctcctgagagaagaaaaagccattcctttcaggttgtaaagtaccatgaaaaggtctttcaaaaatattcctatcagccaggcatggtggctcacaccagtaatctcagcactttgggaggccgaggcaggcgggtcacttgaggtcaggagttcgagaccagcctggccaacatggtgaaaccctgtttctactaaaaatacaaaaattagctgggcgtggtggtgcatgcctgtaatcccagctacttgggaggctaaggtaggagaattacttgaacatgggagatggaggttgcagtgagccaagatcatgccactgcattccaacctgggcaagggagtgagacgctgtctcaaaaaaaaaaaaaagaaaatttcctatcttctgaagttccaagccaaagctatttttaaaacatcaataaaaaaatttaagttacttacttgcattatctttgttagccatggcattcatgccaatgttatcaaacttggatcccatattttcatccaatagatggccaaacttttaaacaaaaacgataaatttattagaaaactaaaaataatgtagaatagctagcttgttaaaacagtacattagccttacctcttcagcagatacaaataggctggaatcatttaagtttcttttcttttttcttggccctaaaaaaaattgtaagtctacattattcaattataaatctaatgattttagaaaaatgcaatgcaacatgattttattttaaaaattatacttgggtaaaaacaattgcaataatcttctggcaccattgggtagctggcatttaaatataatttaagagttagtatataatattttcaaaaagctaacaacatcctaatagaactgttcagatgacaagagtgtcttcttgcttttcagatttggccactgatcgaagttttacccataagggaaataacatagtatcaagcaatagtaaaattatcagtttgacatggatgggttttgaaatacttaagacacaacataaaatttagttcaggggtctttagattgtaaagaaattgactgaaagtatgtttattatgctataaatgaagttgtttataacagcgaaaaaggttctcctttaaaaaaaaaacttatctgtagtactgaatatataaacttttcctgaaacaattattcaaactctgcatctttgatatcaatgtctctagcagtagtagagccatattttaaaaagagctttactaaatacagatcataacattcagctgttttaagtgtattaacgcatttgggtaaatttacagacttgttcaaccacaaccacagtctgattttagaacatttccatcaacttcaaagatccctggtgccatttgtagtcctccaacccatctccgatctatcttgtttctatgacttgccttttctggctatttcatataaatgggatcatatgacatgtggtttcctatatctgacttttttcatttagcataacgtttttgaggctcatccatgttgtagtactccatgccatgttgtgggctacataatattccattgtatggatataccacattttgcttatcagttaatggacatttaggttttgtctactttttggcattaatagtgctgctgtgaacaatcatgtacaagtctttgtatcagagccacttttgataaaatagtttctaaaacatttcatcttgatttttattaaggtgatatgtatgttacttaacagctgtataatacacatttgcatgcattaggaagttttttttgggttttattcatcctgtagtgatgtatctgtgacctcaacgagtaggcacttctgtactgtactggtttcttaaagtttcttttatcccgcccccacccccaacctcagcctcaagtatgtaacaccatgcctggctaatttttgattttttttttttttttttgagacagagtctcgctttgtcgccaggctggagtacaggggcgtgatctcggctcactgcaacctctgccttctgggttcaagcgattctcctgcctcagcctcccaagtagctgggcctacaagtgcatgccaccacgccaagctaatttttgtatttttagtagagatggggtttcatcatgttggccaggatggtcttatctgttgaccttgtgatctacctgccttggcctcccaaagtgctgggattacaggcgtgagccactgcgcccagccatttttgattttttgtagagatggggtctcattgtgttgcccaggctgattaaagtttctataaggtatgtttattcttaaggatatctactctaacacctgtaaatgtagggtgatcaattagtaaattaataaatctgaatcaattaataaatctgtttaaaat

SEQ ID NO: 353757 - DNA, 3292 bp, Homo sapiens
  misc_feature (3110)..(3110): n is a, c, g, or t
tgcgcatgcgcagtcccccttgaacgcacctcaggatggcccgtactttggaaccactagcaaagaagatctttaaaggagtttggtagccgaacttgtaggcgtttttggagcatattttttgtttagcaagatgcacacaagccaagatttcaggcaaacaatgagcaagaaatatcccttcatcttggaagtttattacaaatccactgagaagtctggaatgtatggaatcagagagctagatcaaaaaacatggttgaacagcaaaaattagatccagtcatcacgttcagcctcccatctaagctgtttgagacctttgagagaagaagaaaagatgagtgtactaccacactgtagactcttggtggtcccacagaacatgctgctgagtcacaggaacttctagcctgccttggcctgtggtttcccacccactatacaaacccactgcttgtttgttgcttttcttctcatatttattgtcaaagataaatgtttcaaaaagaaatgactaaggaaggaaaagaaacaaatgctctaaagattttctctccccaagcacttttactggtgaaataaaaaccagtaacaatcaatatgtaaaaacggcccacttccctaaaaaaaagtaatttttgtagtctgcaaggttttttttttttttgctttagtctaaatacttgttaatcttacatgttctcctgagagaagaaaaagccattcctttcaggttgtaaagtaccatgaaaaggtctttcaaaaatattcctatcagccaggcatggtggctcacaccagtaatctcagcactttgggaggccgaggcaggcgggtcacttgaggtcaggagttcgagaccagcctggccaacatggtgaaaccctgtttctactaaaaatacaaaaattagctgggcgtggtggtgcatgcctgtaatcccagctacttgggaggctaaggtaggagaattacttgaacatgggagatggaggttgcagtgagccaagatcatgccactgcattccaacctgggcaagggagtgagacgctgtctcaaaaaaaaaaaaaagaaaatttcctatcttctgaagttccaagccaaagctatttttaaaacatcaataaaaaaatttaagttacttacttgcattatctttgttagccatggcattcatgccaatgttatcaaacttggatcccatattttcatccaatagatggccaaacttttaaacaaaaacgataaatttattagaaaactaaaaataatgtagaatagctagcttgttaaaacagtacattagccttacctcttcagcagatacaaataggctggaatcatttaagtttcttttcttttttcttggccctaaaaaaaattgtaagtctacattattcaattataaatctaatgattttagaaaaatgcaatgcaacatgattttattttaaaaattatacttgggtaaaaacaattgcaataatcttctggcaccattgggtagctggcatttaaatataatttaagagttagtatataatattttcaaaaagctaacaacatcctaatagaactgttcagatgacaagagtgtcttcttgcttttcagatttggccactgatcgaagttttacccataagggaaataacatagtatcaagcaatagtaaaattatcagtttgacatggatgggttttgaaatacttaagacacaacataaaatttagttcaggggtctttagattgtaaagaaattgactgaaagtatgtttattatgctataaatgaagttgtttataacagcgaaaaaggttctcctttaaaaaaaaaacttatctgtagtactgaatatataaacttttcctgaaacaattattcaaactctgcatctttgatatcaatgtctctagcagtagtagagccatattttaaaaagagctttactaaatacagatcataacattcagctgttttaagtgtattaacgcatttgggtaaatttacagacttgttcaaccacaaccacagtctgattttagaacatttccatcaacttcaaagatccctggtgccatttgtagtcctccaacccatctccgatctatcttgtttctatgacttgccttttctggctatttcatataaatgggatcatatgacatgtggtttcctatatctgacttttttcatttagcataacgtttttgaggctcatccatgttgtagtactccatgccatgttgtgggctacataatattccattgtatggatataccacattttgcttatcagttaatggacatttaggttttgtctactttttggcattaatagtgctgctgtgaacaatcatgtacaagtctttgtatcagagccacttttgataaaatagtttctaaaacatttcatcttgatttttattaaggtgatatgtatgttacttaacagctgtataatacacatttgcatgcattaggaagttttttttgggttttattcatcctgtagtgatgtatctgtgacctcaacgagtaggcacttctgtactgtactggtttcttaaagtttcttttatcccgcccccacccccaacctcagcctcaagtatgtaacaccatgcctggctaatttttgattttttttttttttttttgagacagagtctcgctttgtcgccaggctggagtacaggggcgtgatctcggctcactgcaacctctgccttctgggttcaagcgattctcctgcctcagcctcccaagtagctgggcctacaagtgcatgccaccacgccaagctaatttttgtatttttagtagagatggggtttcatcatgttggccaggatggtcttatctgttgaccttgtgatctacctgccttggcctcccaaagtgctgggattacaggcgtgagccactgcgcccagccatttttgattttttgtagagatggggtctcattgtgttgcccaggctgattaaagtttctataaggtatgtttattcttaaggatatctactctaacacctgtaaatgtagggtgatcaattagtaaattaataaatctgaatcaattaataaatctgtttaaaatttanaaacagcagaacaagacaagaacacgtgcggagagtacaaagtacggggcgcgaaaaacaagagctatcaaggggacatgtgcacaagggtaccctgacccggttgctggcgacacagggggagacactgcgggcccccatagaggcagaatactcggaagccggtacgatggagcgacaga

SEQ ID NO: 353758 - DNA, 3201 bp, Homo sapiens
tgcgcatgcgcagtcccccttgaacgcacctcaggatggcccgtactttggaaccactagcaaagaagatctttaaaggagtttggtagccgaacttgtaggcgtttttggagcatattttttgtttagcaagatgcacacaagccaagatttcaggcaaacaatgagcaagaaatatcccttcatcttggaagtttattacaaatccactgagaagtctggaatgtatggaatcagagagctagatcaaaaaacatggttgaacagcaaaaattagatccagtcatcacgttcagcctcccatctaagctgtttgagacctttgagagaagaagaaaagatgagtgtactaccacactgtagactcttggtggtcccacagaacatgctgctgagtcacaggaacttctagcctgccttggcctgtggtttcccacccactatacaaacccactgcttgtttgttgcttttcttctcatatttattgtcaaagataaatgtttcaaaaagaaatgactaaggaaggaaaagaaacaaatgctctaaagattttctctccccaagcacttttactggtgaaataaaaaccagtaacaatcaatatgtaaaaacggcccacttccctaaaaaaaagtaatttttgtagtctgcaaggttttttttttttttgctttagtctaaatacttgttaatcttacatgttctcctgagagaagaaaaagccattcctttcaggttgtaaagtaccatgaaaaggtctttcaaaaatattcctatcagccaggcatggtggctcacaccagtaatctcagcactttgggaggccgaggcaggcgggtcacttgaggtcaggagttcgagaccagcctggccaacatggtgaaaccctgtttctactaaaaatacaaaaattagctgggcgtggtggtgcatgcctgtaatcccagctacttgggaggctaaggtaggagaattacttgaacatgggagatggaggttgcagtgagccaagatcatgccactgcattccaacctgggcaagggagtgagacgctgtctcaaaaaaaaaaaaaagaaaatttcctatcttctgaagttccaagccaaagctatttttaaaacatcaataaaaaaatttaagttacttacttgcattatctttgttagccatggcattcatgccaatgttatcaaacttggatcccatattttcatccaatagatggccaaacttttaaacaaaaacgataaatttattagaaaactaaaaataatgtagaatagctagcttgttaaaacagtacattagccttacctcttcagcagatacaaataggctggaatcatttaagtttcttttcttttttcttggccctaaaaaaaattgtaagtctacattattcaattataaatctaatgattttagaaaaatgcaatgcaacatgattttattttaaaaattatacttgggtaaaaacaattgcaataatcttctggcaccattgggtagctggcatttaaatataatttaagagttagtatataatattttcaaaaagctaacaacatcctaatagaactgttcagatgacaagagtgtcttcttgcttttcagatttggccactgatcgaagttttacccataagggaaataacatagtatcaagcaatagtaaaattatcagtttgacatggatgggttttgaaatacttaagacacaacataaaatttagttcaggggtctttagattgtaaagaaattgactgaaagtatgtttattatgctataaatgaagttgtttataacagcgaaaaaggttctcctttaaaaaaaaaacttatctgtagtactgaatatataaacttttcctgaaacaattattcaaactctgcatctttgatatcaatgtctctagcagtagtagagccatattttaaaaagagctttactaaatacagatcataacattcagctgttttaagtgtattaacgcatttgggtaaatttacagacttgttcaaccacaaccacagtctgattttagaacatttccatcaacttcaaagatccctggtgccatttgtagtcctccaacccatctccgatctatcttgtttctatgacttgccttttctggctatttcatataaatgggatcatatgacatgtggtttcctatatctgacttttttcatttagcataacgtttttgaggctcatccatgttgtagtactccatgccatgttgtgggctacataatattccattgtatggatataccacattttgcttatcagttaatggacatttaggttttgtctactttttggcattaatagtgctgctgtgaacaatcatgtacaagtctttgtatcagagccacttttgataaaatagtttctaaaacatttcatcttgatttttattaaggtgatatgtatgttacttaacagctgtataatacacatttgcatgcattaggaagttttttttgggttttattcatcctgtagtgatgtatctgtgacctcaacgagtaggcacttctgtactgtactggtttcttaaagtttcttttatcccgcccccacccccaacctcagcctcaagtatgtaacaccatgcctggctaatttttgattttttttttttttttttgagacagagtctcgctttgtcgccaggctggagtacaggggcgtgatctcggctcactgcaacctctgccttctgggttcaagcgattctcctgcctcagcctcccaagtagctgggcctacaagtgcatgccaccacgccaagctaatttttgtatttttagtagagatggggtttcatcatgttggccaggatggtcttatctgttgaccttgtgatctacctgccttggcctcccaaagtgctgggattacaggcgtgagccactgcgcccagccatttttgattttttgtagagatggggtctcattgtgttgcccaggctgattaaagtttctataaggtatgtttattcttaaggatatctactctaacacctgtaaatgtagggtgatcaagaccagcctggccaacatggtgaaaccctgtttcccaggctgattaaagtttctataaggtatgtttattcttaaggatatctactctaacacctgtaaatgtagggtgatcaattagtaaattaattgattcagatttat

SEQ ID NO: 353759 - DNA, 3172 bp, Homo sapiens
tgcgcatgcgcagtcccccttgaacgcacctcaggatggcccgtactttggaaccactagcaaagaagatctttaaaggagtttggtagccgaacttgtaggcgtttttggagcatattttttgtttagcaagatgcacacaagccaagatttcaggcaaacaatgagcaagaaatatcccttcatcttggaagtttattacaaatccactgagaagtctggaatgtatggaatcagagagctagatcaaaaaacatggttgaacagcaaaaattagatccagtcatcacgttcagcctcccatctaagctgtttgagacctttgagagaagaagaaaagatgagtgtactaccacactgtagactcttggtggtcccacagaacatgctgctgagtcacaggaacttctagcctgccttggcctgtggtttcccacccactatacaaacccactgcttgtttgttgcttttcttctcatatttattgtcaaagataaatgtttcaaaaagaaatgactaaggaaggaaaagaaacaaatgctctaaagattttctctccccaagcacttttactggtgaaataaaaaccagtaacaatcaatatgtaaaaacggcccacttccctaaaaaaaagtaatttttgtagtctgcaaggttttttttttttttgctttagtctaaatacttgttaatcttacatgttctcctgagagaagaaaaagccattcctttcaggttgtaaagtaccatgaaaaggtctttcaaaaatattcctatcagccaggcatggtggctcacaccagtaatctcagcactttgggaggccgaggcaggcgggtcacttgaggtcaggagttcgagaccagcctggccaacatggtgaaaccctgtttctactaaaaatacaaaaattagctgggcgtggtggtgcatgcctgtaatcccagctacttgggaggctaaggtaggagaattacttgaacatgggagatggaggttgcagtgagccaagatcatgccactgcattccaacctgggcaagggagtgagacgctgtctcaaaaaaaaaaaaaagaaaatttcctatcttctgaagttccaagccaaagctatttttaaaacatcaataaaaaaatttaagttacttacttgcattatctttgttagccatggcattcatgccaatgttatcaaacttggatcccatattttcatccaatagatggccaaacttttaaacaaaaacgataaatttattagaaaactaaaaataatgtagaatagctagcttgttaaaacagtacattagccttacctcttcagcagatacaaataggctggaatcatttaagtttcttttcttttttcttggccctaaaaaaaattgtaagtctacattattcaattataaatctaatgattttagaaaaatgcaatgcaacatgattttattttaaaaattatacttgggtaaaaacaattgcaataatcttctggcaccattgggtagctggcatttaaatataatttaagagttagtatataatattttcaaaaagctaacaacatcctaatagaactgttcagatgacaagagtgtcttcttgcttttcagatttggccactgatcgaagttttacccataagggaaataacatagtatcaagcaatagtaaaattatcagtttgacatggatgggttttgaaatacttaagacacaacataaaatttagttcaggggtctttagattgtaaagaaattgactgaaagtatgtttattatgctataaatgaagttgtttataacagcgaaaaaggttctcctttaaaaaaaaaacttatctgtagtactgaatatataaacttttcctgaaacaattattcaaactctgcatctttgatatcaatgtctctagcagtagtagagccatattttaaaaagagctttactaaatacagatcataacattcagctgttttaagtgtattaacgcatttgggtaaatttacagacttgttcaaccacaaccacagtctgattttagaacatttccatcaacttcaaagatccctggtgccatttgtagtcctccaacccatctccgatctatcttgtttctatgacttgccttttctggctatttcatataaatgggatcatatgacatgtggtttcctatatctgacttttttcatttagcataacgtttttgaggctcatccatgttgtagtactccatgccatgttgtgggctacataatattccattgtatggatataccacattttgcttatcagttaatggacatttaggttttgtctactttttggcattaatagtgctgctgtgaacaatcatgtacaagtctttgtatcagagccacttttgataaaatagtttctaaaacatttcatcttgatttttattaaggtgatatgtatgttacttaacagctgtataatacacatttgcatgcattaggaagttttttttgggttttattcatcctgtagtgatgtatctgtgacctcaacgagtaggcacttctgtactgtactggtttcttaaagtttcttttatcccgcccccacccccaacctcagcctcaagtatgtaacaccatgcctggctaatttttgattttttttttttttttttgagacagagtctcgctttgtcgccaggctggagtacaggggcgtgatctcggctcactgcaacctctgccttctgggttcaagcgattctcctgcctcagcctcccaagtagctgggcctacaagtgcatgccaccacgccaagctaatttttgtatttttagtagagatggggtttcatcatgttggccaggatggtcttatctgttgaccttgtgatctacctgccttggcctcccaaagtgctgggattacaggcgtgagccactgcgcccagccatttttgattttttgtagagatggggtctcattgtgttgcccaggctgattaaagtttctataaggtatgtttattcttaaggatatctactctaacacctgtaaatgtagggtgatcaattagtaaattaataaatctgaatcaattaataaatctgtttaaaattccttgcctctttttgtttcagtcaattctgttgggtattctttaatctgcatccaaaactattat

SEQ ID NO: 353760 - DNA, 3257 bp, Homo sapiens
cctcaggcattgaaaaggggtcggaagtgaatggagtaaacacctgacagcagcgagctgggattgagaacaaaagagcacacacaggacaatagaaaaatctgaaaaacaagtggttctcctcttctggactttgaggttataaggaggctgactaaaaacttgggtttacattaatgtcttcagatggcccgtactttggaaccactagcaaagaagatctttaaaggagtttggtagccgaacttgtaggcgtttttggagcatattttttgtttagcaagatgcacacaagccaagatttcaggcaaacaatgagcaagaaatatcccttcatcttggaagtttattacaaatccactgagaagtctggaatgtatggaatcagagagctagatcaaaaaacatggttgaacagcaaaaattagatccagtcatcacgttcagcctcccatctaagctgtttgagacctttgagagaagaagaaaagatgagtgtactaccacactgtagactcttggtggtcccacagaacatgctgctgagtcacaggaacttctagcctgccttggcctgtggtttcccacccactatacaaacccactgcttgtttgttgcttttcttctcatatttattgtcaaagataaatgtttcaaaaagaaatgactaaggaaggaaaagaaacaaatgctctaaagattttctctccccaagcacttttactggtgaaataaaaaccagtaacaatcaatatgtaaaaacggcccacttccctaaaaaaaagtaatttttgtagtctgcaaggttttttttttttttgctttagtctaaatacttgttaatcttacatgttctcctgagagaagaaaaagccattcctttcaggttgtaaagtaccatgaaaaggtctttcaaaaatattcctatcagccaggcatggtggctcacaccagtaatctcagcactttgggaggccgaggcaggcgggtcacttgaggtcaggagttcgagaccagcctggccaacatggtgaaaccctgtttctactaaaaatacaaaaattagctgggcgtggtggtgcatgcctgtaatcccagctacttgggaggctaaggtaggagaattacttgaacatgggagatggaggttgcagtgagccaagatcatgccactgcattccaacctgggcaagggagtgagacgctgtctcaaaaaaaaaaaaaagaaaatttcctatcttctgaagttccaagccaaagctatttttaaaacatcaataaaaaaatttaagttacttacttgcattatctttgttagccatggcattcatgccaatgttatcaaacttggatcccatattttcatccaatagatggccaaacttttaaacaaaaacgataaatttattagaaaactaaaaataatgtagaatagctagcttgttaaaacagtacattagccttacctcttcagcagatacaaataggctggaatcatttaagtttcttttcttttttcttggccctaaaaaaaattgtaagtctacattattcaattataaatctaatgattttagaaaaatgcaatgcaacatgattttattttaaaaattatacttgggtaaaaacaattgcaataatcttctggcaccattgggtagctggcatttaaatataatttaagagttagtatataatattttcaaaaagctaacaacatcctaatagaactgttcagatgacaagagtgtcttcttgcttttcagatttggccactgatcgaagttttacccataagggaaataacatagtatcaagcaatagtaaaattatcagtttgacatggatgggttttgaaatacttaagacacaacataaaatttagttcaggggtctttagattgtaaagaaattgactgaaagtatgtttattatgctataaatgaagttgtttataacagcgaaaaaggttctcctttaaaaaaaaaacttatctgtagtactgaatatataaacttttcctgaaacaattattcaaactctgcatctttgatatcaatgtctctagcagtagtagagccatattttaaaaagagctttactaaatacagatcataacattcagctgttttaagtgtattaacgcatttgggtaaatttacagacttgttcaaccacaaccacagtctgattttagaacatttccatcaacttcaaagatccctggtgccatttgtagtcctccaacccatctccgatctatcttgtttctatgacttgccttttctggctatttcatataaatgggatcatatgacatgtggtttcctatatctgacttttttcatttagcataacgtttttgaggctcatccatgttgtagtactccatgccatgttgtgggctacataatattccattgtatggatataccacattttgcttatcagttaatggacatttaggttttgtctactttttggcattaatagtgctgctgtgaacaatcatgtacaagtctttgtatcagagccacttttgataaaatagtttctaaaacatttcatcttgatttttattaaggtgatatgtatgttacttaacagctgtataatacacatttgcatgcattaggaagttttttttgggttttattcatcctgtagtgatgtatctgtgacctcaacgagtaggcacttctgtactgtactggtttcttaaagtttcttttatcccgcccccacccccaacctcagcctcaagtatgtaacaccatgcctggctaatttttgattttttttttttttttttgagacagagtctcgctttgtcgccaggctggagtacaggggcgtgatctcggctcactgcaacctctgccttctgggttcaagcgattctcctgcctcagcctcccaagtagctgggcctacaagtgcatgccaccacgccaagctaatttttgtatttttagtagagatggggtttcatcatgttggccaggatggtcttatctgttgaccttgtgatctacctgccttggcctcccaaagtgctgggattacaggcgtgagccactgcgcccagccatttttgattttttgtagagatggggtctcattgtgttgcccaggctgattaaagtttctataaggtatgtttattcttaaggatatctactctaacacctgtaaatgtagggtgatcaattagtaaattaataaatctgaatcaattaataaatctgtttaaaat

SEQ ID NO: 353761 - DNA, 962 bp, Homo sapiens
tgcgcatgcgcagtcccccttgaacgcacctcaggatggcccgtactttggaaccactagcaaagaagatctttaaaggagtttggtagccgaacttgtaggcgtttttggagcatattttttgtttagcaagatgcacacaagccaagatttcaggcaaacaatgagcaagaaatatcccttcatcttggaagtttattacaaatccactgagaagtctggaatgtatggaatcagagagctagatcaaaaaacatggttgaacagcaaaaattagatccagtcatcacgttcagcctcccatctaagctgtttgagacctttgagagaagaagaaaagatgagtgtactaccacactgtagactcttggtggtcccacagaacatgctgctgagtcacaggaacttctagcctgccttggcctgtggtttcccacccactatacaaacccactgcttgtttgttgcttttcttctcatatttattgtcaaagataaatgtttcaaaaagaaatgactaaggaaggaaaagaaacaaatgctctaaagattttctctccccaagcacttttactggtgaaataaaaaccagtaacaatcaatatgtaaaaacggcccacttccctaaaaaaaagtaatttttgtagtctgcaaggttttttttttttttgctttagtctaaatacttgttaatcttacatgttctcctgagagaagaaaaagccattcctttcaggttgtaaagtaccatgaaaaggtctttcaaaaatattcctatcagccactgcgcccagccatttttgattttttgtagagatggggtctcattgtgttgcccaggctgattaaagtttctataaggtatgtttattcttaaggatatctactctaacacctgtaaatgtagggtgatcaattagtaaattaataaatctgaatcaattaataaatctgtttaaaat

SEQ ID NO: 353762 - DNA, 1586 bp, Homo sapiens
tgcgcatgcgcagtcccccttgaacgcacctcaggatggcccgtactttggaaccactagcaaagaagatctttaaaggagtttggtagccgaacttgtaggcgtttttggagcatattttttgtttagcaagatgcacacaagccaagatttcaggcaaacaatgagcaagaaatatcccttcatcttggaagtttattacaaatccactgagaagtctggaatgtatggaatcagagagctagatcaaaaaacatggttgaacagcaaaaattagatccagtcatcacgttcagcctcccatctaagctgtttgagacctttgagagaagaagaaaagatgagtgtactaccacactgtagactcttggtggtcccacagaacatgctgctgagtcacaggaacttctagcctgccttggcctgtggtttcccacccactatacaaacccactgcttgtttgttgcttttcttctcatatttattgtcaaagataaatgtttcaaaaagaaatgactaaggaaggaaaagaaacaaatgctctaaagattttctctccccaagcacttttactggtgaaataaaaaccagtaacaatcaatatgtaaaaacggcccacttccctaaaaaaaagtaatttttgtagtctgcaaggttttttttttttttgctttagtctaaatacttgttaatcttacatgttctcctgagagaagaaaaagccattcctttcaggttgtaaagtaccatgaaaaggtctttcaaaaatattcctatcagccaggcatggtggctcacaccagtaatctcagcactttgggaggccgaggcaggcgggtcacttgaggtcaggagttcgagaccagcctggccaacatggtgaaaccctgtttctactaaaaatacaaaaattagctgggcgtggtggtgcatgcctgtaatcccagctacttgggaggctaaggtaggagaattacttgaacatgggagatggaggttgcagtgagccaagatcatgccactgcattccaacctgggcaagggagtgagacgctgtctcaaaaaaaaaaaaaagaaaatttcctatcttctgaagttccaagccaaagctatttttaaaacatcaataaaaaaatttaagttacttacttgcattatctttgttagccatggcattcatgccaatgttatcaaacttggatcccatattttcatccaatagatggccaaacttttaaacaaaaacgataaatttattagaaaactaaaaataatgtagaatagctagcttgttaaaacagtacattagccttacctcttcagcagatacaaataggctggaatcatttaagtttcttttcttttttccttggcctcccaaagtgctgggattacaggcgtgagccactgcgcccagccatttttgattttttgtagagatggggtctcattgtgttgcccaggctgattaaagtttctataaggtatgtttattcttaaggatatctactctaacacctgtaaatgtagggtgatcaattagtaaattaataaatctgaatcaattaataaatctgtttaaaat

SEQ ID NO: 353763 - DNA, 3045 bp, Homo sapiens
  misc_feature (5)..(5): n is a, c, g, or t
  misc_feature (22)..(22): n is a, c, g, or t
  misc_feature (28)..(28): n is a, c, g, or t
  misc_feature (63)..(63): n is a, c, g, or t
gcagncccccttgaacgcaccncagganggtttgttttttggaaccaccagcaaagaagaacntttagcaagatgcacacaagccaagatttcaggcaaacaatgagcaagaaatatcccttcatcttggaagtttattacaaatccactgagaagtctggaatgtatggaatcagagagctagatcaaaaaacatggttgaacagcaaaaattagatccagtcatcacgttcagcctcccatctaagctgtttgagacctttgagagaagaagaaaagatgagtgtactaccacactgtagactcttggtggtcccacagaacatgctgctgagtcacaggaacttctagcctgccttggcctgtggtttcccacccactatacaaacccactgcttgtttgttgcttttcttctcatatttattgtcaaagataaatgtttcaaaaagaaatgactaaggaaggaaaagaaacaaatgctctaaagattttctctccccaagcacttttactggtgaaataaaaaccagtaacaatcaatatgtaaaaacggcccacttccctaaaaaaaagtaatttttgtagtctgcaaggttttttttttttttgctttagtctaaatacttgttaatcttacatgttctcctgagagaagaaaaagccattcctttcaggttgtaaagtaccatgaaaaggtctttcaaaaatattcctatcagccaggcatggtggctcacaccagtaatctcagcactttgggaggccgaggcaggcgggtcacttgaggtcaggagttcgagaccagcctggccaacatggtgaaaccctgtttctactaaaaatacaaaaattagctgggcgtggtggtgcatgcctgtaatcccagctacttgggaggctaaggtaggagaattacttgaacatgggagatggaggttgcagtgagccaagatcatgccactgcattccaacctgggcaagggagtgagacgctgtctcaaaaaaaaaaaaaagaaaatttcctatcttctgaagttccaagccaaagctatttttaaaacatcaataaaaaaatttaagttacttacttgcattatctttgttagccatggcattcatgccaatgttatcaaacttggatcccatattttcatccaatagatggccaaacttttaaacaaaaacgataaatttattagaaaactaaaaataatgtagaatagctagcttgttaaaacagtacattagccttacctcttcagcagatacaaataggctggaatcatttaagtttcttttcttttttcttggccctaaaaaaaattgtaagtctacattattcaattataaatctaatgattttagaaaaatgcaatgcaacatgattttattttaaaaattatacttgggtaaaaacaattgcaataatcttctggcaccattgggtagctggcatttaaatataatttaagagttagtatataatattttcaaaaagctaacaacatcctaatagaactgttcagatgacaagagtgtcttcttgcttttcagatttggccactgatcgaagttttacccataagggaaataacatagtatcaagcaatagtaaaattatcagtttgacatggatgggttttgaaatacttaagacacaacataaaatttagttcaggggtctttagattgtaaagaaattgactgaaagtatgtttattatgctataaatgaagttgtttataacagcgaaaaaggttctcctttaaaaaaaaaacttatctgtagtactgaatatataaacttttcctgaaacaattattcaaactctgcatctttgatatcaatgtctctagcagtagtagagccatattttaaaaagagctttactaaatacagatcataacattcagctgttttaagtgtattaacgcatttgggtaaatttacagacttgttcaaccacaaccacagtctgattttagaacatttccatcaacttcaaagatccctggtgccatttgtagtcctccaacccatctccgatctatcttgtttctatgacttgccttttctggctatttcatataaatgggatcatatgacatgtggtttcctatatctgacttttttcatttagcataacgtttttgaggctcatccatgttgtagtactccatgccatgttgtgggctacataatattccattgtatggatataccacattttgcttatcagttaatggacatttaggttttgtctactttttggcattaatagtgctgctgtgaacaatcatgtacaagtctttgtatcagagccacttttgataaaatagtttctaaaacatttcatcttgatttttattaaggtgatatgtatgttacttaacagctgtataatacacatttgcatgcattaggaagttttttttgggttttattcatcctgtagtgatgtatctgtgacctcaacgagtaggcacttctgtactgtactggtttcttaaagtttcttttatcccgcccccacccccaacctcagcctcaagtatgtaacaccatgcctggctaatttttgattttttttttttttttttgagacagagtctcgctttgtcgccaggctggagtacaggggcgtgatctcggctcactgcaacctctgccttctgggttcaagcgattctcctgcctcagcctcccaagtagctgggcctacaagtgcatgccaccacgccaagctaatttttgtatttttagtagagatggggtttcatcatgttggccaggatggtcttatctgttgaccttgtgatctacctgccttggcctcccaaagtgctgggattacaggcgtgagccactgcgcccagccatttttgattttttgtagagatggggtctcattgtgttgcccaggctgattaaagtttctataaggtatgtttattcttaaggatatctactctaacacctgtaaatgtagggtgatcaattagtaaattaataaatctgaatcaattaataaatctgtttaaaat

SEQ ID NO: 353764 - DNA, 3793 bp, Homo sapiens
tgcgcatgcgcagtcccccttgaacgcacctcaggatggcccgtactttggaaccactagcaaagaagatctttaaaggagtttggtagccgaacttgtaggcgtttttggagcatattttttgtttagcaagatgcacacaagccaagatttcaggcaaacaatgagcaagaaatatcccttcatcttggaagaggtatgtttttccttaagtaaaaataagtataaaacaacttcttcaggtaacctataaattatgtagtaatttctttacaaggaatttctaacaatactattcacatgtattttagttcttctgagactaaattctcatctattctagtgagaggagaattaggtaatgggctggattctgaattcttctagtggttaagaatgtaaactctggaatcattcatatatgaggtgatagaatcaaaccacagtttaaacctttggttttaaaagatcagtttcatctcaggtttgctaacttcttggagctgtctctttctctgtcaagtagataaagactgaacaagatgacatcatgtagttagacgaaatagtgctcattacaatgatcagagatgccaggacttatatgtgaagtctgtaatcctactgtcctctttttcattttgttatgtagcaatatggaaaaaagaagttgtttttttcaatacatttaattttaacaatgcttccacatgactttataaatgagagctatttttatttatagtttattacaaatccactgagaagtctggaatgtatggaatcagagagctagatcaaaaaacatggttgaacagcaaaaattagatgtaagtagaattttaatctataatttacattaataactcatttcctttgttttttagttttttgagtggttttaatcctcttctttttaaaatgtttctttttcttgatgatactttttgcatctctgttgtgtagccagtcatcacgttcagcctcccatctaagctgtttgagacctttgagagaagaagaaaagatgagtgtactaccacactgtagactcttggtggtcccacagaacatgctgctgagtcacaggaacttctagcctgccttggcctgtggtttcccacccactatacaaacccactgcttgtttgttgcttttcttctcatatttattgtcaaagataaatgtttcaaaaagaaatgactaaggaaggaaaagaaacaaatgctctaaagattttctctccccaagcacttttactggtgaaataaaaaccagtaacaatcaatatgtaaaaacggcccacttccctaaaaaaaagtaatttttgtagtctgcaaggttttttttttttttgctttagtctaaatacttgttaatcttacatgttctcctgagagaagaaaaagccattcctttcaggttgtaaagtaccatgaaaaggtctttcaaaaatattcctatcagccaggcatggtggctcacaccagtaatctcagcactttgggaggccgaggcaggcgggtcacttgaggtcaggagttcgagaccagcctggccaacatggtgaaaccctgtttctactaaaaatacaaaaattagctgggcgtggtggtgcatgcctgtaatcccagctacttgggaggctaaggtaggagaattacttgaacatgggagatggaggttgcagtgagccaagatcatgccactgcattccaacctgggcaagggagtgagacgctgtctcaaaaaaaaaaaaaagaaaatttcctatcttctgaagttccaagccaaagctatttttaaaacatcaataaaaaaatttaagttacttacttgcattatctttgttagccatggcattcatgccaatgttatcaaacttggatcccatattttcatccaatagatggccaaacttttaaacaaaaacgataaatttattagaaaactaaaaataatgtagaatagctagcttgttaaaacagtacattagccttacctcttcagcagatacaaataggctggaatcatttaagtttcttttcttttttcttggccctaaaaaaaattgtaagtctacattattcaattataaatctaatgattttagaaaaatgcaatgcaacatgattttattttaaaaattatacttgggtaaaaacaattgcaataatcttctggcaccattgggtagctggcatttaaatataatttaagagttagtatataatattttcaaaaagctaacaacatcctaatagaactgttcagatgacaagagtgtcttcttgcttttcagatttggccactgatcgaagttttacccataagggaaataacatagtatcaagcaatagtaaaattatcagtttgacatggatgggttttgaaatacttaagacacaacataaaatttagttcaggggtctttagattgtaaagaaattgactgaaagtatgtttattatgctataaatgaagttgtttataacagcgaaaaaggttctcctttaaaaaaaaaacttatctgtagtactgaatatataaacttttcctgaaacaattattcaaactctgcatctttgatatcaatgtctctagcagtagtagagccatattttaaaaagagctttactaaatacagatcataacattcagctgttttaagtgtattaacgcatttgggtaaatttacagacttgttcaaccacaaccacagtctgattttagaacatttccatcaacttcaaagatccctggtgccatttgtagtcctccaacccatctccgatctatcttgtttctatgacttgccttttctggctatttcatataaatgggatcatatgacatgtggtttcctatatctgacttttttcatttagcataacgtttttgaggctcatccatgttgtagtactccatgccatgttgtgggctacataatattccattgtatggatataccacattttgcttatcagttaatggacatttaggttttgtctactttttggcattaatagtgctgctgtgaacaatcatgtacaagtctttgtatcagagccacttttgataaaatagtttctaaaacatttcatcttgatttttattaaggtgatatgtatgttacttaacagctgtataatacacatttgcatgcattaggaagttttttttgggttttattcatcctgtagtgatgtatctgtgacctcaacgagtaggcacttctgtactgtactggtttcttaaagtttcttttatcccgcccccacccccaacctcagcctcaagtatgtaacaccatgcctggctaatttttgattttttttttttttttttgagacagagtctcgctttgtcgccaggctggagtacaggggcgtgatctcggctcactgcaacctctgccttctgggttcaagcgattctcctgcctcagcctcccaagtagctgggcctacaagtgcatgccaccacgccaagctaatttttgtatttttagtagagatggggtttcatcatgttggccaggatggtcttatctgttgaccttgtgatctacctgccttggcctcccaaagtgctgggattacaggcgtgagccactgcgcccagccatttttgattttttgtagagatggggtctcattgtgttgcccaggctgattaaagtttctataaggtatgtttattcttaaggatatctactctaacacctgtaaatgtagggtgatcaattagtaaattaataaatctgaatcaattaataaatctgtttaaaat

SEQ ID NO: 353765 - DNA, 999 bp, Homo sapiens
tgcgcatgcgcagtcccccttgaacgcacctcaggatggcccgtactttggaaccactagcaaagaagatctttaaaggagtttggtagccgaacttgtaggcgtttttggagcatattttttgtttagcaagatgcacacaagccaagatttcaggcaaacaatgagcaagaaatatcccttcatcttggaagtttattacaaatccactgagaagtctggaatgtatggaatcagagagctagatcaaaaaacatggttgaacagcaaaaattagatccagtcatcacgttcagcctcccatctaagctgtttgagacctttgagagaagaagaaaagatgagtgtactaccacactgtagactcttggtggtcccacagaacatgctgctgagtcacaggaacttctagcctgccttggcctgtggtttcccacccactatacaaacccactgcttgtttgttgcttttcttctcatatttattgtcaaagataaatgtttcaaaaagaaatgactaaggaaggaaaagaaacaaatgctctaaagattttctctccccaagcacttttactggtgaaataaaaaccagtaacaatcaatatgtaaaaacggcccacttccctaaaaaaaagtaatttttgtagtctgcaaggttttttttttttttgctttagtctaaatacttgttaatcttacatgttctcctgagagaagaaaaagccattcctttcaggttgtaaagtaccatgaaaaggtctttcaaaaatattcctatcagccttggcctcccaaagtgctgggattacaggcgtgagccactgcgcccagccatttttgattttttgtagagatggggtctcattgtgttgcccaggctgattaaagtttctataaggtatgtttattcttaaggatatctactctaacacctgtaaatgtagggtgatcaattagtaaattaataaatctgaatcaattaataaatctgtttaaaat

SEQ ID NO: 353766 - DNA, 1920 bp, Homo sapiens
cctcaggcattgaaaaggggtcggaagtgaatggagtaaacacctgacagcagcgagctgggattgagaacaaaagagcacacacaggacaatagaaaaatctgaaaaacaagtggttctcctcttctggactttgaggttataaggaggctgactaaaaacttgggtttacattaatgtcttcagatggcccgtactttggaaccactagcaaagaagatctttaaaggagtttggtagccgaacttgtaggcgtttttggagcatattttttgtttagcaagatgcacacaagccaagatttcaggcaaacaatgagcaagaaatatcccttcatcttggaagtttattacaaatccactgagaagtctggaatgtatggaatcagagagctagatcaaaaaacatggttgaacagcaaaaattagatatttggccactgatcgaagttttacccataagggaaataacatagtatcaagcaatagtaaaattatcagtttgacatggatgggttttgaaatacttaagacacaacataaaatttagttcaggggtctttagattgtaaagaaattgactgaaagtatgtttattatgctataaatgaagttgtttataacagcgaaaaaggttctcctttaaaaaaaaaacttatctgtagtactgaatatataaacttttcctgaaacaattattcaaactctgcatctttgatatcaatgtctctagcagtagtagagccatattttaaaaagagctttactaaatacagatcataacattcagctgttttaagtgtattaacgcatttgggtaaatttacagacttgttcaaccacaaccacagtctgattttagaacatttccatcaacttcaaagatccctggtgccatttgtagtcctccaacccatctccgatctatcttgtttctatgacttgccttttctggctatttcatataaatgggatcatatgacatgtggtttcctatatctgacttttttcatttagcataacgtttttgaggctcatccatgttgtagtactccatgccatgttgtgggctacataatattccattgtatggatataccacattttgcttatcagttaatggacatttaggttttgtctactttttggcattaatagtgctgctgtgaacaatcatgtacaagtctttgtatcagagccacttttgataaaatagtttctaaaacatttcatcttgatttttattaaggtgatatgtatgttacttaacagctgtataatacacatttgcatgcattaggaagttttttttgggttttattcatcctgtagtgatgtatctgtgacctcaacgagtaggcacttctgtactgtactggtttcttaaagtttcttttatcccgcccccacccccaacctcagcctcaagtatgtaacaccatgcctggctaatttttgattttttttttttttttttgagacagagtctcgctttgtcgccaggctggagtacaggggcgtgatctcggctcactgcaacctctgccttctgggttcaagcgattctcctgcctcagcctcccaagtagctgggcctacaagtgcatgccaccacgccaagctaatttttgtatttttagtagagatggggtttcatcatgttggccaggatggtcttatctgttgaccttgtgatctacctgccttggcctcccaaagtgctgggattacaggcgtgagccactgcgcccagccatttttgattttttgtagagatggggtctcattgtgttgcccaggctgattaaagtttctataaggtatgtttattcttaaggatatctactctaacacctgtaaatgtagggtgatcaattagtaaattaataaatctgaatcaattaataaatctgtttaaaat

SEQ ID NO: 353767 - DNA, 1769 bp, Homo sapiens
tgcgcatgcgcagtcccccttgaacgcacctcaggatggcccgtactttggaaccactagcaaagaagatctttaaaggagtttggtagccgaacttgtaggcgtttttggagcatattttttgtttagcaagatgcacacaagccaagatttcaggcaaacaatgagcaagaaatatcccttcatcttggaagtttattacaaatccactgagaagtctggaatgtatggaatcagagagctagatcaaaaaacatggttgaacagcaaaaattagatatttggccactgatcgaagttttacccataagggaaataacatagtatcaagcaatagtaaaattatcagtttgacatggatgggttttgaaatacttaagacacaacataaaatttagttcaggggtctttagattgtaaagaaattgactgaaagtatgtttattatgctataaatgaagttgtttataacagcgaaaaaggttctcctttaaaaaaaaaacttatctgtagtactgaatatataaacttttcctgaaacaattattcaaactctgcatctttgatatcaatgtctctagcagtagtagagccatattttaaaaagagctttactaaatacagatcataacattcagctgttttaagtgtattaacgcatttgggtaaatttacagacttgttcaaccacaaccacagtctgattttagaacatttccatcaacttcaaagatccctggtgccatttgtagtcctccaacccatctccgatctatcttgtttctatgacttgccttttctggctatttcatataaatgggatcatatgacatgtggtttcctatatctgacttttttcatttagcataacgtttttgaggctcatccatgttgtagtactccatgccatgttgtgggctacataatattccattgtatggatataccacattttgcttatcagttaatggacatttaggttttgtctactttttggcattaatagtgctgctgtgaacaatcatgtacaagtctttgtatcagagccacttttgataaaatagtttctaaaacatttcatcttgatttttattaaggtgatatgtatgttacttaacagctgtataatacacatttgcatgcattaggaagttttttttgggttttattcatcctgtagtgatgtatctgtgacctcaacgagtaggcacttctgtactgtactggtttcttaaagtttcttttatcccgcccccacccccaacctcagcctcaagtatgtaacaccatgcctggctaatttttgattttttttttttttttttgagacagagtctcgctttgtcgccaggctggagtacaggggcgtgatctcggctcactgcaacctctgccttctgggttcaagcgattctcctgcctcagcctcccaagtagctgggcctacaagtgcatgccaccacgccaagctaatttttgtatttttagtagagatggggtttcatcatgttggccaggatggtcttatctgttgaccttgtgatctacctgccttggcctcccaaagtgctgggattacaggcgtgagccactgcgcccagccatttttgattttttgtagagatggggtctcattgtgttgcccaggctgattaaagtttctataaggtatgtttattcttaaggatatctactctaacacctgtaaatgtagggtgatcaattagtaaattaataaatctgaatcaattaataaatctgtttaaaat

SEQ ID NO: 353768 - DNA, 934 bp, Homo sapiens
tgcgcatgcgcagtcccccttgaacgcacctcaggatggcccgtactttggaaccactagcaaagaagatctttaaaggagtttggtagccgaacttgtaggcgtttttggagcatattttttgtttagcaagatgcacacaagccaagatttcaggcaaacaatgagcaagaaatatcccttcatcttggaagtttattacaaatccactgagaagtctggaatgtatggaatcagagagctagatcaaaaaacatggttgaacagcaaaaattagatccagtcatcacgttcagcctcccatctaagctgtttgagacctttgagagaagaagaaaagatgagtgtactaccacactgtagactcttggtggtcccacagaacatgctgctgagtcacaggaacttctagcctgccttggcctgtggtttcccacccactatacaaacccactgcttgtttgttgcttttcttctcatatttattgtcaaagataaatgtttcaaaaagaaatgactaaggaaggaaaagaaacaaatgctctaaagattttctctccccaagcacttttactggtgaaataaaaaccagtaacaatcaatatgtaaaaacggcccacttccctaaaaaaaactaatttttgtatttttagtagagatggggtttcatcatgttggccaggatggtcttatctgttgaccttgtgatctacctgccttggcctcccaaagtgctgggattacaggcgtgagccactgcgcccagccatttttgattttttgtagagatggggtctcattgtgttgcccaggctgattaaagtttctataaggtatgtttattcttaaggatatctactctaacacctgtaaatgtagggtgatcaattagtaaattaataaatctgaatcaattaataaatctgtttaaaat

SEQ ID NO: 353769 - DNA, 867 bp, Homo sapiens
cctcaggcattgaaaaggggtcggaagtgaatggagtaaacacctgacagcagcgagctgggattgagaacaaaagagcacacacaggacaatagaaaaatctgaaaaacaagtggttctcctcttctggactttgaggttataaggaggctgactaaaaacttgggtttacattaatgtcttcagatggcccgtactttggaaccactagcaaagaagatctttaaaggagtttggtagccgaacttgtaggcgtttttggagcatattttttgtttagcaagatgcacacaagccaagatttcaggcaaacaatgagcaagaaatatcccttcatcttggaagtttattacaaatccactgagaagtctggaatgtatggaatcagagagctagatcaaaaaacatggttgaacagcaaaaattagatagtctcgctttgtcgccaggctggagtacaggggcgtgatctcggctcactgcaacctctgccttctgggttcaagcgattctcctgcctcagcctcccaagtagctgggcctacaagtgcatgccaccacgccaagctaatttttgtatttttagtagagatggggtttcatcatgttggccaggatggtcttatctgttgaccttgtgatctacctgccttggcctcccaaagtgctgggattacaggcgtgagccactgcgcccagccatttttgattttttgtagagatggggtctcattgtgttgcccaggctgattaaagtttctataaggtatgtttattcttaaggatatctactctaacacctgtaaatgtagggtgatcaattagtaaattaataaatctgaatcaattaataaatctgtttaaaat

SEQ ID NO: 353770 - DNA, 819 bp, Homo sapiens
tgcgcatgcgcagtcccccttgaacgcacctcagatttcaggcaaacaatgagcaagaaatatcccttcatcttggaagtttattacaaatccactgagaagtctggaatgtatggaatcagagagctagatcaaaaaacatggttgaacagcaaaaattagatccagtcatcacgttcagcctcccatctaagctgtttgagacctttgagagaagaagaaaagatgagtgtactaccacactgtagactcttggtggtcccacagaacatgctgctgagtcacaggaacttctagcctgccttggcctgtggtttcccacccactatacaaacccactgcttgtttgttgcttttcttctcatatttattgtcaaagataaatgtttcaaaaagaaatgactaaggaaggaaaagaaacaaatgctctaaagattttctctccccaagcacttttactggtgaaataaaaaccagtaacaatcaatatgtaaaaacggcccacttccctaaaaaaaactaatttttgtatttttagtagagatggggtttcatcatgttggccaggatggtcttatctgttgaccttgtgatctacctgccttggcctcccaaagtgctgggattacaggcgtgagccactgcgcccagccatttttgattttttgtagagatggggtctcattgtgttgcccaggctgattaaagtttctataaggtatgtttattcttaaggatatctactctaacacctgtaaatgtagggtgatcaattagtaaattaataaatctgaatcaattaataaatctgtttaaaat

SEQ ID NO: 353771 - DNA, 1053 bp, Homo sapiens
  misc_feature (871)..(871): n is a, c, g, or t
cctcaggcattgaaaaggggtcggaagtgaatggagtaaacacctgacagcagcgagctgggattgagaacaaaagagcacacacaggacaatagaaaaatctgaaaaacaagtggttctcctcttctggactttgaggttataaggaggctgactaaaaacttgggtttacattaatgtcttcagatggcccgtactttggaaccactagcaaagaagatctttaaaggagtttggtagccgaacttgtaggcgtttttggagcatattttttgtttagcaagatgcacacaagccaagatttcaggcaaacaatgagcaagaaatatcccttcatcttggaagtttattacaaatccactgagaagtctggaatgtatggaatcagagagctagatcaaaaaacatggttgaacagcaaaaattagatagtctcgctttgtcgccaggctggagtacaggggcgtgatctcggctcactgcaacctctgccttctgggttcaagcgattctcctgcctcagcctcccaagtagctgggcctacaagtgcatgccaccacgccaagctaatttttgtatttttagtagagatggggtttcatcatgttggccaggatggtcttatctgttgaccttgtgatctacctgccttggcctcccaaagtgctgggattacaggcgtgagccactgcgcccagccatttttgattttttgtagagatggggtctcattgtgttgcccaggctgattaaagtttctataaggtatgtttattcttaaggatatctactctaacacctgtaaatgtagggtgatcaattagtaaattaataaatctgaatcaattaataaatctgtttaaaatttanaaacagcagaacaagacaagaacacgtgcggagagtacaaagtacggggcgcgaaaaacaagagctatcaaggggacatgtgcacaagggtaccctgacccggttgctggcgacacagggggagacactgcgggcccccatagaggcagaatactcggaagccggtacgatggagcgacaga

SEQ ID NO: 353772 - DNA, 1022 bp, Homo sapiens
acattttcttaatccagtctatgattgttggaaatttgggttggttccaagtctttgctattgttaatagtgctgcaataaacatacgtgtgcatgcgtctttatagcagcatgatttatagtcctttgggtatataaccagtaatgggatggctgggtcaaatggtatttctaattctagatcccggaggaatcacctcactgacttccacaatggttgaactagtttccagtcccaccaacagtgcaaaagtgttcccatttttccacatcctttccagcacctgttgtttcctgactttttaatgatattgttttgtgaggccttcgtggtattgatttttattaaggtgatatgtatgttacttaacagctgtataatacacatttgcatgcattaggaagttttttttgggttttattcatcctgtagtgatgtatctgtgacctcaacgagtaggcacttctgtactgtactggtttcttaaagtttcttttatcccgcccccacccccaacctcagcctcaagtatgtaacaccatgcctggctaatttttgattttttttttttttttttgagacagagtctcgctttgtcgccaggctggagtacaggggcgtgatctcggctcactgcaacctctgccttctgggttcaagcgattctcctgcctcagcctcccaagtagctgggcctacaagtgcatgccaccacgccaagctaatttttgtatttttagtagagatggggtttcatcatgttggccaggatggtcttatctgttgaccttgtgatctacctgccttggcctcccaaagtgctgggattacaggcgtgagccactgcgcccagccatttttgattttttgtagagatggggtctcattgtgttgcccaggctgattaaagtttctataaggtatgtttattcttaaggatatctactctaacacctgtaaatgtagggtgatcaattagtaaattaataaatctgaatcaattaataaatctgtttaaaat

SEQ ID NO: 353773 - DNA, 735 bp, Homo sapiens
cctcaggcattgaaaaggggtcggaagtgaatggagtaaacacctgacagcagcgagctgggattgagaacaaaagagcacacacaggacaatagaaaaatctgaaaaacaagtggttctcctcttctggactttgaggttataaggaggctgactaaaaacttgggtttacattaatgtcttcagatggcccgtactttggaaccactagcaaagaagatctttaaaggagtttggtagccgaacttgtaggcgtttttggagcatattttttgtttagcaagatgcacacaagccaagatttcaggcaaacaatgagcaagaaatatcccttcatcttggaagtttattacaaatccactgagaagtctggaatgtatggaatcagagagctagatcaaaaaacatggttgaacagcaaaaattagatccagtcatcacgttcagcctcccatctaagctgtttgagacctttgagagaagaagaaaagatgagtgtactaccacactgtagactccttggcctcccaaagtgctgggattacaggcgtgagccactgcgcccagccatttttgattttttgtagagatggggtctcattgtgttgcccaggctgattaaagtttctataaggtatgtttattcttaaggatatctactctaacacctgtaaatgtagggtgatcaattagtaaattaataaatctgaatcaattaataaatctgtttaaaat

SEQ ID NO: 353774 - DNA, 789 bp, Homo sapiens
cctcaggcattgaaaaggggtcggaagtgaatggagtaaacacctgacagcagcgagctgggattgagaacaaaagagcacacacaggacaatagaaaaatctgaaaaacaagtggttctcctcttctggactttgaggttataaggaggctgactaaaaacttgggtttacattaatgtcttcagatggcccgtactttggaaccactagcaaagaagatctttaaaggagtttggtagccgaacttgtaggcgtttttggagcatattttttgtttagcaagatgcacacaagccaagatttcaggcaaacaatgagcaagaaatatcccttcatcttggaagtttattacaaatccactgagaagtctggaatgtatggaatcagagagctagatcaaaaaacatggttgaacagcaaaaattagatagtctcgctttgtcgccaggctggagtacaggggcgtgatctcggctcactgcaacctctgccttctgggttcaagcgattctcctgcctcagcctcccaagtagctgggcctacaagtgcatgccaccacgccaagctaatttttgtatttttagtagagatggggccaacatggtgaaaccccgtctctactaaaaatacaaaaattagctgggcgtggtggtgggcgcctgtaatcccagctacttgggaggctgagccaggagaatggcttgaacccggaaggcggacgttacagtgagccacaatcatgccactgcactccagcctggtgacagaggaagactctgtctcaaaa

SEQ ID NO: 353775 - DNA, 584 bp, Homo sapiens
gcggccgcctactactactaaattcgcggccgcgtcgaccttgaacgcacctcaggatggcccgtactttggaaccactagcaaagaagatctttaaaggagtttggtagccgaacttgtaggcgtttttggagcatattttttgtttagcaagatgcacacaagccaagatttcaggcaaacaatgagcaagaaatatcccttcatcttggaagtttattacaaatccactgagaagtctggaatgtatggaatcagagagctagatcaaaaaacatggttgaacagcaaaaattagatccttggcctcccaaagtgctgggattacaggcgtgagccactgcgcccagccatttttgattttttgtagagatggggtctcattgtgttgcccaggctgattaaagtttctataaggtatgtttattcttaaggatatctactctaacacctgtaaatgtagggtgatcaattagtaaattaataaatctgaatcaattaataaatctgtttaaaattccttgcctctttttgtttcagtcaattctgttgggtattctttaatctgcatccaaaactattat

SEQ ID NO: 353776 - DNA, 563 bp, Homo sapiens
cctcaggcattgaaaaggggtcggaagtgaatggagtaaacacctgacagcagcgagctgggattgagaacaaaagagcacacacaggacaatagaaaaatctgaaaaacaagtggttctcctcttctggactttgaggttataaggaggctgactaaaaacttgggtttacattaatgtcttcagatggcccgtactttggaaccactagcaaagaagatctttaaaggagtttggtagccgaacttgtaggcgtttttggagcatattttttgtttagcaagatgcacacaagccaagatttcaggcaaacaatgagcaagaaatatcccttcatcttggaagccttggcctcccaaagtgctgggattacaggcgtgagccactgcgcccagccatttttgattttttgtagagatggggtctcattgtgttgcccaggctgattaaagtttctataaggtatgtttattcttaaggatatctactctaacacctgtaaatgtagggtgatcaattagtaaattaataaatctgaatcaattaataaatctgtttaaaat

SEQ ID NO: 353777 - DNA, 435 bp, Homo sapiens
cctcaggcattgaaaaggggtcggaagtgaatggagtaaacacctgacagcagcgagctgggattgagaacaaaagagcacacacaggacaatagaaaaatctgaaaaacaagtggttctcctcttctggactttgaggttataaggaggctgactaaaaacttgggtttacattaatgtcttcagatggcccgtactttggaaccactagcaaagaagatctttaaaggagtttggtagccgaacttgtaggcgtttttggagcatattttttgtttagcaagatgcacacaagccaagatttcaggcaaacaatgagcaagaaatatcccttcatcttggaagaggtatgtttttccttaagtaaaaataagtataaaacaacccttcatcttggaaggtatgttttatacttatttttacttaaggaaaaac

SEQ ID NO: 353778 - DNA, 154 bp, Homo sapiens
gatctttaaaggagtttggtagccgaacttgtaggcgtttttggagcatattttttgtttagcaagatgcacacaagccaaggtaatcataattcagaagttaatgctttctaaaggggtatagttttgctaatccattttatgtgttaaatgg

SEQ ID NO: 353779 - DNA, 2164 bp, Homo sapiens
tccccaacgatggtcctcagctccaaggaagaggagcagcagcggctgatcaatgacctcacagcacagagagcgcgcctgcaaacagaatcaggtgaatattcacgccagctagatgaaaaggacacactagtttcacagctctcgaggggcaaacaagcctttactcaacagattgaggaactgaaaaggcaacttgaagaggagataaaggccaagagtgccctggcacatgccctgcagtcctcccgccatgactgtgacctgctgcgggaacagtatgaggaggagcaggaagccaaggccgagctacagagagcaatgtccaaggccaacagtgaggttgcccagtggaggaccaaatatgagacagatgccatccagcgcacagaggagctggaggaggccaagaagaagctggctcagcgtctgcaggatgctgaggaacatgtagaagctgtgaatgccaaatgtgcttcccttgagaagacgaagcagaggctccagaatgaagttgaggacctcatgattgatgttgagaggacaaatgctgcctgtgccgccctggacaaaaagcaaaggaactttgataagatcctggcagaatggaaacagaagtgtgaagaaactcatgctgaacttgaagcttctcaaaaggaatcccgctcactcagcacagaactatttaagattaagaatgcttatgaggaatctttagaccaacttgaaaccttgaaacgggaaaataagaatctgcagcaggagatttctgatctcactgaacagattgcagaaggaggaaagcgcatccatgaactggaaaaaataaagaagcaagttgagcaagaaaagtctgaacttcaggctgccttagaggaggcagaggcatctcttgaacatgaagagggaaagatcctgcgcatccagcttgagttgaaccaagtcaagtctgaggttgataggaaaattgctgaaaaagatgaggaaattgaccagatgaagagaaaccacattagaatcgtggagtccatgcagagcacactggatgctgagatcaggagcaggaatgatgccattaggctcaagaagaagatggagggagacctcaatgaaatggaaatccagctgaaccatgccaaccgcatggctgctgaggccctgaggaactataggaacacccaagccatcctcaaggatacccagctccacctagatgatgctctccggagccaagaggacctgaaggaacagctggctatggtggagcgcagagccaacctgctgcaggctgagatcgaggagctgcgggccactctggaacagacagagaggagcaggaaaatcgcagaacaggagctcctggatgccagtgagcgtgttcagctcctgcacacccagaacaccagcctgatcaacaccaagaagaagctggagacagacatttcccaaatccagggagagatggaagacatcatccaggaagcccgcaatgcagaagagaaggccaagaaggccatcactgatgctgccatgatggctgaggagctgaagaaggaacaggacaccagcgcccatctggagcggatgaagaagaacctggaacagacggtgaaggacctgcagcatcgtctggatgaggctgagcagctggccctgaagggtgggaagaagcagatccagaaactggaggccagggttcgtgaacttgaaggtgaagttgaaagtgaacagaagcgcaatgttgaagctgtcaagggtctacgcaaacatgagagaaaagtgaaggaactcacttaccaaactgaggaagaccgcaagaatattctcaggctccaggacctggtggacaaactgcaagcaaaggtgaaatcctacaagagacaagctgaagaagcggaggaacaatccaacgtcaacctctccaaattccgcaggatccagcacgagctggaggaggccgaggaacgggctgacattgctgagtcccaggtcaacaagctgagggtgaagagcagggaggttcacacaaaaatcataagtgaagagtaatttatctaactgctgaaaggtgaccaaagaaatgcacaaaatgtgaaaatctttgtcactccattttgtacttatgacttttggagataaaaaatttatctgccaaaaaaaaaaa

SEQ ID NO: 353780 - DNA, 5994 bp, Homo sapiens
ggtctctcctcataaagcttcaagttctgatccactttaaggtcgcatctctacgccagggtccttaactgggctaccatcaataacctgcagccatgagttccgactctgagatggccatttttggggaggctgctcctttcctccgaaagtctgaaagggagcgaattgaagcccagaacaagccttttgatgccaagacatcagtctttgtggtggaccctaaggagtcctttgtgaaagcaacagtgcagagcagggaaggggggaaggtgacagctaagaccgaagctggagctactgtaacagtgaaagatgaccaagtcttccccatgaaccctcccaaatatgacaagatcgaggacatggccatgatgactcatctacacgagcctgctgtgctgtacaacctcaaagagcgctacgcagcctggatgatctacacctactcaggcttgttctgtgtcactgtcaacccctacaagtggttgccagtgtataatgcagaggtggtgacagcctaccgaggcaaaaagcgccaggaggccccaccccacatcttctccatctctgacaatgcctatcagttcatgctgactgatcgggagaatcagtctatcttgatcaccggagaatctggcgcagggaagactgtgaacaccaagcgtgtcatccagtactttgcaacaattgcagttactggggagaagaagaaggaagaagttacttctggcaaaatgcaggggactctggaagatcaaatcatcagtgccaaccccctactggaggcctttggcaacgccaagaccgtgaggaatgacaactcctctcgctttggtaaattcatcaggatccacttcggtaccacagggaaactggcttctgctgatattgaaacatatcttctggagaagtctagagttactttccagctaaaggctgaaagaagctatcatattttttatcagatcatgtctaacaagaagccagatctaattgaaatgctcctgatcaccaccaacccatacgattatgccttcgtcagtcaaggggagatcacagtgcccagcattgatgaccaagaagagttgatggctacagatagtgccattgaaattctgggcttcacttcagatgaaagagtgtccatctataagctcacaggggctgtgatgcattatgggaacatgaaattcaagcaaaagcagcgtgaggagcaagctgagccagatggcactgaagttgctgacaaggcagcctatctccaaaatctgaactctgcagatctgctcaaagccctctgctaccctagggtcaaggtcggcaatgagtatgtcaccaaaggtcaaactgtgcagcaggtgtacaatgcagtgggtgctctggccaaagctgtctacgataagatgttcttgtggatggtcacccgcatcaaccagcagctggacaccaagcagcccaggcagtacttcattggggtcttggacattgctggctttgagatctttgatttcaacagcctggagcagctgtgcatcaacttcaccaatgagaaactgcaacagtttttcaaccaccacatgttcgtgctggagcaggaggagtacaagaaggaaggcattgagtggacgttcattgactttgggatggacctggctgcctgcatcgagctcatcgagaagcctatgggcatcttctccatcctggaagaggagtgcatgttccccaaggcgacagacacctccttcaagaacaagctgtatgaacaacatcttggaaaatccaataacttccagaagcccaagcctgccaaaggcaagcctgaggcccacttctctttgattcactatgctggcaccgtggactacaacattgccggctggcttgacaagaacaaggaccccctgaatgagactgtggtggggctgtaccagaagtctgcaatgaagactctggctctcctctttgttggggcaacgggagcggaagcagaggctggcggtggaaagaaaggtggtaagaagaagggttcttctttccagactgtgtctgctctcttcagggagaatttgaataagctgatgaccaacttgaggagcactcacccccactttgtgcggtgcatcatccccaatgaaactaaaactcctggtgccatggagcatgagcttgtcctgcatcagctgaggtgtaacggtgtgctggaaggcatccgcatctgcaggaaaggcttcccaagcagaatcctttatgcagacttcaaacagagatacaaggtgttaaatgcaagtgctatccctgaaggacaattcatcgatagcaagaaggcttcagagaagctcctggggtccattgacattgaccacacccagtataaatttggtcacaccaaggtctttttcaaagctggtcttctggggctcctagaggagatgcgagatgagaagctggcccagctgattacccgaacccaggccatgtgcagagggttcttggcaagagtggagtaccagaaaatggtggaaagaagagagtccatcttctgcatccagtacaatgtccgtgccttcatgaatgtcaagcactggccctggatgaaactctatcttcaagatcaagcctctgttgaaaagtgcagaaactgagaaggagatggccaccatgaaggaagaatttcagaaaaccaaagacgaacttgccaagtcagaggcaaaaaggaaggaactggaagaaaagatggtgacgctgttgaaagaaaaaaatgacttgcagctccaagttcaggctgaagccgacaggcttggctgatgcagaggaaaggtgtgaccagctaatcaaaaccaaaatccagctagaagccaaaatcaaagaggtgactgagagagctgaggatgaggaagagatcaatgctgagctgacagccaagaagaggaaactggaggatgaatgttcagaactcaagaaagacattgatgaccttgagctgacactggccaaggttgagaaggagaaacatgccacagaaaacaaggtgaaaaacctcacagaagagatggcaggtctggatgaaaccattgctaagctgaccaaggagaagaaggctctccaggaggcccaccagcagaccctggatgacctgcaggcagaggaggacaaagtcaacaccctgaccaaagctaaaatcaaacttgaacaacaagtggatgatcttgaaggatctttggaacaagaaaagaaaatccggatggatctagaaagagcaaagagaaaactagagggagacctaaaattggctcaagaatccgcaatggatatagaaaatgacaaacaacaacttgatgaaaagcttaaaaagaaagagtttgaaatgagcggtctgcaaagcaagattgaagatgaacaagcccttggtatgcagctgcagaagaaaatcaaggagttacaagcccgcattgaggagctggaggaggaaatcgaggcagagcgggcctcccgggccaaagcagagaagcagcgctctgatctctcccgggagctggaggagatcagtgagaggctggaagaagccggtggggccacctcggcccagattgagatgaacaagaagcgggaagctgagttccagaaaatgcgcagggacctggaggaggccaccctacagcatgaggccacggcggccaccctgaggaagaagcatgcagatagtgtggccgagcttggggagcagattgacaacctgcagcgagtgaagcagaagctggagaaggagaagagtgagatgaagatggagatcgatgaccttgctagtaacatggagactgtctccaaagccaagggaaaccttgaaaagatgtgccgcgctctagaagatcaactgagtgaaattaagaccaaggaagaggagcagcagcggctgatcaatgacctcacagcacagagagcgcgcctgcaaacagaatcaggtgaatattcacgccagctagatgaaaaggacacactagtttcacagctctcgaggggcaaacaagcctttactcaacagattgaggaactgaaaaggcaacttgaagaggagataaaggccaagagtgccctggcacatgccctgcagtcctcccgccatgactgtgacctgctgcgggaacagtatgaggaggagcaggaagccaaggccgagctacagagagcaatgtccaaggccaacagtgaggttgcccagtggaggaccaaatatgagacagatgccatccagcgcacagaggagctggaggaggccaagaagaagctggctcagcgtctgcaggatgctgaggaacatgtagaagctgtgaatgccaaatgtgcttcccttgagaagacgaagcagaggctccagaatgaagttgaggacctcatgattgatgttgagaggacaaatgctgcctgtgccgccctggacaaaaagcaaaggaactttgataagatcctggcagaatggaaacagaagtgtgaagaaactcatgctgaacttgaagcttctcaaaaggaatcccgctcactcagcacagaactatttaagattaagaatgcttatgaggaatctttagaccaacttgaaaccttgaaacgggaaaataagaatctgcagcaggagatttctgatctcactgaacagattgcagaaggaggaaagcgcatccatgaactggaaaaaataaagaagcaagttgagcaagaaaagtctgaacttcaggctgccttagaggaggcagaggcatctcttgaacatgaagagggaaagatcctgcgcatccagcttgagttgaaccaagtcaagtctgaggttgataggaaaattgctgaaaaagatgaggaaattgaccagatgaagagaaaccacattagaatcgtggagtccatgcagagcacactggatgctgagatcaggagcaggaatgatgccattaggctcaagaagaagatggagggagacctcaatgaaatggaaatccagctgaaccatgccaaccgcatggctgctgaggccctgaggaactataggaacacccaagccatcctcaaggatacccagctccacctagatgatgctctccggagccaagaggacctgaaggaacagctggctatggtggagcgcagagccaacctgctgcaggctgagatcgaggagctgcgggccactctggaacagacagagaggagcaggaaaatcgcagaacaggagctcctggatgccagtgagcgtgttcagctcctgcacacccagaacaccagcctgatcaacaccaagaagaagctggagacagacatttcccaaatccagggagagatggaagacatcatccaggaagcccgcaatgcagaagagaaggccaagaaggccatcactgatgctgccatgatggctgaggagctgaagaaggaacaggacaccagcgcccatctggagcggatgaagaagaacctggaacagacggtgaaggacctgcagcatcgtctggatgaggctgagcagctggccctgaagggtgggaagaagcagatccagaaactggaggccagggttcgtgaacttgaaggtgaagttgaaagtgaacagaagcgcaatgttgaagctgtcaagggtctacgcaaacatgagagaaaagtgaaggaactcacttaccaaactgaggaagaccgcaagaatattctcaggctccaggacctggtggacaaactgcaagcaaaggtgaaatcctacaagagacaagctgaagaagcggatccagcacgagctggaggaggccgaggaacgggctgacattgctgagtcccaggtcaacaagctgagggtgaagagcagggaggttcacacaaaaatcataagtgaagagtaatttatctaactgctgaaaggtgaccaaagaaatgcacaaaatgtgaaaatctttgtcactccattttgtacttatgacttttggagataaaaaatttatctgccaaaaaaaaaaa

SEQ ID NO: 353781 - DNA, 551 bp, Homo sapiens
cagcctcagcattacgcttttgctcactctcaacctctccttccagctcccgtaccctggcctccagaaactggaggccagggttcgtgaacttgaaggtgaagttgaaagtgaacagaagcgcaatgttgaagctgtcaagggtctacgcaaacatgagagaaaagtgaaggaactcacttaccaaactgaggaagaccgcaagaatattctcaggctccaggacctggtggacaaactgcaagcaaaggtgaaatcctacaagagacaagctgaagaagcggaggaacaatccaacgtcaacctctccaaattccgcaggatccagcacgagctggaggaggccgaggaacgggctgacattgctgagtcccaggtcaacaagctgagggtgaagagcagggaggttcacacaaaaatcataagtgaagagtaatttatctaactgctgaaaggtgaccaaagaaatgcacaaaatgtgaaaatctttgtcactccattttgtacttatgacttttggagataaaaaatttatctgccaaaaaaaaaaa

SEQ ID NO: 353782 - DNA, 6032 bp, Homo sapiens
ggtctctcctcataaagcttcaagttctgatccactttaaggtcgcatctctacgccagggtccttaactgggctaccatcaataacctgcagccatgagttccgactctgagatggccatttttggggaggctgctcctttcctccgaaagtctgaaagggagcgaattgaagcccagaacaagccttttgatgccaagacatcagtctttgtggtggaccctaaggagtcctttgtgaaagcaacagtgcagagcagggaaggggggaaggtgacagctaagaccgaagctggagctactgtaacagtgaaagatgaccaagtcttccccatgaaccctcccaaatatgacaagatcgaggacatggccatgatgactcatctacacgagcctgctgtgctgtacaacctcaaagagcgctacgcagcctggatgatctacacctactcaggcttgttctgtgtcactgtcaacccctacaagtggttgccagtgtataatgcagaggtggtgacagcctaccgaggcaaaaagcgccaggaggccccaccccacatcttctccatctctgacaatgcctatcagttcatgctgactgatcgggagaatcagtctatcttgatcaccggagaatctggcgcagggaagactgtgaacaccaagcgtgtcatccagtactttgcaacaattgcagttactggggagaagaagaaggaagaagttacttctggcaaaatgcaggggactctggaagatcaaatcatcagtgccaaccccctactggaggcctttggcaacgccaagaccgtgaggaatgacaactcctctcgctttggtaaattcatcaggatccacttcggtaccacagggaaactggcttctgctgatattgaaacatatcttctggagaagtctagagttactttccagctaaaggctgaaagaagctatcatattttttatcagatcatgtctaacaagaagccagatctaattgaaatgctcctgatcaccaccaacccatacgattatgccttcgtcagtcaaggggagatcacagtgcccagcattgatgaccaagaagagttgatggctacagatagtgccattgaaattctgggcttcacttcagatgaaagagtgtccatctataagctcacaggggctgtgatgcattatgggaacatgaaattcaagcaaaagcagcgtgaggagcaagctgagccagatggcactgaagttgctgacaaggcagcctatctccaaaatctgaactctgcagatctgctcaaagccctctgctaccctagggtcaaggtcggcaatgagtatgtcaccaaaggtcaaactgtgcagcaggtgtacaatgcagtgggtgctctggccaaagctgtctacgataagatgttcttgtggatggtcacccgcatcaaccagcagctggacaccaagcagcccaggcagtacttcattggggtcttggacattgctggctttgagatctttgatttcaacagcctggagcagctgtgcatcaacttcaccaatgagaaactgcaacagtttttcaaccaccacatgttcgtgctggagcaggaggagtacaagaaggaaggcattgagtggacgttcattgactttgggatggacctggctgcctgcatcgagctcatcgagaagcctatgggcatcttctccatcctggaagaggagtgcatgttccccaaggcgacagacacctccttcaagaacaagctgtatgaacaacatcttggaaaatccaataacttccagaagcccaagcctgccaaaggcaagcctgaggcccacttctctttgattcactatgctggcaccgtggactacaacattgccggctggcttgacaagaacaaggaccccctgaatgagactgtggtggggctgtaccagaagtctgcaatgaagactctggctctcctctttgttggggcaacgggagcggaagcagaggctggcggtggaaagaaaggtggtaagaagaagggttcttctttccagactgtgtctgctctcttcagggagaatttgaataagctgatgaccaacttgaggagcactcacccccactttgtgcggtgcatcatccccaatgaaactaaaactcctggtgccatggagcatgagcttgtcctgcatcagctgaggtgtaacggtgtgctggaaggcatccgcatctgcaggaaaggcttcccaagcagaatcctttatgcagacttcaaacagagatacaaggtgttaaatgcaagtgctatccctgaaggacaattcatcgatagcaagaaggcttcagagaagctcctggggtccattgacattgaccacacccagtataaatttggtcacaccaaggtctttttcaaagctggtcttctggggctcctagaggagatgcgagatgagaagctggcccagctgattacccgaacccaggccatgtgcagagggttcttggcaagagtggagtaccagaaaatggtggaaagaagagagtccatcttctgcatccagtacaatgtccgtgccttcatgaatgtcaagcactggccctggatgaaactctatcttcaagatcaagcctctgttgaaaagtgcagaaactgagaaggagatggccaccatgaaggaagaatttcagaaaaccaaagacgaacttgccaagtcagaggcaaaaaggaaggaactggaagaaaagatggtgacgctgttgaaagaaaaaaatgacttgcagctccaagttcaggctgaagccgacaggcttggctgatgcagaggaaaggtgtgaccagctaatcaaaaccaaaatccagctagaagccaaaatcaaagaggtgactgagagagctgaggatgaggaagagatcaatgctgagctgacagccaagaagaggaaactggaggatgaatgttcagaactcaagaaagacattgatgaccttgagctgacactggccaaggttgagaaggagaaacatgccacagaaaacaaggtgaaaaacctcacagaagagatggcaggtctggatgaaaccattgctaagctgaccaaggagaagaaggctctccaggaggcccaccagcagaccctggatgacctgcaggcagaggaggacaaagtcaacaccctgaccaaagctaaaatcaaacttgaacaacaagtggatgatcttgaaggatctttggaacaagaaaagaaaatccggatggatctagaaagagcaaagagaaaactagagggagacctaaaattggctcaagaatccgcaatggatatagaaaatgacaaacaacaacttgatgaaaagcttaaaaagaaagagtttgaaatgagcggtctgcaaagcaagattgaagatgaacaagcccttggtatgcagctgcagaagaaaatcaaggagttacaagcccgcattgaggagctggaggaggaaatcgaggcagagcgggcctcccgggccaaagcagagaagcagcgctctgatctctcccgggagctggaggagatcagtgagaggctggaagaagccggtggggccacctcggcccagattgagatgaacaagaagcgggaagctgagttccagaaaatgcgcagggacctggaggaggccaccctacagcatgaggccacggcggccaccctgaggaagaagcatgcagatagtgtggccgagcttggggagcagattgacaacctgcagcgagtgaagcagaagctggagaaggagaagagtgagatgaagatggagatcgatgaccttgctagtaacatggagactgtctccaaagccaagggaaaccttgaaaagatgtgccgcgctctagaagatcaactgagtgaaattaagaccaaggaagaggagcagcagcggctgatcaatgacctcacagcacagagagcgcgcctgcaaacagaatcaggtgaatattcacgccagctagatgaaaaggacacactagtttcacagctctcgaggggcaaacaagcctttactcaacagattgaggaactgaaaaggcaacttgaagaggagataaaggccaagagtgccctggcacatgccctgcagtcctcccgccatgactgtgacctgctgcgggaacagtatgaggaggagcaggaagccaaggccgagctacagagagcaatgtccaaggccaacagtgaggttgcccagtggaggaccaaatatgagacagatgccatccagcgcacagaggagctggaggaggccaagaagaagctggctcagcgtctgcaggatgctgaggaacatgtagaagctgtgaatgccaaatgtgcttcccttgagaagacgaagcagaggctccagaatgaagttgaggacctcatgattgatgttgagaggacaaatgctgcctgtgccgccctggacaaaaagcaaaggaactttgataagatcctggcagaatggaaacagaagtgtgaagaaactcatgctgaacttgaagcttctcaaaaggaatcccgctcactcagcacagaactatttaagattaagaatgcttatgaggaatctttagaccaacttgaaaccttgaaacgggaaaataagaatctgcagcaggagatttctgatctcactgaacagattgcagaaggaggaaagcgcatccatgaactggaaaaaataaagaagcaagttgagcaagaaaagtctgaacttcaggctgccttagaggaggcagaggcatctcttgaacatgaagagggaaagatcctgcgcatccagcttgagttgaaccaagtcaagtctgaggttgataggaaaattgctgaaaaagatgaggaaattgaccagatgaagagaaaccacattagaatcgtggagtccatgcagagcacactggatgctgagatcaggagcaggaatgatgccattaggctcaagaagaagatggagggagacctcaatgaaatggaaatccagctgaaccatgccaaccgcatggctgctgaggccctgaggaactataggaacacccaagccatcctcaaggatacccagctccacctagatgatgctctccggagccaagaggacctgaaggaacagctggctatggtggagcgcagagccaacctgctgcaggctgagatcgaggagctgcgggccactctggaacagacagagaggagcaggaaaatcgcagaacaggagctcctggatgccagtgagcgtgttcagctcctgcacacccagaacaccagcctgatcaacaccaagaagaagctggagacagacatttcccaaatccagggagagatggaagacatcatccaggaagcccgcaatgcagaagagaaggccaagaaggccatcactgatgctgccatgatggctgaggagctgaagaaggaacaggacaccagcgcccatctggagcggatgaagaagaacctggaacagacggtgaaggacctgcagcatcgtctggatgaggctgagcagctggccctgaagggtgggaagaagcagatccagaaactggaggccagggttcgtgaacttgaaggtgaagttgaaagtgaacagaagcgcaatgttgaagctgtcaagggtctacgcaaacatgagagaaaagtgaaggaactcacttaccaaactgaggaagaccgcaagaatattctcaggctccaggacctggtggacaaactgcaagcaaaggtgaaatcctacaagagacaagctgaagaagcggaggaacaatccaacgtcaacctctccaaattccgcaggatccagcacgagctggaggaggccgaggaacgggctgacattgctgagtcccaggtcaacaagctgagggtgaagagcagggaggttcacacaaaaatcataagtgaagagtaatttatctaactgctgaaaggtgaccaaagaaatgcacaaaatgtgaaaatctttgtcactccattttgtacttatgacttttggagataaaaaatttatctgccaaaaaaaaaaa

SEQ ID NO: 353783 - DNA, 6003 bp, Homo sapiens
ggtctctcctcataaagcttcaagttctgatccactttaaggtcgcatctctacgccagggtccttaactgggctaccatcaataacctgcagccatgagttccgactctgagatggccatttttggggaggctgctcctttcctccgaaagtctgaaagggagcgaattgaagcccagaacaagccttttgatgccaagacatcagtctttgtggtggaccctaaggagtcctttgtgaaagcaacagtgcagagcagggaaggggggaaggtgacagctaagaccgaagctggagctactgtaacagtgaaagatgaccaagtcttccccatgaaccctcccaaatatgacaagatcgaggacatggccatgatgactcatctacacgagcctgctgtgctgtacaacctcaaagagcgctacgcagcctggatgatctacacctactcaggcttgttctgtgtcactgtcaacccctacaagtggttgccagtgtataatgcagaggtggtgacagcctaccgaggcaaaaagcgccaggaggccccaccccacatcttctccatctctgacaatgcctatcagttcatgctgactgatcgggagaatcagtctatcttgatcaccggagaatctggcgcagggaagactgtgaacaccaagcgtgtcatccagtactttgcaacaattgcagttactggggagaagaagaaggaagaagttacttctggcaaaatgcaggggactctggaagatcaaatcatcagtgccaaccccctactggaggcctttggcaacgccaagaccgtgaggaatgacaactcctctcgctttggtaaattcatcaggatccacttcggtaccacagggaaactggcttctgctgatattgaaacatatcttctggagaagtctagagttactttccagctaaaggctgaaagaagctatcatattttttatcagatcatgtctaacaagaagccagatctaattgaaatgctcctgatcaccaccaacccatacgattatgccttcgtcagtcaaggggagatcacagtgcccagcattgatgaccaagaagagttgatggctacagatagtgccattgaaattctgggcttcacttcagatgaaagagtgtccatctataagctcacaggggctgtgatgcattatgggaacatgaaattcaagcaaaagcagcgtgaggagcaagctgagccagatggcactgaagttgctgacaaggcagcctatctccaaaatctgaactctgcagatctgctcaaagccctctgctaccctagggtcaaggtcggcaatgagtatgtcaccaaaggtcaaactgtgcagcaggtgtacaatgcagtgggtgctctggccaaagctgtctacgataagatgttcttgtggatggtcacccgcatcaaccagcagctggacaccaagcagcccaggcagtacttcattggggtcttggacattgctggctttgagatctttgatttcaacagcctggagcagctgtgcatcaacttcaccaatgagaaactgcaacagtttttcaaccaccacatgttcgtgctggagcaggaggagtacaagaaggaaggcattgagtggacgttcattgactttgggatggacctggctgcctgcatcgagctcatcgagaagcctatgggcatcttctccatcctggaagaggagtgcatgttccccaaggcgacagacacctccttcaagaacaagctgtatgaacaacatcttggaaaatccaataacttccagaagcccaagcctgccaaaggcaagcctgaggcccacttctctttgattcactatgctggcaccgtggactacaacattgccggctggcttgacaagaacaaggaccccctgaatgagactgtggtggggctgtaccagaagtctgcaatgaagactctggctctcctctttgttggggcaacgggagcggaagcagaggctggcggtggaaagaaaggtggtaagaagaagggttcttctttccagactgtgtctgctctcttcagggagaatttgaataagctgatgaccaacttgaggagcactcacccccactttgtgcggtgcatcatccccaatgaaactaaaactcctggtgccatggagcatgagcttgtcctgcatcagctgaggtgtaacggtgtgctggaaggcatccgcatctgcaggaaaggcttcccaagcagaatcctttatgcagacttcaaacagagatacaaggtgttaaatgcaagtgctatccctgaaggacaattcatcgatagcaagaaggcttcagagaagctcctggggtccattgacattgaccacacccagtataaatttggtcacaccaaggtctttttcaaagctggtcttctggggctcctagaggagatgcgagatgagaagctggcccagctgattacccgaacccaggccatgtgcagagggttcttggcaagagtggagtaccagaaaatggtggaaagaagagagtccatcttctgcatccagtacaatgtccgtgccttcatgaatgtcaagcactggccctggatgaaactctatcttcaagatcaagcctctgttgaaaagtgcagaaactgagaaggagatggccaccatgaaggaagaatttcagaaaaccaaagacgaacttgccaagtcagaggcaaaaaggaaggaactggaagaaaagatggtgacgctgttgaaagaaaaaaatgacttgcagctccaagttcaggctgaagccgacaggcttggctgatgcagaggaaaggtgtgaccagctaatcaaaaccaaaatccagctagaagccaaaatcaaagaggtgactgagagagctgaggatgaggaagagatcaatgctgagctgacagccaagaagaggaaactggaggatgaatgttcagaactcaagaaagacattgatgaccttgagctgacactggccaaggttgagaaggagaaacatgccacagaaaacaaggtgaaaaacctcacagaagagatggcaggtctggatgaaaccattgctaagctgaccaaggagaagaaggctctccaggaggcccaccagcagaccctggatgacctgcaggcagaggaggacaaagtcaacaccctgaccaaagctaaaatcaaacttgaacaacaagtggatgatcttgaaggatctttggaacaagaaaagaaaatccggatggatctagaaagagcaaagagaaaactagagggagacctaaaattggctcaagaatccgcaatggatatagaaaatgacaaacaacaacttgatgaaaagcttaaaaagaaagagtttgaaatgagcggtctgcaaagcaagattgaagatgaacaagcccttggtatgcagctgcagaagaaaatcaaggagttacaagcccgcattgaggagctggaggaggaaatcgaggcagagcgggcctcccgggccaaagcagagaagcagcgctctgatctctcccgggagctggaggagatcagtgagaggctggaagaagccggtggggccacctcggcccagattgagatgaacaagaagcgggaagctgagttccagaaaatgcgcagggacctggaggaggccaccctacagcatgaggccacggcggccaccctgaggaagaagcatgcagatagtgtggccgagcttggggagcagattgacaacctgcagcgagtgaagcagaagctggagaaggagaagagtgagatgaagatggagatcgatgaccttgctagtaacatggagactgtctccaaagccaagggaaaccttgaaaagatgtgccgcgctctagaagatcaactgagtgaaattaagaccaaggaagaggagcagcagcggctgatcaatgacctcacagcacagagagcgcgcctgcaaacagaatcaggtgaatattcacgccagctagatgaaaaggacacactagtttcacagctctcgaggggcaaacaagcctttactcaacagattgaggaactgaaaaggcaacttgaagaggagataaaggccaagagtgccctggcacatgccctgcagtcctcccgccatgactgtgacctgctgcgggaacagtatgaggaggagcaggaagccaaggccgagctacagagagcaatgtccaaggccaacagtgaggttgcccagtggaggaccaaatatgagacagatgccatccagcgcacagaggagctggaggaggccaagaagaagctggctcagcgtctgcaggatgctgaggaacatgtagaagctgtgaatgccaaatgtgcttcccttgagaagacgaagcagaggctccagaatgaagttgaggacctcatgattgatgttgagaggacaaatgctgcctgtgccgccctggacaaaaagcaaaggaactttgataagatcctggcagaatggaaacagaagtgtgaagaaactcatgctgaacttgaagcttctcaaaaggaatcccgctcactcagcacagaactatttaagattaagaatgcttatgaggaatctttagaccaacttgaaaccttgaaacgggaaaataagaatctgcagcaggagatttctgatctcactgaacagattgcagaaggaggaaagcgcatccatgaactggaaaaaataaagaagcaagttgagcaagaaaagtctgaacttcaggctgccttagaggaggcagaggcatctcttgaacatgaagagggaaagatcctgcgcatccagcttgagttgaaccaagtcaagtctgaggttgataggaaaattgctgaaaaagatgaggaaattgaccagatgaagagaaaccacattagaatcgtggagtccatgcagagcacactggatgctgagatcaggagcaggaatgatgccattaggctcaagaagaagatggagggagacctcaatgaaatggaaatccagctgaaccatgccaaccgcatggctgctgaggccctgaggaactataggaacacccaagccatcctcaaggatacccagctccacctagatgatgctctccggagccaagaggacctgaaggaacagctggctatggtggagcgcagagccaacctgctgcaggctgagatcgaggagctgcgggccactctggaacagacagagaggagcaggaaaatcgcagaacaggagctcctggatgccagtgagcgtgttcagctcctgcacacccagaacaccagcctgatcaacaccaagaagaagctggagacagacatttcccaaatccagggagagatggaagacatcatccaggaagcccgcaatgcagaagagaaggccaagaaggccatcactgatgctgccatgatggctgaggagctgaagaaggaacaggacaccagcgcccatctggagcggatgaagaagaacctggaacagacggtgaaggacctgcagcatcgtctggatgaggctgagcagctggccctgaagggtgggaagaagcagatccagaaactggaggccagggttcgtgaacttgaaggtgaagttgaaagtgaacagaagcgcaatgttgaagctgtcaagggtctacgcaaacatgagagaaaagtgaaggaactcacttaccaaactgaggaagaccgcaagaatattctcaggctccaggacctggtggacaaactgcaagcaaaggtgaaatcctacaagagacaagctgaagaagcggaggaacaatccaacgtcaacctctccaaattccgcaggatccagcacgagctggaggaggccgaggaacgggctgacattgctgagtcccaggtcaacaagctgagggtgaagagcagggaggttcacacaaaaatcataagtgaagagtgatcatgtcctgccaagcactagtgtcctgccaagcactagtgtcctgccaagcactagtgtcctgccaagcactagtgtcctgccaa

SEQ ID NO: 353784 - DNA, 765 bp, Homo sapiens
  misc_feature (44)..(44): n is a, c, g, or t
  misc_feature (109)..(109): n is a, c, g, or t
  misc_feature (163)..(163): n is a, c, g, or t
cgccgaccgcggacgtccggcagctttatcagccagagtgcccntgaactgctcgcgtttctattttaatcgccctgcatcggatcacgcggcgtgccccaaccatgtncagacgcagcccgtagacaccagctccagaaatcaccacccaaggatcttaaanggagaagaaggaagattgtggaagaggcgagaacctggaacagacggtgaaggacctgcagcatcgtctggatgaggctgagcagctggccctgaagggtgggaagaagcagatccagaaactggaggccagggttcgtgaacttgaaggtgaagttgaaagtgaacagaagcgcaatgttgaagctgtcaagggtctacgcaaacatgagagaaaagtgaaggaactcacttaccaaactgaggaagaccgcaagaatattctcaggctccaggacctggtggacaaactgcaagcaaaggtgaaatcctacaagagacaagctgaagaagcggaggaacaatccaacgtcaacctctccaaattccgcaggatccagcacgagctggaggaggccgaggaacgggctgacattgctgagtcccaggtcaacaagctgagggtgaagagcagggaggttcacacaaaaatcataagtgaagagtaatttatctaactgctgaaaggtgaccaaagaaatgcacaaaatgtgaaaatctttgtcactccattttgtacttatgacttttggagataaaaaatttatctgccaaaaaaaaaaa

SEQ ID NO: 353785 - DNA, 2318 bp, Homo sapiens
caggcggcgaggcggccgtcgagggcgcgggcggcggggacgcggcgctgggcgagccggggctgagcttcacgaccaccgacctgagcctggtggagatgacggaggtggagtacacgcagctgcagcacatcctctgctcgcacatggaggcggcggctgacggcgagctcgagacgcgcctcaactcggcgctgctggcggcggcgggcccgggcgcaggcgcgggcggcttcgcggcgggcggtcaggggggcgcggcgcccgtgtaccccgtgctgtgcccgtccgcgctggcggccgacgcgccctgcctgggccacatcgacttccaggagctgcgcatgatgctgctaagcgaggcgggcgcggcggagaagacgtcgggcggcggggacggagcgagggcccgggccgacggcgccgccaaggagggcgcgggcgcggctgcggctgcggctggacccgacggcgcgcccgaggcccgggccaagccggccgtgcgcgtccgcctggaggaccgcttcaacagcatccccgccgagccgccgcccgcgccgcgcggccccgagccccccgagccgggcggggcgctcaacaatttggtaactctcattcgacatccatctgaactaatgaatgttcctcttcagcaacaaaacaaatgtacagcattagtgaaaaataaaactgcggctacaactactgctttgcaatttacatacccactgtttactacaaatgcttgctctactagtggaaattctaatctttcacagacacagagttctagtaactcatgttctgtacttgaagctgccaagcaccaggatattggattgcctagagcattttctttctgttatcagcaagaaattgaatccactaaacagacgttaggtagtagaaacaaagttttgcctgagcaagtttggattaaagtgggagaagcagcgctatgcaaacaagcactgaagaggaatcggagtagaatgcgtcagttggacacaaatgtagagcgaagagcccttggagagattcagaatgtgggcgaaggtgccaccgccacacaaggcgcttggcagtcctcggagtcctcacaggcaaacctgggggagcaggcccagagtgggccccagggaggaaggtctcaacgtagggagaggcataaccgaatggaaagagatagaaggcgcagaatccgcatttgctgtgatgagttgaatctcttagtgccgttctgcaatgccgagactgacaaggccacaactctgcagtggaccacagcattcctgaaatacatccaggaaagacatggagattctcttaaaaaggaatttgagagcgtattttgcggtaaaactggccgaaggctaaagctgaccagaccggactccttggtgacctgtcctgcacaggggagtttacagagcagcccctcgatggagatcaagtgatcggactgaacaggaatcctcggggggtgaacagccattccttcgtgacctgtgcacgccttctgcaaccctggagctctgctcggctagtctgactcgaaaagggcgtgactcaagctgacgggactccagtagggactttgagagcacattttgtaaaaatatttatctagacgcaaatgcttatccatgaatgtcctcttagaccatttggggatgaagccatcttaataattagtaataattaattagtaataattagtaagcattttctcaatgctctgattccatcatgttttcttaacatgataacttaaaaaattgacatcctttgtactttctttaatcttaaaaagtacacggctttttacttatttaccttttaaatattgcccctttagcaattggaacaagttaaattgttaactaaaaacagtttggaaattttatttcattcgttatatcacacccccttgtcatgactctgagtcacgtgctgctgtattgcaacgtgcaggaccattttaaacctgtgtgctaaaaattttccagatacttgctttaaagctacttttgtccacaaatgaaatactgtcacagtagacgcttaaatgccacgttttcataccaagagtcattcattacttcatgtgtcacaaactgtggtgtttggaattgggtttttcaatgagtggctttacttatcaatcacaacaggtaatagcaatagacgttagtgcaatacaaagtcaccctcaataaatactgttaattggagatgtgagtttgtacacaaaacatcagactagacctttgtatgggagagaatttactgtacattaaattctttattttttgtta

SEQ ID NO: 353786 - DNA, 672 bp, Homo sapiens
ataagtgtcaaatagtctgatctggacttcaaatatgcccagcaggttaataagaaatatacttctgtggccaggatgcacgagctctggttccctcaagtactacaggagacgcttccttttacatgtttgttttgctccggtctctctcggtgatgactttgggttttgactataggcgcagaatccgcatttgctgtgatgagttgaatctcttagtgccgttctgcaatgccgagactgacaaggccacaactctgcagtggaccacagcattcctgaaatacatccaggaaagacatggagattctcttaaaaaggttagtggtaggccaggtagattttcagaattttacaaattttacttaacaatgtccctcctttttcctaaggataactcaaactatcctttgtttcctggaatctaacatcaaatactaagtccagtatgagcaaagctctgctctttaatgatataacttgtcatttattaaagtaatagtcacagcctacatgtgttacactcagtgtgtaaataactgtgaagaggcaattgtcagatagcaaattgggcacctgctgtgtacggtatattgcactggggctgacgggtgtgtaggacatgatatttgccctcagaaaaacttgtgaaagggataaaagcaagaatag

SEQ ID NO: 353787 - DNA, 687 bp, Homo sapiens
caggcggcgaggcggccgtcgagggcgcgggcggcggggacgcggcgctgggcgagccggggctgagcttcacgaccaccgacctgagcctggtggagatgacggaggtggagtacacgcagctgcagcacatcctctgctcgcacatggaggcggcggctgacggcgagctcgagacgcgcctcaactcggcgctgctggcggcggcgggcccgggcgcaggcgcgggcggcttcgcggcgggcggtcaggggggcgcggcgcccgtgtaccccgtgctgtgcccgtccgcgctggcggccgacgcgccctgcctgggccacatcgacttccaggagctgcgcatgatgctgctaagcgaggcgggcgcggcggagaagacgtcgggcggcggggacggagcgagggcccgggccgacggcgccgccaaggagggcgcgggcgcggctgcggctgcggctggacccgacggcgcgcccgaggcccgggccaagccggccgtgcgcgtccgcctggaggaccgcttcaacagcatccccgccgagccgccgcccgcgccgcgcggccccgagccccccgagccgggcggggcgctcaacaagtgcgtgcccggcggccgggggctggcggggcccgggtggaggccgaggccggggccggggccggggcggaggcaaagggggccct

SEQ ID NO: 353788 - DNA, 2166 bp, Homo sapiens
  misc_feature (25)..(25): n is a, c, g, or t
  misc_feature (198)..(198): n is a, c, g, or t
gggaaccatgtgctccgggtggcantcttggatgtcagggaagcctaggaaggcccgacgggggtttgcaggctttgagctctaaaatgaggctccagcctgcagccgcccccttggcgaccctcagggatggctgtggaaggggctgcgtccgcagttttctgctcatcccagcctgtagttgcccatcgtggtcanactggaggatggcaaaagtgagattggtgtcaggatgtgatgagagcagggaggtggcgcagttttgcttttcctccataggaagaggaggacttccacagcagcgatagttgctaattgttgtgtagagatttccaggatgagagttgggttgctgtctggaaaaactagccagagccatgggagtgggatggtggatgcttgtctgccacgtattgctgacacttctgggctttcttttgtcttggcagtttggtaactctcattcgacatccatctgaactaatgaatgttcctcttcagcaacaaaacaaatgtacagcattagtgaaaaataaaactgcggctacaactactgctttgcaatttacatacccactgtttactacaaatgcttgctctactagtggaaattctaatctttcacagacacagagttctagtaactcatgttctgtacttgaagctgccaagcaccaggatattggattgcctagagcattttctttctgttatcagcaagaaattgaatccactaaacagacgttaggtagtagaaacaaagttttgcctgagcaagtttggattaaagtgggagaagcagcgctatgcaaacaagcactgaagaggaatcggagtagaatgcgtcagttggacacaaatgtagagcgaagagcccttggagagattcagaatgtgggcgaaggtgccaccgccacacaaggcgcttggcagtcctcggagtcctcacaggcaaacctgggggagcaggcccagagtgggccccagggaggaaggtctcaacgtagggagaggcataaccgaatggaaagagatagaaggcgcagaatccgcatttgctgtgatgagttgaatctcttagtgccgttctgcaatgccgagactgacaaggccacaactctgcagtggaccacagcattcctgaaatacatccaggaaagacatggagattctcttaaaaaggaatttgagagcgtattttgcggtaaaactggccgaaggctaaagctgaccagaccggactccttggtgacctgtcctgcacaggggagtttacagagcagcccctcgatggagatcaagtgatcggactgaacaggaatcctcggggggtgaacagccattccttcgtgacctgtgcacgccttctgcaaccctggagctctgctcggctagtctgactcgaaaagggcgtgactcaagctgacgggactccagtagggactttgagagcacattttgtaaaaatatttatctagacgcaaatgcttatccatgaatgtcctcttagaccatttggggatgaagccatcttaataattagtaataattaattagtaataattagtaagcattttctcaatgctctgattccatcatgttttcttaacatgataacttaaaaaattgacatcctttgtactttctttaatcttaaaaagtacacggctttttacttatttaccttttaaatattgcccctttagcaattggaacaagttaaattgttaactaaaaacagtttggaaattttatttcattcgttatatcacacccccttgtcatgactctgagtcacgtgctgctgtattgcaacgtgcaggaccattttaaacctgtgtgctaaaaattttccagatacttgctttaaagctacttttgtccacaaatgaaatactgtcacagtagacgcttaaatgccacgttttcataccaagagtcattcattacttcatgtgtcacaaactgtggtgtttggaattgggtttttcaatgagtggctttacttatcaatcacaacaggtaatagcaatagacgttagtgcaatacaaagtcaccctcaataaatactgttaattggagatgtgagtttgtacacaaaacatcagactagacctttgtatgggagagaatttactgtacattaaattctttattttttgtta

SEQ ID NO: 353789 - DNA, 2087 bp, Homo sapiens
ggccttttgtaaaagacaggtggtgtgacgaggagcaagctcagcccacccccaccctgctggcagggtctccccaaggacagagccatctcagcgagcagcacctccaccttgctggccttggaaccctgagtgtgtggcagtgcagagggcaaggcagtcgccctggggtgggggtagatgcccctgacttgttaattgttgaaactttttaaaaatttatttttttgagacggagtatcacgctgttgcactccagcctgggtgacagagtgagactcggtctcaaaaaaaaaaaaacaaaaaacaaacaaaaaaaaacagaaaaaaaatgttgaaagccaggcgtgatggtgtgcacctgtagtcccagctactcgggaggctgagcctgcagtgagccgtggatgtgccactgcattccagcctgagagagcaagaccctgtccaaaacaaagacagcacaactgaaaaatgggcaaagaacttgaatagacatttctccagagaagatacacagatggccaataagcccatgaaagatgcgccaagccgttagtcattagggaaatacgaatcaagacccaatgagatactacttttacacatactaggatggctattcaaaaacaaaaacaaaagcaaaatagcaagtgttggcaaggatgtggagacatcagaatccctgtgctttgccgctgggggtgtgaaatggtgcagccactgtggaagacagtatgacagctcctcagaaggttcaacatagaatcaccagagaagcataaaccccaaagaggtgaaacagggacccaaatggatgcttttctatgaatattcatggcagcacctttcacagtggccaaaaggtggaaatgactcaagtgtgctccagcagaggaatgagtaaacaaatgtgttacaagcacacaacagaatcttactcagccatgaaaaggaatgaaattctgacacaggctacagcatggatggcccgaggtcattatgctgagtgaaataagccagtcacaacagggcacaccctgcgggattccgtaaacaaggcacctagagccgtcagattcagagagacagaaagtggactggaatttgagagcgtattttgcggtaaaactggccgaaggctaaagctgaccagaccggactccttggtgacctgtcctgcacaggggagtttacagagcagcccctcgatggagatcaagtgatcggactgaacaggaatcctcggggggtgaacagccattccttcgtgacctgtgcacgccttctgcaaccctggagctctgctcggctagtctgactcgaaaagggcgtgactcaagctgacgggactccagtagggactttgagagcacattttgtaaaaatatttatctagacgcaaatgcttatccatgaatgtcctcttagaccatttggggatgaagccatcttaataattagtaataattaattagtaataattagtaagcattttctcaatgctctgattccatcatgttttcttaacatgataacttaaaaaattgacatcctttgtactttctttaatcttaaaaagtacacggctttttacttatttaccttttaaatattgcccctttagcaattggaacaagttaaattgttaactaaaaacagtttggaaattttatttcattcgttatatcacacccccttgtcatgactctgagtcacgtgctgctgtattgcaacgtgcaggaccattttaaacctgtgtgctaaaaattttccagatacttgctttaaagctacttttgtccacaaatgaaatactgtcacagtagacgcttaaatgccacgttttcataccaagagtcattcattacttcatgtgtcacaaactgtggtgtttggaattgggtttttcaatgagtggctttacttatcaatcacaacaggtaatagcaatagacgttagtgcaatacaaagtcaccctcaataaatactgttaattggagatgtgagtttgtacacaaaacatcagactagacctttgtatgggagagaatttactgtacattaaattctttattttttgtta

SEQ ID NO: 353790 - DNA, 2737 bp, Homo sapiens
  misc_feature (25)..(25): n is a, c, g, or t
  misc_feature (198)..(198): n is a, c, g, or t
gggaaccatgtgctccgggtggcantcttggatgtcagggaagcctaggaaggcccgacgggggtttgcaggctttgagctctaaaatgaggctccagcctgcagccgcccccttggcgaccctcagggatggctgtggaaggggctgcgtccgcagttttctgctcatcccagcctgtagttgcccatcgtggtcanactggaggatggcaaaagtgagattggtgtcaggatgtgatgagagcagggaggtggcgcagttttgcttttcctccataggaagaggaggacttccacagcagcgatagttgctaattgttgtgtagagatttccaggatgagagttgggttgctgtctggaaaaactagccagagccatgggagtgggatggtggatgcttgtctgccacgtattgctgacacttctgggctttcttttgtcttggcagtttggtaactctcattcgacatccatctgaactaatgaatgttcctcttcagcaacaaaacaaatgtacagcattagtgaaaaataaaactgcggctacaactactgctttgcaatttacatacccactgtttactacaaatgcttgctctactagtggaaattctaatctttcacagacacagagttctagtaactcatgttctgtacttgaagctgccaagcaccaggatattggattgcctagagcattttctttctgttatcagcaagaaattgaatccactaaacagacgttaggtagtagaaacaaagttttgcctgagcaagtttggattaaagtgggagaagcagcgctatgcaaacaagcactgaagaggaatcggagtagaatgcgtcagttggacacaaatgtagagcgaagagcccttggagagattcagaatgtgggcgaaggtgccaccgccacacaaggcgcttggcagtcctcggagtcctcacaggcaaacctgggggagcaggcccagagtgggccccagggaggaaggtctcaacgtagggagaggcataaccgaatggaaagagatagaaggcgcagaatccgcatttgctgtgatgagttgaatctcttagtgccgttctgcaatgccgagactgacaaggccacaactctgcagtggaccacagcattcctgaaatacatccaggaaagacatggagattctcttaaaaaggaatttgagagcgtattttgcggtaaaactggccgaaggctaaagctgaccagaccggactccttggtgacctgtcctgcacaggggagtttacagagcagcccctcgatggagatcaagtgatcggactgaacaggaatcctcggggggtgaacagccattccttcgtgacctgtgcacgccttctgcaaccctggagctctgctcggctagtctgactcgaaaagggcgtgactcaagctgacgggactccagtagggactttgagagcacattttgtaaaaatatttatctagacgcaaatgcttatccatgaatgtcctcttagaccatttggggatgaagccatcttaataattagtaataattaattagtaataattagtaagcattttctcaatgctctgattccatcatgttttcttaacatgataacttaaaaaattgacatcctttgtactttctttaatcttaaaaagtacacggctttttacttatttaccttttaaatattgcccctttagcaattggaacaagttaaattgttaactaaaaacagtttggaaattttatttcattcgttatatcacacccccttgtcatgactctgagtcacgtgctgctgtattgcaacgtgcaggaccattttaaacctgtgtgctaaaaattttccagatacttgctttaaagctacttttgtccacaaatgaaatactgtcacagtagacgcttaaatgccacgttttcataccaagagtcattcattacttcatgtgtcacaaactgtggtgtttggaattgggtttttcaatgagtggctttacttatcaatcacaacaggtaatagcaatagacgttagtgcaatacaaagtcaccctcaataaatactgttaattggagatgtgagtttgtacacaaaacatcagactagacctttgtatgggagagaatttactgtacattaaattctttattttttgttaaaaaaaaaaaaaaagaaggcaaacaaaaaacaaaccagcaaaataacagaaagacaacacaacaaaaagagagagggcgcggcgcacgcccacaaagaatatcccctcggggggggccccccagattagactaacacccggtgttttggtgtaaccagaaggggccccccatagaaggggggccccttataataaaaaaccgcacgagcgccgaggggcgcccgccgtttataaacaccgcctgtggaacgtggaggaaaacacgcgccacagctgggaggaaccattgtggggaggagaacgcccccacaatatcggggggcgggggccaccacattattcgggaccacacctaccctccacgaggaagatatatagcgcgcccccaaggggacatatattcaaaccctttacagggtgtattaacggtggtgaaacacccgcggttaatattactccgcgagtgagaaagattgcccccccgagtttatattcttgaaacaatatttcacagccgtgtatctacatacaagtcccactctactgctcactgcagatcatctagctaatc

SEQ ID NO: 353791 - DNA, 1193 bp, Homo sapiens
tgtaactgctatttgaaaaaaaaaaagttaaaatctgtttattatataaatccccttgtgaggtaagacacaagtttgtgaatgacaccttaaaacagcgtattctaaagtcatttacttagctcttaatttgaaccttttgcactttggaagacagcagttttcatgtcagttaattcagtatgttaaccgtcacttcttcactgcaggaatttgagagcgtattttgcggtaaaactggccgaaggctaaagctgaccagaccggactccttggtgacctgtcctgcacaggggagtttacagagcagcccctcgatggagatcaagtgatcggactgaacaggaatcctcggggggtgaacagccattccttcgtgacctgtgcacgccttctgcaaccctggagctctgctcggctagtctgactcgaaaagggcgtgactcaagctgacgggactccagtagggactttgagagcacattttgtaaaaatatttatctagacgcaaatgcttatccatgaatgtcctcttagaccatttggggatgaagccatcttaataattagtaataattaattagtaataattagtaagcattttctcaatgctctgattccatcatgttttcttaacatgataacttaaaaaattgacatcctttgtactttctttaatcttaaaaagtacacggctttttacttatttaccttttaaatattgcccctttagcaattggaacaagttaaattgttaactaaaaacagtttggaaattttatttcattcgttatatcacacccccttgtcatgactctgagtcacgtgctgctgtattgcaacgtgcaggaccattttaaacctgtgtgctaaaaattttccagatacttgctttaaagctacttttgtccacaaatgaaatactgtcacagtagacgcttaaatgccacgttttcataccaagagtcattcattacttcatgtgtcacaaactgtggtgtttggaattgggtttttcaatgagtggctttacttatcaatcacaacaggtaatagcaatagacgttagtgcaatacaaagtcaccctcaataaatactgttaattggagatgtgagtttgtacacaaaacatcagactagacctttgtatgggagagaatttactgtacattaaattctttattttttgtta

SEQ ID NO: 353792 - DNA, 1310 bp, Homo sapiens
ggccttttgtaaaagacaggtggtgtgacgaggagcaagctcagcccacccccaccctgctggcagggtctccccaaggacagagccatctcagcgagcagcacctccaccttgctggccttggaaccctgagtgtgtggcagtgcagagggcaaggcagtcgccctggggtgggggtagatgcccctgacttgttaattgttgaaactttttaaaaatttatttttttgagacggagtatcacgctgttgcactccagcctgggtgacagagtgagactcggtctcaaaaaaaaaaaaacaaaaaacaaacaaaaaaaaacagaaaaaaaatgttgaaagccaggcgtgatggtgtgcacctgtagtcccagctactcgggaggctgagcctgcagtgagccgtggatgtgccactgcattccagcctgagagagcaagaccctgtccaaaacaaagacagcacaactgaaaaatgggcaaagaacttgaatagacatttctccagagaagatacacagatggccaataagcccatgaaagatgcgccaagccgttagtcattagggaaatacgaatcaagacccaatgagatactacttttacacatactaggatggctattcaaaaacaaaaacaaaagcaaaatagcaagtgttggcaaggatgtggagacatcagaatccctgtgctttgccgctgggggtgtgaaatggtgcagccactgtggaagacagtatgacagctcctcagaaggttcaacatagaatcaccagagaagcataaaccccaaagaggtgaaacagggacccaaatggatgcttttctatgaatattcatggcagcacctttcacagtggccaaaaggtggaaatgactcaagtgtgctccagcagaggaatgagtaaacaaatgtgttacaagcacacaacagaatcttactcagccatgaaaaggaatgaaattctgacacaggctacagcatggatggcccgaggtcattatgctgagtgaaataagccagtcacaacagggcacaccctgcgggattccgtaaacaaggcacctagagccgtcagattcagagagacagaaagtggactggtacgtgccaggggctgggggccggagcggtgtggagttagtgtttaatgggtacggagtttctgtttagggtgatgaaaaggtggtggcggctgcacagcactgtgagtggacttcacgctgctccactgtacacttacacatgcttaaaaggcaaattttatgctatattttaataccacaataaaaactgtataaacctggatt

SEQ ID NO: 353793 - DNA, 662 bp, Homo sapiens
cgaatggaaagagatagaaggtaatacgtgtgactgcttgtcaggctgactcatatatgattaccttagtcatacatggttatcacagatgagtgatccttagccgtttctgcgttcagagggaataaagcaggtaggagcatcgttagctttcccagatggatcaaggatcccccagactatgcccaggctcgctggctcactaggaggactcccgggactccgcatgcagtcactctcaggctgtgacttactatggagaaaggatgccaggtgcgatcagcaaaggcgcgtggggagaaggcaggagctgaggtgcaagcttctaagagcgcgccctgtggagtcaggcaggttgcccctcatgcccccagccatgtggtctgaaaacgtgggtgaggtgttgccaaccaggaaagctcgctagagaccaggggcgtgtcacgtaggcactgcccccatgcatgcaaccacagtccagtctcccagaaggaaagcagttgttcagtgtcagccatatcgtttgcacagtgtaggttctgggggcactcttaactccctgaatctaggtttgcagactccactaagggccagccctgactgcaggcctttctgaggagagtggtcaggctgttttggtaactgctgcttaccagccagct

SEQ ID NO: 353794 - DNA, 587 bp, Homo sapiens
aaaaacaaaaaaatacctgtgaaagttgagtgtttatgtggtatgcgaatatttttaaatcttcagtgcaactaaagttcttcaaattacgtgttagtagttttgatgtttgttaagtgcatttcatttgtgcagtaaagaggagagtaagccacatattgataaaattcctgttgcttcatttttttccagagttctagtaactcatgttctgtacttgaagctgccaagcaccaggatattggattgcctagagcattttctttctgttatcagcaagaaattgaatccactaaacagacgttaggtagtagaaacaaagttttgcctgagcaagtttggattaaagtgggaggtaagcgatgaagcagcaggtagtgggagctttcttctgactgagccctgtggctgatggcattttggccttggggggcaggggagacagatggtttgtacacatgtgaaacagtcttggaggtgtctgtgtatctcaggggtctgtccacccgcttccctgtcttttcgctttaaacattattctgattctcaaacataattaatcttggtgtgagaacgttgcgtttgag

SEQ ID NO: 353795 - DNA, 437 bp, Homo sapiens
gcaacgtgcaggaccattttaaacctgtgtgctaaaaattttccagatacttgctttaaagctacttttgtccacaaatgaaatactgtcacagtagacgcttaaatgccacgttttcataccaagagtcattcattacttcatgtgtcacaaactgtggtgtttggaattgggtttttcaatgagtggctttacttatcaatcacaacaggtaatagcaatagacgttagtgcaatacaaagtcaccctcaataaatactgttaattggagatgtgagtttgtacacaaaacatcagactagacctttgtatgggagagaatttactgtacattaaattctttattttttgttactctgtagccagtcattaatctgaaggtttaatatatcattttattgggatgagatcatagtctttacacaaatgctatgta

SEQ ID NO: 353796 - DNA, 1458 bp, Homo sapiens
  misc_feature (25)..(25): n is a, c, g, or t
  misc_feature (198)..(198): n is a, c, g, or t
gggaaccatgtgctccgggtggcantcttggatgtcagggaagcctaggaaggcccgacgggggtttgcaggctttgagctctaaaatgaggctccagcctgcagccgcccccttggcgaccctcagggatggctgtggaaggggctgcgtccgcagttttctgctcatcccagcctgtagttgcccatcgtggtcanactggaggatggcaaaagtgagattggtgtcaggatgtgatgagagcagggaggtggcgcagttttgcttttcctccataggaagaggaggacttccacagcagcgatagttgctaattgttgtgtagagatttccaggatgagagttgggttgctgtctggaaaaactagccagagccatgggagtgggatggtggatgcttgtctgccacgtattgctgacacttctgggctttcttttgtcttggcagtttggtaactctcattcgacatccatctgaactaatgaatgttcctcttcagcaacaaaacaaatgtacagcattagtgaaaaataaaactgcggctacaactactgctttgcaatttacatacccactgtttactacaaatgcttgctctactagtggaaattctaatctttcacagacacagagttctagtaactcatgttctgtacttgaagctgccaagcaccaggatattggattgcctagagcattttctttctgttatcagcaagaaattgaatccactaaacagacgttaggtagtagaaacaaagttttgcctgagcaagtttggattaaagtgggagaagcagcgctatgcaaacaagcactgaagaggaatcggagtagaatgcgtcagttggacacaaatgtagagcgaagagcccttggagagattcagaatgtgggcgaaggtgccaccgccacacaaggcgcttggcagtcctcggagtcctcacaggcaaacctgggggagcaggcccagagtgggccccagggaggaaggtctcaacgtagggagaggcataaccgaatggaaagagatagaaggcgcagaatccgcatttgctgtgatgagttgaatctcttagtgccgttctgcaatgccgagactgacaaggccacaactctgcagtggaccacagcattcctgaaatacatccaggaaagacatggagattctcttaaaaaggaatttgagagcgtattttgcggtaaaactggccgaaggctaaagctgaccagaccggactccttggtgacctgtcctgcacaggggagtttacagagcagcccctcgatggagatcaagtgatcggactgaacaggaatcctcggggggtgaacagccattccttcgtgacctgtgcacgccttctgcaaccctggagctctgctcggctagtctgactcgaaaagggcgtgactcttcgactgccctgaggtcatccctgaaactcgagcacgg

SEQ ID NO: 353797 - DNA, 1304 bp, Homo sapiens
ataagtgtcaaatagtctgatctggacttcaaatatgcccagcaggttaataagaaatatacttctgtggccaggatgcacgagctctggttccctcaagtactacaggagacgcttccttttacatgtttgttttgctccggtctctctcggtgatgactttgggttttgactataggcgcagaatccgcatttgctgtgatgagttgaatctcttagtgccgttctgcaatgccgagactgacaaggccacaactctgcagtggaccacagcattcctgaaatacatccaggaaagacatggagattctcttaaaaaggaatttgagagcgtattttgcggtaaaactggccgaaggctaaagctgaccagaccggactccttggtgacctgtcctgcacaggggagtttacagagcagcccctcgatggagatcaagtgatcggactgaacaggaatcctcggggggtgaacagccattccttcgtgacctgtgcacgccttctgcaaccctggagctctgctcggctagtctgactcgaaaagggcgtgactcaagctgacgggactccagtagggactttgagagcacattttgtaaaaatatttatctagacgcaaatgcttatccatgaatgtcctcttagaccatttggggatgaagccatcttaataattagtaataattaattagtaataattagtaagcattttctcaatgctctgattccatcatgttttcttaacatgataacttaaaaaattgacatcctttgtactttctttaatcttaaaaagtacacggctttttacttatttaccttttaaatattgcccctttagcaattggaacaagttaaattgttaactaaaaacagtttggaaattttatttcattcgttatatcacacccccttgtcatgactctgagtcacgtgctgctgtattgcaacgtgcaggaccattttaaacctgtgtgctaaaaattttccagatacttgctttaaagctacttttgtccacaaatgaaatactgtcacagtagacgcttaaatgccacgttttcataccaagagtcattcattacttcatgtgtcacaaactgtggtgtttggaattgggtttttcaatgagtggctttacttatcaatcacaacaggtaatagcaatagacgttagtgcaatacaaagtcaccctcaataaatactgttaattggagatgtgagtttgtacacaaaacatcagactagacctttgtatgggagagaatttactgtacattaaattctttattttttgtta

SEQ ID NO: 353798 - DNA, 1679 bp, Homo sapiens
tagtaaatttattttttaattgtaacaaatatatgccattagtatgttcttaagttttgggtcacattggcaacagtgtctttattttttttttgaaattcttttcaggaatcctaaggttatagttcccttaaaaaaatatttgctgttttacctcttttaagactgtaaacaggacaaaaaggcatggatatgagaattagctagtgatcactggctattctaaatagtcactaaggcttgaattgtctcttcaccagatgcctgtcagaagtcccaaaggtttccctgatcatattaataactttataaaaaattgatcattattcattaaatattagatattagtaaggaaaatataaatgaagtctaaaccaaaactcttaaccagactaacttcaatgttatgaatcacaaaatctttttgattgattgctctattgacaagctcttatatgcttttagagaaagattaagtcccattataagagatgataaattttagtcaaagactagaacacaacttacagaatacataactggacttgacagttaacaacttagttatttacactgtacaatggaacaaagaaaaatcttaattcttctgcctttattgctgtatttgaccattcaggaatactttggctttcatatttacaattaaatctccttgttcaaacgtaaaatatgtatatttcctatatgcaacttttaaagataatgtttccattaggaggaaataaagaagctgaaaaaagaactggaaaattttgatccttcattttttgaagaaattgaagatcttaagtataattacaaggaagaagtgaagaagaatattctcttagaagagaaggtaaaaaaactttcagaacaattgggagttgaattaactagccctgttgctgcttctgaagagtttgaagatgaagaagaaagtcctgttaatttccccatttactaaaggtcacctataaactttgtttcatttaactatttattaactttataagttaaatatacttggaaataagcagttctccgaactgtagtatttccttctcactaccttgtacctttatacttagattggaattcttaataaataaaattatatgaaattttcaacttattataaaagtatatacttgaagacttgttacagccatcaaataggcagtgagctctggtgaatttctctacattcataatgctttaagttttttaaagaatatgagggtaaattcagcaattttaagatttaaaattggagtttatatatacttatttatacatgtgttaagattctcaaatcctatgatatatacacagatgtagacatacacacatataggttatgaggttgagccgtatgttttgttaaatatctagcaaaattaaattgagcttaaactatttaattttgaaaattagtgacattaaattgttgtctttaaattaccactcagttatagtgaagagaatccagcctttgtccaagcttaggagcttactattacttatgtttttatggctagagattaaaattaatttgctggtttttaataaaattttgaataggtacttgaaactggaaaattcatttcttcacaaatggtagaaaacatattgatgtttcataatgaacagaaaccttgagatatttttaaatatgg

SEQ ID NO: 353799 - DNA, 1131 bp, Homo sapiens
tagtaaatttattttttaattgtaacaaatatatgccattagtatgttcttaagttttgggtcacattggcaacagtgtctttattttttttttgaaattcttttcaggaatcctaaggttatagttcccttaaaaaaatatttgctgttttacctcttttaagactgtaaacaggacaaaaaggcatggatatgagaattagctagtgatcactggctattctaaatagtcactaaggcttgaattgtctcttcaccagatgcctgtcagaagtcccaaaggtttccctgatcatattaataactttataaaaaattgatcattattcattaaatattagatattagtaaggaaaatataaatgaagtctaaaccaaaactcttaaccagactaacttcaatgttatgaatcacaaaatctttttgattgattgctctattgacaagctcttatatgcttttagagaaagattaagtcccattataagagatgataaattttagtcaaagactagaacacaacttacagaatacataactggacttgacagttaacaacttagttatttacactgtacaatggaacaaagaaaaatcttaattcttctgcctttattgctgtatttgaccattcaggaatactttggctttcatatttacaattaaatctccttgttcaaacgtaaaatatgtatatttcctatatgcaacttttaaagataatgtttccattaggaggaaataaagaagctgaaaaaagaactggaaaattttgatccttcattttttgaagaaattgaagatcttaagtataattacaaggaagaagtgaagaagaatattctcttagaagagaaggtaaaaaaactttcagaacaattgggagttgaattaactagccctgttgctgcttctgaagagtttgaagatgaagaagaaagtcctgttaatttccccatttactaaaggtcacctataaactttgtttcatttaactatttattaactttataagttaaatatacttggaaataagcagttctccgaactgtagtatttccttctcactaccttgtacctttatacttagattggaattcttaataaataaaattatatgaaattttcaa

SEQ ID NO: 353800 - DNA, 875 bp, Homo sapiens
cagatggattcggatgaaatgaaaaaaatacttgcagaaaatagtaggaaaattactgttttgcaagtgaatgaaaaatcacttataaggcaatatacaaccttagtagaattggagcgacaacttagaaaagaaaatgagaagcaaaagaatgaattgttgtcaatggaggctgaagtttgtgaaaaaattgggtgtttgcaaagatttaaggaaatggccattttcaagattgcagctctccaaaaagttgtagataatagtgtttctttgtctgaactagaactggctaataaacagtacaatgaactgactgctaagtacagggacatcttgcaaaaagataatatgcttgttcaaagaacaagtaacttggaacacctggagtgtgaaaacatctccttaaaagaacaagtggagtctataaataaagaactggagattaccaaggaaaaacttcacactattgaacaagcctgggaacaggaaactaaattaggtaatgaatctagcatggataaggcaaagaaatcaataaccaacagtgacattgtttccatttcaaaaaaaataactatgctggaaatgaaggaattaaatgaaaggcagcgggctgaacattgtcaaaaaatgtatgaacacttacggacttcgttaaagcaaatggaggaacgtaattttgaattggaaaccaaatttgctgaggtttgatattataagttttatcatacaattatagaataaagaattagttttggtagacattgtattattgttaagtggtttgtctggatctctgaaatatcttattaatatagtgcctatgttttgtgtaataaataaataaaagatttaaatctgaattgtttaaaagg

SEQ ID NO: 353801 - DNA, 5030 bp, Homo sapiens
cagatggattcggatgaaatgaaaaaaatacttgcagaaaatagtaggaaaattactgttttgcaagtgaatgaaaaatcacttataaggcaatatacaaccttagtagaattggagcgacaacttagaaaagaaaatgagaagcaaaagaatgaattgttgtcaatggaggctgaagtttgtgaaaaaattgggtgtttgcaaagatttaaggaaatggccattttcaagattgcagctctccaaaaagttgtagataatagtgtttctttgtctgaactagaactggctaataaacagtacaatgaactgactgctaagtacagggacatcttgcaaaaagataatatgcttgttcaaagaacaagtaacttggaacacctggagtgtgaaaacatctccttaaaagaacaagtggagtctataaataaagaactggagattaccaaggaaaaacttcacactattgaacaagcctgggaacaggaaactaaattaggtaatgaatctagcatggataaggcaaagaaatcaataaccaacagtgacattgtttccatttcaaaaaaaataactatgctggaaatgaaggaattaaatgaaaggcagcgggctgaacattgtcaaaaaatgtatgaacacttacggacttcgttaaagcaaatggaggaacgtaattttgaattggaaaccaaatttgctgagcttaccaaaatcaatttggatgcacagaaggtggaacagatgttaagagatgaattagctgatagtgtgagcaaggcagtaagtgatgctgataggcaacggattctagaattagagaagaatgaaatggaactaaaagttgaagtgtcaaaactgagagagatttctgatattgccagaagacaagttgaaattttgaatgcacaacaacaatctagggacaaggaagtagagtccctcagaatgcaactgctagactatcaggcacagtctgatgaaaagtcgctcattgccaagttgcaccaacataatgtctctcttcaactgagtgaggctactgctcttggtaagttggagtcaattacatctaaactgcagaagatggaggcctacaacttgcgcttagagcagaaacttgatgaaaaagaacaggctctctattatgctcgtttggagggaagaaacagagcaaaacatctgcgccaaacaattcagtctctacgacgacagtttagtggagctttacccttggcacaacaggaaaagttctccaaaacaatgattcaactacaaaatgacaaacttaagataatgcaagaaatgaaaaattctcaacaagaacatagaaatatggagaacaaaacattggagatggaattaaaattaaagggcctggaagagttaataagcactttaaaggataccaaaggagcccaaaaggtaatcaactggcatatgaaaatagaagaacttcgtcttcaagaacttaaactaaatcgggaattagtcaaggataaagaagaaataaaatatttgaataacataatttctgaatatgaacgtacaatcagcagtcttgaagaagaaattgtgcaacagaacaagtttcatgaagaaagacaaatggcctgggatcaaagagaagttgacctggaacgccaactagacatttttgaccgtcagcaaaatgaaatactaaatgcggcacaaaagtttgaagaagctacaggatcaatccctgaccctagtttgccccttccaaatcaacttgagatcgctctaaggaaaattaaggagaacattcgaataattctagaaacacgggcaacttgcaaatcactagaagagaaactaaaagagaaagaatctgctttaaggttagcagaacaaaatatactgtcaagagacaaagtaatcaatgaactgaggcttcgattgcctgccactgcagaaagagaaaagctcatagctgagctaggcagaaaagagatggaaccaaaatctcaccacacattgaaaattgctcatcaaaccattgcaaacatgcaagcaaggttaaatcaaaaagaagaagtattaaagaagtatcaacgtcttctagaaaaagccagagaggagcaaagagaaattgtgaagaaacatgaggaagaccttcatattcttcatcacagattagaactacaggctgatagttcactaaataaattcaaacaaacggcttgggatttaatgaaacagtctcccactccagttcctaccaacaagcattttattcgtctggctgagatggaacagacagtagcagaacaagatgactctctttcctcactcttggtcaaactaaagaaagtatcacaagatttggagagacaaagagaaatcactgaattaaaagtaaaagaatttgaaaatatcaaattacagcttcaagaaaaccatgaagatgaagtgaaaaaagtaaaagcggaagtagaggatttaaagtatcttctggaccagtcacaaaaggagtcacagtgtttaaaatctgaacttcaggctcaaaaagaagcaaattcaagagctccaacaactacaatgagaaatctagtagaacggctaaagagccaattagccttgaaggagaaacaacagaaagcacttagtcgggcacttttagaactccgggcagaaatgacagcagctgctgaagaacgtattatttctgcaacttctcaaaaagaggcccatctcaatgttcaacaaatcgttgatcgacatactagagagctaaagacacaagttgaagatttaaatgaaaatcttttaaaattgaaagaagcacttaaaacaagtaaaaacagagaaaactcactaactgataatttgaatgacttaaataatgaactgcaaaagaaacaaaaagcctataataaaatacttagagagaaagaggaaattgatcaagagaatgatgaactgaaaaggcaaattaaaagactaaccagtggattacagggcaaacccctgacagataataaacaaagtctaattgaagaactccaaaggaaagttaaaaaactagagaaccaattagagggaaaggtggaggaagtagacctaaaacctatgaaagaaaagaatgctaaagaagaattaattaggtgggaagaaggtaaaaagtggcaagccaaaatagaaggaattcgaaacaagttaaaagagaaagagggggaagtctttactttaacaaagcagttgaatactttgaaggatctttttgccaaagccgataaagagaaacttactttgcagaggaaactaaaaacaactggcatgactgttgatcaggttttgggaatacgagctttggagtcagaaaaagaattggaagaattaaaaaagagaaatcttgacttagaaaatgatatattgtatatgagggcccaccaagctcttcctcgagattctgttgtagaagatttacatttacaaaatagatacctccaagaaaaacttcatgctttagaaaaacagttttcaaaggatacatattctaagccttcaatttcaggaatagagtcagatgatcattgtcagagagaacaggagcttcagaaggaaaacttgaagttgtcatctgaaaatattgaactgaaatttcagcttgaacaagcaaataaagatttgccaagattaaagaatcaagtcagagatttgaaggaaatgtgtgaatttcttaagaaagaaaaagcagaagttcagcggaaacttggccatgttagagggtctggtagaagtggaaagacaatcccagaactggaaaaaaccattggtttaatgaaaaaagtagttgaaaaagtccagagagaaaatgaacagttgaaaaaagcatcaggaatattgactagtgaaaaaatggctaatattgagcaggaaaatgaaaaattgaaggctgaattagaaaaacttaaagctcatcttgggcatcagttgagcatgcactatgaatccaagaccaaaggcacagaaaaaattattgctgaaaatgaaaggcttcgtaaagaacttaaaaaagaaactgatgctgcagagaaattacggatagcaaagaataatttagagatattaaatgagaagatgacagttcaactagaagagactggtaagagattgcagtttgcagaaagcagaggtccacagcttgaaggtgctgacagtaagagctggaaatccattgtggttacaagaatgtatgaaaccaagttaaaagaattggaaactgatattgccaaaaaaaatcaaagcattactgaccttaaacagcttgtaaaagaagcaacagagagagaacaaaaagttaacaaatacaatgaagaccttgaacaacagattaagattcttaaacatgttcctgaaggtgctgagacagagcaaggccttaaacgggagcttcaagttcttagattagctaatcatcagctggataaagagaaagcagaattaatccatcagatagaagctaacaaggaccaaagtggagctgaaagcaccatacctgatgctgatcaactaaaggaaaaaataaaagatctagagacacagctcaaaatgtcagatctagaaaagcagcatttgaaggaggaaataaagaagctgaaaaaagaactggaaaattttgatccttcattttttgaagaaattgaagatcttaagtataattacaaggaagaagtgaagaagaatattctcttagaagagaaggtaaaaaaactttcagaacaattgggagttgaattaactagccctgttgctgcttctgaagagtttgaagatgaagaagaaagtcctgttaatttccccatttactaaaggtcacctataaactttgtttcatttaactatttattaactttataagttaaatatacttggaaataagcagttctccgaactgtagtatttccttctcactaccttgtacctttatacttagattggaattcttaataaataaaattatatgaaattttcaaaaaaaaaagtcgacgcggccgcgaatttaa

SEQ ID NO: 353802 - DNA, 1489 bp, Homo sapiens
acaaaggtgagtgggtagagggaggcagtaatatgaagtgactgctgtgtattttaactaccagatttttctatatttgccactgtgaaatagttggaaaggggacattctgattacgcgaaagtggtatcatcctaggtaagcttatttcagaacaagtctaatatttcagattctttcttttcgactttatactctgagttattacttactgtaagtggtgtatatgaaacctccatgcattttccagtatggatctgctaatatgcacagtaaatccatgtctttgtttgtttttctattaaaaagcaatcaagaaagataatgtgaaaaagaaaggaatttagaggtagggaaaagatgaatgtcagacatttgaagaactataggaaaatgataaattgaaggctgaattagaaaaacttaaagctcatcttgggcatcagttgagcatgcactatgaatccaagaccaaaggcacagaaaaaattattgctgaaaatgaaaggcttcgtaaagaacttaaaaaagaaactgatgctgcagagaaattacggatagcaaagaataatttagagatattaaatgagaagatgacagttcaactagaagagactggtaagagattgcagtttgcagaaagcagaggtccacagcttgaaggtgctgacagtaagagctggaaatccattgtggttacaagaatgtatgaaaccaagttaaaagaattggaaactgatattgccaaaaaaaatcaaagcattactgaccttaaacagcttgtaaaagaagcaacagagagagaacaaaaagttaacaaatacaatgaagaccttgaacaacagattaagattcttaaacatgttcctgaaggtgctgagacagagcaaggccttaaacgggagcttcaagttcttagattagctaatcatcagctggataaagagaaagcagaattaatccatcagatagaagctaacaaggaccaaagtggagctgaaagcaccatacctgatgctgatcaactaaaggaaaaaataaaagatctagagacacagctcaaaatgtcagatctagaaaagcagcatttgaaggaggaaataaagaagctgaaaaaagaactggaaaattttgatccttcattttttgaagaaattgaagatcttaagtataattacaaggaagaagtgaagaagaatattctcttagaagagaaggtaaaaaaactttcagaacaattgggagttgaattaactagccctgttgctgcttctgaagagtttgaagatgaagaagaaagtcctgttaatttccccatttactaaaggtcacctataaactttgtttcatttaactatttattaactttataagttaaatatacttggaaataagcagttctccgaactgtagtatttccttctcactaccttgtacctttatacttagattggaattcttaataaataaaattatatgaaattttcaa

SEQ ID NO: 353803 - DNA, 327 bp, Homo sapiens
tattatgttttctcataaaatactaattagcatttaatgataggaaactgatgctgcagagaaattacggatagcaaagaataatttagagatattaaatgagaagatgacagttcaactagaagagactggtaagagattgcagtttgcagaaagcagaggtccacagcttgaaggtgctgacagtaagagctggaaatccattgtggttacaaggtaggaacagagttttaaacttgtacaaagtttaatcatttcaaattttggcattgttttaaaagacaacactattctggataacctggtttcttcctgatgaacagtttg

SEQ ID NO: 353804 - DNA, 5964 bp, Homo sapiens
aagcttaatactgagcatcaagaaattctttaataaatataagtgatatttattaagacgtgtaataaggaaatgttcatgtcttatttttgtgttagatttttttagaatctacttttgttagagttttataaatacagttagtgtttgagatagaaagagaaaagaattagttttcttcctcttctacctgctcatgaacttgatttttttctcccaacaattgaagagccaagaaaaagggagattcttaagagatgggaaatagaatctcatctacccctgtttccctcagaacagtgaaactgaatcttaagggtaagatagaatagtgtgtacttaacttagatggagaagaaaggctgccaaaatgagatctgaagcgctattacaaatatttccatcattactgtacttcagaatgaattacaaccgtaagtttttttacttcctcattcataaatttgattattccttataccacttctcagctttcatcattctttattgtacttttctatgtaatgtttgcctattatacagcaacttaagagaactgtaagtttggacatttcattttggtgttgataatagaatatctttgaatagttctatagttgatgagtagaaccatgaaccaagtaacttaaagtccttgatgttatttattacagagaactataatagaagctctcccgctaatgtttccatcatgtgtacaaaaagttttcttgttattaaagccagtccgtttaacttacaataagcataaatagctaagctgtgaaagttacctgtgataatgctaattttcccatttattaaaaggcaagttgttttccgatcataagaaatttagaaaagccatccaaagataaattccgagtgatatattcctgctgtttgttatgttttctcaaattaattgagttttattttacaatgacaggagttattaaagtattttatttttattatgattaagattttcaaagtaacatttcttatatgaaagaaattatgttaatgcatgtttttcttacatgggaaatcatatattttaaaaatgattttaaaattcgttttactttaagttgtattatctttctcaaaagtggctagtgcttcaccagaaaaaaagacaccagcataactcagtgtatctttatttacataggaaatggccattttcaagattgcagctctccaaaaagttgtagataatagtgtttctttgtctgaactagaactggctaataaacagtacaatgaactgactgctaagtacagggacatcttgcaaaaagataatatgcttgttcaaagaacaagtaacttggaacacctggagtgtgaaaacatctccttaaaagaacaagtggagtctataaataaagaactggagattaccaaggaaaaacttcacactattgaacaagcctgggaacaggaaactaaattaggtaatgaatctagcatggataaggcaaagaaatcaataaccaacagtgacattgtttccatttcaaaaaaaataactatgctggaaatgaaggaattaaatgaaaggcagcgggctgaacattgtcaaaaaatgtatgaacacttacggacttcgttaaagcaaatggaggaacgtaattttgaattggaaaccaaatttgctgagcttaccaaaatcaatttggatgcacagaaggtggaacagatgttaagagatgaattagctgatagtgtgagcaaggcagtaagtgatgctgataggcaacggattctagaattagagaagaatgaaatggaactaaaagttgaagtgtcaaaactgagagagatttctgatattgccagaagacaagttgaaattttgaatgcacaacaacaatctagggacaaggaagtagagtccctcagaatgcaactgctagactatcaggcacagtctgatgaaaagtcgctcattgccaagttgcaccaacataatgtctctcttcaactgagtgaggctactgctcttggtaagttggagtcaattacatctaaactgcagaagatggaggcctacaacttgcgcttagagcagaaacttgatgaaaaagaacaggctctctattatgctcgtttggagggaagaaacagagcaaaacatctgcgccaaacaattcagtctctacgacgacagtttagtggagctttacccttggcacaacaggaaaagttctccaaaacaatgattcaactacaaaatgacaaacttaagataatgcaagaaatgaaaaattctcaacaagaacatagaaatatggagaacaaaacattggagatggaattaaaattaaagggcctggaagagttaataagcactttaaaggataccaaaggagcccaaaaggtaatcaactggcatatgaaaatagaagaacttcgtcttcaagaacttaaactaaatcgggaattagtcaaggataaagaagaaataaaatatttgaataacataatttctgaatatgaacgtacaatcagcagtcttgaagaagaaattgtgcaacagaacaagtttcatgaagaaagacaaatggcctgggatcaaagagaagttgacctggaacgccaactagacatttttgaccgtcagcaaaatgaaatactaaatgcggcacaaaagtttgaagaagctacaggatcaatccctgaccctagtttgccccttccaaatcaacttgagatcgctctaaggaaaattaaggagaacattcgaataattctagaaacacgggcaacttgcaaatcactagaagagaaactaaaagagaaagaatctgctttaaggttagcagaacaaaatatactgtcaagagacaaagtaatcaatgaactgaggcttcgattgcctgccactgcagaaagagaaaagctcatagctgagctaggcagaaaagagatggaaccaaaatctcaccacacattgaaaattgctcatcaaaccattgcaaacatgcaagcaaggttaaatcaaaaagaagaagtattaaagaagtatcaacgtcttctagaaaaagccagagaggagcaaagagaaattgtgaagaaacatgaggaagaccttcatattcttcatcacagattagaactacaggctgatagttcactaaataaattcaaacaaacggcttgggatttaatgaaacagtctcccactccagttcctaccaacaagcattttattcgtctggctgagatggaacagacagtagcagaacaagatgactctctttcctcactcttggtcaaactaaagaaagtatcacaagatttggagagacaaagagaaatcactgaattaaaagtaaaagaatttgaaaatatcaaattacagcttcaagaaaaccatgaagatgaagtgaaaaaagtaaaagcggaagtagaggatttaaagtatcttctggaccagtcacaaaaggagtcacagtgtttaaaatctgaacttcaggctcaaaaagaagcaaattcaagagctccaacaactacaatgagaaatctagtagaacggctaaagagccaattagccttgaaggagaaacaacagaaagcacttagtcgggcacttttagaactccgggcagaaatgacagcagctgctgaagaacgtattatttctgcaacttctcaaaaagaggcccatctcaatgttcaacaaatcgttgatcgacatactagagagctaaagacacaagttgaagatttaaatgaaaatcttttaaaattgaaagaagcacttaaaacaagtaaaaacagagaaaactcactaactgataatttgaatgacttaaataatgaactgcaaaagaaacaaaaagcctataataaaatacttagagagaaagaggaaattgatcaagagaatgatgaactgaaaaggcaaattaaaagactaaccagtggattacagggcaaacccctgacagataataaacaaagtctaattgaagaactccaaaggaaagttaaaaaactagagaaccaattagagggaaaggtggaggaagtagacctaaaacctatgaaagaaaagaatgctaaagaagaattaattaggtgggaagaaggtaaaaagtggcaagccaaaatagaaggaattcgaaacaagttaaaagagaaagagggggaagtctttactttaacaaagcagttgaatactttgaaggatctttttgccaaagccgataaagagaaacttactttgcagaggaaactaaaaacaactggcatgactgttgatcaggttttgggaatacgagctttggagtcagaaaaagaattggaagaattaaaaaagagaaatcttgacttagaaaatgatatattgtatatgagggcccaccaagctcttcctcgagattctgttgtagaagatttacatttacaaaatagatacctccaagaaaaacttcatgctttagaaaaacagttttcaaaggatacatattctaagccttcaatttcaggaatagagtcagatgatcattgtcagagagaacaggagcttcagaaggaaaacttgaagttgtcatctgaaaatattgaactgaaatttcagcttgaacaagcaaataaagatttgccaagattaaagaatcaagtcagagatttgaaggaaatgtgtgaatttcttaagaaagaaaaagcagaagttcagcggaaacttggccatgttagagggtctggtagaagtggaaagacaatcccagaactggaaaaaaccattggtttaatgaaaaaagtagttgaaaaagtccagagagaaaatgaacagttgaaaaaagcatcaggaatattgactagtgaaaaaatggctaatattgagcaggaaaatgaaaaattgaaggctgaattagaaaaacttaaagctcatcttgggcatcagttgagcatgcactatgaatccaagaccaaaggcacagaaaaaattattgctgaaaatgaaaggcttcgtaaagaacttaaaaaagaaactgatgctgcagagaaattacggatagcaaagaataatttagagatattaaatgagaagatgacagttcaactagaagagactggtaagagattgcagtttgcagaaagcagaggtccacagcttgaaggtgctgacagtaagagctggaaatccattgtggttacaagaatgtatgaaaccaagttaaaagaattggaaactgatattgccaaaaaaaatcaaagcattactgaccttaaacagcttgtaaaagaagcaacagagagagaacaaaaagttaacaaatacaatgaagaccttgaacaacagattaagattcttaaacatgttcctgaaggtgctgagacagagcaaggccttaaacgggagcttcaagttcttagattagctaatcatcagctggataaagagaaagcagaattaatccatcagatagaagctaacaaggaccaaagtggagctgaaagcaccatacctgatgctgatcaactaaaggaaaaaataaaagatctagagacacagctcaaaatgtcagatctagaaaagcagcatttgaaggaggaaataaagaagctgaaaaaagaactggaaaattttgatccttcattttttgaagaaattgaagatcttaagtataattacaaggaagaagtgaagaagaatattctcttagaagagaaggtaaaaaaactttcagaacaattgggagttgaattaactagccctgttgctgcttctgaagagtttgaagatgaagaagaaagtcctgttaatttccccatttactaaaggtcacctataaactttgtttcatttaactatttattaactttataagttaaatatacttggaaataagcagttctccgaactgtagtatttccttctcactaccttgtacctttatacttagattggaattcttaataaataaaattatatgaaattttcaa

SEQ ID NO: 353805 - DNA, 4882 bp, Homo sapiens
cagatggattcggatgaaatgaaaaaaatacttgcagaaaatagtaggaaaattactgttttgcaagtgaatgaaaaatcacttataaggcaatatacaaccttagtagaattggagcgacaacttagaaaagaaaatgagaagcaaaagaatgaattgttgtcaatggaggctgaagtttgtgaaaaaattgggtgtttgcaaagatttaaggaaatggccattttcaagattgcagctctccaaaaagttgtagataatagtgtttctttgtctgaactagaactggctaataaacagtacaatgaactgactgctaagtacagggacatcttgcaaaaagataatatgcttgttcaaagaacaagtaacttggaacacctggagtgtgaaaacatctccttaaaagaacaagtggagtctataaataaagaactggagattaccaaggaaaaacttcacactattgaacaagcctgggaacaggaaactaaattaggtaatgaatctagcatggataaggcaaagaaatcaataaccaacagtgacattgtttccatttcaaaaaaaataactatgctggaaatgaaggaattaaatgaaaggcagcgggctgaacattgtcaaaaaatgtatgaacacttacggacttcgttaaagcaaatggaggaacgtaattttgaattggaaaccaaatttgctgagcttaccaaaatcaatttggatgcacagaaggtggaacagatgttaagagatgaattagctgatagtgtgagcaaggcagtaagtgatgctgataggcaacggattctagaattagagaagaatgaaatggaactaaaagttgaagtgtcaaaactgagagagatttctgatattgccagaagacaagttgaaattttgaatgcacaacaacaatctagggacaaggaagtagagtccctcagaatgcaactgctagactatcaggcacagtctgatgaaaagtcgctcattgccaagttgcaccaacataatgtgctctctattatgctcgtttggagggaagaaacagagcaaaacatctgcgccaaacaattcagtctctacgacgacagtttagtggagctttacccttggcacaacaggaaaagttctccaaaacaatgattcaactacaaaatgacaaacttaagataatgcaagaaatgaaaaattctcaacaagaacatagaaatatggagaacaaaacattggagatggaattaaaattaaagggcctggaagagttaataagcactttaaaggataccaaaggagcccaaaaggtaatcaactggcatatgaaaatagaagaacttcgtcttcaagaacttaaactaaatcgggaattagtcaaggataaagaagaaataaaatatttgaataacataatttctgaatatgaacgtacaatcagcagtcttgaagaagaaattgtgcaacagaacaagtttcatgaagaaagacaaatggcctgggatcaaagagaagttgacctggaacgccaactagacatttttgaccgtcagcaaaatgaaatactaaatgcggcacaaaagtttgaagaagctacaggatcaatccctgaccctagtttgccccttccaaatcaacttgagatcgctctaaggaaaattaaggagaacattcgaataattctagaaacacgggcaacttgcaaatcactagaagagaaactaaaagagaaagaatctgctttaaggttagcagaacaaaatatactgtcaagagacaaagtaatcaatgaactgaggcttcgattgcctgccactgcagaaagagaaaagctcatagctgagctaggcagaaaagagatggaaccaaaatctcaccacacattgaaaattgctcatcaaaccattgcaaacatgcaagcaaggttaaatcaaaaagaagaagtattaaagaagtatcaacgtcttctagaaaaagccagagaggagcaaagagaaattgtgaagaaacatgaggaagaccttcatattcttcatcacagattagaactacaggctgatagttcactaaataaattcaaacaaacggcttgggatttaatgaaacagtctcccactccagttcctaccaacaagcattttattcgtctggctgagatggaacagacagtagcagaacaagatgactctctttcctcactcttggtcaaactaaagaaagtatcacaagatttggagagacaaagagaaatcactgaattaaaagtaaaagaatttgaaaatatcaaattacagcttcaagaaaaccatgaagatgaagtgaaaaaagtaaaagcggaagtagaggatttaaagtatcttctggaccagtcacaaaaggagtcacagtgtttaaaatctgaacttcaggctcaaaaagaagcaaattcaagagctccaacaactacaatgagaaatctagtagaacggctaaagagccaattagccttgaaggagaaacaacagaaagcacttagtcgggcacttttagaactccgggcagaaatgacagcagctgctgaagaacgtattatttctgcaacttctcaaaaagaggcccatctcaatgttcaacaaatcgttgatcgacatactagagagctaaagacacaagttgaagatttaaatgaaaatcttttaaaattgaaagaagcacttaaaacaagtaaaaacagagaaaactcactaactgataatttgaatgacttaaataatgaactgcaaaagaaacaaaaagcctataataaaatacttagagagaaagaggaaattgatcaagagaatgatgaactgaaaaggcaaattaaaagactaaccagtggattacagggcaaacccctgacagataataaacaaagtctaattgaagaactccaaaggaaagttaaaaaactagagaaccaattagagggaaaggtggaggaagtagacctaaaacctatgaaagaaaagaatgctaaagaagaattaattaggtgggaagaaggtaaaaagtggcaagccaaaatagaaggaattcgaaacaagttaaaagagaaagagggggaagtctttactttaacaaagcagttgaatactttgaaggatctttttgccaaagccgataaagagaaacttactttgcagaggaaactaaaaacaactggcatgactgttgatcaggttttgggaatacgagctttggagtcagaaaaagaattggaagaattaaaaaagagaaatcttgacttagaaaatgatatattgtatatgagggcccaccaagctcttcctcgagattctgttgtagaagatttacatttacaaaatagatacctccaagaaaaacttcatgctttagaaaaacagttttcaaaggatacatattctaagccttcaatttcaggaatagagtcagatgatcattgtcagagagaacaggagcttcagaaggaaaacttgaagttgtcatctgaaaatattgaactgaaatttcagcttgaacaagcaaataaagatttgccaagattaaagaatcaagtcagagatttgaaggaaatgtgtgaatttcttaagaaagaaaaagcagaagttcagcggaaacttggccatgttagagggtctggtagaagtggaaagacaatcccagaactggaaaaaaccattggtttaatgaaaaaagtagttgaaaaagtccagagagaaaatgaacagttgaaaaaagcatcaggaatattgactagtgaaaaaatggctaatattgagcaggaaaatgaaaaattgaaggctgaattagaaaaacttaaagctcatcttgggcatcagttgagcatgcactatgaatccaagaccaaaggcacagaaaaaattattgctgaaaatgaaaggcttcgtaaagaacttaaaaaagaaactgatgctgcagagaaattacggatagcaaagaataatttagagatattaaatgagaagatgacagttcaactagaagagactggtaagagattgcagtttgcagaaagcagaggtccacagcttgaaggtgctgacagtaagagctggaaatccattgtggttacaagaatgtatgaaaccaagttaaaagaattggaaactgatattgccaaaaaaaatcaaagcattactgaccttaaacagcttgtaaaagaagcaacagagagagaacaaaaagttaacaaatacaatgaagaccttgaacaacagattaagattcttaaacatgttcctgaaggtgctgagacagagcaaggccttaaacgggagcttcaagttcttagattagctaatcatcagctggataaagagaaagcagaattaatccatcagatagaagctaacaaggaccaaagtggagctgaaagcaccatacctgatgctgatcaactaaaggaaaaaataaaagatctagagacacagctcaaaatgtcagatctagaaaagcagcatttgaaggaggaaataaagaagctgaaaaaagaactggaaaattttgatccttcattttttgaagaaattgaagatcttaagtataattacaaggaagaagtgaagaagaatattctcttagaagagaaggtaaaaaaactttcagaacaattgggagttgaattaactagccctgttgctgcttctgaagagtttgaagatgaagaagaaagtcctgttaatttccccatttactaaaggtcacctataaactttgtttcatttaactatttattaactttataagttaaatatacttggaaataagcagttctccgaactgtagtatttccttctcactaccttgtacctttatacttagattggaattcttaataaataaaattatatgaaattttcaa

SEQ ID NO: 353806 - DNA, 4835 bp, Homo sapiens
cagatggattcggatgaaatgaaaaaaatacttgcagaaaatagtaggaaaattactgttttgcaagtgaatgaaaaatcacttataaggcaatatacaaccttagtagaattggagcgacaacttagaaaagaaaatgagaagcaaaagaatgaattgttgtcaatggaggctgaagtttgtgaaaaaattgggtgtttgcaaagatttaaggaaatggccattttcaagattgcagctctccaaaaagttgtagataatagtgtttctttgtctgaactagaactggctaataaacagtacaatgaactgactgctaagtacagggacatcttgcaaaaagataatatgcttgttcaaagaacaagtaacttggaacacctggagtgtgaaaacatctccttaaaagaacaagtggagtctataaataaagaactggagattaccaaggaaaaacttcacactattgaacaagcctgggaacaggaaactaaattaggtaatgaatctagcatggataaggcaaagaaatcaataaccaacagtgacattgtttccatttcaaaaaaaataactatgctggaaatgaaggaattaaatgaaaggcagcgggctgaacattgtcaaaaaatgtatgaacacttacggacttcgttaaagcaaatggaggaacgtaattttgaattggaaaccaaatttgctgagcttaccaaaatcaatttggatgcacagaaggtggaacagatgttaagagatgaattagctgatagtgtgagcaaggcagtaagtgatgctgataggcaacggattctagaattagagaagaatgaaatggaactaaaagttgaagtgtcaaaactgagagagatttctgatattgccagaagacaagttgaaattttgaatgcacaacaacaatctagggacaaggaagtagagtccctcagaatgcaactgctagactatcaggcacagtctgatgaaaagtcgctcattgccaagttgcaccaacataatgtctctcttcaactgagtgaggctactgctcttggtaagttggagtcaattacatctaaactgcagaagatggaggcctacaacttgcgcttagagcagaaacttgatgaaaaagaacaggctctctattatgctcgtttggagggaagaaacagagcaaaacatctgcgccaaacaattcagtctctacgacgacagtttagtggagctttacccttggcacaacaggaaaagttctccaaaacaatgattcaactacaaaatgacaaacttaagataatgcaagaaatgaaaaattctcaacaagaacatagaaatatggagaacaaaacattggagatggaattaaaattaaagggcctggaagagttaataagcactttaaaggataccaaaggagcccaaaaggtaatcaactggcatatgaaaatagaagaacttcgtcttcaagaacttaaactaaatcgggaattagtcaaggataaagaagaaataaaatatttgaataacataatttctgaatatgaacgtacaatcagcagtcttgaagaagaaattgtgcaacagaacaagtttcatgaagaaagacaaatggcctgggatcaaagagaagttgacctggaacgccaactagacatttttgaccgtcagcaaaatgaaatactaaatgcggcacaaaagtttgaagaagctacaggatcaatccctgaccctagtttgccccttccaaatcaacttgagatcgctctaaggaaaattaaggagaacattcgaataattctagaaacacgggcaacttgcaaatcactagaagagaaactaaaagagaaagaatctgctttaaggttagcagaacaaaatatactgtcaagagacaaagtaatcaatgaactgaggcttcgattgcctgccactgcagaaagagaaaagctcatagctgagctaggcagaaaagagatggaaccaaaatctcaccacacattgaaaattgctcatcaaaccattgcaaacatgcaagcaaggttaaatcaaaaagaagaagtattaaagaagtatcaacgtcttctagaaaaagccagagaggagcaaagagaaattgtgaagaaacatgaggaagaccttcatattcttcatcacagattagaactacaggctgatagttcactaaataaattcaaacaaacggcttgggatttaatgaaacagtctcccactccagttcctaccaacaagcattttattcgtctggctgagatggaacagacagtagcagaacaagatgactctctttcctcactcttggtcaaactaaagaaagtatcacaagatttggagagacaaagagaaatcactgaattaaaagtaaaagaatttgaaaatatcaaattacagcttcaagaaaaccatgaagatgaagtgaaaaaagtaaaagcggaagtagaggatttaaagtatcttctggaccagtcacaaaaggagtcacagtgtttaaaatctgaacttcaggctcaaaaagaagcaaattcaagagctccaacaactacaatgagaaatctagtagaacggctaaagagccaattagccttgaaggagaaacaacagaaagcacttagtcgggcacttttagaactccgggcagaaatgacagcagctgctgaagaacgtattatttctgcaacttctcaaaaagaggcccatctcaatgttcaacaaatcgttgatcgacatactagagagctaaagacacaagttgaagatttaaatgaaaatcttttaaaattgaaagaagcacttaaaacaagtaaaaacagagaaaactcactaactgataatttgaatgacttaaataatgaactgcaaaagaaacaaaaagcctataataaaatacttagagagaaagaggaaattgatcaagagaatgatgaactgaaaaggcaaattaaaagactaaccagtggattacagggcaaacccctgacagataataaacaaagtctaattgaagaactccaaaggaaagttaaaaaactagagaaccaattagagggaaaggtggaggaagtagacctaaaacctatgaaagaaaagaatgctaaagaagaattaattaggtgggaagaaggtaaaaagtggcaagccaaaatagaaggaattcgaaacaagttaaaagagaaagagggggaagtctttactttaacaaagcagttgaatactttgaaggatctttttgccaaagccgataaagagaaacttactttgcagaggaaactaaaaacaactggcatgactgttgatcaggttttgggaatacgagctttggagtcagaaaaagaattggaagaattaaaaaagagaaatcttgacttagaaaatgatatattgtatatgagggcccaccaagctcttcctcgagattctgttgtagaagatttacatttacaaaatagatacctccaagaaaaacttcatgctttagaaaaacagttttcaaaggatacatattctaagccttcaatttcaggaatagagtcagatgatcattgtcagagagaacaggagcttcagaaggaaaacttgaagttgtcatctgaaaatattgaactgaaatttcagcttgaacaagcaaataaagatttgccaagattaaagaatcaagtcagagatttgaaggaaatgtgtgaatttcttaagaaagaaaaagcagaagttcagcggaaacttggccatgttagaggggctgaattagaaaaacttaaagctcatcttgggcatcagttgagcatgcactatgaatccaagaccaaaggcacagaaaaaattattgctgaaaatgaaaggcttcgtaaagaacttaaaaaagaaactgatgctgcagagaaattacggatagcaaagaataatttagagatattaaatgagaagatgacagttcaactagaagagactggtaagagattgcagtttgcagaaagcagaggtccacagcttgaaggtgctgacagtaagagctggaaatccattgtggttacaagaatgtatgaaaccaagttaaaagaattggaaactgatattgccaaaaaaaatcaaagcattactgaccttaaacagcttgtaaaagaagcaacagagagagaacaaaaagttaacaaatacaatgaagaccttgaacaacagattaagattcttaaacatgttcctgaaggtgctgagacagagcaaggccttaaacgggagcttcaagttcttagattagctaatcatcagctggataaagagaaagcagaattaatccatcagatagaagctaacaaggaccaaagtggagctgaaagcaccatacctgatgctgatcaactaaaggaaaaaataaaagatctagagacacagctcaaaatgtcagatctagaaaagcagcatttgaaggaggaaataaagaagctgaaaaaagaactggaaaattttgatccttcattttttgaagaaattgaagatcttaagtataattacaaggaagaagtgaagaagaatattctcttagaagagaaggtaaaaaaactttcagaacaattgggagttgaattaactagccctgttgctgcttctgaagagtttgaagatgaagaagaaagtcctgttaatttccccatttactaaaggtcacctataaactttgtttcatttaactatttattaactttataagttaaatatacttggaaataagcagttctccgaactgtagtatttccttctcactaccttgtacctttatacttagattggaattcttaataaataaaattatatgaaattttcaa

SEQ ID NO: 353807 - DNA, 694 bp, Homo sapiens
ctctgggagagagactcagaaagtcatccaggtagcccagttcactgggggagtccagggaaggtccagcacccagcctggaggtctggaaacacctctcgaggaggtgacaacagaaacggttttggagccaggcgcggtagctcacgcttgtaatcccagcactttgggaggccgaggtaggcggatcacttgaggtcaggagtttgagaccagcctggccaacatggtgaaaccccgtctctactaaaaatataaaaagtaaggccgggcgctgtggctcactcttgtaatcccagcactttggggggctgaggcgggcatataaatataaatgtgaatataaattagccggacatggtgctgcatgccccagttactccagttactcaggaggctgaggcacgagaatcgcttggacccgagaggcggaggttgcagtgagctgagatcgcaccactgcactctagcctcagcctgggcgacagagcaagactctgtctcaaaaaaaaaaaaaagaaaaaaagaaaaaaagaaatggttttgaatgacagctgaggatttggtcagtatgaaatgggtgagggctgggcgcggtggctcacgcctgtaatcccagcactttgggaggctgaggcgggcagatcaccaggtcaagagaggctgaggcaggagaatctcttgaacctgggag

SEQ ID NO: 353808 - DNA, 1885 bp, Homo sapiens
ccctagtgattggctgataggaggagccagcaagtgtggctgagctccggggtgtgtggacgccgctttgttgcctgaggtgggtggcggtggaagttaagggagtcaggggctatcgctcctcgagactcgcagtcgcggccactgcagtcacttcgccagttagcccttagggtaggagtcgcgccggcagcagccatgagcggcggcgtgtacgggggagatgaagttggagcccttgtttttgacattggatcctatactgtgagagctggttatgctggtgaggactgccccaaggtggattttcctacagctattggtatggtggtagaaagagatgacggaagcacattaatggaaatagatggcgataaaggcaaacaaggcggtcccacctactacatagatactaatgctctgcgtgttccgagggagaatatggaggccatttcacctctaaaaaatgggatggttgaagactgggatagtttccaagctattttggatcatacctacaaaatgcatgtcaaatcagaagccagtctccatcctgttctcatgtcagaggcaccgtggaatactagagcaaagagagagaaactgacagagttaatgtttgaacactacaacatccctgccttcttcctttgcaaaactgcagttttgacagcatttgctaatggtcgttctactgggctgattttggacagtggagccactcataccactgcaattccagtccacgatggctatgtccttcaacaaggcattgtgaaatcccctcttgctggagactttattactatgcagtgcagagaactcttccaagaaatgaatattgaattggttcctccatatatgattgcatcaaaagaagctgttcgtgaaggatctccagcaaactggaaaagaaaagagaagttgcctcaggttacgaggtcttggcacaattatatgtgtaattgtgttatccaggattttcaagcttcggtacttcaagtgtcagattcaacttatgatgaacaagtggctgcacagatgccaactgttcattatgaattccccaatggctacaattgtgattttggtgcagagcggctaaagattccagaaggattatttgacccttccaatgtaaaggggttatcaggaaacacaatgttaggagtcagtcatgttgtcaccacaagtgttgggatgtgtgatattgatatcagaccaggtctctatggcagtgtaatagtggcaggaggaaacacactaatacagagttttactgacaggttgaatagagagctgtctcagaaaactcctccaagtatgcggttgaaattgattgcaaataatacaacagtggaacggaggtttagctcatggattggcggctccattctagcctctttgggtacctttcaacagatgtggatttccaagcaagaatatgaagaaggagggaagcagtgtgtagaaagaaaatgcccttgagaaagagttcccaagcttctaccttccttttgtcaccttacgtttcatagctttagtatactcaggaaaagaatgaccatcttttgtagaatgtttatacatttttgcatatttcaatttccacttaaattttttaaagctttaactggctctataaattaagtttgtgctttccttgaaatgcacttattcttattacaagcattttataattttgtataaatgtctattttctctaaatattttgctttcagtaaaatgctttccaactctgtttagtgtattaattaccagtggattggtagaactgctttttattgactagtaaaagttactgcctatgctttttaccttaggcttacagaattaaataaaaattagccattccagaaatata

SEQ ID NO: 353809 - DNA, 791 bp, Homo sapiens
tctattaattcactttaatacccccatttcaacagaccccccacttcaggggttatcaggaaacacaatgttaggagtcagtcatgttgtcaccacaagtgttgggatgtgtgatattgatatcagaccaggtctctatggcagtgtaatagtggcaggaggaaacacactaatacagagttttactgacaggttgaatagagagctgtctcagaaaactcctccaagtatgcggttgaaattgattgcaaataatacaacagtggaacggaggtttagctcatggattggcggctccattctagcctctttgggtacctttcaacagatgtggatttccaagcaagaatatgaagaaggagggaagcagtgtgtagaaagaaaatgcccttgagaaagagttcccaagcttctaccttccttttgtcaccttacgtttcatagctttagtatactcaggaaaagaatgaccatcttttgtagaatgtttatacatttttgcatatttcaatttccacttaaattttttaaagctttaactggctctataaattaagtttgtgctttccttgaaatgcacttattcttattacaagcattttataattttgtataaatgtctattttctctaaatattttgctttcagtaaaatgctttccaactctgtttagtgtattaattaccagtggattggtagaactgctttttattgactagtaaaagttactgcctatgctttttaccttaggcttacagaattaaataaaaattagccattccagaaatata

SEQ ID NO: 353810 - DNA, 601 bp, Homo sapiens
  misc_feature (18)..(18): n is a, c, g, or t
  misc_feature (24)..(25): n is a, c, g, or t
gggcccgacagaattgtntttggnngggtttttcgggattagcggttgaaattgattgcaaataatacaacagtggaacggaggtttagctcatggattggcggctccattctagcctctttgggtacctttcaacagatgtggatttccaagcaagaatatgaagaaggagggaagcagtgtgtagaaagaaaatgcccttgagaaagagttcccaagcttctaccttccttttgtcaccttacgtttcatagctttagtatactcaggaaaagaatgaccatcttttgtagaatgtttatacatttttgcatatttcaatttccacttaaattttttaaagctttaactggctctataaattaagtttgtgctttccttgaaatgcacttattcttattacaagcattttataattttgtataaatgtctattttctctaaatattttgctttcagtaaaatgctttccaactctgtttagtgtattaattaccagtggattggtagaactgctttttattgactagtaaaagttactgcctatgctttttaccttaggcttacagaattaaataaaaattagccattccagaaatata

SEQ ID NO: 353811 - DNA, 529 bp, Homo sapiens
tacctaaccaattcccaccaccaccacaactacctcgacgacttcctcagggtgacctttcacagcagttggatttccaagcaagaatatgaagaaggagggaagcagtgtgtagaaagaaaatgcccttgagaaagagttcccaagcttctaccttccttttgtcaccttacgtttcatagctttagtatactcaggaaaagaatgaccatcttttgtagaatgtttatacatttttgcatatttcaatttccacttaaattttttaaagctttaactggctctataaattaagtttgtgctttccttgaaatgcacttattcttattacaagcattttataattttgtataaatgtctattttctctaaatattttgctttcagtaaaatgctttccaactctgtttagtgtattaattaccagtggattggtagaactgctttttattgactagtaaaagttactgcctatgctttttaccttaggcttacagaattaaataaaaattagccattccagaaatata

SEQ ID NO: 353812 - DNA, 968 bp, Homo sapiens
ggacgcgtgggtcgacccacgcgtcgactgtgagagctggttatgctggtgaggactgccccaaggtggattttcctacagctattggtatggtggtagaaagagatgacggaagcacattaatggaaatagatggcgataaaggcaaacaaggcggtcccacctactacatagatactaatgctctgcgtgttccgagggagaatatggaggccatttcacctctaaaaaatgggatggttgaagactgggatagtttccaagctattttggatcatacctacaaaatgcatgtcaaatcagaagccagtctccatcctgttctcatgtcagaggcaccgtggaatactagagcaaagagagagaaactgacagagttaatgtttgaacactacaacatccctgccttcttcctttgcaaaactgcagttttgacagcatttgctaatggtcgttctactgggctgattttggacagtggagccactcataccactgcaattccagtccacgatggctatgtccttcaacaaggcattgtgaaatcccctcttgctggagactttattactatgcagtgcagagaactcttccaagaaatgaatattgaattggttcctccatatatgattgcatcaaaaggaaaggccttggttaccgcgggaaaagggaattctctccagagacaaaatgtggaaaaggacaaagcacgaagtgtgaccatacagagatatacagaagggattcctttatgggggacggaaacccacgaaatttataattttaatttggttgggtttcaaaattataggctacggttaataaatacaccaagaggcaaattttatattacccacaagaaacccttatcacggaggattaaaagcctttataccaaaaaagggattgggtttacaccaagggagaatttttttacacaataatacttttattaaattttgcggaaa

SEQ ID NO: 353813 - DNA, 389 bp, Homo sapiens
taaacagagttggaaagcattttactgaaagcaaaatatttagagaaaatagacatttatacaaaattataaaatgcttgtaataagaataagtgcatttcaaggaaagcacaaacttaaattttttaaagctttaactggctctataaattaagtttgtgctttccttgaaatgcacttattcttattacaagcattttataattttgtataaatgtctattttctctaaatattttgctttcagtaaaatgctttccaactctgtttagtgtattaattaccagtggattggtagaactgctttttattgactagtaaaagttactgcctatgctttttaccttaggcttacagaattaaataaaaattagccattccagaaatata

SEQ ID NO: 353814 - DNA, 1859 bp, Homo sapiens
  misc_feature (3)..(3): n is a, c, g, or t
canaagaaaagtttgtaaaaaaagaggtggtacggtccggaattcccgggagggtgggtggcggtggaagttaagggagtcaggggctatcgctcctcgagactcgcagtcgcggccactgcagtcacttcgccagttagcccttagggtaggagtcgcgccggcagcagccatgagcggcggcgtgtacgggggagatgaagttggagcccttgtttttgacattggatcctatactgtgagagctggttatgctggtgaggactgccccaaggtggattttcctacagctattggtatggtggtagaaagagatgacggaagcacattaatggaaatagatggcgataaaggcaaacaaggcggtcccacctactacatagatactaatgctctgcgtgttccgagggagaatatggaggccatttcacctctaaaaaatgggatggttgaagactgggatagtttccaagctattttggatcatacctacaaaatgcatgtcaaatcagaagccagtctccatcctgttctcatgtcagaggcaccgtggaatactagagcaaagagagagaaactgacagagttaatgtttgaacactacaacatccctgccttcttcctttgcaaaactgcagttttgacagcatttgctaatggtcgttctactgggctgattttggacagtggagccactcataccactgcaattccagtccacgatggctatgtccttcaacaaggcattgtgaaatcccctcttgctggagactttattactatgcagtgcagagaactcttccaagaaatgaatattgaattggttcctccatatatgattgcatcaaaagaagctgttcgtgaaggatctccagcaaactggaaaagaaaagagaagttgcctcaggttacgaggtcttggcacaattatatgtgtaattgtgttatccaggattttcaagcttcggtacttcaagtgtcagattcaacttatgatgaacaagtggctgcacagatgccaactgttcattatgaattccccaatggctacaattgtgattttggtgcagagcggctaaagattccagaaggattatttgacccttccaatgtaaaggggttatcaggaaacacaatgttaggagtcagtcatgttgtcaccacaagtgttgggatgtgtgatattgatatcagaccaggtctctatggcagtgtaatagtggcaggaggaaacacactaatacagagttttactgacaggttgaatagagagctgtctcagaaaactcctccaagtatgcggttgaaattgattgcaaataatacaacagtggaacggaggtttagctcatggattggcggctccattctagcctctttgggtacctttcaacagatgtggatttccaagcaagaatatgaagaaggagggaagcagtgtgtagaaagaaaatgcccttgagaaagagttcccaagcttctaccttccttttgtcaccttacgtttcatagctttagtatactcaggaaaagaatgaccatcttttgtagaatgtttatacatttttgcatatttcaatttccacttaaattttttaaagctttaactggctctataaattaagtttgtgctttccttgaaatgcacttattcttattacaagcattttataattttgtataaatgtctattttctctaaatattttgctttcagtaaaatgctttccaactctgtttagtgtattaattaccagtggattggtagaactgctttttattgactagtaaaagttactgcctatgctttttaccttaggcttacagaattaaataaaaattagccattccagaaatata

SEQ ID NO: 353815 - DNA, 2717 bp, Homo sapiens
ccctagtgattggctgataggaggagccagcaagtgtggctgagctccggggtgtgtggacgccgctttgttgcctgaggtgggtggcggtggaagttaagggagtcaggggctatcgctcctcgagactcgcagtcgcggccactgcagtcacttcgccagttagcccttagggtaggagtcgcgccggcagcagccatgagcggcggcgtgtacgggggagatgaagttggagcccttgtttttgacattggatcctatactgtgagagctggttatgctggtgaggactgccccaaggtggattttcctacagctattggtatggtggtagaaagagatgacggaagcacattaatggaaatagatggcgataaaggcaaacaaggcggtcccacctactacatagatactaatgctctgcgtgttccgagggagaatatggaggccatttcacctctaaaaaatgggatggttgaagactgggatagtttccaagctattttggatcatacctacaaaatgcatgtcaaatcagaagccagtctccatcctgttctcatgtcagaggcaccgtggaatactagagcaaagagagagaaactgacagagttaatgtttgaacactacaacatccctgccttcttcctttgcaaaactgcagttttgacagcatttgctaatggtcgttctactgggctgattttggacagtggagccactcataccactgcaattccagtccacgatggctatgtccttcaacaaggcattgtgaaatcccctcttgctggagactttattactatgcagtgcagagaactcttccaagaaatgaatattgaattggttcctccatatatgattgcatcaaaagaagctgttcgtgaaggatctccagcaaactggaaaagaaaagagaagttgcctcaggttacgaggtcttggcacaattatatgtgtaattgtgttatccaggattttcaagcttcggtacttcaagtgtcagattcaacttatgatgaacaagtggctgcacagatgccaactgttcattatgaattccccaatggctacaattgtgattttggtgcagagcggctaaagattccagaaggattatttgacccttccaatgtaaaggggttatcaggaaacacaatgttaggagtcagtcatgttgtcaccacaagtgttgggatgtgtgatattgatatcagaccaggtctctatggcagtgtaatagtggcaggaggaaacacactaatacagagttttactgacaggttgaatagagagctgtctcagaaaactcctccaagtatgcggttgaaattgattgcaaataatacaacagtggaacggaggtttagctcatggattggcggctccattctagcctctttgggtacctttcaacagatgtggatttccaagcaagaatatgaagaaggagggaagcagtgtgtagaaagaaaatgcccttgagaaagagttcccaagcttctaccttccttttgtcaccttacgtttcatagctttagtatactcaggaaaagaatgaccatcttttgtagaatgtttatacatttttgcatatttcaatttccacttaaattttttaaagctttaactggctctataaattaagtttgtgctttccttgaaatgcacttattcttattacaagcattttataattttgtataaatgtctattttctctaaatattttgctttcagtaaaatgctttccaactctgtttagtgtattaattaccagtggattggtagaactgctttttattgactagtaaaagttactgcctatgctttttaccttaggcttacagaattaaataaaaattagccattccagaaatatattttggactgttgtgcactgtgattactactttaaggactaaatgtatttctcattattttgaatcaaagtcctccgtttattaacagcaatacccacatcctcttcatagcctattaacaacagaggtaaaactattattcaaattcaaaaactacggtattgcctttgctgtggcagttaccatcaccttcacactctaaggtagcaggtgacatttaaagcctgcttaaatgtcagaatttataaagtgggaatctcatctgaactttatacctgatttttagaagcaaattagcttctaccaaattagctaattagcatgccatattcacacttagaacaactgattagtaaagtcacttgactaaaaacagaatttctttataaaccacttaacatatttactcctgtacacagactattcaagaaaaacaaaatggtaaatttaatagttcagacatcttagacaagacttgacttttgggcttcagcaagatgtggaaacttttttaaaagaatttttgctttctttctctctaaattttccttccgtgctttgatgcgggctcgtttctcacgttccagtctgagaaaatggtccacataaggcaaggcaaagaatcgtttcctattgtatcttttatttaggtgccaaggtataacccactgcttgaacttgtgccagatgattcttccaaagatgtctcttctccaagcaccaggtctagctctttcttgaccagtctgaagaagccttagggcatcttctctttcctggacaactttatctaatgcatccatggaatctacggttgtccttcgggtggacg

SEQ ID NO: 353816 - DNA, 2515 bp, Homo sapiens
ccctagtgattggctgataggaggagccagcaagtgtggctgagctccggggtgtgtggacgccgctttgttgcctgaggtgggtggcggtggaagttaagggagtcaggggctatcgctcctcgagactcgcagtcgcggccactgcagtcacttcgccagttagcccttagggtaggagtcgcgccggcagcagccatgagcggcggcgtgtacgggggagatgaagttggagcccttgtttttgacattggatcctatactgtgagagctggttatgctggtgaggactgccccaaggtggattttcctacagctattggtatggtggtagaaagagatgacggaagcacattaatggaaatagatggcgataaaggcaaacaaggcggtcccacctactacatagatactaatgctctgcgtgttccgagggagaatatggaggccatttcacctctaaaaaatgggatggttgaagactgggatagtttccaagctattttggatcatacctacaaaatgcatgtcaaatcagaagccagtctccatcctgttctcatgtcagaggcaccgtggaatactagagcaaagagagagaaactgacagagttaatgtttgaacactacaacatccctgccttcttcctttgcaaaactgcagttttgacagcatttgctaatggtcgttctactgggctgattttggacagtggagccactcataccactgcaattccagtccacgatggctatgtccttcaacaaggcattgtgaaatcccctcttgctggagactttattactatgcagtgcagagaactcttccaagaaatgaatattgaattggttcctccatatatgattgcatcaaaagaagctgttcgtgaaggatctccagcaaactggaaaagaaaagagaagttgcctcaggttacgaggtcttggcacaattatatgtgtaattgtgttatccaggattttcaagcttcggtacttcaagtgtcagattcaacttatgatgaacaagtggctgcacagatgccaactgttcattatgaattccccaatggctacaattgtgattttggtgcagagcggctaaagattccagaaggattatttgacccttccaatgtaaaggggttatcaggaaacacaatgttaggagtcagtcatgttgtcaccacaagtgttgggatgtgtgatattgatatcagaccaggtctctatggcagtgtaatagtggcaggaggaaacacactaatacagagttttactgacaggttgaatagagagctgtctcagaaaactcctccaagtatgcggttgaaattgattgcaaataatacaacagtggaacggaggtttagctcatggattggcggctccattctagcctctttgggtacctttcaacagatgtggatttccaagcaagaatatgaagaaggagggaagcagtgtgtagaaagaaaatgcccttgagaaagagttcccaagcttctaccttccttttgtcaccttacgtttcatagctttagtatactcaggaaaagaatgaccatcttttgtagaatgtttatacatttttgcatatttcaatttccacttaaattttttaaagctttaactggctctataaattaagtttgtgctttccttgaaatgcacttattcttattacaagcattttataattttgtataaatgtctattttctctaaatattttgctttcagtaaaatgctttccaactctgtttagtgtattaattaccagtggattggtagaactgctttttattgactagtaaaagttactgcctatgctttttaccttaggcttacagaattaaataaaaattagccattccagaaatatattttggactgttgtgcactgtgattactactttaaggactaaatgtatttctcattattttgaatcaaagtcctccgtttattaacagcaatacccacatcctcttcatagcctattaacaacagaggtaaaactattattcaaattcaaaaactacggtattgcctttgctgtggcagttaccatcaccttcacactctaaggtagcaggtgacatttaaagcctgcttaaatgtcagaatttataaagtgggaatctcatctgaactttatacctgatttttagaagcaaattagcttctaccaaattagctaattagcatgccatattcacacttagaacaactgattagtaaagtcacttgactaaaaacagaatttctttataaaccacttaacatatttactcctgtacacagactattcaagaaaaacaaaatggtaaatttaatagttcagacatcttagacaagacttgacttttgggcttcagcaagatgtggaaacttttttaaaagaatttttgctttctttctctctaaattttccttccgtgctttgatgcgggaacgtttctcacgttgtcactctgaaagaattttttcttattttaataacttgatcttgtgt

SEQ ID NO: 353817 - DNA, 2509 bp, Homo sapiens
  misc_feature (2481)..(2482): n is a, c, g, or t
ccctagtgattggctgataggaggagccagcaagtgtggctgagctccggggtgtgtggacgccgctttgttgcctgaggtgggtggcggtggaagttaagggagtcaggggctatcgctcctcgagactcgcagtcgcggccactgcagtcacttcgccagttagcccttagggtaggagtcgcgccggcagcagccatgagcggcggcgtgtacgggggagatgaagttggagcccttgtttttgacattggatcctatactgtgagagctggttatgctggtgaggactgccccaaggtggattttcctacagctattggtatggtggtagaaagagatgacggaagcacattaatggaaatagatggcgataaaggcaaacaaggcggtcccacctactacatagatactaatgctctgcgtgttccgagggagaatatggaggccatttcacctctaaaaaatgggatggttgaagactgggatagtttccaagctattttggatcatacctacaaaatgcatgtcaaatcagaagccagtctccatcctgttctcatgtcagaggcaccgtggaatactagagcaaagagagagaaactgacagagttaatgtttgaacactacaacatccctgccttcttcctttgcaaaactgcagttttgacagcatttgctaatggtcgttctactgggctgattttggacagtggagccactcataccactgcaattccagtccacgatggctatgtccttcaacaaggcattgtgaaatcccctcttgctggagactttattactatgcagtgcagagaactcttccaagaaatgaatattgaattggttcctccatatatgattgcatcaaaagaagctgttcgtgaaggatctccagcaaactggaaaagaaaagagaagttgcctcaggttacgaggtcttggcacaattatatgtgtaattgtgttatccaggattttcaagcttcggtacttcaagtgtcagattcaacttatgatgaacaagtggctgcacagatgccaactgttcattatgaattccccaatggctacaattgtgattttggtgcagagcggctaaagattccagaaggattatttgacccttccaatgtaaaggggttatcaggaaacacaatgttaggagtcagtcatgttgtcaccacaagtgttgggatgtgtgatattgatatcagaccaggtctctatggcagtgtaatagtggcaggaggaaacacactaatacagagttttactgacaggttgaatagagagctgtctcagaaaactcctccaagtatgcggttgaaattgattgcaaataatacaacagtggaacggaggtttagctcatggattggcggctccattctagcctctttgggtacctttcaacagatgtggatttccaagcaagaatatgaagaaggagggaagcagtgtgtagaaagaaaatgcccttgagaaagagttcccaagcttctaccttccttttgtcaccttacgtttcatagctttagtatactcaggaaaagaatgaccatcttttgtagaatgtttatacatttttgcatatttcaatttccacttaaattttttaaagctttaactggctctataaattaagtttgtgctttccttgaaatgcacttattcttattacaagcattttataattttgtataaatgtctattttctctaaatattttgctttcagtaaaatgctttccaactctgtttagtgtattaattaccagtggattggtagaactgctttttattgactagtaaaagttactgcctatgctttttaccttaggcttacagaattaaataaaaattagccattccagaaatatattttggactgttgtgcactgtgattactactttaaggactaaatgtatttctcattattttgaatcaaagtcctccgtttattaacagcaatacccacatcctcttcatagcctattaacaacagaggtaaaactattattcaaattcaaaaactacggtattgcctttgctgtggcagttaccatcaccttcacactctaaggtagcaggtgacatttaaagcctgcttaaatgtcagaatttataaagtgggaatctcatctgaactttatacctgatttttagaagcaaattagcttctaccaaattagctaattagcatgccatattcacacttagaacaactgattagtaaagtcacttgactaaaaacagaatttctttataaaccacttaacatatttactcctgtacacagactattcaagaaaaacaaaatggtaaatttaatagttcagacatcttagacaagacttgacttttgggcttcagcaagatgtggaaacttttttaaaagaatttttgctttctttctctctaaattttccttccgtgctttgatgcgggcacgttttcacgttgcagtatagagaanngtctgtgactatgattaataatattac

SEQ ID NO: 353818 - DNA, 1918 bp, Homo sapiens
  misc_feature (1910)..(1910): n is a, c, g, or t
ccctagtgattggctgataggaggagccagcaagtgtggctgagctccggggtgtgtggacgccgctttgttgcctgaggtgggtggcggtggaagttaagggagtcaggggctatcgctcctcgagactcgcagtcgcggccactgcagtcacttcgccagttagcccttagggtaggagtcgcgccggcagcagccatgagcggcggcgtgtacgggggagatgaagttggagcccttgtttttgacattggatcctatactgtgagagctggttatgctggtgaggactgccccaaggtggattttcctacagctattggtatggtggtagaaagagatgacggaagcacattaatggaaatagatggcgataaaggcaaacaaggcggtcccacctactacatagatactaatgctctgcgtgttccgagggagaatatggaggccatttcacctctaaaaaatgggatggttgaagactgggatagtttccaagctattttggatcatacctacaaaatgcatgtcaaatcagaagccagtctccatcctgttctcatgtcagaggcaccgtggaatactagagcaaagagagagaaactgacagagttaatgtttgaacactacaacatccctgccttcttcctttgcaaaactgcagttttgacagcatttgctaatggtcgttctactgggctgattttggacagtggagccactcataccactgcaattccagtccacgatggctatgtccttcaacaaggcattgtgaaatcccctcttgctggagactttattactatgcagtgcagagaactcttccaagaaatgaatattgaattggttcctccatatatgattgcatcaaaagaagctgttcgtgaaggatctccagcaaactggaaaagaaaagagaagttgcctcaggttacgaggtcttggcacaattatatgtgtaattgtgttatccaggattttcaagcttcggtacttcaagtgtcagattcaacttatgatgaacaagtggctgcacagatgccaactgttcattatgaattccccaatggctacaattgtgattttggtgcagagcggctaaagattccagaaggattatttgacccttccaatgtaaaggggttatcaggaaacacaatgttaggagtcagtcatgttgtcaccacaagtgttgggatgtgtgatattgatatcagaccaggtctctatggcagtgtaatagtggcaggaggaaacacactaatacagagttttactgacaggttgaatagagagctgtctcagaaaactcctccaagtatgcggttgaaattgattgcaaataatacaacagtggaacggaggtttagctcatggattggcggctccattctagcctctttgggtacctttcaacagatgtggatttccaagcaagaatatgaagaaggagggaagcagtgtgtagaaagaaaatgcccttgagaaagagttcccaagcttctaccttccttttgtcaccttacgtttcatagctttagtatactcaggaaaagaatgaccatcttttgtagaatgtttatacatttttgcatatttcaatttccacttaaattttttaaagctttaactggctctataaattaagtttgtgctttccttgaaatgcacttattcttattacaagcattttataattttgtataaatgtctattttctctaaatattttgctttcagtaaaatgctttccaactctgtttagtgtattaattaccagtggattggtagaactgctttttattgactagtaaaagttactgcctatgctttttaccttaggcttacagaattaaataaaaattagccattccagaaatataaaaaaaagaaaacaaaagacaccanacaaaaca

SEQ ID NO: 353819 - DNA, 1637 bp, Homo sapiens
tttttgtagagttgggggtctcactatggtgccgaggctgatcttgaactccgtggattttcctacagctattggtatggtggtagaaagagatgacggaagcacattaatggaaatagatggcgataaaggcaaacaaggcggtcccacctactacatagatactaatgctctgcgtgttccgagggagaatatggaggccatttcacctctaaaaaatgggatggttgaagactgggatagtttccaagctattttggatcatacctacaaaatgcatgtcaaatcagaagccagtctccatcctgttctcatgtcagaggcaccgtggaatactagagcaaagagagagaaactgacagagttaatgtttgaacactacaacatccctgccttcttcctttgcaaaactgcagttttgacagcatttgctaatggtcgttctactgggctgattttggacagtggagccactcataccactgcaattccagtccacgatggctatgtccttcaacaaggcattgtgaaatcccctcttgctggagactttattactatgcagtgcagagaactcttccaagaaatgaatattgaattggttcctccatatatgattgcatcaaaagaagctgttcgtgaaggatctccagcaaactggaaaagaaaagagaagttgcctcaggttacgaggtcttggcacaattatatgtgtaattgtgttatccaggattttcaagcttcggtacttcaagtgtcagattcaacttatgatgaacaagtggctgcacagatgccaactgttcattatgaattccccaatggctacaattgtgattttggtgcagagcggctaaagattccagaaggattatttgacccttccaatgtaaaggggttatcaggaaacacaatgttaggagtcagtcatgttgtcaccacaagtgttgggatgtgtgatattgatatcagaccaggtctctatggcagtgtaatagtggcaggaggaaacacactaatacagagttttactgacaggttgaatagagagctgtctcagaaaactcctccaagtatgcggttgaaattgattgcaaataatacaacagtggaacggaggtttagctcatggattggcggctccattctagcctctttgggtacctttcaacagatgtggatttccaagcaagaatatgaagaaggagggaagcagtgtgtagaaagaaaatgcccttgagaaagagttcccaagcttctaccttccttttgtcaccttacgtttcatagctttagtatactcaggaaaagaatgaccatcttttgtagaatgtttatacatttttgcatatttcaatttccacttaaattttttaaagctttaactggctctataaattaagtttgtgctttccttgaaatgcacttattcttattacaagcattttataattttgtataaatgtctattttctctaaatattttgctttcagtaaaatgctttccaactctgtttagtgtattaattaccagtggattggtagaactgctttttattgactagtaaaagttactgcctatgctttttaccttaggcttacagaattaaataaaaattagccattccagaaatata

SEQ ID NO: 353820 - DNA, 2021 bp, Homo sapiens
ccctagtgattggctgataggaggagccagcaagtgtggctgagctccggggtgtgtggacgccgctttgttgcctgaggtgggtggcggtggaagttaagggagtcaggggctatcgctcctcgagactcgcagtcgcggccactgcagtcacttcgccagttagcccttagggtaggagtcgcgccggcagcagccatgagcggcggcgtgtacgggggagatgaagttggagcccttgtttttgacattggatcctatactgtgagagctggttatgctggtgaggactgccccaaggtggattttcctacagctattggtatggtggtagaaagagatgacggaagcacattaatggaaatagatggcgataaaggcaaacaaggcggtcccacctactacatagatactaatgctctgcgtgttccgagggagaatatggaggccatttcacctctaaaaaatgggatggttgaagactgggatagtttccaagctattttggatcatacctacaaaatgcatgtcaaatcagaagccagtctccatcctgttctcatgtcagaggcaccgtggaatactagagcaaagagagagaaactgacagagttaatgtttgaacactacaacatccctgccttcttcctttgcaaaactgcagttttgacagcgtatccttgaaagagtaatacctttcctcttgaactttattcatcatctacttcactaaacaggataaccttcagggaaaaggcagttttggtgcaccattgtgtgtctactgtgttaaaggaattttagtgccagatttgctaatggtcgttctactgggctgattttggacagtggagccactcataccactgcaattccagtccacgatggctatgtccttcaacaaggcattgtgaaatcccctcttgctggagactttattactatgcagtgcagagaactcttccaagaaatgaatattgaattggttcctccatatatgattgcatcaaaagaagctgttcgtgaaggatctccagcaaactggaaaagaaaagagaagttgcctcaggttacgaggtcttggcacaattatatgtgtaattgtgttatccaggattttcaagcttcggtacttcaagtgtcagattcaacttatgatgaacaagtggctgcacagatgccaactgttcattatgaattccccaatggctacaattgtgattttggtgcagagcggctaaagattccagaaggattatttgacccttccaatgtaaaggggttatcaggaaacacaatgttaggagtcagtcatgttgtcaccacaagtgttgggatgtgtgatattgatatcagaccaggtctctatggcagtgtaatagtggcaggaggaaacacactaatacagagttttactgacaggttgaatagagagctgtctcagaaaactcctccaagtatgcggttgaaattgattgcaaataatacaacagtggaacggaggtttagctcatggattggcggctccattctagcctctttgggtacctttcaacagatgtggatttccaagcaagaatatgaagaaggagggaagcagtgtgtagaaagaaaatgcccttgagaaagagttcccaagcttctaccttccttttgtcaccttacgtttcatagctttagtatactcaggaaaagaatgaccatcttttgtagaatgtttatacatttttgcatatttcaatttccacttaaattttttaaagctttaactggctctataaattaagtttgtgctttccttgaaatgcacttattcttattacaagcattttataattttgtataaatgtctattttctctaaatattttgctttcagtaaaatgctttccaactctgtttagtgtattaattaccagtggattggtagaactgctttttattgactagtaaaagttactgcctatgctttttaccttaggcttacagaattaaataaaaattagccattccagaaatata

SEQ ID NO: 353821 - DNA, 1830 bp, Homo sapiens
ccctagtgattggctgataggaggagccagcaagtgtggctgagctccggggtgtgtggacgccgctttgttgcctgaggtgggtggcggtggaagttaagggagtcaggggctatcgctcctcgagactcgcagtcgcggccactgcagtcacttcgccagttagcccttagggtaggagtcgcgccggcagcagccatgagcggcggcgtgtacgggggagatgaagttggagcccttgtttttgacattggatcctatactgtgagagctggttatgctggtgaggactgccccaaggtggattttcctacagctattggtatggtggtagaaagagatgacggaagcacattaatggaaatagatggcgataaaggcaaacaaggcggtcccacctactacatagatactaatgctctgcgtgttccgagggagaatatggaggccatttcacctctaaaaaatgggatggttgaagactgggatagtttccaagctattttggatcatacctacaaaatgcatgtcaaatcagaagccagtctccatcctgttctcatgtcagaggcaccgtggaatactagagcaaagagagagaaactgacagagttaatgtttgaacactacaacatccctgccttcttcctttgcacagtggagccactcataccactgcaattccagtccacgatggctatgtccttcaacaaggcattgtgaaatcccctcttgctggagactttattactatgcagtgcagagaactcttccaagaaatgaatattgaattggttcctccatatatgattgcatcaaaagaagctgttcgtgaaggatctccagcaaactggaaaagaaaagagaagttgcctcaggttacgaggtcttggcacaattatatgtgtaattgtgttatccaggattttcaagcttcggtacttcaagtgtcagattcaacttatgatgaacaagtggctgcacagatgccaactgttcattatgaattccccaatggctacaattgtgattttggtgcagagcggctaaagattccagaaggattatttgacccttccaatgtaaaggggttatcaggaaacacaatgttaggagtcagtcatgttgtcaccacaagtgttgggatgtgtgatattgatatcagaccaggtctctatggcagtgtaatagtggcaggaggaaacacactaatacagagttttactgacaggttgaatagagagctgtctcagaaaactcctccaagtatgcggttgaaattgattgcaaataatacaacagtggaacggaggtttagctcatggattggcggctccattctagcctctttgggtacctttcaacagatgtggatttccaagcaagaatatgaagaaggagggaagcagtgtgtagaaagaaaatgcccttgagaaagagttcccaagcttctaccttccttttgtcaccttacgtttcatagctttagtatactcaggaaaagaatgaccatcttttgtagaatgtttatacatttttgcatatttcaatttccacttaaattttttaaagctttaactggctctataaattaagtttgtgctttccttgaaatgcacttattcttattacaagcattttataattttgtataaatgtctattttctctaaatattttgctttcagtaaaatgctttccaactctgtttagtgtattaattaccagtggattggtagaactgctttttattgactagtaaaagttactgcctatgctttttaccttaggcttacagaattaaataaaaattagccattccagaaatata

SEQ ID NO: 353822 - DNA, 2275 bp, Homo sapiens
ccctagtgattggctgataggaggagccagcaagtgtggctgagctccggggtgtgtggacgccgctttgttgcctgaggtgggtggcggtggaagttaagggagtcaggggctatcgctcctcgagactcgcagtcgcggccactgcagtcacttcgccagttagcccttagggtaggagtcgcgccggcagcagccatgagcggcggcgtgtacgggggagatgaagttggagcccttgtttttgacattggatcctatactgtgagagctggttatgctggtgaggactgccccaaggtggattttcctacagctattggtatggtggtagaaagagatgacggaagcacattaatggaaatagatggcgataaaggcaaacaaggcggtcccacctactacatagatactaatgctctgcgtgttccgagggagaatatggaggccatttcacctctaaaaaatgggatggttgaagactgggatagtttccaagctattttggatcatacctacaaaatgcatgtcaaatcagaagccagtctccatcctgttctcatgtcagaggcaccgtggaatactagagcaaagagagagaaactgacagagttaatgtttgaacactacaacatccctgccttcttcctttgcaaaactgcagttttgacagcgtatccttgaaagagtaatacctttcctcttgaactttattcatcatctacttcactaaacaggataaccttcagggaaaagatttgctaatggtcgttctactgggctgattttggacagtggagccactcataccactgcaattccagtccacgatggctatgtccttcaacaaggtaaatgtatttaaccaggatacactgagatgattttagatgccatgaggatgcacataatgaaataaaatgatgagtagcactattaaagcatatcagtttctgaataagattttttttaagtatgttaaaaatctttagtatataatgtatatttaaaactgatgcatggctttatttatgtgttgaaggatagttcagttcattctacctgaaaaagttattcacataaatacacccacagaggaaattcgttcaaggaagtttggacttactgccctcttagccttgtttcatctgtttcataggcattgtgaaatcccctcttgctggagactttattactatgcagtgcagagaactcttccaagaaatgaatattgaattggttcctccatatatgattgcatcaaaagaagctgttcgtgaaggatctccagcaaactggaaaagaaaagagaagttgcctcaggttacgaggtcttggcacaattatatgtgtaattgtgttatccaggattttcaagcttcggtacttcaagtgtcagattcaacttatgatgaacaagtggctgcacagatgccaactgttcattatgaattccccaatggctacaattgtgattttggtgcagagcggctaaagattccagaaggattatttgacccttccaatgtaaaggggttatcaggaaacacaatgttaggagtcagtcatgttgtcaccacaagtgttgggatgtgtgatattgatatcagaccaggtctctatggcagtgtaatagtggcaggaggaaacacactaatacagagttttactgacaggttgaatagagagctgtctcagaaaactcctccaagtatgcggttgaaattgattgcaaataatacaacagtggaacggaggtttagctcatggattggcggctccattctagcctctttgggtacctttcaacagatgtggatttccaagcaagaatatgaagaaggagggaagcagtgtgtagaaagaaaatgcccttgagaaagagttcccaagcttctaccttccttttgtcaccttacgtttcatagctttagtatactcaggaaaagaatgaccatcttttgtagaatgtttatacatttttgcatatttcaatttccacttaaattttttaaagctttaactggctctataaattaagtttgtgctttccttgaaatgcacttattcttattacaagcattttataattttgtataaatgtctattttctctaaatattttgctttcagtaaaatgctttccaactctgtttagtgtattaattaccagtggattggtagaactgctttttattgactagtaaaagttactgcctatgctttttaccttaggcttacagaattaaataaaaattagccattccagaaatata

SEQ ID NO: 353823 - DNA, 1823 bp, Homo sapiens
ccctagtgattggctgataggaggagccagcaagtgtggctgagctccggggtgtgtggacgccgctttgttgcctgagatgaagttggagcccttgtttttgacattggatcctatactgtgagagctggttatgctggtgaggactgccccaaggtggattttcctacagctattggtatggtggtagaaagagatgacggaagcacattaatggaaatagatggcgataaaggcaaacaaggcggtcccacctactacatagatactaatgctctgcgtgttccgagggagaatatggaggccatttcacctctaaaaaatgggatggttgaagactgggatagtttccaagctattttggatcatacctacaaaatgcatgtcaaatcagaagccagtctccatcctgttctcatgtcagaggcaccgtggaatactagagcaaagagagagaaactgacagagttaatgtttgaacactacaacatccctgccttcttcctttgcaaaactgcagttttgacagcgtatccttgaaagagtaatacctttcctcttgaactttattcatcatctacttcactaaacaggataaccttcagggaaaagatttgctaatggtcgttctactgggctgattttggacagtggagccactcataccactgcaattccagtccacgatggctatgtccttcaacaaggcattgtgaaatcccctcttgctggagactttattactatgcagtgcagagaactcttccaagaaatgaatattgaattggttcctccatatatgattgcatcaaaagaagctgttcgtgaaggatctccagcaaactggaaaagaaaagagaagttgcctcaggttacgaggtcttggcacaattatatgtgtaattgtgttatccaggattttcaagcttcggtacttcaagtgtcagattcaacttatgatgaacaagtggctgcacagatgccaactgttcattatgaattccccaatggctacaattgtgattttggtgcagagcggctaaagattccagaaggattatttgacccttccaatgtaaaggggttatcaggaaacacaatgttaggagtcagtcatgttgtcaccacaagtgttgggatgtgtgatattgatatcagaccaggtctctatggcagtgtaatagtggcaggaggaaacacactaatacagagttttactgacaggttgaatagagagctgtctcagaaaactcctccaagtatgcggttgaaattgattgcaaataatacaacagtggaacggaggtttagctcatggattggcggctccattctagcctctttgggtacctttcaacagatgtggatttccaagcaagaatatgaagaaggagggaagcagtgtgtagaaagaaaatgcccttgagaaagagttcccaagcttctaccttccttttgtcaccttacgtttcatagctttagtatactcaggaaaagaatgaccatcttttgtagaatgtttatacatttttgcatatttcaatttccacttaaattttttaaagctttaactggctctataaattaagtttgtgctttccttgaaatgcacttattcttattacaagcattttataattttgtataaatgtctattttctctaaatattttgctttcagtaaaatgctttccaactctgtttagtgtattaattaccagtggattggtagaactgctttttattgactagtaaaagttactgcctatgctttttaccttaggcttacagaattaaataaaaattagccattccagaaatata

SEQ ID NO: 353824 - DNA, 1894 bp, Homo sapiens
ccctagtgattggctgataggaggagccagcaagtgtggctgagctccggggtgtgtggacgccgctttgttgcctgaggtgggtggcggtggaagttaagggagtcaggggctatcgctcctcgagactcgcagtcgcggccactgcagtcacttcgccagttagcccttagggtaggagtcgcgccggcagcagccatgagcggcggcgtgtacgggggagatgaagttggagcccttgtttttgacattggatcctatactgtgagagctggttatgctggtgaggactgccccaaggtggattttcctacagctattggtatggtggtagaaagagatgacggaagcacattaatggaaatagatggcgataaaggcaaacaaggcggtcccacctactacatagatactaatgctctgcgtgttccgagggagaatatggaggccatttcacctctaaaaaatgggatggttgaagactgggatagtttccaagctattttggatcatacctacaaaatgcatgtcaaatcagaagccagtctccatcctgttctcatgtcagaggcaccgtggaatactagagcaaagagagagaaactgacagagttaatgtttgaacactacaacatccctgccttcttcctttgcaaaactgcagttttgacagcatttgctaatggtcgttctactgggctgattttggacagtggagccactcataccactgcaattccagtccacgatggctatgtccttcaacaaggcattgtgaaatcccctcttgctggagactttattactatgcagtgcagagaactcttccaagaaatgaatattgaattggttcctccatatatgattgcatcaaaagaagctgttcgtgaaggatctccagcaaactggaaaagaaaagagaagttgcctcaggttacgaggtcttggcacaattatatgtgtaattgtgttatccaggattttcaagcttcggtacttcaagtgtcagattcaacttatgatgaacaagtggctgcacagatgccaactgttcattatgaattccccaatggctacaattgtgattttggtgcagagcggctaaagattccagaaggattatttgacccttccaatgtaaaggggttatcaggaaacacaatgttaggagtcagtcatgttgtcaccacaagtgttgggatgtgtgatattgatatcagaccaggtctctatggcagtgtaatagtggcaggaggaaacacactaatacagagttttactgacaggttgaatagagagctgtctcagaaaactcctccaagtatgcggttgaaattgattgcaaataatacaacagtggaacggaggtttagctcatggattggcggctccattctagcctctttgggtacctttcaacagatgtggatttccaagcaagaatatgaagaaggagggaagcagtgtgtagaaagaaaatgcccttgagaaagagttcccaagcttctaccttccttttgtcaccttacgtttcatagctttagtatactcaggaaaagaatgaccatcttttgtagaatgtttatacatttttgcatatttcaatttccacttaaattttttaaagctttaactggctctataaattaagtttgtgctttccttgaaatgcacttattcttattacaagcattttataattttgtataaatgtctattttctctaaatattttgctttcagtaaaatgctttccaactctgtttagtgtattaattaccagtggattggtagaactgctttttattgactagtaaaagttactgcctatgcttgtgttacgcgttgagtacacttaccccagaaaagttaagatagatacgtagccttgctgg

SEQ ID NO: 353825 - DNA, 1535 bp, Homo sapiens
agaatcgtcttctacatttcttcctttattttactttcagaccgtgctgaggtacttgcagttctctgacctcgctgtgttctcttgcttcttggtcttcccacatgctcctactcttgcccatattcccttccccagattttactattgaatatctcaggaataggtttcccttttacatcaccatcttccctgggacatcctgagcttttctttttacagctttattcatcatctacttcactaaacaggataaccttcagggaaaaggcagttttggtgcaccattgtgtgtctactgtgttaaaggaattttagtgccagatttgctaatggtcgttctactgggctgattttggacagtggagccactcataccactgcaattccagtccacgatggctatgtccttcaacaaggcattgtgaaatcccctcttgctggagactttattactatgcagtgcagagaactcttccaagaaatgaatattgaattggttcctccatatatgattgcatcaaaagaagctgttcgtgaaggatctccagcaaactggaaaagaaaagagaagttgcctcaggttacgaggtcttggcacaattatatgtgtaattgtgttatccaggattttcaagcttcggtacttcaagtgtcagattcaacttatgatgaacaagtggctgcacagatgccaactgttcattatgaattccccaatggctacaattgtgattttggtgcagagcggctaaagattccagaaggattatttgacccttccaatgtaaaggggttatcaggaaacacaatgttaggagtcagtcatgttgtcaccacaagtgttgggatgtgtgatattgatatcagaccaggtctctatggcagtgtaatagtggcaggaggaaacacactaatacagagttttactgacaggttgaatagagagctgtctcagaaaactcctccaagtatgcggttgaaattgattgcaaataatacaacagtggaacggaggtttagctcatggattggcggctccattctagcctctttgggtacctttcaacagatgtggatttccaagcaagaatatgaagaaggagggaagcagtgtgtagaaagaaaatgcccttgagaaagagttcccaagcttctaccttccttttgtcaccttacgtttcatagctttagtatactcaggaaaagaatgaccatcttttgtagaatgtttatacatttttgcatatttcaatttccacttaaattttttaaagctttaactggctctataaattaagtttgtgctttccttgaaatgcacttattcttattacaagcattttataattttgtataaatgtctattttctctaaatattttgctttcagtaaaatgctttccaactctgtttagtgtattaattaccagtggattggtagaactgctttttattgactagtaaaagttactgcctatgctttttaccttaggcttacagaattaaataaaaattagccattccagaaatata

SEQ ID NO: 353826 - DNA, 1124 bp, Homo sapiens
taaacagagttggaaagcattttactgaaagcaaaatatttagagaaaatagacatttatacaaaattataaaatgcttgtaataagaataagtgcatttcaaggaaagcacaaacttaatttatagagccagttaaagctttaaaaaatttaagtggaaattgaaatatgcaaaaatgtataaacattctacaaaagatggtcatgtgttatccaggattttcaagcttcggtacttcaagtgtcagattcaacttatgatgaacaagtggctgcacagatgccaactgttcattatgaattccccaatggctacaattgtgattttggtgcagagcggctaaagattccagaaggattatttgacccttccaatgtaaaggggttatcaggaaacacaatgttaggagtcagtcatgttgtcaccacaagtgttgggatgtgtgatattgatatcagaccaggtctctatggcagtgtaatagtggcaggaggaaacacactaatacagagttttactgacaggttgaatagagagctgtctcagaaaactcctccaagtatgcggttgaaattgattgcaaataatacaacagtggaacggaggtttagctcatggattggcggctccattctagcctctttgggtacctttcaacagatgtggatttccaagcaagaatatgaagaaggagggaagcagtgtgtagaaagaaaatgcccttgagaaagagttcccaagcttctaccttccttttgtcaccttacgtttcatagctttagtatactcaggaaaagaatgaccatcttttgtagaatgtttatacatttttgcatatttcaatttccacttaaattttttaaagctttaactggctctataaattaagtttgtgctttccttgaaatgcacttattcttattacaagcattttataattttgtataaatgtctattttctctaaatattttgctttcagtaaaatgctttccaactctgtttagtgtattaattaccagtggattggtagaactgctttttattgactagtaaaagttactgcctatgctttttaccttaggcttacagaattaaataaaaattagccattccagaaatata

SEQ ID NO: 353827 - DNA, 1203 bp, Homo sapiens
ccctagtgattggctgataggaggagccagcaagtgtggctgagctccggggtgtgtggacgccgctttgttgcctgaggtgggtggcggtggaagttaagggagtcaggggctatcgctcctcgagactcgcagtcgcggccactgcagtcacttcgccagttagcccttagggtaggagtcgcgccggcagcagccatgagcggcggcgtgtacgggggagatgaagttggagcccttgtttttgacattggatcctatactgtgagagctggttatgctggtgaggactgccccaaggtggattttcctacagctattggtatggtggtagaaagagatgacggaagcacattaatggaaatagatggcgataaaggcaaacaaggcggtcccacctactacatagatactaatgctctgcgtgttccgagggagaatatggaggccatttcacctctaaaaaatgggatggttgaagactgggatagtttccaagctattttggatcatacctacaaaatgcatgtcaaatcagaagccagtctccatcctgttctcatgtcagaggcaccgtggaatactagagcaaagagagagaaactgacagagttaatgtttgaacactacaacatccctgccttcttcctttgcaaaactgcagttttgacagcatttgctaatggtcgttctactgggctgattttggacagtggagccactcataccactgcaattccagtccacgatggctatgtccttcaacaaggcattgtgaaatcccctcttgctggagactttattactatgcagtgcagagaactcttccaagaaatgaatattgaattggttcctccatatatgattgcatcaaaaggaaaggccttggttaccgcgggaaaagggaattctctccagagacaaaatgtggaaaaggacaaagcacgaagtgtgaccatacagagatatacagaagggattcctttatgggggacggaaacccacgaaatttataattttaatttggttgggtttcaaaattataggctacggttaataaatacaccaagaggcaaattttatattacccacaagaaacccttatcacggaggattaaaagcctttataccaaaaaagggattgggtttacaccaagggagaatttttttacacaataatacttttattaaattttgcggaaa

SEQ ID NO: 353828 - DNA, 1088 bp, Homo sapiens
ttgggatgataattaggttggtgttggatgaaatgaaataataaagacttagcacagcaccagatttatagtgttaggtgtggatttgctattttaggatagaaattgtgaatgctatacttcagtatgcagctttttaaagtttgtatgttttctcatcatataatcgcatgttaaaagccataatcaaagtacttttaaaagtctgtacattagtctaacctatgcttgttatcttggctatttcaaaattaccgtattttaatcagtgtttgaaccacagggagccattatgaagtctgtcaaaattgaatttcctggctgggtgcaagtggctcatgcatgtaatcccagcactttgggaggctgagatgggccgattgcttgagtgcaaatgtgaagaccagcctggacaatatggcgaggaagacccctgtctctatttaaaaaaaaaaaaaaaaaaagaattttctaagttgagtcacaagatttgattgtactaatgcatattcttctatttcagagtatgcggttgaaattgattgcaaataatacaacagtggaacggaggtttagctcatggattggcggctccattctagcctctttgggtacctttcaacagatgtggatttccaagcaagaatatgaagaaggagggaagcagtgtgtagaaagaaaatgcccttgagaaagagttcccaagcttctaccttccttttgtcaccttacgtttcatagctttagtatactcaggaaaagaatgaccatcttttgtagaatgtttatacatttttgcatatttcaatttccacttaaattttttaaagctttaactggctctataaattaagtttgtgctttccttgaaatgcacttattcttattacaagcattttataattttgtataaatgtctattttctctaaatattttgctttcagtaaaatgctttccaactctgtttagtgtattaattaccagtggattggtagaactgctttttattgactagtaaaagttactgcctatgctttttaccttaggcttacagaattaaataaaaattagccattccagaaatata

SEQ ID NO: 353829 - DNA, 611 bp, Homo sapiens
ctaatgaagaagaggttacgttttacagagacgcgaaaaagccctataggtgcggttgaaattgattgcaaataatacaacagtggaacggaggtttagctcatggattggcggctccattctagcctctttgggtacctttcaacagatgtggatttccaagcaagaatatgaagaaggagggaagcagtgtgtagaaagaaaatgcccttgagaaagagttcccaagcttctaccttccttttgtcaccttacgtttcatagctttagtatactcaggaaaagaatgaccatcttttgtagaatgtttatacatttttgcatatttcaatttccacttaaattttttaaagctttaactggctctataaattaagtttgtgctttccttgaaatgcacttattcttattacaagcattttataattttgtataaatgtctattttctctaaatattttgctttcagtaaaatgctttccaactctgtttagtgtattaattaccagtggattggtagaactgctttttattgactagtaaaagttactgcctatgctttttaccttaggcttacagaattaaataaaaattagccattccagaaatata

SEQ ID NO: 353830 - DNA, 626 bp, Homo sapiens
gcggccatcaggccagggcagatatgtgttggttgtccggacgaacgcgggaggggttacgatgatgcggttgaaattgattgcaaataatacaacagtggaacggaggtttagctcatggattggcggctccattctagcctctttgggtacctttcaacagatgtggatttccaagcaagaatatgaagaaggagggaagcagtgtgtagaaagaaaatgcccttgagaaagagttcccaagcttctaccttccttttgtcaccttacgtttcatagctttagtatactcaggaaaagaatgaccatcttttgtagaatgtttatacatttttgcatatttcaatttccacttaaattttttaaagctttaactggctctataaattaagtttgtgctttccttgaaatgcacttattcttattacaagcattttataattttgtataaatgtctattttctctaaatattttgctttcagtaaaatgctttccaactctgtttagtgtattaattaccagtggattggtagaactgctttttattgactagtaaaagttactgcctatgctttttaccttaggcttacagaattaaataaaaattagccattccagaaatata

SEQ ID NO: 353831 - DNA, 620 bp, Homo sapiens
  misc_feature (58)..(58): n is a, c, g, or t
ttcccctctccttcttcttcaacttacccccccaccacgtacacaccccctcgaaatnatgcggttgaaattgattgcaaataatacaacagtggaacggaggtttagctcatggattggcggctccattctagcctctttgggtacctttcaacagatgtggatttccaagcaagaatatgaagaaggagggaagcagtgtgtagaaagaaaatgcccttgagaaagagttcccaagcttctaccttccttttgtcaccttacgtttcatagctttagtatactcaggaaaagaatgaccatcttttgtagaatgtttatacatttttgcatatttcaatttccacttaaattttttaaagctttaactggctctataaattaagtttgtgctttccttgaaatgcacttattcttattacaagcattttataattttgtataaatgtctattttctctaaatattttgctttcagtaaaatgctttccaactctgtttagtgtattaattaccagtggattggtagaactgctttttattgactagtaaaagttactgcctatgctttttaccttaggcttacagaattaaataaaaattagccattccagaaatata

SEQ ID NO: 353832 - DNA, 619 bp, Homo sapiens
ctaatgtagtatactctttaatgtcggaacaacatctaaacacaaaattcagaatcatggcggttgaaattgattgcaaataatacaacagtggaacggaggtttagctcatggattggcggctccattctagcctctttgggtacctttcaacagatgtggatttccaagcaagaatatgaagaaggagggaagcagtgtgtagaaagaaaatgcccttgagaaagagttcccaagcttctaccttccttttgtcaccttacgtttcatagctttagtatactcaggaaaagaatgaccatcttttgtagaatgtttatacatttttgcatatttcaatttccacttaaattttttaaagctttaactggctctataaattaagtttgtgctttccttgaaatgcacttattcttattacaagcattttataattttgtataaatgtctattttctctaaatattttgctttcagtaaaatgctttccaactctgtttagtgtattaattaccagtggattggtagaactgctttttattgactagtaaaagttactgcctatgctttttaccttaggcttacagaattaaataaaaattagccattccagaaatata

SEQ ID NO: 353833 - DNA, 625 bp, Homo sapiens
cgtactctgcccctatcacgttttgtctagcaccatgacataacgacccccccccttacgatgatgcggttgaaattgattgcaaataatacaacagtggaacggaggtttagctcatggattggcggctccattctagcctctttgggtacctttcaacagatgtggatttccaagcaagaatatgaagaaggagggaagcagtgtgtagaaagaaaatgcccttgagaaagagttcccaagcttctaccttccttttgtcaccttacgtttcatagctttagtatactcaggaaaagaatgaccatcttttgtagaatgtttatacatttttgcatatttcaatttccacttaaattttttaaagctttaactggctctataaattaagtttgtgctttccttgaaatgcacttattcttattacaagcattttataattttgtataaatgtctattttctctaaatattttgctttcagtaaaatgctttccaactctgtttagtgtattaattaccagtggattggtagaactgctttttattgactagtaaaagttactgcctatgctttttaccttaggcttacagaattaaataaaaattagccattccagaaatata

SEQ ID NO: 353834 - DNA, 750 bp, Homo sapiens
ccctagtgattggctgataggaggagccagcaagtgtggctgagctccggggtgtgtggacgccgctttgttgcctgaggtgggtggcggtggaagttaagggagtcaggggctatcgctcctcgagactcgcagtcgcggccactgcagtcacttcgccagttagcccttagggtaggagtcgcgccggcagcagccatgagcggcggcgtgtacgggggagatgaagttggagcccttgtttttgacattggatcctatactgtgagagctggttatgctggtgaggactgccccaaggtggattttcctacagctattggtatggtggtagaaagagatgacggaagcacattaatggaaatagatggcgataaaggcaaacaaggcggtcccacctactacatagatactaatgctctgcgtgttccgagggagaatatggaggccatttcacctctaaaaaatgggatgggtatgatgttttccccatggaattgattatggagtgtacatgttatattttagatacaaagtagtagcttcctataagttgaacatcaaccatggttttttgttttgttttgttttttattccacaaactgatttccagacactgagaatacaaagatgcataagaaatgttccttttcattaaaagcttacagttagttgggggaaatagatgtatatatacaaataatggtacactgtgggataagtggtacaatataggtatgtgcaatgag

SEQ ID NO: 353835 - DNA, 754 bp, Homo sapiens
acaagtttgaccttccttcaataaagggggtcataaggaacaaaagtcctccgtttattaacagcaatacccacatcctcttcatagcctattaacaacagaggtaaaactattattcaaattcaaaaactacggtattgcctttgctgtggcagttaccatcaccttcacactctaaggtagcaggtgacatttaaagcctgcttagaagcaaattagcttctaccaaattagctaattagcatgccatattcacacttagaacaactgattagtaaagtcacttgactaaaaacagaatttctttataaaccacttaacatatttactcctgtacacagactattcaagaaaaacaaaatggtaaatttaatagttcagacatcttagacaagacttgacttttgggcttcagcaagatgtggaaacttttttaaaagaatttttgctttctttctctctaaattttccttccgtgctttgatgcgggctcgtttctcacgttccagtctgagaaaatggtccacataaggcaaggcaaagaatcgtttcctattgtatcttttatttaggtgccaaggtataacccactgcttgaacttgtgccagatgattcttccaaagatgtctcttctccaagcaccaggtctagctctttcttgaccagtctgaagaagccttagggcatcttctctttcctggacaactttatctaatgcatccatggaatctacggttgtccttcgggtggacg

SEQ ID NO: 353836 - DNA, 594 bp, Homo sapiens
gggaggtttataaagggggggcccatctgcacttatccctgtttttagaagcaaattagcttctaccaaattagctaattagcatgccatattcacacttagaacaactgattagtaaagtcacttgactaaaaacagaatttctttataaaccacttaacatatttactcctgtacacagactattcaagaaaaacaaaatggtaaatttaatagttcagacatcttagacaagacttgacttttgggcttcagcaagatgtggaaacttttttaaaagaatttttgctttctttctctctaaattttccttccgtgctttgatgcgggctcgtttctcacgttccagtctgagaaaatggtccacataaggcaaggcaaagaatcgtttcctattgtatcttttatttaggtgccaaggtataacccactgcttgaacttgtgccagatgattcttccaaagatgtctcttctccaagcaccaggtctagctctttcttgaccagtctgaagaagccttagggcatcttctctttcctggacaactttatctaatgcatccatggaatctacggttgtccttcgggtggacg

SEQ ID NO: 353837 - DNA, 195 bp, Homo sapiens
ttggcctcctgctctagggttagaagcatgtttctttctttcagtaagacatacctatacaaaagaacacaaaccttgtgatgctattctgtggttatgttaataaagttgtgatttctgacatcaaaattaattatctgtacttgaaagtcacttagaggcgaggtgctgtggctcacacctgtaatcccagca

SEQ ID NO: 353838 - DNA, 228 bp, Homo sapiens
atgttaggagtcagtcatgttgtcaccacaagtgttgggatgtgtgatattgacatcagaccagtaagtgccagtctcctgttacggtttaaaggtatcttttaggggactgaaatgtccccaaatcattgttaggttgacagtgatctaatggttgtcagtgtcattgactttgaggttcattttataacagtatatgtaaaaagatgaagtactagaaaaggaaaa

SEQ ID NO: 353839 - DNA, 509 bp, Homo sapiens
ataaatccagcagtagtatcatcagaaggccatacaattcttctgtacttcctattatcattctgatcacattctgggcctctaataagtatttattgaattgaataacatttacttcatattttaggtctgttagattaattacatttgggacaggtctgggggctggagggaccaaaaagaagttctatatatctagaaggcaaaggtaatctctatataaagtaatgtggtatgaagttgatctgtaaaatcagtaggttctgtatactaaagtattaattgttaagtcatagaaacaatttctcaaaagatgctatattcatcttcaactatgcattatttccaagttactaatcttatattctagttgaagactgggatagtttccaagctattttggatcatacctacaaaatgcatgtcaaatcagaagccagtctccatcctgttctcatgtcagaggcaccggtgagataaagattttctttttcacgtttctctagttg

SEQ ID NO: 353840 - DNA, 1741 bp, Homo sapiens
ccctagtgattggctgataggaggagccagcaagtgtggctgagctccggggtgtgtggacgccgctttgttgcctgagatgaagttggagcccttgtttttgacattggatcctatactgtgagagctggttatgctggtgaggactgccccaaggtggattttcctacagctattggtatggtggtagaaagagatgacggaagcacattaatggaaatagatggcgataaaggcaaacaaggcggtcccacctactacatagatactaatgctctgcgtgttccgagggagaatatggaggccatttcacctctaaaaaatgggatggttgaagactgggatagtttccaagctattttggatcatacctacaaaatgcatgtcaaatcagaagccagtctccatcctgttctcatgtcagaggcaccgtggaatactagagcaaagagagagaaactgacagagttaatgtttgaacactacaacatccctgccttcttcctttgcaaaactgcagttttgacagcatttgctaatggtcgttctactgggctgattttggacagtggagccactcataccactgcaattccagtccacgatggctatgtccttcaacaaggcattgtgaaatcccctcttgctggagactttattactatgcagtgcagagaactcttccaagaaatgaatattgaattggttcctccatatatgattgcatcaaaagaagctgttcgtgaaggatctccagcaaactggaaaagaaaagagaagttgcctcaggttacgaggtcttggcacaattatatgtgtaattgtgttatccaggattttcaagcttcggtacttcaagtgtcagattcaacttatgatgaacaagtggctgcacagatgccaactgttcattatgaattccccaatggctacaattgtgattttggtgcagagcggctaaagattccagaaggattatttgacccttccaatgtaaaggggttatcaggaaacacaatgttaggagtcagtcatgttgtcaccacaagtgttgggatgtgtgatattgatatcagaccaggtctctatggcagtgtaatagtggcaggaggaaacacactaatacagagttttactgacaggttgaatagagagctgtctcagaaaactcctccaagtatgcggttgaaattgattgcaaataatacaacagtggaacggaggtttagctcatggattggcggctccattctagcctctttgggtacctttcaacagatgtggatttccaagcaagaatatgaagaaggagggaagcagtgtgtagaaagaaaatgcccttgagaaagagttcccaagcttctaccttccttttgtcaccttacgtttcatagctttagtatactcaggaaaagaatgaccatcttttgtagaatgtttatacatttttgcatatttcaatttccacttaaattttttaaagctttaactggctctataaattaagtttgtgctttccttgaaatgcacttattcttattacaagcattttataattttgtataaatgtctattttctctaaatattttgctttcagtaaaatgctttccaactctgtttagtgtattaattaccagtggattggtagaactgctttttattgactagtaaaagttactgcctatgctttttaccttaggcttacagaattaaataaaaattagccattccagaaatata

SEQ ID NO: 353841 - DNA, 800 bp, Homo sapiens
ggacgcgtgggtcgacccacgcgtcgacagtggagccactcataccactgcaattccagtccacgatggctatgtccttcaacaaggcattgtgaaatcccctcttgctggagactttattactatgcagtgcagagaactcttccaagaaatgaatattgaattggttcctccatatatgattgcatcaaaagaagctgttcgtgaaggatctccagcaaactggaaaagaaaagagaagttgcctcaggttacgaggtcttggcacaattatatgtgtaattgtgttatccaggattttcaagcttcggtacttcaagtgtcagattcaacttatgatgaacaagtggctgcacagatgccaactgttcattatgaattccccaatggctacaattgtgattttggtgcagagcggctaaagattccagaaggattatttgacccttccaatgtaaaggggttatcaggaaacacaatgttaggagtcagtcatgttgtcaccacaagtgttgggatgtgtgatattgatatcagaccaggtctctatggcagtgtaatagtggcaggaggaaacacactaatacagagttttactgacaggttgaatagagagctgtctcagaaaactcctccaagtatgcggttgaaattgattgcaaataatacaacagtggaacggaggtttagctcatggattggcggctccattctagcctctttggttagtagatgagctactttgcaaaaatattcttactgaattatactaaatttagtaaaaatacaaaaaataattc

SEQ ID NO: 353842 - DNA, 1712 bp, Homo sapiens
ggacgcgtgggtcgacccacgcgtcggtggacgccgctttgttgcctgagatgaagttggagcccttgtttttgacattggatcctatactgtgagagctggttatgctggtgaggactgccccaaggtggattttcctacagctattggtatggtggtagaaagagatgacggaagcacattaatggaaatagatggcgataaaggcaaacaaggcggtcccacctactacatagatactaatgctctgcgtgttccgagggagaatatggaggccatttcacctctaaaaaatgggatggttgaagactgggatagtttccaagctattttggatcatacctacaaaatgcatgtcaaatcagaagccagtctccatcctgttctcatgtcagaggcaccgtggaatactagagcaaagagagagaaactgacagagttaatgtttgaacactacaacatccctgccttcttcctttgcaaaactgcagttttgacagcatttgctaatggtcgttctactgggctgattttggacagtggagccactcataccactgcaattccagtccacgatggctatgtccttcaacaaggcattgtgaaatcccctcttgctggagactttattactatgcagtgcagagaactcttccaagaaatgaatattgaattggttcctccatatatgattgcatcaaaagaagctgttcgtgaaggatctccagcaaactggaaaagaaaagagaagttgcctcaggttacgaggtcttggcacaattatatgtgtaattgtgttatccaggattttcaagcttcggtacttcaagtgtcagattcaacttatgatgaacaagtggctgcacagatgccaactgttcattatgaattccccaatggctacaattgtgattttggtgcagagcggctaaagattccagaaggattatttgacccttccaatgtaaaggggttatcaggaaacacaatgttaggagtcagtcatgttgtcaccacaagtgttgggatgtgtgatattgatatcagaccaggtctctatggcagtgtaatagtggcaggaggaaacacactaatacagagttttactgacaggttgaatagagagctgtctcagaaaactcctccaagtatgcggttgaaattgattgcaaataatacaacagtggaacggaggtttagctcatggattggcggctccattctagcctctttgggtacctttcaacagatgtggatttccaagcaagaatatgaagaaggagggaagcagtgtgtagaaagaaaatgcccttgagaaagagttcccaagcttctaccttccttttgtcaccttacgtttcatagctttagtatactcaggaaaagaatgaccatcttttgtagaatgtttatacatttttgcatatttcaatttccacttaaattttttaaagctttaactggctctataaattaagtttgtgctttccttgaaatgcacttattcttattacaagcattttataattttgtataaatgtctattttctctaaatattttgctttcagtaaaatgctttccaactctgtttagtgtattaattaccagtggattggtagaactgctttttattgactagtaaaagttactgcctatgctttttaccttaggcttacagaattaaataaaaattagccattccagaaatata

SEQ ID NO: 353843 - DNA, 1908 bp, Homo sapiens
  misc_feature (3)..(3): n is a, c, g, or t
canaagaaaagtttgtaaaaaaagaggtggtacggtccggaattcccgggagggtgggtggcggtggaagttaagggagtcaggggctatcgctcctcgagactcgcagtcgcggccactgcagtcacttcgccagttagcccttagggtaggagtcgcgccggcagcagccatgagcggcggcgtgtacgggggaaggtgagtgagtgcggccggacgagagagcgcgccttttcggcgtgtgggatgaagttggagcccttgtttttgacattggatcctatactgtgagagctggttatgctggtgaggactgccccaaggtggattttcctacagctattggtatggtggtagaaagagatgacggaagcacattaatggaaatagatggcgataaaggcaaacaaggcggtcccacctactacatagatactaatgctctgcgtgttccgagggagaatatggaggccatttcacctctaaaaaatgggatggttgaagactgggatagtttccaagctattttggatcatacctacaaaatgcatgtcaaatcagaagccagtctccatcctgttctcatgtcagaggcaccgtggaatactagagcaaagagagagaaactgacagagttaatgtttgaacactacaacatccctgccttcttcctttgcaaaactgcagttttgacagcatttgctaatggtcgttctactgggctgattttggacagtggagccactcataccactgcaattccagtccacgatggctatgtccttcaacaaggcattgtgaaatcccctcttgctggagactttattactatgcagtgcagagaactcttccaagaaatgaatattgaattggttcctccatatatgattgcatcaaaagaagctgttcgtgaaggatctccagcaaactggaaaagaaaagagaagttgcctcaggttacgaggtcttggcacaattatatgtgtaattgtgttatccaggattttcaagcttcggtacttcaagtgtcagattcaacttatgatgaacaagtggctgcacagatgccaactgttcattatgaattccccaatggctacaattgtgattttggtgcagagcggctaaagattccagaaggattatttgacccttccaatgtaaaggggttatcaggaaacacaatgttaggagtcagtcatgttgtcaccacaagtgttgggatgtgtgatattgatatcagaccaggtctctatggcagtgtaatagtggcaggaggaaacacactaatacagagttttactgacaggttgaatagagagctgtctcagaaaactcctccaagtatgcggttgaaattgattgcaaataatacaacagtggaacggaggtttagctcatggattggcggctccattctagcctctttgggtacctttcaacagatgtggatttccaagcaagaatatgaagaaggagggaagcagtgtgtagaaagaaaatgcccttgagaaagagttcccaagcttctaccttccttttgtcaccttacgtttcatagctttagtatactcaggaaaagaatgaccatcttttgtagaatgtttatacatttttgcatatttcaatttccacttaaattttttaaagctttaactggctctataaattaagtttgtgctttccttgaaatgcacttattcttattacaagcattttataattttgtataaatgtctattttctctaaatattttgctttcagtaaaatgctttccaactctgtttagtgtattaattaccagtggattggtagaactgctttttattgactagtaaaagttactgcctatgctttttaccttaggcttacagaattaaataaaaattagccattccagaaatata

SEQ ID NO: 353844 - DNA, 2101 bp, Homo sapiens
  misc_feature (1914)..(1914): n is a, c, g, or t
  misc_feature (1918)..(1918): n is a, c, g, or t
  misc_feature (1925)..(1925): n is a, c, g, or t
  misc_feature (1930)..(1930): n is a, c, g, or t
  misc_feature (1932)..(1933): n is a, c, g, or t
ccctagtgattggctgataggaggagccagcaagtgtggctgagctccggggtgtgtggacgccgctttgttgcctgaggtgggtggcggtggaagttaagggagtcaggggctatcgctcctcgagactcgcagtcgcggccactgcagtcacttcgccagttagcccttagggtaggagtcgcgccggcagcagccatgagcggcggcgtgtacgggggagatgaagttggagcccttgtttttgacattggatcctatactgtgagagctggttatgctggtgaggactgccccaaggtggattttcctacagctattggtatggtggtagaaagagatgacggaagcacattaatggaaatagatggcgataaaggcaaacaaggcggtcccacctactacatagatactaatgctctgcgtgttccgagggagaatatggaggccatttcacctctaaaaaatgggatggttgaagactgggatagtttccaagctattttggatcatacctacaaaatgcatgtcaaatcagaagccagtctccatcctgttctcatgtcagaggcaccgtggaatactagagcaaagagagagaaactgacagagttaatgtttgaacactacaacatccctgccttcttcctttgcaaaactgcagttttgacagcatttgctaatggtcgttctactgggctgattttggacagtggagccactcataccactgcaattccagtccacgatggctatgtccttcaacaaggcattgtgaaatcccctcttgctggagactttattactatgcagtgcagagaactcttccaagaaatgaatattgaattggttcctccatatatgattgcatcaaaagaagctgttcgtgaaggatctccagcaaactggaaaagaaaagagaagttgcctcaggttacgaggtcttggcacaattatatgtgtaattgtgttatccaggattttcaagcttcggtacttcaagtgtcagattcaacttatgatgaacaagtggctgcacagatgccaactgttcattatgaattccccaatggctacaattgtgattttggtgcagagcggctaaagattccagaaggattatttgacccttccaatgtaaaggggttatcaggaaacacaatgttaggagtcagtcatgttgtcaccacaagtgttgggatgtgtgatattgatatcagaccaggtctctatggcagtgtaatagtggcaggaggaaacacactaatacagagttttactgacaggttgaatagagagctgtctcagaaaactcctccaagtatgcggttgaaattgattgcaaataatacaacagtggaacggaggtttagctcatggattggcggctccattctagcctctttgggtacctttcaacagatgtggatttccaagcaagaatatgaagaaggagggaagcagtgtgtagaaagaaaatgcccttgagaaagagttcccaagcttctaccttccttttgtcaccttacgtttcatagctttagtatactcaggaaaagaatgaccatcttttgtagaatgtttatacatttttgcatatttcaatttccacttaaattttttaaagctttaactggctctataaattaagtttgtgctttccttgaaatgcacttattcttattacaagcattttataattttgtataaatgtctattttctctaaatattttgctttcagtaaaatgctttccaactctgtttagtgtattaattaccagtggattggtagaactgctttttattgactagtaaaagttactgcctatgctttttaccttaggcttacagaattaaataaaaattagccattccagaaatataaaaaaaaaaaaaaatggactcgttggccncacnggggganctttncnnccgttccgtttagcgagggttaccccccgatcctcgctgactcagtcgtgtcttccggcgcctgagctgttgccaatgggcgcacctcactaatacgcccgctctcggtatacccacgattactgggataccccgcgaacaacccagttatattacggctctcccccg

SEQ ID NO: 353845 - DNA, 2926 bp, Homo sapiens
  misc_feature (2777)..(2777): n is a, c, g, or t
  misc_feature (2780)..(2780): n is a, c, g, or t
ccctagtgattggctgataggaggagccagcaagtgtggctgagctccggggtgtgtggacgccgctttgttgcctgaggtgggtggcggtggaagttaagggagtcaggggctatcgctcctcgagactcgcagtcgcggccactgcagtcacttcgccagttagcccttagggtaggagtcgcgccggcagcagccatgagcggcggcgtgtacgggggagatgaagttggagcccttgtttttgacattggatcctatactgtgagagctggttatgctggtgaggactgccccaaggtggattttcctacagctattggtatggtggtagaaagagatgacggaagcacattaatggaaatagatggcgataaaggcaaacaaggcggtcccacctactacatagatactaatgctctgcgtgttccgagggagaatatggaggccatttcacctctaaaaaatgggatggttgaagactgggatagtttccaagctattttggatcatacctacaaaatgcatgtcaaatcagaagccagtctccatcctgttctcatgtcagaggcaccgtggaatactagagcaaagagagagaaactgacagagttaatgtttgaacactacaacatccctgccttcttcctttgcaaaactgcagttttgacagcatttgctaatggtcgttctactgggctgattttggacagtggagccactcataccactgcaattccagtccacgatggctatgtccttcaacaaggcattgtgaaatcccctcttgctggagactttattactatgcagtgcagagaactcttccaagaaatgaatattgaattggttcctccatatatgattgcatcaaaagaagctgttcgtgaaggatctccagcaaactggaaaagaaaagagaagttgcctcaggttacgaggtcttggcacaattatatgtgtaattgtgttatccaggattttcaagcttcggtacttcaagtgtcagattcaacttatgatgaacaagtggctgcacagatgccaactgttcattatgaattccccaatggctacaattgtgattttggtgcagagcggctaaagattccagaaggattatttgacccttccaatgtaaaggggttatcaggaaacacaatgttaggagtcagtcatgttgtcaccacaagtgttgggatgtggatttccaagcaagaatatgaagaaggagggaagcagtgtgtagaaagaaaatgcccttgagaaagagttcccaagcttctaccttccttttgtcaccttacgtttcatagctttagtatactcaggaaaagaatgaccatcttttgtagaatgtttatacatttttgcatatttcaatttccacttaaattttttaaagctttaactggctctataaattaagtttgtgctttccttgaaatgcacttattcttattacaagcattttataattttgtataaatgtctattttctctaaatattttgctttcagtaaaatgctttccaactctgtttagtgtattaattaccagtggattggtagaactgctttttattgactagtaaaagttactgcctatgctttttaccttaggcttacagaattaaataaaaattagccattccagaaatatattttggactgttgtgcactgtgattactactttaaggactaaatgtatttctcattattttgaatcaaagtcctccgtttattaacagcaatacccacatcctcttcatagcctattaacaacagaggtaaaactattattcaaattcaaaaactacggtattgcctttgctgtggcagttaccatcaccttcacactctaaggtagcaggtgacatttaaagcctgcttaaatgtcagaatttataaagtgggaatctcatctgaactttatacctgatttttagaagcaaattagcttctaccaaattagctaattagcatgccatattcacacttagaacaactgattagtaaagtcacttgactaaaaacagaatttctttataaaccacttaacatatttactcctgtacacagactattcaagaaaaacaaaatggtaaatttaatagttcagacatcttagacaagacttgacttttgggcttcagcaagatgtggaaacttttttaaaagaatttttgctttctttctctctaaattttccttccgtgctttgatgcgggctcgtttctcacgttccagtctgagaaaatggtccacataaggcaaggcaaagaatcgtttcctattgtatcttttatttaggtgccaaggtataacccactgcttgaacttgtgccagatgattcttccaaagatgtctcttctccaagcaccaggtctagctctttcttgaccagtctgaagaagccttagggcatcttctctttcctggacaactttatctaatgcatccatggaatctactaccttatctaaccgctctggacttggcattggcaatctctgccgcttggcctcctgctctagggttagaagcatgtttctttctttcagtaagacataccaaagtttgtgtaaatcttcattacttttgttccttagttgctgacaggtccatgctgctccagattttactttttcttgcccccagttttttgggtcatcaaaaaattcttctagtcctttccttgacaatgtggtatgaagtaatctatattggtgaaaggatgtcacatttggtgtactcttaggcaacaaactaaganaanacctgcaacccgagtgagcagcgtccttgggatttactagggaacaagctgccttcaggaacgctgaggctcttctacaaatacccactagactggtcgcagccatgtttctaatggagaccgtcagtttcacctaggccagcaat

SEQ ID NO: 353846 - DNA, 1987 bp, Homo sapiens
ccctagtgattggctgataggaggagccagcaagtgtggctgagctccggggtgtgtggacgccgctttgttgcctgaggtgggtggcggtggaagttaagggagtcaggggctatcgctcctcgagactcgcagtcgcggccactgcagtcacttcgccagttagcccttagggtaggagtcgcgccggcagcagccatgagcggcggcgtgtacgggggagatgaagttggagcccttgtttttgacattggatcctatactgtgagagctggttatgctggtgaggactgccccaaggtggattttcctacagctattggtatggtggtagaaagagatgacggaagcacattaatggaaatagatggcgataaaggcaaacaaggcggtcccacctactacatagatactaatgctctgcgtgttccgagggagaatatggaggccatttcacctctaaaaaatgggatggttgaagactgggatagtttccaagctattttggatcatacctacaaaatgcatgtcaaatcagaagccagtctccatcctgttctcatgtcagaggcaccgtggaatactagagcaaagagagagaaactgacagagttaatgtttgaacactacaacatccctgccttcttcctttgcaaaactgcagttttgacagcctttattcatcatctacttcactaaacaggataaccttcagggaaaaggcagttttggtgcaccattgtgtgtctactgtgttaaaggaattttagtgccagatttgctaatggtcgttctactgggctgattttggacagtggagccactcataccactgcaattccagtccacgatggctatgtccttcaacaaggcattgtgaaatcccctcttgctggagactttattactatgcagtgcagagaactcttccaagaaatgaatattgaattggttcctccatatatgattgcatcaaaagaagctgttcgtgaaggatctccagcaaactggaaaagaaaagagaagttgcctcaggttacgaggtcttggcacaattatatgtgtaattgtgttatccaggattttcaagcttcggtacttcaagtgtcagattcaacttatgatgaacaagtggctgcacagatgccaactgttcattatgaattccccaatggctacaattgtgattttggtgcagagcggctaaagattccagaaggattatttgacccttccaatgtaaaggggttatcaggaaacacaatgttaggagtcagtcatgttgtcaccacaagtgttgggatgtgtgatattgatatcagaccaggtctctatggcagtgtaatagtggcaggaggaaacacactaatacagagttttactgacaggttgaatagagagctgtctcagaaaactcctccaagtatgcggttgaaattgattgcaaataatacaacagtggaacggaggtttagctcatggattggcggctccattctagcctctttgggtacctttcaacagatgtggatttccaagcaagaatatgaagaaggagggaagcagtgtgtagaaagaaaatgcccttgagaaagagttcccaagcttctaccttccttttgtcaccttacgtttcatagctttagtatactcaggaaaagaatgaccatcttttgtagaatgtttatacatttttgcatatttcaatttccacttaaattttttaaagctttaactggctctataaattaagtttgtgctttccttgaaatgcacttattcttattacaagcattttataattttgtataaatgtctattttctctaaatattttgctttcagtaaaatgctttccaactctgtttagtgtattaattaccagtggattggtagaactgctttttattgactagtaaaagttactgcctatgctttttaccttaggcttacagaattaaataaaaattagccattccagaaatata

SEQ ID NO: 353847 - DNA, 1829 bp, Homo sapiens
ccctagtgattggctgataggaggagccagcaagtgtggctgagctccggggtgtgtggacgccgctttgttgcctgaggtgggtggcggtggaagttaagggagtcaggggctatcgctcctcgagactcgcagtcgcggccactgcagtcacttcgccagttagcccttagggtaggagtcgcgccggcagcagccatgagcggcggcgtgtacgggggagatgaagttggagcccttgtttttgacattggatcctatactgtgagagctggttatgctggtgaggactgccccaaggtggattttcctacagctattggtatggtggtagaaagagatgacggaagcacattaatggaaatagatggcgataaaggcaaacaaggcggtcccacctactacatagatactaatgctctgcgtgttccgagggagaatatggaggccatttcacctctaaaaaatgggatggttgaagactgggatagtttccaagctattttggatcatacctacgtggaatactagagcaaagagagagaaactgacagagttaatgtttgaacactacaacatccctgccttcttcctttgcaaaactgcagttttgacagcatttgctaatggtcgttctactgggctgattttggacagtggagccactcataccactgcaattccagtccacgatggctatgtccttcaacaaggcattgtgaaatcccctcttgctggagactttattactatgcagtgcagagaactcttccaagaaatgaatattgaattggttcctccatatatgattgcatcaaaagaagctgttcgtgaaggatctccagcaaactggaaaagaaaagagaagttgcctcaggttacgaggtcttggcacaattatatgtgtaattgtgttatccaggattttcaagcttcggtacttcaagtgtcagattcaacttatgatgaacaagtggctgcacagatgccaactgttcattatgaattccccaatggctacaattgtgattttggtgcagagcggctaaagattccagaaggattatttgacccttccaatgtaaaggggttatcaggaaacacaatgttaggagtcagtcatgttgtcaccacaagtgttgggatgtgtgatattgatatcagaccaggtctctatggcagtgtaatagtggcaggaggaaacacactaatacagagttttactgacaggttgaatagagagctgtctcagaaaactcctccaagtatgcggttgaaattgattgcaaataatacaacagtggaacggaggtttagctcatggattggcggctccattctagcctctttgggtacctttcaacagatgtggatttccaagcaagaatatgaagaaggagggaagcagtgtgtagaaagaaaatgcccttgagaaagagttcccaagcttctaccttccttttgtcaccttacgtttcatagctttagtatactcaggaaaagaatgaccatcttttgtagaatgtttatacatttttgcatatttcaatttccacttaaattttttaaagctttaactggctctataaattaagtttgtgctttccttgaaatgcacttattcttattacaagcattttataattttgtataaatgtctattttctctaaatattttgctttcagtaaaatgctttccaactctgtttagtgtattaattaccagtggattggtagaactgctttttattgactagtaaaagttactgcctatgctttttaccttaggcttacagaattaaataaaaattagccattccagaaatata

SEQ ID NO: 353848 - DNA, 1762 bp, Homo sapiens
ccctagtgattggctgataggaggagccagcaagtgtggctgagctccggggtgtgtggacgccgctttgttgcctgaggtgggtggcggtggaagttaagggagtcaggggctatcgctcctcgagactcgcagtcgcggccactgcagtcacttcgccagttagcccttagggtaggagtcgcgccggcagcagccatgagcggcggcgtgtacgggggagatgaagttggagcccttgtttttgacattggatcctatactgtgagagctggttatgctggtgaggactgccccaaggtggattttcctacagctattggtatggtggtagaaagagatgacggaagcacattaatggaaatagatggcgataaaggcaaacaaggcggtcccacctactacatagatactaatgctctgcgtgttccgagggagaatatggaggccatttcacctctaaaaaatgggatggttgaagactgggatagtttccaagctattttggatcatacctacaaaatgcatgtcaaatcagaagccagtctccatcctgttctcatgtcagaggcaccgtggaatactagagcaaagagagagaaactgacagagttaatgtttgaacactacaacatccctgccttcttcctttgcaaaactgcagttttgacagcatttgctaatggtcgttctactgggctgattttggacagtggagccactcataccactgcaattccagtccacgatggctatgtccttcaacaaggcattgtgaaatcccctcttgctggagactttattactatgcagtgcagagaactcttccaagaaatgaatattgaattggttcctccatatatgattgcatcaaaagaagctgttcgtgaaggatctccagcaaactggaaaagaaaagagaagttgcctcaggttacgaggtcttggcacaattatatgtgtaattgtgttatccaggattttcaagcttcggtacttcaagtgtcagattcaacttatgatgaacaagtggctgcacagatgccaactgttcattatgaattccccaatggctacaattgtgattttggtgcagagcggctaaagattccagaaggattatttgacccttccaatgtaaaggggttatcaggaaacacaatgttaggagtcagtcatgttgtcaccacaagtgttgggatgtgtgatattgatatcagaccaggtctctatggcagtgtaatagtggcaggaggaaacacactaatacagagttttactgacaggttgaatagagagctgtctcagaaaactcctccaagtatgcggttgaaattgattgcaaataatacaacagtggaacggaggtttagctcatggattggcggctccattctagcctctttgggtacctttcaacagatgtggatttccaagcaagaatatgaagaaggagggaagcagtgtgtagaaagaaaatgcccttgagaaagagttcccaagcttctaccttccttttgtcaccttacgtttcatagctttagtatactcaggaaaagaatgaccatcttttgtagaatgtttatacatttttgcatatttcaatttccacttaaattttttaaagctttaactggctctataaattaagtttgtgctttccttgaaatgcacttattcttattacaagcattttataattttgtataaatgtctattttctctaaatattttgctttcagtaaaatgctttccaactctg

SEQ ID NO: 353849 - DNA, 1663 bp, Homo sapiens
ccctagtgattggctgataggaggagccagcaagtgtggctgagctccggggtgtgtggacgccgctttgttgcctgaggtgggtggcggtggaagttaagggagtcaggggctatcgctcctcgagactcgcagtcgcggccactgcagtcacttcgccagttagcccttagggtaggagtcgcgccggcagcagccatgagcggcggcgtgtacgggggagatgaagttggagcccttgtttttgacattggatcctatactgtgagagctggttatgctggtgaggactgccccaaggtggattttcctacagctattggtatggtggtagaaagagatgacggaagcacattaatggaaatagatggcgataaaggcaaacaaggcggtcccacctactacatagatactaatgctctgcgtgttccgagggagaatatggaggccatttcacctctaaaaaatgggatggttgaagactgggatagtttccaagctattttggatcatacctacaaaatgcatgtcaaatcagaagccagtctccatcctgttctcatgtcagaggcaccgtggaatactagagcaaagagagagaaactgacagagttaatgtttgaacactacaacatccctgccttcttcctttgcaaaactgcagttttgacagcatttgctaatggtcgttctactgggctgattttggacagtggagccactcataccactgcaattccagtccacgatggctatgtccttcaacaaggcattgtgaaatcccctcttgctggagactttattactatgcagtgcagagaactcttccaagaaatgaatattgaattggttcctccatatatgattgcatcaaaagaagctgttcgtgaaggatctccagcaaactggaaaagaaaagagaagttgcctcaggttacgaggtcttggcacaattatatgtgtaattgtgttatccaggattttcaagcttcggtacttcaagtgtcagattcaacttatgatgaacaagtggctgcacagatgccaactgttcattatgaattccccaatggctacaattgtgattttggtgcagagcggctaaagattccagaaggattatttgacccttccaatgtaaaggggttatcaggaaacacaatgttaggagtcagtcatgttgtcaccacaagtgttgggatgtggatttccaagcaagaatatgaagaaggagggaagcagtgtgtagaaagaaaatgcccttgagaaagagttcccaagcttctaccttccttttgtcaccttacgtttcatagctttagtatactcaggaaaagaatgaccatcttttgtagaatgtttatacatttttgcatatttcaatttccacttaaattttttaaagctttaactggctctataaattaagtttgtgctttccttgaaatgcacttattcttattacaagcattttataattttgtataaatgtctattttctctaaatattttgctttcagtaaaatgctttccaactctgtttagtgtattaattaccagtggattggtagaactgctttttattgactagtaaaagttactgcctatgctttttaccttaggcttacagaattaaataaaaattagccattccagaaatata

SEQ ID NO: 353850 - DNA, 1683 bp, Homo sapiens
ccctagtgattggctgataggaggagccagcaagtgtggctgagctccggggtgtgtggacgccgctttgttgcctgaggtgggtggcggtggaagttaagggagtcaggggctatcgctcctcgagactcgcagtcgcggccactgcagtcacttcgccagttagcccttagggtaggagtcgcgccggcagcagccatgagcggcggcgtgtacgggggagatgaagttggagcccttgtttttgacattggatcctatactgtgagagctggttatgctggtgaggactgccccaaggtggattttcctacagctattggtatggtggtagaaagagatgacggaagcacattaatggaaatagatggcgataaaggcaaacaaggcggtcccacctactacatagatactaatgctctgcgtgttccgagggagaatatggaggccatttcacctctaaaaaatgggatggttgaagactgggatagtttccaagctattttggatcatacctacaaaatgcatgtcaaatcagaagccagtctccatcctgttctcatgtcagaggcaccgtggaatactagagcaaagagagagaaactgacagagttaatgtttgaacactacaacatccctgccttcttcctttgcaaaactgcagttttgacagcatttgctaatggtcgttctactgggctgattttggacagtggagccactcataccactgcaattccagtccacgatggctatgtccttcaacaaggcattgtgaaatcccctcttgctggagactttattactatgcagtgcagagaactcttccaagaaatgaatattgaattggttcctccatatatgattgcatcaaaagaagctgttcgtgaaggatctccagcaaactggaaaagaaaagagaagttgcctcaggttacgaggtcttggcacaattatatgtgtaattgtgttatccaggattttcaagcttcggtacttcaagtgtcagattcaacttatgatgaacaagtggctgcacagatgccaactgttcattatgaattccccaatggctacaattgtgattttggtgcagagcggctaaagattccagaaggattatttgacccttccaatgtaaaggggttatcaggaaacacaatgttaggagtcagtcatgttgtcaccacaagtgttgggatgtgtgatattgatatcagaccaggtctctatggcagtgtaatagtggcaggaggaaacacactaatacagagttttactgacaggttgaatagagagctgtctcagaaaactcctccaagtatgcggttgaaattgattgcaaataatacaacagtggaacggaggtttagctcatggattggcggctccattctagcctctttgggtacctttcaacagatgtggatttccaagcaagaatatgaagaaggagggaagcagtgtgtagaaagaaaatgcccttgagaaagagttcccaagcttctaccttccttttgtcaccttacgtttcatagctttagtatactcaggaaaagaatgaccatcttttgtagaatgtttatacatttttgcatatttcaatttccacacacatatatactcttaacctactcataggctctattaaaggcacgttctagctgttgaatggggcgcagg

SEQ ID NO: 353851 - DNA, 1483 bp, Homo sapiens
ccctagtgattggctgataggaggagccagcaagtgtggctgagctccggggtgtgtggacgccgctttgttgcctgaggtgggtggcggtggaagttaagggagtcaggggctatcgctcctcgagactcgcagtcgcggccactgcagtcacttcgccagttagcccttagggtaggagtcgcgccggcagcagccatgagcggcggcgtgtacgggggagatgaagttggagcccttgtttttgacattggatcctatactgtgagagctggttatgctggtgaggactgccccaaggtggattttcctacagctattggtatggtggtagaaagagatgacggaagcacattaatggaaatagatggcgataaaggcaaacaaggcggtcccacctactacatagatactaatgctctgcgtgttccgagggagaatatggaggccatttcacctctaaaaaatgggatggttgaagactgggatagtttccaagctattttggatcatacctacaaaatgcatgtcaaatcagaagccagtctccatcctgttctcatgtcagaggcaccgtggaatactagagcaaagagagagaaactgacagagttaatgtttgaacactacaacatccctgccttcttcctttgcaaaactgcagttttgacagcatttgctaatggtcgttctactgggctgattttggacagtggagccactcataccactgcaattccagtccacgatggctatgtccttcaacaaggcattgtgaaatcccctcttgctggagactttattactatgcagtgcagagaactcttccaagaaatgaatattgaattggttcctccatatatgattgcatcaaaagaagctgttcgtgaaggatctccagcaaactggaaaagaaaagagaagttgcctcaggttacgaggtcttggcacaattatatgtgtaattgtgttatccaggattttcaagcttcggtacttcaagtgtcagattcaacttatgatgaacaagtggctgcacagatgccaactgttcattatgaattccccaatggctacaattgtgattttggtgcagagcggctaaagattccagaaggattatttgacccttccaatgtaaaggggttatcaggaaacacaatgttaggagtcagtcatgttgtcaccacaagtgttgggatgtgtgatattgatatcagaccaggtctctatggcagtgtaatagtggcaggaggaaacacactaatacagagttttactgacaggttgaatagagagctgtctcagaaaactcctccaagtatgcggttgaaattgattgcaaataatacaacagtggaacggaggtttagctcatggattggcggctccattctagcctctttggttagtagatgagctactttgcaaaaatattcttactgaattatactaaatttagtaaaaatacaaaaaataattc

SEQ ID NO: 353852 - DNA, 849 bp, Homo sapiens
  misc_feature (738)..(738): n is a, c, g, or t
  misc_feature (749)..(749): n is a, c, g, or t
  misc_feature (780)..(780): n is a, c, g, or t
ccctagtgattggctgataggaggagccagcaagtgtggctgagctccggggtgtgtggacgccgctttgttgcctgaggtgggtggcggtggaagttaagggagtcaggggctatcgctcctcgagactcgcagtcgcggccactgcagtcacttcgccagttagcccttagggtaggagtcgcgccggcagcagccatgagcggcggcgtgtacgggggagatgaagttggagcccttgtttttgacattggatcctatactgtgagagctggttatgctggtgaggactgccccaaggtggattttcctacagctattggtatggtggtagaaagagatgacggaagcacattaatggaaatagatggcgataaaggcaaacaaggcggtcccacctactacatagatactaatgctctgcgtgttccgagggagaatatggaggccatttcacctctaaaaaatgggatggttgaagactgggatagtttccaagctattttggatcatacctacaaaatgcatgtcaaatcagaagccagtctccatcctgttctcatgtcagaggcaccgtggaatactagagcaaagagagagaaactgacagagttaatgtttgaacactacaacatccctgccttcttcctttgcaaaactgcagttttgacagcatttgctaatggtcgttctactgggctgattttggacagtggagccactcataccactgcaaanttcccaagttncccccaaaacccggaaaattttggggggggncccctttttaaaattttgggggtttttcccccccctttttttttccccaaaaaaacccccaaaaaaagg

SEQ ID NO: 353853 - DNA, 707 bp, Homo sapiens
  misc_feature (558)..(558): n is a, c, g, or t
  misc_feature (561)..(561): n is a, c, g, or t
agagcagtgcagcttgttacctcagtgacttctaaggtatcccctcttcacatcggtcagcacatcatgattgctgaccggaattattgtgatctcttagatttaccttgcgtcggtaccagctctggctctgaccgatcatataaagagttcttgcctggaaaacccgttgcgctctttcttgaccagtctgaagaagccttagggcatcttctctttcctggacaactttatctaatgcatccatggaatctactaccttatctaaccgctctggacttggcattggcaatctctgccgcttggcctcctgctctagggttagaagcatgtttctttctttcagtaagacataccaaagtttgtgtaaatcttcattacttttgttccttagttgctgacaggtccatgctgctccagattttactttttcttgcccccagttttttgggtcatcaaaaaattcttctagtcctttccttgacaatgtggtatgaagtaatctatattggtgaaaggatgtcacatttggtgtactcttaggcaacaaactaaganaanacctgcaacccgagtgagcagcgtccttgggatttactagggaacaagctgccttcaggaacgctgaggctcttctacaaatacccactagactggtcgcagccatgtttctaatggagaccgtcagtttcacctaggccagcaat

SEQ ID NO: 353854 - DNA, 3000 bp, Homo sapiens
cccccaatgggagggctctttgatatcttcctcctcctcctccctgcgctgctccccaggagccagtggacacaagcagagggatacaaatttcgcgcgggcagcgctgaggtgggccgtaaagaggaacggaccggaagtggtggtggttatagcaaccagtgtggccagcctcttccccagcttatcctcctcccaatactcccgctctttttttatgaggctgggaaaatagaacgaggaagtggtgacgcactgggctctcacgaatacaactagaagctgcaacgactgtgtggctctatcgattcgggagaggtccagaccggaaatggtcgtttccatggtaaccctgagcaggttgcctgggagatgacctctttcgggtctctttgaatctccgctgtagcgtcacctggaaggcagatctaacagagaacctggactgtctcctatcatgattcccgggaaatatcgctctgtttctggccgggctgcgaacaacgtgaactgcgggcttcatctggttattcaaacatcatcgcttcctgaaaaaaacaaagttgaattcaagctaaataaagacacatcgtcattccccggtagacttttacaacatgaccttgaaagaaactactcaagtaggcaaggtgatcatattaatttggtgagctcatcattgtcatcatttcctattcttcaacgttcttctgaagagaaaattctttactcagacaggttgagcctagaaagacaaaagctgaccgtatgtcctatcatcaatggggaagaccaccttcgtttgttgaactttcaacacaattttataactcggatacaaaatatttctaatctacagaagttaatatcgttggatttatatgataaccagattgaagaaattagtgggctttcgactctgagatgtcttcgtgtccttctgttggggaaaaacagaatcaagaaaatctcaaatctggagaatctaaaaagcttagatgtcttggatcttcatggaaatcagattaccaaaattgaaaatattaatcatttgtgtgagttgagagttttaaatcttgccaggaactttttaagtcatgttgataatcttaatgggctggattcactaactgaacttaacttgcgacacaatcaaatcactttcgtgagagatgtggataatttgccctgcctccaacatctctttctcagctttaacaatatatctagttttgacagtgtttcctgccttgctgactcttcttccctctcggacatcacctttgatggcaatcccatagctcaagagtcatggtacaaacacactgtccttcagaatatgatgcagctgcgccagctagatatgaagagaatcacggaagaagaaaggcgtatggcatctgttttagccaaaaaagaggaagagaagaagcgggaaagtcataaacaatctttgcttaaggagaagaaaaggttaacaattaacaacgtagctcgacagtgggacttgcaacaacgagtagccaatattgctacaaatgaagatagaaaagattctgactctcctcaggacccctgtcagattgatggaagcaccctctctgcattcccagaggaaacagggcctctagactcaggactcaacaatgctttacaaggtttatctgtcatagacacataccttgttgaagtggacggggatacactttccctatatggctcaggagcactggaatctctggataggaattggagtgttcaaacagcaggaatgatcacaacagtctccttcactttcatagaatttgatgaaatcgtccaagtgcttcctaaactgaagattaagtttcctaattctctgcaccttaaattcaaggaaacaaatcttgtaatgctgcagcaatttaacgcactagcccaactccgtcgtattgaccagttgacaattgatcctcaaggaaatccagttgtcaattttacactctggaaatactatgtactgtttaggctaagccatttcagtatgcagaaaataaatggaacagaggtgacacagaatgatatgataatggctgaaaggctctttggaatcctagcacatgtagcatcttctgagttaccccagtatcgtctgatttccattctgggtgatgccaggaaaaagcaatttcggtatctactagaatccaaaggaaaaaaacctggtattatcaacgaagaaaataatgacagcaaaagacttgtaggagaaaacacaaatcgtgctacattaaattatactacaagagacttttataatgaaaagctagaggaaataaaggaaaagaagaaattctgtaaaacatatatagaagaccttgtgaaggaagccacagaaatcaacatgaaaaatgaggctttgcagaagctttggccacagatgttcattgagcttgttagggatgcagtcatagaaattcgcaataaaaattcctatatgaagctctgcctacagcagataacagaccaaaaataaaaatggcctttagttacagttgattttggcagttttattttttgaaggttgaaaatatgcaggttatacatgttaaaacaacaacaacactatcctataaactagaaagactagtataaaagcattattgcccactgttctcatagctaaaagttaagaaggaaagaaggaaagcaggagaaaggaaggattaattgcctgtatgtgaggaccaaacaacctttgggaactaaacagttttcagagatggcgtggcactgcatccttggttcttgctttgattggtgccctgctatagcccaaagcacgtagtatttgctgatgattcagcatgagctgcatctacctacttttagctgataattttcagttatttccctttttattttatgtcatgatttcaaagccaaaaatatgttctttttatgagtgaagaataaacttactaacaaattagtcaaaataaagtatgtttgcctccttaa

SEQ ID NO: 353855 - DNA, 760 bp, Homo sapiens
ttttcacactgccagacccagaagttgagtgggagacctgtttctttagaaggcaacgtcctgggtcccaggaaataaaggaaaagaagaaattctgtaaaacatatatagaagaccttgtgaaggaagccacagaaatcaacatgaaaaatgaggctttgcagaagctttggccacagatgttcattgagcttgttagggatgcagtcatagaaattcgcaataaaaattcctatatgaagctctgcctacagcagataacagaccaaaaataaaaatggcctttagttacagttgattttggcagttttattttttgaaggttgaaaatatgcaggttatacatgttaaaacaacaacaacactatcctataaactagaaagactagtataaaagcattattgcccactgttctcatagctaaaagttaagaaggaaagaaggaaagcaggagaaaggaaggattaattgcctgtatgtgaggaccaaacaacctttgggaactaaacagttttcagagatggcgtggcactgcatccttggttcttgctttgattggtgccctgctatagcccaaagcacgtagtatttgctgatgattcagcatgagctgcatctacctacttttagctgataattttcagttatttccctttttattttatgtcatgatttcaaagccaaaaatatgttctttttatgagtgaagaataaacttactaacaaattagtcaaaataaagtatgtttgcctccttaa

SEQ ID NO: 353856 - DNA, 277 bp, Homo sapiens
  misc_feature (41)..(41): n is a, c, g, or t
ccataccccttctcgacccaaaaaacaaacacaccccccgncctttcaggagaaacggaaataaaggaaaagaagaaattctgtaaaacatatatagaagaccttgtgaaggaagccacagaaatcaacatgaaaaatgaggctttgcagaagctttggccacagatgttcattgagcttgttagggatgcagtcatagaaattcgcaataaaaattcctatatgaagctctgcctacagcagataacagaccaaaaataaaaatggcctttagtta

SEQ ID NO: 353857 - DNA, 276 bp, Homo sapiens
ccggtggcggtgtgcgtcccccccggaccgggggccgggcggctgggaataacagagaaataaaggaaaagaagaaattctgtaaaacatatatagaagaccttgtgaaggaagccacagaaatcaacatgaaaaatgaggctttgcagaagctttggccacagatgttcattgagcttgttagggatgcagtcatagaaattcgcaataaaaattcctatatgaagctctgcctacagcagataacagaccaaaaataaaaatggcctttagtta

SEQ ID NO: 353858 - DNA, 280 bp, Homo sapiens
tatgtagagaggggatgataaagtcgagcgggcaaccaaggattctgagggataaacagagaaataaaggaaaagaagaaattctgtaaaacatatatagaagaccttgtgaaggaagccacagaaatcaacatgaaaaatgaggctttgcagaagctttggccacagatgttcattgagcttgttagggatgcagtcatagaaattcgcaataaaaattcctatatgaagctctgcctacagcagataacagaccaaaaataaaaatggcctttagtta

SEQ ID NO: 353859 - DNA, 279 bp, Homo sapiens
gaatagaaatatgttctatgatagtatttgtaagaaccgcggggttaggggaaacaggagaaataaaggaaaagaagaaattctgtaaaacatatatagaagaccttgtgaaggaagccacagaaatcaacatgaaaaatgaggctttgcagaagctttggccacagatgttcattgagcttgttagggatgcagtcatagaaattcgcaataaaaattcctatatgaagctctgcctacagcagataacagaccaaaaataaaaatggcctttagtta

SEQ ID NO: 353860 - DNA, 278 bp, Homo sapiens
tacggacattcatatctttgataataaatacacgagcggagggcttgggagtaacagagaaataaaggaaaagaagaaattctgtaaaacatatatagaagaccttgtgaaggaagccacagaaatcaacatgaaaaatgaggctttgcagaagctttggccacagatgttcattgagcttgttagggatgcagtcatagaaattcgcaataaaaattcctatatgaagctctgcctacagcagataacagaccaaaaataaaaatggcctttagtta

SEQ ID NO: 353861 - DNA, 277 bp, Homo sapiens
cacatagatttgcgaggaccggccacgccagacccccccacgcttagcgaaaacagagaaataaaggaaaagaagaaattctgtaaaacatatatagaagaccttgtgaaggaagccacagaaatcaacatgaaaaatgaggctttgcagaagctttggccacagatgttcattgagcttgttagggatgcagtcatagaaattcgcaataaaaattcctatatgaagctctgcctacagcagataacagaccaaaaataaaaatggcctttagtta

SEQ ID NO: 353862 - DNA, 276 bp, Homo sapiens
tagtttatctttttcatattaatattaatttgtatcgaaccccagtcagcaatacagaaataaaggaaaagaagaaattctgtaaaacatatatagaagaccttgtgaaggaagccacagaaatcaacatgaaaaatgaggctttgcagaagctttggccacagatgttcattgagcttgttagggatgcagtcatagaaattcgcaataaaaattcctatatgaagctctgcctacagcagataacagaccaaaaataaaaatggcctttagtta

SEQ ID NO: 353863 - DNA, 274 bp, Homo sapiens
ttattctcatccgctctttaaattagacgcaggggggagctttgggataacagagaaataaaggaaaagaagaaattctgtaaaacatatatagaagaccttgtgaaggaagccacagaaatcaacatgaaaaatgaggctttgcagaagctttggccacagatgttcattgagcttgttagggatgcagtcatagaaattcgcaataaaaattcctatatgaagctctgcctacagcagataacagaccaaaaataaaaatggcctttagtta

SEQ ID NO: 353864 - DNA, 274 bp, Homo sapiens
ctgtcctcattccctttccatacaagataataaattatcctccttggtaaaaaagaaataaaggaaaagaagaaattctgtaaaacatatatagaagaccttgtgaaggaagccacagaaatcaacatgaaaaatgaggctttgcagaagctttggccacagatgttcattgagcttgttagggatgcagtcatagaaattcgcaataaaaattcctatatgaagctctgcctacagcagataacagaccaaaaataaaaatggcctttagtta

SEQ ID NO: 353865 - DNA, 272 bp, Homo sapiens
aattcgtagaagttcctattaaataatattttttatccctcctctacctcgagaaataaaggaaaagaagaaattctgtaaaacatatatagaagaccttgtgaaggaagccacagaaatcaacatgaaaaatgaggctttgcagaagctttggccacagatgttcattgagcttgttagggatgcagtcatagaaattcgcaataaaaattcctatatgaagctctgcctacagcagataacagaccaaaaataaaaatggcctttagtta

SEQ ID NO: 353866 - DNA, 271 bp, Homo sapiens
  misc_feature (36)..(36): n is a, c, g, or t
ataaggaaactcaaagcattaaatacccaggagggngcctagtgtaacagagaaataaaggaaaagaagaaattctgtaaaacatatatagaagaccttgtgaaggaagccacagaaatcaacatgaaaaatgaggctttgcagaagctttggccacagatgttcattgagcttgttagggatgcagtcatagaaattcgcaataaaaattcctatatgaagctctgcctacagcagataacagaccaaaaataaaaatggcctttagtta

SEQ ID NO: 353867 - DNA, 274 bp, Homo sapiens
  misc_feature (36)..(36): n is a, c, g, or t
aaattaatatgaatttattaccatgtcacagatatnctttttagcattacaggagaaataaaggaaaagaagaaattctgtaaaacatatatagaagaccttgtgaaggaagccacagaaatcaacatgaaaaatgaggctttgcagaagctttggccacagatgttcattgagcttgttagggatgcagtcatagaaattcgcaataaaaattcctatatgaagctctgcctacagcagataacagaccaaaaataaaaatggcctttagtta

SEQ ID NO: 353868 - DNA, 307 bp, Homo sapiens
  misc_feature (45)..(45): n is a, c, g, or t
aaataatgatgtgttaagcacccacccaccgggccgccccctagnataaacagagaaataaaggaaaagaagaaattctgtaaaacatatatagaagaccttgtgaaggaagccacagaaatcaacatgaaaaatgaggctttgcagaagctttggccacagatgttcattgagcttgttagggatgcagtcatagaaattcgcaataaaaattcctatatgaagctctgcctacagcagataacagaccaaaaataaaaatggcctttagttaaaaaaaagggggaaaatggcctacgtggcctca

SEQ ID NO: 353869 - DNA, 3187 bp, Homo sapiens
cccccaatgggagggctctttgatatcttcctcctcctcctccctgcgctgctccccaggagccagtggacacaagcagagggatacaaatttcgcgcgggcagcgctgaggtgggccgtaaagaggaacggaccggaagtggtggtggttatagcaaccagtgtggccagcctcttccccagcttatcctcctcccaatactcccgctctttttttatgaggctgggaaaatagaacgaggaagtggtgacgcactgggctctcacgaatacaactagaagctgcaacgactgtgtggctctatcgattcgggagaggtccagaccggaaatggtcgtttccatggtaaccctgagcaggttgcctgggagatgacctctttcgggtctctttgaatctccgctgtagcgtcacctggaaggcagatctaacagagaacctggactgtctcctatcatgattcccgggaaatatcgctctgtttctggccgggctgcgaacaacgtgaactgcgggcttcatctggttattcaaacatcatcgcttcctgaaaaaaacaaacatttatacttacctactttctacacactatgtctcaagacacaacatgatttttcctcctttgaccaagttggaaacctctaaccatcacaattcaggttgaattcaagctaaataaagacacatcgtcattccccggtagacttttacaacatgaccttgaaagaaactactcaagtaggcaagattttaccaagaatataaagaatgtaaaatgaggtccatcacccaaggagcttgtagatttatttgggaagacaagggctacatatctggtgatcatattaatttggtgagctcatcattgtcatcatttcctattcttcaacgttcttctgaagagaaaattctttactcagacaggttgagcctagaaagacaaaagctgaccgtatgtcctatcatcaatggggaagaccaccttcgtttgttgaactttcaacacaattttataactcggatacaaaatatttctaatctacagaagttaatatcgttggatttatatgataaccagattgaagaaattagtgggctttcgactctgagatgtcttcgtgtccttctgttggggaaaaacagaatcaagaaaatctcaaatctggagaatctaaaaagcttagatgtcttggatcttcatggaaatcagattaccaaaattgaaaatattaatcatttgtgtgagttgagagttttaaatcttgccaggaactttttaagtcatgttgataatcttaatgggctggattcactaactgaacttaacttgcgacacaatcaaatcactttcgtgagagatgtggataatttgccctgcctccaacatctctttctcagctttaacaatatatctagttttgacagtgtttcctgccttgctgactcttcttccctctcggacatcacctttgatggcaatcccatagctcaagagtcatggtacaaacacactgtccttcagaatatgatgcagctgcgccagctagatatgaagagaatcacggaagaagaaaggcgtatggcatctgttttagccaaaaaagaggaagagaagaagcgggaaagtcataaacaatctttgcttaaggagaagaaaaggttaacaattaacaacgtagctcgacagtgggacttgcaacaacgagtagccaatattgctacaaatgaagatagaaaagattctgactctcctcaggacccctgtcagattgatggaagcaccctctctgcattcccagaggaaacagggcctctagactcaggactcaacaatgctttacaaggtttatctgtcatagacacataccttgttgaagtggacggggatacactttccctatatggctcaggagcactggaatctctggataggaattggagtgttcaaacagcaggaatgatcacaacagtctccttcactttcatagaatttgatgaaatcgtccaagtgcttcctaaactgaagattaagtttcctaattctctgcaccttaaattcaaggaaacaaatcttgtaatgctgcagcaatttaacgcactagcccaactccgtcgtattgaccagttgacaattgatcctcaaggaaatccagttgtcaattttacactctggaaatactatgtactgtttaggctaagccatttcagtatgcagaaaataaatggaacagaggtgacacagaatgatatgataatggctgaaaggctctttggaatcctagcacatgtagcatcttctgagttaccccagtatcgtctgatttccattctgggtgatgccaggaaaaagcaatttcggtatctactagaatccaaaggaaaaaaacctggtattatcaacgaagaaaataatgacagcaaaagacttgtaggagaaaacacaaatcgtgctacattaaattatactacaagagacttttataatgaaaagctagaggaaataaaggaaaagaagaaattctgtaaaacatatatagaagaccttgtgaaggaagccacagaaatcaacatgaaaaatgaggctttgcagaagctttggccacagatgttcattgagcttgttagggatgcagtcatagaaattcgcaataaaaattcctatatgaagctctgcctacagcagataacagaccaaaaataaaaatggcctttagttacagttgattttggcagttttattttttgaaggttgaaaatatgcaggttatacatgttaaaacaacaacaacactatcctataaactagaaagactagtataaaagcattattgcccactgttctcatagctaaaagttaagaaggaaagaaggaaagcaggagaaaggaaggattaattgcctgtatgtgaggaccaaacaacctttgggaactaaacagttttcagagatggcgtggcactgcatccttggttcttgctttgattggtgccctgctatagcccaaagcacgtagtatttgctgatgattcagcatgagctgcatctacctacttttagctgataattttcagttatttccctttttattttatgtcatgatttcaaagccaaaaatatgttctttttatgagtgaagaataaacttactaacaaattagtcaaaataaagtatgtttgcctccttaa

SEQ ID NO: 353870 - DNA, 2005 bp, Homo sapiens
ctcccatttaatctgcagtggaggagagtggagctcactgtccagtagaaatcagtgatgtagcaatgttgcagtaaatagaaatgattatatatttcaatagcttagcaagaagacatttataatatttttttctttcatctgattaagttttgctgtctattttcttccagagagatgtggataatttgccctgcctccaacatctctttctcagctttaacaatatatctagttttgacagtgtttcctgccttgctgactcttcttccctctcggacatcacctttgatggcaatcccatagctcaagagtcatggtacaaacacactgtccttcagaatatgatgcagctgcgccagctagatatgaagagaatcacggaagaagaaaggcgtatggcatctgttttagccaaaaaagaggaagagaagaagcgggaaagtcataaacaatctttgcttaaggagaagaaaaggttaacaattaacaacgtagctcgacagtgggacttgcaacaacgagtagccaatattgctacaaatgaagatagaaaagattctgactctcctcaggacccctgtcagattgatggaagcaccctctctgcattcccagaggaaacagggcctctagactcaggactcaacaatgctttacaaggtttatctgtcatagacacataccttgttgaagtggacggggatacactttccctatatggctcaggagcactggaatctctggataggaattggagtgttcaaacagcaggaatgatcacaacagtctccttcactttcatagaatttgatgaaatcgtccaagtgcttcctaaactgaagattaagtttcctaattctctgcaccttaaattcaaggaaacaaatcttgtaatgctgcagcaatttaacgcactagcccaactccgtcgtattgaccagttgacaattgatcctcaaggaaatccagttgtcaattttacactctggaaatactatgtactgtttaggctaagccatttcagtatgcagaaaataaatggaacagaggtgacacagaatgatatgataatggctgaaaggctctttggaatcctagcacatgtagcatcttctgagttaccccagtatcgtctgatttccattctgggtgatgccaggaaaaagcaatttcggtatctactagaatccaaaggaaaaaaacctggtattatcaacgaagaaaataatgacagcaaaagacttgtaggagaaaacacaaatcgtgctacattaaattatactacaagagacttttataatgaaaagctagaggaaataaaggaaaagaagaaattctgtaaaacatatatagaagaccttgtgaaggaagccacagaaatcaacatgaaaaatgaggctttgcagaagctttggccacagatgttcattgagcttgttagggatgcagtcatagaaattcgcaataaaaattcctatatgaagctctgcctacagcagataacagaccaaaaataaaaatggcctttagttacagttgattttggcagttttattttttgaaggttgaaaatatgcaggttatacatgttaaaacaacaacaacactatcctataaactagaaagactagtataaaagcattattgcccactgttctcatagctaaaagttaagaaggaaagaaggaaagcaggagaaaggaaggattaattgcctgtatgtgaggaccaaacaacctttgggaactaaacagttttcagagatggcgtggcactgcatccttggttcttgctttgattggtgccctgctatagcccaaagcacgtagtatttgctgatgattcagcatgagctgcatctacctacttttagctgataattttcagttatttccctttttattttatgtcatgatttcaaagccaaaaatatgttctttttatgagtgaagaataaacttactaacaaattagtcaaaataaagtatgtttgcctccttaa

SEQ ID NO: 353871 - DNA, 746 bp, Homo sapiens
acataaccatcaaaagtttcacggtaaacaccaaccgcaaaggcctgtggataacaggaaataaaggaaaagaagaaattctgtaaaacatatatagaagaccttgtgaaggaagccacagaaatcaacatgaaaaatgaggctttgcagaagctttggccacagatgttcattgagcttgttagggatgcagtcatagaaattcgcaataaaaattcctatatgaagctctgcctacagcagataacagaccaaaaataaaaatggcctttagttacagttgattttggcagttttattttttgaaggttgaaaatatgcaggttatacatgttaaaacaacaacaacactatcctataaactagaaagactagtataaaagcattattgcccactgttctcatagctaaaagttaagaaggaaagaaggaaagcaggagaaaggaaggattaattgcctgtatgtgaggaccaaacaacctttgggaactaaacagttttcagagatggcgtggcactgcatccttggttcttgctttgattggtgccctgctatagcccaaagcacgtagtatttgctgatgattcagcatgagctgcatctacctacttttagctgataattttcagttatttccctttttattttatgtcatgatttcaaagccaaaaatatgttctttttatgagtgaagaataaacttactaacaaattagtcaaaataaagtatgtttgcctccttaa

SEQ ID NO: 353872 - DNA, 2531 bp, Homo sapiens
cccccaatgggagggctctttgatatcttcctcctcctcctccctgcgctgctccccaggagccagtggacacaagcagagggatacaaatttcgcgcgggcagcgctgaggtgggccgtaaagaggaacggaccggaagtggtggtggttatagcaaccagtgtggccagcctcttccccagcttatcctcctcccaatactcccgctctttttttatgaggctgggaaaatagaacgaggaagtggtgacgcactgggctctcacgaatacaactagaagctgcaacgactgtgtggctctatcgattcgggagaggtccagaccggaaatggtcgtttccatggtaaccctgagcaggttgcctgggagatgacctctttcgggtctctttgaatctccgctgtagcgtcacctggaaggcagatctaacagagaacctggactgtctcctatcatgattcccgggaaatatcgctctgtttctggccgggctgcgaacaacgtgaactgcgggcttcatctggttattcaaacatcatcgcttcctgaaaaaaacaaagttgaattcaagctaaataaagacacatcgtcattccccggtagacttttacaacatgaccttgaaagaaactactcaagtaggcaaggtgatcatattaatttggtgagctcatcattgtcatcatttcctattcttcaacgttcttctgaagagaaaattctttactcagacaggttgagcctagaaagacaaaagctgaccgtatgtcctatcatcaatggggaagaccaccttcgtttgttgaactttcaacacaattttataactcggatacaaaatatttctaatctacagaagttaatatcgttggatttatatgataaccagattgaagaaattagtgggctttcgactctgagatgtcttcgtgtccttctgttggggaaaaacagaatcaagaaaatctcaaatctggagaatctaaaaagcttagatgtcttggatcttcatggaaatcagattaccaaaattgaaaatattaatcatttgtgtgagttgagagttttaaatcttgccaggaactttttaagtcatgttgataatcttaatgggctggattcactaactgaacttaacttgcgacacaatcaaatcactttcgtgagagatgtggataatttgccctgcctccaacatctctttctcagctttaacaatatatctagttttgacagtgtttcctgccttgctgactcttcttccctctcggacatcacctttgatggcaatcccatagctcaagagtcatggtacaaacacactgtccttcagaatatgatgcagctgcgccagctagatatgaagagaatcacggaagaagaaaggcgtatggcatctgttttagccaaaaaagaggaagagaagaagcgggaaagtcataaacaatctttgcttaaggagaagaaaaggttaacaattaacaacgtagctcgacagtgggacttgcaacaacgagtagccaatattgctacaaatgaagatagaaaagattctgactctcctcaggacccctgtcagattgatggaagcaccctctctgcattcccagaggaaacagggcctctagactcaggactcaacaatgctttacaaggtttatctgtcatagacacataccttgttgaagtggacggggatacactttccctatatggctcaggagcactggaatctctggataggaattggagtgttcaaacagcaggaatgatcacaacagtctccttcactttcatagaatttgatgaaatcgtccaagtgcttcctaaactgaagattaagtttcctaattctctgcaccttaaattcaaggaaacaaatcttgtaatgctgcagcaatttaacgcactagcccaactccgtcgtattgaccagttgacaattgatcctcaaggaaatccagttgtcaattttacactctggaaatactatgtactgtttaggctaagccatttcagtatgcagaaaataaatggaacagaggtgacacagaatgatatgataatggctgaaaggctctttggaatcctagcacatgtagcatcttctgagttaccccagtatcgtctgatttccattctgggtgatgccaggaaaaagcaatttcggtatctactagaatccaaaggaaaaaaacctggtattatcaacgaagaaaataatgacagcaaaagacttgtaggagaaaacacaaatcgtgctacattaaattatactacaagagacttttataatgaaaagctagaggaaataaaggaaaagaagaaattctgtaaaacatatatagaagaccttgtgaaggaagccacagaaatcaacatgaaaaatgaggctttgcagaagctttggccacagatgttcattgagcttgttagggatgcagtcatagaaattcgcaataaaaattcctatatgaagctctgcctacagcagataacagaccaaaaataaaaatggcctttagtta

SEQ ID NO: 353873 - DNA, 2908 bp, Homo sapiens
cccccaatgggagggctctttgatatcttcctcctcctcctccctgcgctgctccccaggagccagtggacacaagcagagggatacaaatttcgcgcgggcagcgctgaggtgggccgtaaagaggaacggaccggaagtggtggtggttatagcaaccagtgtggccagcctcttccccagcttatcctcctcccaatactcccgctctttttttatgaggctgggaaaatagaacgaggaagtggtgacgcactgggctctcacgaatacaactagaagctgcaacgactgtgtggctctatcgattcgggagaggtccagaccggaaatggtcgtttccatggtaaccctgagcaggttgcctgggagatgacctctttcgggtctctttgaatctccgctgtagcgtcacctggaaggcagatctaacagagaacctggactgtctcctatcatgattcccgggaaatatcgctctgtttctggccgggctgcgaacaacgtgaactgcgggcttcatctggttattcaaacatcatcgcttcctgaaaaaaacaaagttgaattcaagctaaataaagacacatcgtcattccccggtagacttttacaacatgaccttgaaagaaactactcaagtaggcaaggtgatcatattaatttggtgagctcatcattgtcatcatttcctattcttcaacgttcttctgaagagaaaattctttactcagacaggttgagcctagaaagacaaaagctgaccgtatgtcctatcatcaatggggaagaccaccttcgtttgttgaactttcaacacaattttataactcggatacaaaatatttctaatctacagaagttaatatcgttggatttatatgataaccagattgaagaaattagtgggctttcgactctgagatgtcttcgtgtccttctgttggggaaaaacagaatcaagaaaatctcaaatctggagaatctaaaaagcttagatgtcttggatcttcatggaaatcagattaccaaaattgaaaatattaatcatttgtgtgagttgagagttttaaatcttgccaggaactttttaagtcatgttgataatcttaatgggctggattcactaactgaacttaacttgcgacacaatcaaatcactttcgtgagagatgtggataatttgccctgcctccaacatctctttctcagctttaacaatatatctagttttgacagtgtttcctgccttgctgactcttcttccctctcggacatcacctttgatggcaatcccatagctcaagagtcatggtacaaacacactgtccttcagaatatgatgcagctgcgccagctagatatgaagagaatcacggaagaagaaaggcgtatggcatctgttttagccaaaaaagaggaagagaagaagcgggaaagtcataaacaatctttgcttaaggagaagaaaaggttaacaattaacaacgtagctcgacagtgggacttgcaacaacgagtagccaatattgctacaaatgaagatagaaaagattctgactctcctcaggacccctgtcagattgatggaagcaccctctctgcattcccagaggaaacagggcctctagactcaggactcaacaatgctttacaaggtttatctgtcatagacacataccttgttgaagtggacggggatacactttccctatatggctcaggagcactggaatctctggataggaattggagtgttcaaacagcaggaatgatcacaacagtctccttcactttcatagaatttgatgaaatcgtccaagtgcttcctaaactgaagattaagtttcctaattctctgcaccttaaattcaaggaaacaaatcttgtaatgctgcagcaatttaacgcactagcccaactccgtcgtattgaccagttgacaattgatcctcaaggaaatccagttgtcaattttacactctggaaatactatgtactgtttaggctaagccatttcagtatgcagaaaataaatggaacagaggtgacacagaatgatatgataatggctgaaaggctctttggaatcctagcacatgtagcatcttctgagttaccccagtatcgtctgatttccattctgggtgatgccaggaaaaagcaatttcggtatctactagaatccaaaggaaaaaaacctggtattatcaacgaagaaaataatgacagcaaaagacttgtaggagaaaacacaaatcgtgctacattaaattatactacaagagacttttataatgaaaagctagaggaaataaaggaaaagaagaaattctgtaaaacatatatagaagaccttgtgaaggaagccacagaaatcaacatgaaaaatgaggctttgcagaagctttggccacagatgttcattgagcttgttagggatgcagtcatagaaattcgcaataaaaattcctatatgaagctctgcctacagcagataacagaccaaaaataaaaatggcctttagttaaaaaaaaaaaaaaaaaaaaaaaaaaaaaaaaaaaaaaaaaaaaaaaaaaaaaaaaaaaaaaaaaaaaaaaaaaaaaaaaaaaaaaataacaaaaaaaaaaaaaaaaaaaaaacaaaaaaaaaaaaaaaccctagggggggcccccgtgaccaaattggccttatggggggtcgtttaaaattcaaggggccgccttttaaaaaaggccgactgggaaaaccctggggttccccaatttaaaccccttggagaaaatccccttttgcccgttggggttaaaccaaaagggccccaaccgattggcctttccaaaaggtggccaaaccgaatggccaatgggaaatttgtagcgtataaattttggtaaaaatccggtg

SEQ ID NO: 353874 - DNA, 746 bp, Homo sapiens
atggaggtttagtacgcaatagtgacgatgggaggagggaatgcttcggggatacaggaaataaaggaaaagaagaaattctgtaaaacatatatagaagaccttgtgaaggaagccacagaaatcaacatgaaaaatgaggctttgcagaagctttggccacagatgttcattgagcttgttagggatgcagtcatagaaattcgcaataaaaattcctatatgaagctctgcctacagcagataacagaccaaaaataaaaatggcctttagttacagttgattttggcagttttattttttgaaggttgaaaatatgcaggttatacatgttaaaacaacaacaacactatcctataaactagaaagactagtataaaagcattattgcccactgttctcatagctaaaagttaagaaggaaagaaggaaagcaggagaaaggaaggattaattgcctgtatgtgaggaccaaacaacctttgggaactaaacagttttcagagatggcgtggcactgcatccttggttcttgctttgattggtgccctgctatagcccaaagcacgtagtatttgctgatgattcagcatgagctgcatctacctacttttagctgataattttcagttatttccctttttattttatgtcatgatttcaaagccaaaaatatgttctttttatgagtgaagaataaacttactaacaaattagtcaaaataaagtatgtttgcctccttaa

SEQ ID NO: 353875 - DNA, 3089 bp, Homo sapiens
cccccaatgggagggctctttgatatcttcctcctcctcctccctgcgctgctccccaggagccagtggacacaagcagagggatacaaatttcgcgcgggcagcgctgaggtgggccgtaaagaggaacggaccggaagtggtggtggttatagcaaccagtgtggccagcctcttccccagcttatcctcctcccaatactcccgctctttttttatgaggctgggaaaatagaacgaggaagtggtgacgcactgggctctcacgaatacaactagaagctgcaacgactgtgtggctctatcgattcgggagaggtccagaccggaaatggtcgtttccatggtaaccctgagcaggttgcctgggagatgacctctttcgggtctctttgaatctccgctgtagcgtcacctggaaggcagatctaacagagaacctggactgtctcctatcatgattcccgggaaatatcgctctgtttctggccgggctgcgaacaacgtgaactgcgggcttcatctggttattcaaacatcatcgcttcctgaaaaaaacaaagttgaattcaagctaaataaagacacatcgtcattccccggtagacttttacaacatgaccttgaaagaaactactcaagtaggcaagattttaccaagaatataaagaatgtaaaatgaggtccatcacccaaggagcttgtagatttatttgggaagacaagggctacatatctggtgatcatattaatttggtgagctcatcattgtcatcatttcctattcttcaacgttcttctgaagagaaaattctttactcagacaggttgagcctagaaagacaaaagctgaccgtatgtcctatcatcaatggggaagaccaccttcgtttgttgaactttcaacacaattttataactcggatacaaaatatttctaatctacagaagttaatatcgttggatttatatgataaccagattgaagaaattagtgggctttcgactctgagatgtcttcgtgtccttctgttggggaaaaacagaatcaagaaaatctcaaatctggagaatctaaaaagcttagatgtcttggatcttcatggaaatcagattaccaaaattgaaaatattaatcatttgtgtgagttgagagttttaaatcttgccaggaactttttaagtcatgttgataatcttaatgggctggattcactaactgaacttaacttgcgacacaatcaaatcactttcgtgagagatgtggataatttgccctgcctccaacatctctttctcagctttaacaatatatctagttttgacagtgtttcctgccttgctgactcttcttccctctcggacatcacctttgatggcaatcccatagctcaagagtcatggtacaaacacactgtccttcagaatatgatgcagctgcgccagctagatatgaagagaatcacggaagaagaaaggcgtatggcatctgttttagccaaaaaagaggaagagaagaagcgggaaagtcataaacaatctttgcttaaggagaagaaaaggttaacaattaacaacgtagctcgacagtgggacttgcaacaacgagtagccaatattgctacaaatgaagatagaaaagattctgactctcctcaggacccctgtcagattgatggaagcaccctctctgcattcccagaggaaacagggcctctagactcaggactcaacaatgctttacaaggtttatctgtcatagacacataccttgttgaagtggacggggatacactttccctatatggctcaggagcactggaatctctggataggaattggagtgttcaaacagcaggaatgatcacaacagtctccttcactttcatagaatttgatgaaatcgtccaagtgcttcctaaactgaagattaagtttcctaattctctgcaccttaaattcaaggaaacaaatcttgtaatgctgcagcaatttaacgcactagcccaactccgtcgtattgaccagttgacaattgatcctcaaggaaatccagttgtcaattttacactctggaaatactatgtactgtttaggctaagccatttcagtatgcagaaaataaatggaacagaggtgacacagaatgatatgataatggctgaaaggctctttggaatcctagcacatgtagcatcttctgagttaccccagtatcgtctgatttccattctgggtgatgccaggaaaaagcaatttcggtatctactagaatccaaaggaaaaaaacctggtattatcaacgaagaaaataatgacagcaaaagacttgtaggagaaaacacaaatcgtgctacattaaattatactacaagagacttttataatgaaaagctagaggaaataaaggaaaagaagaaattctgtaaaacatatatagaagaccttgtgaaggaagccacagaaatcaacatgaaaaatgaggctttgcagaagctttggccacagatgttcattgagcttgttagggatgcagtcatagaaattcgcaataaaaattcctatatgaagctctgcctacagcagataacagaccaaaaataaaaatggcctttagttacagttgattttggcagttttattttttgaaggttgaaaatatgcaggttatacatgttaaaacaacaacaacactatcctataaactagaaagactagtataaaagcattattgcccactgttctcatagctaaaagttaagaaggaaagaaggaaagcaggagaaaggaaggattaattgcctgtatgtgaggaccaaacaacctttgggaactaaacagttttcagagatggcgtggcactgcatccttggttcttgctttgattggtgccctgctatagcccaaagcacgtagtatttgctgatgattcagcatgagctgcatctacctacttttagctgataattttcagttatttccctttttattttatgtcatgatttcaaagccaaaaatatgttctttttatgagtgaagaataaacttactaacaaattagtcaaaataaagtatgtttgcctccttaa

SEQ ID NO: 353876 - DNA, 2570 bp, Homo sapiens
cccccaatgggagggctctttgatatcttcctcctcctcctccctgcgctgctccccaggagccagtggacacaagcagagggatacaaatttcgcgcgggcagcgctgaggtgggccgtaaagaggaacggaccggaagtggtggtggttatagcaaccagtgtggccagcctcttccccagcttatcctcctcccaatactcccgctctttttttatgaggctgggaaaatagaacgaggaagtggtgacgcactgggctctcacgaatacaactagaagctgcaacgactgtgtggctctatcgattcgggagaggtccagaccggaaatggtcgtttccatggtaaccctgagcaggttgcctgggagatgacctctttcgggtctctttgaatctccgctgtagcgtcacctggaaggcagatctaacagagaacctggactgtctcctatcatgattcccgggaaatatcgctctgtttctggccgggctgcgaacaacgtgaactgcgggcttcatctggttattcaaacatcatcgcttcctgaaaaaaacaaagttgaattcaagctaaataaagacacatcgtcattccccggtagacttttacaacatgaccttgaaagaaactactcaagtaggcaaggtgatcatattaatttggtgagctcatcattgtcatcatttcctattcttcaacgttcttctgaagagaaaattctttactcagacaggttgagcctagaaagacaaaagctgaccgtatgtcctatcatcaatggggaagaccaccttcgtttgttgaactttcaacacaattttataactcggatacaaaatatttctaatctacagaagttaatatcgttggatttatatgataaccagattgaagaaattagtgggctttcgactctgagatgtcttcgtgtccttctgttggggaaaaacagaatcaagaaaatctcaaatctggagaatctaaaaagcttagatgtcttggatcttcatggaaatcagattaccaaaattgaaaatattaatcatttgtgtgagttgagagttttaaatcttgccaggaactttttaagtcatgttgataatcttaatgggctggattcactaactgaacttaacttgcgacacaatcaaatcactttcgtgagagatgtggataatttgccctgcctccaacatctctttctcagctttaacaatatatctagttttgacagtgtttcctgccttgctgactcttcttccctctcggacatcacctttgatggcaatcccatagctcaagagtcatggtacaaacacactgtccttcagaatatgatgcagctgcgccagctagatatgaagagaatcacggaagaagaaaggcgtatggcatctgttttagccaaaaaagaggaagagaagaagcgggaaagtcataaacaatctttgcttaaggagaagaaaaggttaacaattaacaacgtagctcgacagtgggacttgcaacaacgagtagccaatattgctacaaatgaagatagaaaagattctgactctcctcaggacccctgtcagattgatggaagcaccctctctgcattcccagaggaaacagggcctctagactcaggactcaacaatgctttacaaggtttatctgtcatagacacataccttgttgaagtggacggggatacactttccctatatggctcaggagcactggaatctctggataggaattggagtgttcaaacagcaggaatgatcacaacagtctccttcactttcatagaatttgatgaaatcgtccaagtgcttcctaaactgaagattaagtttcctaattctctgcaccttaaattcaaggaaacaaatcttgtaatgctgcagcaatttaacgcactagcccaactccgtcgtattgaccagttgacaattgatcctcaaggaaatccagttgtcaattttacactctggaaatactatgtactgtttaggctaagccatttcagtatgcagaaaataaatggaacagaggtgacacagaatgatatgataatggctgaaaggctctttggaatcctagcacatgtagcatcttctgagttaccccagtatcgtctgatttccattctgggtgatgccaggaaaaagcaatttcggtatctactagaatccaaaggaaaaaaacctggtattatcaacgaagaaaataatgacagcaaaagacttgtaggagaaaacacaaatcgtgctacattaaattatactacaagagacttttataatgaaaagctagaggaaataaaggaaaagaagaaattctgtaaaacatatatagaagaccttgtgaaggaagccacagaaatcaacatgaaaaatgaggctttgcagaagctttggccacagatgttcattgagcttgttagggatgcagtcatagaaattcgcaataaaaattcctatatgaagctctgcctacagcagataacagaccaaaaataaaaatggcctttagttaaaaaaaaagggggggatggccttgttggccttagcgaga

SEQ ID NO: 353877 - DNA, 2564 bp, Homo sapiens
cccccaatgggagggctctttgatatcttcctcctcctcctccctgcgctgctccccaggagccagtggacacaagcagagggatacaaatttcgcgcgggcagcgctgaggtgggccgtaaagaggaacggaccggaagtggtggtggttatagcaaccagtgtggccagcctcttccccagcttatcctcctcccaatactcccgctctttttttatgaggctgggaaaatagaacgaggaagtggtgacgcactgggctctcacgaatacaactagaagctgcaacgactgtgtggctctatcgattcgggagaggtccagaccggaaatggtcgtttccatggtaaccctgagcaggttgcctgggagatgacctctttcgggtctctttgaatctccgctgtagcgtcacctggaaggcagatctaacagagaacctggactgtctcctatcatgattcccgggaaatatcgctctgtttctggccgggctgcgaacaacgtgaactgcgggcttcatctggttattcaaacatcatcgcttcctgaaaaaaacaaagttgaattcaagctaaataaagacacatcgtcattccccggtagacttttacaacatgaccttgaaagaaactactcaagtaggcaaggtgatcatattaatttggtgagctcatcattgtcatcatttcctattcttcaacgttcttctgaagagaaaattctttactcagacaggttgagcctagaaagacaaaagctgaccgtatgtcctatcatcaatggggaagaccaccttcgtttgttgaactttcaacacaattttataactcggatacaaaatatttctaatctacagaagttaatatcgttggatttatatgataaccagattgaagaaattagtgggctttcgactctgagatgtcttcgtgtccttctgttggggaaaaacagaatcaagaaaatctcaaatctggagaatctaaaaagcttagatgtcttggatcttcatggaaatcagattaccaaaattgaaaatattaatcatttgtgtgagttgagagttttaaatcttgccaggaactttttaagtcatgttgataatcttaatgggctggattcactaactgaacttaacttgcgacacaatcaaatcactttcgtgagagatgtggataatttgccctgcctccaacatctctttctcagctttaacaatatatctagttttgacagtgtttcctgccttgctgactcttcttccctctcggacatcacctttgatggcaatcccatagctcaagagtcatggtacaaacacactgtccttcagaatatgatgcagctgcgccagctagatatgaagagaatcacggaagaagaaaggcgtatggcatctgttttagccaaaaaagaggaagagaagaagcgggaaagtcataaacaatctttgcttaaggagaagaaaaggttaacaattaacaacgtagctcgacagtgggacttgcaacaacgagtagccaatattgctacaaatgaagatagaaaagattctgactctcctcaggacccctgtcagattgatggaagcaccctctctgcattcccagaggaaacagggcctctagactcaggactcaacaatgctttacaaggtttatctgtcatagacacataccttgttgaagtggacggggatacactttccctatatggctcaggagcactggaatctctggataggaattggagtgttcaaacagcaggaatgatcacaacagtctccttcactttcatagaatttgatgaaatcgtccaagtgcttcctaaactgaagattaagtttcctaattctctgcaccttaaattcaaggaaacaaatcttgtaatgctgcagcaatttaacgcactagcccaactccgtcgtattgaccagttgacaattgatcctcaaggaaatccagttgtcaattttacactctggaaatactatgtactgtttaggctaagccatttcagtatgcagaaaataaatggaacagaggtgacacagaatgatatgataatggctgaaaggctctttggaatcctagcacatgtagcatcttctgagttaccccagtatcgtctgatttccattctgggtgatgccaggaaaaagcaatttcggtatctactagaatccaaaggaaaaaaacctggtattatcaacgaagaaaataatgacagcaaaagacttgtaggagaaaacacaaatcgtgctacattaaattatactacaagagacttttataatgaaaagctagaggaaataaaggaaaagaagaaattctgtaaaacatatatagaagaccttgtgaaggaagccacagaaatcaacatgaaaaatgaggctttgcagaagctttggccacagatgttcattgagcttgttagggatgcagtcatagaaattcgcaataaaaattcctatatgaagctctgcctacagcagataacagaccaaaaataaaaatggcctttagttaaaaaaaagggggaaaatggcctacgtggcctca

SEQ ID NO: 353878 - DNA, 338 bp, Homo sapiens
aaaattccatttataaattccgttttcacaaaccctattacaatttcactcagaccattaatgacatgcttggactttctgctttgtcctgtatttcctttcttaaataaccattttattttaggatgaaaatttgccacataagattctttgtcatacaaaattattctatttctcaataaaggacacattttaatgcctatcttgtaattaaaaaaaatttttttaagagacagagtcttgctctgtcacccagactggagtgcagtggtgcaatcatagctcactataaccctgaactcctgggctcaagcagtcctcctgcctcagccacccca

SEQ ID NO: 353879 - DNA, 447 bp, Homo sapiens
tctcctttgcccacccacctcagcagtgttctcgcagcctatgatttgttttcactgggggccctgcttcaggaaagacacctaatgataaggctgagtcatgggtcagttatggtggatggagccagaagactcatttcactgtgaagacaaatggacatgacacgtcagcacacacttactcctccctacggagcagtctctaaatggaaatccttccagactggctgagagagagattttttggtgaacctgtttcagttaaatgtgacatgggcaataatgaaaaattgggtgaaatgtttttaggaggcagaaattttgaagctgccccagatttcacaccatcggtctttgatttctctgcgcagttagattccagtccccagtctctagattgcattggtccagtaaggggcagccttagtccagaccaaaaaaaaaagc

SEQ ID NO: 353880 - DNA, 693 bp, Homo sapiens
tcttggctcactgcaacctccgcctctccggttcaagcgattctcctgcttcagcctctcatgtagctgggatcacatgtgtgccaccatgcccagctgatttttgtatttttagtagaggcggggtttcaccatgttggccaggctggtctcgaactcttcacctcaagtgattcactcacctcggcctcccaaagtgttgggattacaggcgtgagccactgcacccagcctaggggttttctttttgaggtgataaaaatgttctaaagtttatagtgatgatgcttgcaatttctataagtagacttaatgcagtgatggttgcaaattctataaatatatttaatgtggtgatggttgcaaattctatgaaaaacccaaattgtacaatttcaatgagtgaaagcatgctatgtgaatgtcttcataaaggttttatttaaaaaatgagcaaacggtagaatgttaacatggcccacgtctatgtggtgtctatattggtttctattatatgttttctatgtggttgaaacattcctaataaaatgtgcatagttttttaaaaaagaaaacacatcagtggacgtgaatgcaggatgtcttatgaatgctcacacagaagctcccattcgtgaggaatgcaggtgggtactttcaggtgggtacttaacaggtgggtactgcaggtgg

SEQ ID NO: 353881 - DNA, 1133 bp, Homo sapiens
tcttggctcactgcaacctccgcctctccggttcaagcgattctcctgcttcagcctctcatgtagctgggatcacatgtgtgccaccatgcccagctgatttttgtatttttagtagaggcggggtttcaccatgttggccaggctggtctcgaactcttcacctcaagtgattcactcacctcggcctcccaaagtgttgggattacaggcgtgagccactgcacccagcctaggggttttctttttgaggtgataaaaatgttctaaagtttatagtgatgatgcttgcaatttctataagtagacttaatgcagtgatggttgcaaattctataaatatatttaatgtggtgatggttgcaaattctatgaaaaacccaaattgtacaatttcaatgagtgaaagcatgctatgtgaatgtcttcataaaggttttatttaaaaaatgagcaaacggtagaatgttaacatggcccacgtctatgtggtgtctatattggtttctattatatgttttctatgtggttgaaacattcctaataaaatgtgcatagttttttaaaaaagaaaacacatcagtggacgtgaatgcaggatgtcttatgaatgctcacacagaagctcccattcgtgaggaatgcagggaaaagcagaagatggagtaggagttggcatggcccagctagctcagatgacacacgatggtcccagtggcatgacttggtttgtgtgatttgtgccttggggttttattttggcacattataaaggagtaaataaagcctgtatacagtcagtttctgtctattctaatgaagggcaaggggatgaagggatttaccttgagtaaccatccacttacatttattaggaatcttgtgatcctatcgtcacccgtgagatttctgtgttgtttgtgtttaatgtcagagaatatcttttaatcgctcatacagtttatgcaaataccgtatacgtgataaacgtccctacaacatgatctttggaatgaactaagacaaaggaaactctgaggaaggaccatggcctgagaggtggaattcatccttccgaggactgagatgaggacggaaaatgcccatctgcgctcgggatcctctagatcgcc

SEQ ID NO: 353882 - DNA, 1283 bp, Homo sapiens
gggactcgttctcgaggcgggagctgaggtgcggggtggggcctccaaccgtgcagcccgcccctgacgccgccggtaactgcgacagtcggggtcggtgcggtttgctaagtggtcggttcctggagctgcggtcttctgctagcctgatccgcagcttcagcctccgccgcctcctcagccctcggcgccgccgcctgacccgcaggccgccgcgggccgcagagcccatgagggcgcgggcaccgccgccgcctccgcggcgtcgccgtcgtcccggagcgccccgagctggcgcgggcatggccgcggcatgagcgtggagccgccgccggagctggaggagaaggcggcgtcggagcccgaggcgggagccatgccggagaagcgcgcgggcgcgcaggccgcggggagcacctggctacaaggctttggcccaccaagtgtgtaccatgctgctattgtcatcttccttgaattctttgcgtggggccttttgacaactccaatgttgactgttctacatgaaacattttctcaacacacattcctcatgaatggtctcattcaaggtgtaaagggcctgctctcttttttgagtgccccactcattggtgccctgtctgatgtgtgggggaggaagccctttctcctcggcactgtattctttacctgcttcccaatcccactgatgaggatcagcccatgttttttaaaaaagaaaacacatcagtggacgtgaatgcaggatgtcttatgaatgctcacacagaagctcccattcgtgaggaatgcagggaaaagcagaagatggagtaggagttggcatggcccagctagctcagatgacacacgatggtcccagtggcatgacttggtttgtgtgatttgtgccttggggttttattttggcacattataaaggagtaaataaagcctgtatacagtcagtttctgtctattctaatgaagggcaaggggatgaagggatttaccttgagtaaccatccacttacatttattaggaatcttgtgatcctatcgtcacccgtgagatttctgtgttgtttgtgtttaatgtcagagaatatcttttaatcgctcatacagtttatgcaaataccgtatacgtgataaacgtccctacaacatgatctttggaatgaactaagacaaaggaaactctgaggaaggaccatggcctgagaggtggaattcatccttccgaggactgagatgaggacggaaaatgcccatctgcgctcgggatcctctagatcgcc

SEQ ID NO: 353883 - DNA, 1187 bp, Homo sapiens
gggactcgttctcgaggcgggagctgaggtgcggggtggggcctccaaccgtgcagcccgcccctgacgccgccggtaactgcgacagtcggggtcggtgcggtttgctaagtggtcggttcctggagctgcggtcttctgctagcctgatccgcagcttcagcctccgccgcctcctcagccctcggcgccgccgcctgacccgcaggccgccgcgggccgcagagcccatgagggcgcgggcaccgccgccgcctccgcggcgtcgccgtcgtcccggagcgccccgagctggcgcgggcatggccgcggcatgagcgtggagccgccgccggagctggaggagaaggcggcgtcggagcccgaggcgggagccatgccggagaagcgcgcgggcgcgcaggccgcggggagcacctgggttctacatgaaacattttctcaacacacattcctcatgaatggtctcattcaaggtgtaaagggcctgctctcttttttgagtgccccactcattggtgccctgtctgatgtgtgggggaggaagccctttctcctcggcactgtattctttacctgcttcccaatcccactgatgaggatcagcccatgttttttaaaaaagaaaacacatcagtggacgtgaatgcaggatgtcttatgaatgctcacacagaagctcccattcgtgaggaatgcagggaaaagcagaagatggagtaggagttggcatggcccagctagctcagatgacacacgatggtcccagtggcatgacttggtttgtgtgatttgtgccttggggttttattttggcacattataaaggagtaaataaagcctgtatacagtcagtttctgtctattctaatgaagggcaaggggatgaagggatttaccttgagtaaccatccacttacatttattaggaatcttgtgatcctatcgtcacccgtgagatttctgtgttgtttgtgtttaatgtcagagaatatcttttaatcgctcatacagtttatgcaaataccgtatacgtgataaacgtccctacaacatgatctttggaatgaactaagacaaaggaaactctgaggaaggaccatggcctgagaggtggaattcatccttccgaggactgagatgaggacggaaaatgcccatctgcgctcgggatcctctagatcgcc

SEQ ID NO: 353884 - DNA, 1094 bp, Homo sapiens
gggactcgttctcgaggcgggagctgaggtgcggggtggggcctccaaccgtgcagcccgcccctgacgccgccggtaactgcgacagtcggggtcggtgcggtttgctaagtggtcggttcctggagctgcggtcttctgctagcctgatccgcagcttcagcctccgccgcctcctcagccctcggcgccgccgcctgacccgcaggccgccgcgggccgcagagcccatgagggcgcgggcaccgccgccgcctccgcggcgtcgccgtcgtcccggagcgccccgagctggcgcgggcatggccgcggcatgagcgtggagccgccgccggagctggaggagaaggcggcgtcggagcccgaggcgggagccatgccggagaagcgcgcgggcgcgcaggccgcggggagcacctggctacaaggctttggcccaccaagtgtgtaccatgctgctattgtcatcttccttgaattctttgcgtggggccttttgacaactccaatgttgactgttctacatgaaacattttctcaacacacattcctcatgaatggtctcattcaaggtgtaaagggcctgctctcttttttgagtgccccactcattggtgccctgtctgatgtgtgggggaggaagccctttctcctcggcactgtattctttacctgcttcccaatcccactgatgaggatcagcccatggtgagtgacttggcccttcacctcctgactgcttgttttgagtcacatgtaaattatatttgcagagcacttcttaactattacaaagcagttgtgcttgtgttttcatttgatctctctggtaatactgaaaaccagtttggacagttgtcattatatccattttataaatggggtagtgaagacattctagaattaagtctgagataagttacttaggtgaagaaattttattttttcacattgctagaagaaacatgctagatactagaaacatgctagaagaaaacttggatgaaataatctttaacctggtatagggagaggctttctaattctaaatccagagccagtaaaggattaataaataatgtctacaaatacca

SEQ ID NO: 353885 - DNA, 904 bp, Homo sapiens
gggactcgttctcgaggcgggagctgaggtgcggggtggggcctccaaccgtgcagcccgcccctgacgccgccggtaactgcgacagtcggggtcggtgcggtttgctaagtggtcggttcctggagctgcggtcttctgctagcctgatccgcagcttcagcctccgccgcctcctcagccctcggcgccgccgcctgacccgcaggccgccgcgggccgcagagcccatgagggcgcgggcaccgccgccgcctccgcggcgtcgccgtcgtcccggagcgccccgagctggcgcgggcatggccgcggcatgagcgtggagccgccgccggagctggaggagaaggcggcgtcggagcccgaggcgggagccatgccggagaagcgcgcgggcgcgcaggccgcggggagcacctggctacaaggctttggcccaccaagtgtgtaccatgctgctattgtcatcttccttgaattctttgcgtggggccttttgacaactccaatgttgactgttctacatgaaacattttctcaacacacattcctcatgaatggtctcattcaaggtgtaaagggcctgctctcttttttgagtgccccactcattggtgccctgtctgatgtgtgggggaggaagccctttctcctcggcactgtattctttacctgcttcccaatcccactgatgaggatcagcccatgtttatgcaaataccgtatacgtgataaacgtccctacaacatgatctttggaatgaactaagacaaaggaaactctgaggaaggaccatggcctgagaggtggaattcatccttccgaggactgagatgaggacggaaaatgggggattgacggtgaagatgctaatacctgcccagcatcgaccctagtgcgggt

SEQ ID NO: 353886 - DNA, 470 bp, Homo sapiens
gtatttaatgtttcaaagtattattctgttttgggggcagtacaatgaattagagctaatgcatttagaaaatatgaattacaggtaattgagggatcagattataaaactaacctttgctttggtttcttctccagggcctgctctcttttttgagtgccccactcattggtgccctgtctgatgtgtgggggaggaagccctttctcctcggcactgtattctttacctgcttcccaatcccactgatgaggatcagcccatggtgagtgacttggcccttcacctcctgactgcttgttttgagtcacatgtaaattatatttgcagagcacttcttaactattacaaagcagttgtgcttgtgttttcatttgatctctctggtaatactgaaaaccagtttggacagttgtcattatatccattttataaatggggtagtgaagacattctagaattaagtctga

SEQ ID NO: 353887 - DNA, 849 bp, Homo sapiens
gggactcgttctcgaggcgggagctgaggtgcggggtggggcctccaaccgtgcagcccgcccctgacgccgccggtaactgcgacagtcggggtcggtgcggtttgctaagtggtcggttcctggagctgcggtcttctgctagcctgatccgcagcttcagcctccgccgcctcctcagccctcggcgccgccgcctgacccgcaggccgccgcgggccgcagagcccatgagggcgcgggcaccgccgccgcctccgcggcgtcgccgtcgtcccggagcgccccgagctggcgcgggcatggccgcggcatgagcgtggagccgccgccggagctggaggagaaggcggcgtcggagcccgaggcgggagccatgccggagaagcgcgcgggcgcgcaggccgcggggagcacctggctacaaggctttggcccaccaagtgtgtaccatgctgctattgtcatcttccttgaattctttgcgtggggccttttgacaactccaatgttgactgttctacatgaaacattttctcaacacacattcctcatgaatggtctcattcaaggtgtaaagggcctgctctcttttttgagtgccccactcattggtgccctgtctgatgtgtgggggaggaagccctttctcctcggcactgtattctttacctgcttcccaatcccactgatgaggatcagcccatgccgggtgtggtggcgtgcacctgtagtcccagctacctgtggcaggagaatggcttgaacccaggaagcggaggttgcagtgagccaagatcacaccattgcactccagcctaggcatggtgagactccatctcaaaaaaa

SEQ ID NO: 353888 - DNA, 1360 bp, Homo sapiens
gggactcgttctcgaggcgggagctgaggtgcggggtggggcctccaaccgtgcagcccgcccctgacgccgccggtaactgcgacagtcggggtcggtgcggtttgctaagtggtcggttcctggagctgcggtcttctgctagcctgatccgcagcttcagcctccgccgcctcctcagccctcggcgccgccgcctgacccgcaggccgccgcgggccgcagagcccatgagggcgcgggcaccgccgccgcctccgcggcgtcgccgtcgtcccggagcgccccgagctggcgcgggcatggccgcggcatgagcgtggagccgccgccggagctggaggagaaggcggcgtcggagcccgaggcgggagccatgccggagaagcgcgcgggcgcgcaggccgcggggagcacctggagtctcactttggttgcccaggctggagtgcggtggcgtgatcttggctcattgcagccttgacctcctgggagcagctacaaggctttggcccaccaagtgtgtaccatgctgctattgtcatcttccttgaattctttgcgtggggccttttgacaactccaatgttgactgttctacatgaaacattttctcaacacacattcctcatgaatggtctcattcaaggtgtaaagggcctgctctcttttttgagtgccccactcattggtgccctgtctgatgtgtgggggaggaagccctttctcctcggcactgtattctttacctgcttcccaatcccactgatgaggatcagcccatgttttttaaaaaagaaaacacatcagtggacgtgaatgcaggatgtcttatgaatgctcacacagaagctcccattcgtgaggaatgcagggaaaagcagaagatggagtaggagttggcatggcccagctagctcagatgacacacgatggtcccagtggcatgacttggtttgtgtgatttgtgccttggggttttattttggcacattataaaggagtaaataaagcctgtatacagtcagtttctgtctattctaatgaagggcaaggggatgaagggatttaccttgagtaaccatccacttacatttattaggaatcttgtgatcctatcgtcacccgtgagatttctgtgttgtttgtgtttaatgtcagagaatatcttttaatcgctcatacagtttatgcaaataccgtatacgtgataaacgtccctacaacatgatctttggaatgaactaagacaaaggaaactctgaggaaggaccatggcctgagaggtggaattcatccttccgaggactgagatgaggacggaaaatgcccatctgcgctcgggatcctctagatcgcc

SEQ ID NO: 353889 - DNA, 847 bp, Homo sapiens
gggactcgttctcgaggcgggagctgaggtgcggggtggggcctccaaccgtgcagcccgcccctgacgccgccggtaactgcgacagtcggggtcggtgcggtttgctaagtggtcggttcctggagctgcggtcttctgctagcctgatccgcagcttcagcctccgccgcctcctcagccctcggcgccgccgcctgacccgcaggccgccgcgggccgcagagcccatgagggcgcgggcaccgccgccgcctccgcggcgtcgccgtcgtcccggagcgccccgagctggcgcgggcatggccgcggcatgagcgtggagccgccgccggagctggaggagaaggcggcgtcggagcccgaggcgggagccatgccggagaagcgcgcgggcgcgcaggccgcggggagcacctggctacaaggctttggcccaccaagtgtgtaccatgctgctattgtcatcttccttgaattctttgcgtggggccttttgacaactccaatgttgactgttctacatgaaacattttctcaacacacattcctcatgaatggtctcattcaaggtgtaaagggcctgctctcttttttgagtgccccactcattggtgccctgtctgatgtgtgggggaggaagccctttctcctcggcactgtattctttacctgcttcccaatcccactgatgaggatcagcccatggtattttgcgatgatttctgtgtctggagtcttctcggtcacgttttctgttatatttgcctatatagctgatgtcactcaggagcacgagcgaagtacagcttatggatgggtctcagccacctttgcggctagtctt

SEQ ID NO: 353890 - DNA, 720 bp, Homo sapiens
ggcgtgtcatgtggtactttaggtagcttcacattttatgttctagttaagtaaaattcttagagaatgaggtactatctctggatagtctgtttgatcttgaaaatgtacagaattctttgcctcttgatcctggaggactagtgactttccagctctgagagagaacaggatccctctgccaatttttttctgtggtgtaaggcagagcctggtcactccatctaatgctgtctatctcatctcacgtataggagcgggatgctgcactccaaccctggggactatgcctggggtcagacagggcttgatgccattgtaacccaggtgaggagctgccttttgagggtgtctgttcagtgtgtctcatggttccacaggcttcctgctttccttctgctactttctgaaatggcagtcactctgctttctctaatattttgagctttggggtttccattttactaaagggatgaatgatttatggggttagctcagcatccatgcacttcctaggtctgagggaatttctagaagatggtttcacctccataggaagaaaagacttctataacaaatagtattttgtatttttgtctctcttgctcagttctataaggattctattaacaaatatttcacaaaaaaaggagggtttcctcacatgttgaagcagggatttctgctagatggagcaaagtaggggaaggaagcagagaa

SEQ ID NO: 353891 - DNA, 670 bp, Homo sapiens
ttggtttttcatttccgttgtggatttctgagactagaaagcatgtcctttatattcagtcgtcttataggcagtaatttacctatttcttggctcacgttatgctacttttcatactctcgcttttttcttcttccagaagatgaagcttttggaccagttacattttactttttattaagctatagttttactcgtgacaccacaacccttttgctgcctctgaagttgctttatgcctagaggtgggccttgcaatcatgggtttgtctgtaggcttatacgaacgtcactctgaaattgtaaagcaattatgagtgttctggcagcaggaaaggggaaacccaagcctctcagagccttgcagaagtaagagtaactaacatacctaatgtctgcactgtttgttctcagctggagcagttccctctccagggatattgcgatgtctgccacttcgtctttttctttctctttttttgtagcttttaggacaactggaaaacacaggccctcccccagctgacaaggaaaagatcacatctcttccaacagtgacagtaactcaggaacaagttggttcctcatcccagtgacgtcctcatcccagtgacgttcctcatccggatgatggaacgtcactgaactgtttgctacaaatgaaaatggg

SEQ ID NO: 353892 - DNA, 1602 bp, Homo sapiens
gcaggctggtactgcgtccgaagttcgtatgatcctctttggtgctgggaggcgggccgcagggtagctgttggcgccgccgcgtttctgggcctggccaactcacgtgaccgacgcgggctctgaagcggtgggccgcaccgaggcggcggcggcggcgacgactgcagctcgggaggtagcggcctggcgagggacgggccggctgccctctcggacggccgcggcggagggcaaaaatggcggaggcttcggcggccggggcggactcgggcgccgctgtagccgcccaccggtttttctgccacttttgcaagggcgaggtcagccccaaactaccggaatatatatgtcccagatgtgaatcaggctttattgaagaagtgacagatgattccagttttttaggtggtggcggcagtcggatagacaataccacaacaacacattttgcagagctttggggccatttggatcacacgatgttttttcaagattttagaccctttctaagtagcagtccactggaccaagataatagagccaatgaaaggggtcaccagactcacactgacttctggggagcaagacctccacggttgccattgggtcggagatacagatctcgaggaagttctcgtcctgacagatctccagctattgaaggaatactacaacacatctttgcaggattctttgcaaattctgccattcctggatctccacaccctttttcctggagcgggatgctgcactccaaccctggggactatgcctggggtcagacagggcttgatgccattgtaacccagcttttaggacaactggaaaacacaggccctcccccagctgacaaggaaaagatcacatctcttccaacagtgacagtaactcaggaacaagttgatatgggtttagagtgtccagtatgcaaagaagattacacagttgaagaggaagtccggcagttaccttgcaatcacttctttcacagcagttgtattgtgccgtggctagaactgcatgacacatgtcctgtatgtaggaagagcttaaatggtgaggactctactcggcaaagccagagcactgaggcctctgcaagcaacagatttagcaatgacagtcagctacatgaccgatggactttctgaagctaaagaccacacctgaatcagggctgtggtaatcatcttaccatagctgtaaattgtatcaaaacaaaaaattagtagatggatttaggaatatgtaagaaactcaacacataatataaatgcaatgaatgtttttcttctttaaatttaaagttagtatctacagatggaattgtatctacaaccaaatgcctcttatccctgaattcagagtgataattttataagtgtgaaacttaattatgtagggctccccccgtctgaatagaattaattccttaaagtctagttagggtcctgctgtctgtcatgttgccttgtaacggatgtttccacctccttctccaacctctaccccaccattagtgtattttactataaaaacagtggaaccacagccctaaagtcctgctgatataaagtccttttgtcttaattgtattta

SEQ ID NO: 353893 - DNA, 1555 bp, Homo sapiens
tgtttgtggagccggcgggcgggccgtttgtctctccttcctgcgcctctttggtgctgggaggcgggccgcagggtagctgttggcgccgccgcgtttctgggcctggccaactcacgtgaccgacgcgggctctgaagcggtgggccgcaccgaggcggcggcggcggcgacgactgcagctcgggaggtagcggcctggcgagggacgggccggctgccctctcggacggccgcggcggagggcaaaaatggcggaggcttcggcggccggggcggactcgggcgccgctgtagccgcccaccggtttttctgccacttttgcaagggcgaggtcagccccaaactaccgttttttaggtggtggcggcagtcggatagacaataccacaacaacacattttgcagagctttggggccatttggatcacacgatgttttttcaagattttagaccctttctaagtagcagtccactggaccaagataatagagccaatgaaaggggtcaccagactcacactgacttctggggagcaagacctccacggttgccattgggtcggagatacagatctcgaggaagttctcgtcctgacagatctccagctattgaaggaatactacaacacatctttgcaggattctttgcaaattctgccattcctggatctccacaccctttttcctggagcgggatgctgcactccaaccctggggactatgcctggggtcagacagggcttgatgccattgtaacccagcttttaggacaactggaaaacacaggccctcccccagctgacaaggaaaagatcacatctcttccaacagtgacagtaactcaggaacaagttgatatgggtttagagtgtccagtatgcaaagaagattacacagttgaagaggaagtccggcagttaccttgcaatcacttctttcacagcagttgtattgtgccgtggctagaactgcatgacacatgtcctgtatgtaggaagagcttaaatggtgaggactctactcggcaaagccagagcactgaggcctctgcaagcaacagatttagcaatgacagtcagctacatgaccgatggactttctgaagctaaagaccacacctgaatcagggctgtggtaatcatcttaccatagctgtaaattgtatcaaaacaaaaaattagtagatggatttaggaatatgtaagaaactcaacacataatataaatgcaatgaatgtttttcttctttaaatttaaagttagtatctacagatggaattgtatctacaaccaaatgcctcttatccctgaattcagagtgataattttataagtgtgaaacttaattatgtagggctccccccgtctgaatagaattaattccttaaagtctagttagggtcctgctgtctgtcatgttgccttgtaacggatgtttccacctccttctccaacctctaccccaccattagtgtattttactataaaaacagtggaaccacagccctaaagtcctgctgatataaagtccttttgtcttaattgtattta

SEQ ID NO: 353894 - DNA, 1793 bp, Homo sapiens
gcaggctggtactgcgtccgaagttcgtatgatcctctttggtgctgggaggcgggccgcagggtagctgttggcgccgccgcgtttctgggcctggccaactcacgtgaccgacgcgggctctgaagcggtgggccgcaccgaggcggcggcggcggcgacgactgcagctcgggaggtagcggcctggcgagggacgggccggctgccctctcggacggccgcggcggagggcaaaaatggcggaggcttcggcggccggggcggactcgggcgccgctgtagccgcccaccggtttttctgccacttttgcaagggcgaggtcagccccaaactaccggaatatatatgtcccagatgtgaatcaggctttattgaagaagtgacagatgattccagagagagcgagagtgagagagagagagtgagtgcatgagcttgcacaagagagggcagaagaatgggagaggaaaaagaaagaaaaatgggaaaatttggaaagtgatatcatagcagatgtggtgatacgcactgctcctgattgtatgtggcattccatgtacatctgtacgcatgtcagagtaaatctgttttttaggtggtggcggcagtcggatagacaataccacaacaacacattttgcagagctttggggccatttggatcacacgatgttttttcaagattttagaccctttctaagtagcagtccactggaccaagataatagagccaatgaaaggggtcaccagactcacactgacttctggggagcaagacctccacggttgccattgggtcggagatacagatctcgaggaagttctcgtcctgacagatctccagctattgaaggaatactacaacacatctttgcaggattctttgcaaattctgccattcctggatctccacaccctttttcctggagcgggatgctgcactccaaccctggggactatgcctggggtcagacagggcttgatgccattgtaacccagcttttaggacaactggaaaacacaggccctcccccagctgacaaggaaaagatcacatctcttccaacagtgacagtaactcaggaacaagttgatatgggtttagagtgtccagtatgcaaagaagattacacagttgaagaggaagtccggcagttaccttgcaatcacttctttcacagcagttgtattgtgccgtggctagaactgcatgacacatgtcctgtatgtaggaagagcttaaatggtgaggactctactcggcaaagccagagcactgaggcctctgcaagcaacagatttagcaatgacagtcagctacatgaccgatggactttctgaagctaaagaccacacctgaatcagggctgtggtaatcatcttaccatagctgtaaattgtatcaaaacaaaaaattagtagatggatttaggaatatgtaagaaactcaacacataatataaatgcaatgaatgtttttcttctttaaatttaaagttagtatctacagatggaattgtatctacaaccaaatgcctcttatccctgaattcagagtgataattttataagtgtgaaacttaattatgtagggctccccccgtctgaatagaattaattccttaaagtctagttagggtcctgctgtctgtcatgttgccttgtaacggatgtttccacctccttctccaacctctaccccaccattagtgtattttactataaaaacagtggaaccacagccctaaagtcctgctgatataaagtccttttgtcttaattgtattta

SEQ ID NO: 353895 - DNA, 1865 bp, Homo sapiens
ttttggcataggaccgaaacatgcattttaattaaacattcgtaatttttcttacacagcaaaaccaaaagccccacaatggaaaatcattttctgttcactgattgttaaaaactttttttaaaaaaagtcctgtgacatcaagtgcttgccaggatgtggcacagtagaaactcttaaacacttggtgggtgtttaaattgctacaaccagtttggaaaacaatttgtcattacccagtaaagttgaagatgtatagatcatgtaatagttttacagaccaaaaatatagaaactctggtacctctgcagaagaagacatacagtaatattcacagtggccatttgtaatataaaaaactgtaaacaatccaggtgtttattgattgatttttctaacatgtgacttatttctggtctttactagctttggggccatttggatcacacgatgttttttcaagattttagaccctttctaagtagcagtccactggaccaagataatagagccaatgaaaggggtcaccagactcacactgacttctggggagcaagacctccacggttgccattgggtcggagatacagatctcgaggaagttctcgtcctgacagatctccagctattgaaggaatactacaacacatctttgcaggattctttgcaaattctgccattcctggatctccacaccctttttcctggagcgggatgctgcactccaaccctggggactatgcctggggtcagacagggcttgatgccattgtaacccagcttttaggacaactggaaaacacaggccctcccccagctgacaaggaaaagatcacatctcttccaacagtgacagtaactcaggaacaagttgatatgggtttagagtgtccagtatgcaaagaagattacacagttgaagaggaagtccggcagttaccttgcaatcacttctttcacagcagttgtattgtgccgtggctagaactgcatgacacatgtcctgtatgtaggaagagcttaaatggtgaggactctactcggcaaagccagagcactgaggcctctgcaagcaacagatttagcaatgacagtcagctacatgaccgatggactttctgaagctaaagaccacacctgaatcagggctgtggtaatcatcttaccatagctgtaaattgtatcaaaacaaaaaattagtagatggatttaggaatatgtaagaaactcaacacataatataaatgcaatgaatgtttttcttctttaaatttaaagttagtatctacagatggaattgtatctacaaccaaatgcctcttatccctgaattcagagtgataattttataagtgtgaaacttaattatgtagggctccccccgtctgaatagaattaattccttaaagtctagttagggtcctgctgtctgtcatgttgccttgtaacggatgtttccacctccttctccaacctctaccccaccattagtgtattttactataaaaacagtggaaccacagccctaaagtcctgctgatataaagtccttttgtcttaattgtatttaaaaaaaaaaaaaaaactactcttgatcacattagctatgaggcgaggtcaaattcaggtatctaagactaatgattttgttttgtcttgatccccagagagcaaatcaaagaaaaattacagcaagaagagaaaagtggtttatcattgtgtgctttggttttcttattttaattttttgttttttttttttgagatggagtctcgctctgtcgcctaggctggagtgcagtggcacgatcttggctcattgcaaactctgcctcctgagttcaagcgattctcctacctcagc

SEQ ID NO: 353896 - DNA, 1411 bp, Homo sapiens
ggcgtgtcatgtggtactttaggtagcttcacattttatgttctagttaagtaaaattcttagagaatgaggtactatctctggatagtctgtttgatcttgaaaatgtacagaattctttgcctcttgatcctggaggactagtgactttccagctctgagagagaacaggatccctctgccaatttttttctgtggtgtaaggcagagcctggtcactccatctaatgctgtctatctcatctcacgtataggagcgggatgctgcactccaaccctggggactatgcctggggtcagacagggcttgatgccattgtaacccagcttttaggacaactggaaaacacaggccctcccccagctgacaaggaaaagatcacatctcttccaacagtgacagtaactcaggaacaagttgatatgggtttagagtgtccagtatgcaaagaagattacacagttgaagaggaagtccggcagttaccttgcaatcacttctttcacagcagttgtattgtgccgtggctagaactgcatgacacatgtcctgtatgtaggaagagcttaaatggtgaggactctactcggcaaagccagagcactgaggcctctgcaagcaacagatttagcaatgacagtcagctacatgaccgatggactttctgaagctaaagaccacacctgaatcagggctgtggtaatcatcttaccatagctgtaaattgtatcaaaacaaaaaattagtagatggatttaggaatatgtaagaaactcaacacataatataaatgcaatgaatgtttttcttctttaaatttaaagttagtatctacagatggaattgtatctacaaccaaatgcctcttatccctgaattcagagtgataattttataagtgtgaaacttaattatgtagggctccccccgtctgaatagaattaattccttaaagtctagttagggtcctgctgtctgtcatgttgccttgtaacggatgtttccacctccttctccaacctctaccccaccattagtgtattttactataaaaacagtggaaccacagccctaaagtcctgctgatataaagtccttttgtcttaattgtatttaaaaaaaaaaaaaaaactactcttgatcacattagctatgaggcgaggtcaaattcaggtatctaagactaatgattttgttttgtcttgatccccagagagcaaatcaaagaaaaattacagcaagaagagaaaagtggtttatcattgtgtgctttggttttcttattttaattttttgttttttttttttgagatggagtctcgctctgtcgcctaggctggagtgcagtggcacgatcttggctcattgcaaactctgcctcctgagttcaagcgattctcctacctcagc

SEQ ID NO: 353897 - DNA, 1569 bp, Homo sapiens
ttggtttttcatttccgttgtggatttctgagactagaaagcatgtcctttatattcagtcgtcttataggcagtaatttacctatttcttggctcacgttatgctacttttcatactctcgcttttttcttcttccagaagatgaagcttttggaccagttacattttactttttattaagctatagttttactcgtgacaccacaacccttttgctgcctctgaagttgctttatgcctagaggtgggccttgcaatcatgggtttgtctgtaggcttatacgaacgtcactctgaaattgtaaagcaattatgagtgttctggcagcaggaaaggggaaacccaagcctctcagagccttgcagaagtaagagtaactaacatacctaatgtctgcactgtttgttctcagctggagcagttccctctccagggatattgcgatgtctgccacttcgtctttttctttctctttttttgtagcttttaggacaactggaaaacacaggccctcccccagctgacaaggaaaagatcacatctcttccaacagtgacagtaactcaggaacaagttgatatgggtttagagtgtccagtatgcaaagaagattacacagttgaagaggaagtccggcagttaccttgcaatcacttctttcacagcagttgtattgtgccgtggctagaactgcatgacacatgtcctgtatgtaggaagagcttaaatggtgaggactctactcggcaaagccagagcactgaggcctctgcaagcaacagatttagcaatgacagtcagctacatgaccgatggactttctgaagctaaagaccacacctgaatcagggctgtggtaatcatcttaccatagctgtaaattgtatcaaaacaaaaaattagtagatggatttaggaatatgtaagaaactcaacacataatataaatgcaatgaatgtttttcttctttaaatttaaagttagtatctacagatggaattgtatctacaaccaaatgcctcttatccctgaattcagagtgataattttataagtgtgaaacttaattatgtagggctccccccgtctgaatagaattaattccttaaagtctagttagggtcctgctgtctgtcatgttgccttgtaacggatgtttccacctccttctccaacctctaccccaccattagtgtattttactataaaaacagtggaaccacagccctaaagtcctgctgatataaagtccttttgtcttaattgtatttaaaaaaaaaaaaaaaactactcttgatcacattagctatgaggcgaggtcaaattcaggtatctaagactaatgattttgttttgtcttgatccccagagagcaaatcaaagaaaaattacagcaagaagagaaaagtggtttatcattgtgtgctttggttttcttattttaattttttgttttttttttttgagatggagtctcgctctgtcgcctaggctggagtgcagtggcacgatcttggctcattgcaaactctgcctcctgagttcaagcgattctcctacctcagc

SEQ ID NO: 353898 - DNA, 1229 bp, Homo sapiens
gcaggctggtactgcgtccgaagttcgtatgatcctctttggtgctgggaggcgggccgcagggtagctgttggcgccgccgcgtttctgggcctggccaactcacgtgaccgacgcgggctctgaagcggtgggccgcaccgaggcggcggcggcggcgacgactgcagctcgggaggtagcggcctggcgagggacgggccggctgccctctcggacggccgcggcggagggcaaaaatggcggaggcttcggcggccggggcggactcgggcgccgctgtagccgcccaccggtttttctgccacttttgcaagggcgaggtcagccccaaactaccggaatatatatgtcccagatgtgaatcaggctttattgaagaagtgacagatgattccagttttttaggtggtggcggcagtcggatagacaataccacaacaacacattttgcagagctttggggccatttggatcacacgatgttttttcaagattttagaccctttctaagtagcagtccactggaccaagataatagagccaatgaaaggggtcaccagactcacactgacttctggggagcaagacctccacggttgccattgggtcggagatacagatctcgaggaagttctcgtcctgacagatctccagctattgaaggaatactacaacacatctttgcaggattctttgcaaattctgccattcctggatctccacaccctttttcctggagcgggatgctgcactccaaccctggggactatgcctggggtcagacagggcttgatgccattgtaacccagcttttaggacaactggaaaacacaggccctcccccagctgacaaggaaaagatcacatctcttccaacagtgacagtaactcaggaacaagttgatatgggtttagagtgtccagtatgcaaagaagattacacagttgaagaggaagtccggcagttaccttgcaatcacttctttcacagcagttgtattgtgccgtggctagaactgccatgttcctgtatgtacggaagactttccatggggaggactcttccttcgggaaagccaggagcctggggctcttgtaggcaccgattagcatcgcggcgtctctggccgaggctcctggagtcaggaccacctgacaggtggggtaccctcctgttggctgttcaccaactgtacggtgcgctttgccccccttatgcgagttcc

SEQ ID NO: 353899 - DNA, 973 bp, Homo sapiens
gcaggctggtactgcgtccgaagttcgtatgatcctctttggtgctgggaggcgggccgcagggtagctgttggcgccgccgcgtttctgggcctggccaactcacgtgaccgacgcgggctctgaagcggtgggccgcaccgaggcggcggcggcggcgacgactgcagctcgggaggtagcggcctggcgagggacgggccggctgccctctcggacggccgcggcggagggcaaaaatggcggaggcttcggcggccggggcggactcgggcgccgctgtagccgcccaccggtttttctgccacttttgcaagggcgaggtcagccccaaactaccggaatatatatgtcccagatgtgaatcaggctttattgaagaagtgacagatgattccagttttttaggtggtggcggcagtcggatagacaataccacaacaacacattttgcagagctttggggccatttggatcacacgatgttttttcaagattttagaccctttctaagtagcagtccactggaccaagataatagagccaatgaaaggggtcaccagactcacactgacttctggggagcaagacctccacggttgccattgggtcggagatacagatctcgaggaagttctcgtcctgacagatctccagctattgaaggaatactacaacacatctttgcaggattctttgcaaattctgccattcctggatctccacaccctttttcctggagcgggatgctgcactccaaccctggggactatgcctggggtcagacagggcttgatgccattgtaacccagcttttaggacaactggaaaacacaggccctcccccagctgacaaggaaaagatcacatctcttccaacagtgacagtaactcaggaacaagttggaagttaatccgggagcactttgtttggggttaaaggttgccctttatgcgtttcccagttggtcgg

SEQ ID NO: 353900 - DNA, 615 bp, Homo sapiens
acgcgggctctgaagcggtgggccgcaccgaggcggcggcggcggcgacgactgcagctcgggaggtagcggcctggcgagggacgggccggctgccctctcggacggccgcggcggagggcaaaaatggcggaggcttcggcggccggggcggactcgggcgccgctgtagccgcccaccggtttttctgccacttttgcaagggcgaggtcagccccaaactaccggtaagagcgctgtgttctctatacttgggaacctcatagattcctggccccgatttcccggaactgggtctggagctttctgcacatcattgactcgcccgacatcggtctgccgaatacctgctgcccacttctaagccgccggccctaaaccctgggcatcacggcctcggccccgtacctcctgcccacctcttaattcatcctgggctgctccacctgacctcacctctttacctcccgtgtccttaatttttttttttcttagcaagtttccctctgataactctcccctcaattttcttgcattcttttatacctggtctttttcctacgatgacctccccccacacttcttccactgtgtcttctcaccttcctctgtgt

SEQ ID NO: 353901 - DNA, 1896 bp, Homo sapiens
gcaggctggtactgcgtccgaagttcgtatgatcctctttggtgctgggaggcgggccgcagggtagctgttggcgccgccgcgtttctgggcctggccaactcacgtgaccgacgcgggctctgaagcggtgggccgcaccgaggcggcggcggcggcgacgactgcagctcgggaggtagcggcctggcgagggacgggccggctgccctctcggacggccgcggcggagggcaaaaatggcggaggcttcggcggccggggcggactcgggcgccgctgtagccgcccaccggtttttctgccacttttgcaagggcgaggtcagccccaaactaccggaatatatatgtcccagatgtgaatcaggctttattgaagaagtgacagatgattccagttttttaggtggtggcggcagtcggatagacaataccacaacaacacattttgcagagctttggggccatttggatcacacgatgttttttcaagattttagaccctttctaagtagcagtccactggaccaagataatagagccaatgaaaggggtcaccagactcacactgacttctggggagcaagacctccacggttgccattgggtcggagatacagatctcgaggaagttctcgtcctgacagatctccagctattgaaggaatactacaacacatctttgcaggattctttgcaaattctgccattcctggatctccacaccctttttcctggagcgggatgctgcactccaaccctggggactatgcctggggtcagacagggcttgatgccattgtaacccagcttttaggacaactggaaaacacaggccctcccccagctgacaaggaaaagatcacatctcttccaacagtgacagtaactcaggaacaagttgatatgggtttagagtgtccagtatgcaaagaagattacacagttgaagaggaagtccggcagttaccttgcaatcacttctttcacagcagttgtattgtgccgtggctagaactgcatgacacatgtcctgtatgtaggaagagcttaaatggtgaggactctactcggcaaagccagagcactgaggcctctgcaagcaacagatttagcaatgacagtcagctacatgaccgatggactttctgaagctaaagaccacacctgaatcagggctgtggtaatcatcttaccatagctgtaaattgtatcaaaacaaaaaattagtagatggatttaggaatatgtaagaaactcaacacataatataaatgcaatgaatgtttttcttctttaaatttaaagttagtatctacagatggaattgtatctacaaccaaatgcctcttatccctgaattcagagtgataattttataagtgtgaaacttaattatgtagggctccccccgtctgaatagaattaattccttaaagtctagttagggtcctgctgtctgtcatgttgccttgtaacggatgtttccacctccttctccaacctctaccccaccattagtgtattttactataaaaacagtggaaccacagccctaaagtcctgctgatataaagtccttttgtcttaattgtatttaaaaaaaaaaaaaaaactactcttgatcacattagctatgaggcgaggtcaaattcaggtatctaagactaatgattttgttttgtcttgatccccagagagcaaatcaaagaaaaattacagcaagaagagaaaagtggtttatcattgtgtgctttggttttcttattttaattttttgttttttttttttgagatggagtctcgctctgtcgcctaggctggagtgcagtggcacgatcttggctcattgcaaactctgcctcctgagttcaagcgattctcctacctcagc

SEQ ID NO: 353902 - DNA, 1654 bp, Homo sapiens
gcaggctggtactgcgtccgaagttcgtatgatcctctttggtgctgggaggcgggccgcagggtagctgttggcgccgccgcgtttctgggcctggccaactcacgtgaccgacgcgggctctgaagcggtgggccgcaccgaggcggcggcggcggcgacgactgcagctcgggaggtagcggcctggcgagggacgggccggctgccctctcggacggccgcggcggagggcaaaaatggcggaggcttcggcggccggggcggactcgggcgccgctgtagccgcccaccggtttttctgccacttttgcaagggcgaggtcagccccaaactaccggaatatatatgtcccagatgtgaatcaggctttattgaagaagtgacagatgattccagaatctaaagttgaaggtcccttccacaaccaggaaaaactacacattttacattttttaggtggtggcggcagtcggatagacaataccacaacaacacattttgcagagctttggggccatttggatcacacgatgttttttcaagattttagaccctttctaagtagcagtccactggaccaagataatagagccaatgaaaggggtcaccagactcacactgacttctggggagcaagacctccacggttgccattgggtcggagatacagatctcgaggaagttctcgtcctgacagatctccagctattgaaggaatactacaacacatctttgcaggattctttgcaaattctgccattcctggatctccacaccctttttcctggagcgggatgctgcactccaaccctggggactatgcctggggtcagacagggcttgatgccattgtaacccagcttttaggacaactggaaaacacaggccctcccccagctgacaaggaaaagatcacatctcttccaacagtgacagtaactcaggaacaagttgatatgggtttagagtgtccagtatgcaaagaagattacacagttgaagaggaagtccggcagttaccttgcaatcacttctttcacagcagttgtattgtgccgtggctagaactgcatgacacatgtcctgtatgtaggaagagcttaaatggtgaggactctactcggcaaagccagagcactgaggcctctgcaagcaacagatttagcaatgacagtcagctacatgaccgatggactttctgaagctaaagaccacacctgaatcagggctgtggtaatcatcttaccatagctgtaaattgtatcaaaacaaaaaattagtagatggatttaggaatatgtaagaaactcaacacataatataaatgcaatgaatgtttttcttctttaaatttaaagttagtatctacagatggaattgtatctacaaccaaatgcctcttatccctgaattcagagtgataattttataagtgtgaaacttaattatgtagggctccccccgtctgaatagaattaattccttaaagtctagttagggtcctgctgtctgtcatgttgccttgtaacggatgtttccacctccttctccaacctctaccccaccattagtgtattttactataaaaacagtggaaccacagccctaaagtcctgctgatataaagtccttttgtcttaattgtattta

SEQ ID NO: 353903 - DNA, 1278 bp, Homo sapiens
ataaattattttgtctttctagtagagtgatgggactcaaggttaacatgactctcttattaaaccaccgatccagttttttaggtggtggcggcagtcggatagacaataccacaacaacacattttgcagagctttggggccatttggatcacacgatgttttttcaagattttagaccctttctaagtagcagtccactggaccaagataatagagccaatgaaaggggtcaccagactcacactgacttctggggagcaagacctccacggttgccattgggtcggagatacagatctcgaggaagttctcgtcctgacagatctccagctattgaaggaatactacaacacatctttgcaggattctttgcaaattctgccattcctggatctccacaccctttttcctggagcgggatgctgcactccaaccctggggactatgcctggggtcagacagggcttgatgccattgtaacccagcttttaggacaactggaaaacacaggccctcccccagctgacaaggaaaagatcacatctcttccaacagtgacagtaactcaggaacaagttgatatgggtttagagtgtccagtatgcaaagaagattacacagttgaagaggaagtccggcagttaccttgcaatcacttctttcacagcagttgtattgtgccgtggctagaactgcatgacacatgtcctgtatgtaggaagagcttaaatggtgaggactctactcggcaaagccagagcactgaggcctctgcaagcaacagatttagcaatgacagtcagctacatgaccgatggactttctgaagctaaagaccacacctgaatcagggctgtggtaatcatcttaccatagctgtaaattgtatcaaaacaaaaaattagtagatggatttaggaatatgtaagaaactcaacacataatataaatgcaatgaatgtttttcttctttaaatttaaagttagtatctacagatggaattgtatctacaaccaaatgcctcttatccctgaattcagagtgataattttataagtgtgaaacttaattatgtagggctccccccgtctgaatagaattaattccttaaagtctagttagggtcctgctgtctgtcatgttgccttgtaacggatgtttccacctccttctccaacctctaccccaccattagtgtattttactataaaaacagtggaaccacagccctaaagtcctgctgatataaagtccttttgtcttaattgtattta

SEQ ID NO: 353904 - DNA, 1665 bp, Homo sapiens
gcaggctggtactgcgtccgaagttcgtatgatcctctttggtgctgggaggcgggccgcagggtagctgttggcgccgccgcgtttctgggcctggccaactcacgtgaccgacgcgggctctgaagcggtgggccgcaccgaggcggcggcggcggcgacgactgcagctcgggaggtagcggcctggcgagggacgggccggctgccctctcggacggccgcggcggagggcaaaaatggcggaggcttcggcggccggggcggactcgggcgccgctgtagccgcccaccggtttttctgccacttttgcaagggcgaggtcagccccaaactaccggaatatatatgtcccagatgtgaatcaggctttattgaagaagtgacagatgattccagaatctaaagttgaaggtcccttccacaaccaggaaaaactacacattttacattttttaggtggtggcggcagtcggatagacaataccacaacaacacattttgcagagctttggggccatttggatcacacgatgttttttcaagattttagaccctttctaagtagcagtccactggaccaagataatagagccaatgaaaggggtcaccagactcacactgacttctggggagcaagacctccacggttgccattgggtcggagatacagatctcgaggaagttctcgtcctgacagatctccagctattgaaggaatactacaacacatctttgcaggattctttgcaaattctgccattcctggatctccacaccctttttcctgcatgacacatgtcctgtatgtaggaagagcttaaatggtgaggactctactcggcaaagccagagcactgaggcctctgcaagcaacagatttagcaatgacagtcagctacatgaccgatggactttctgaagctaaagaccacacctgaatcagggctgtggtaatcatcttaccatagctgtaaattgtatcaaaacaaaaaattagtagatggatttaggaatatgtaagaaactcaacacataatataaatgcaatgaatgtttttcttctttaaatttaaagttagtatctacagatggaattgtatctacaaccaaatgcctcttatccctgaattcagagtgataattttataagtgtgaaacttaattatgtagggctccccccgtctgaatagaattaattccttaaagtctagttagggtcctgctgtctgtcatgttgccttgtaacggatgtttccacctccttctccaacctctaccccaccattagtgtattttactataaaaacagtggaaccacagccctaaagtcctgctgatataaagtccttttgtcttaattgtatttaaaaaaaaaaaaaaaactactcttgatcacattagctatgaggcgaggtcaaattcaggtatctaagactaatgattttgttttgtcttgatccccagagagcaaatcaaagaaaaattacagcaagaagagaaaagtggtttatcattgtgtgctttggttttcttattttaattttttgttttttttttttgagatggagtctcgctctgtcgcctaggctggagtgcagtggcacgatcttggctcattgcaaactctgcctcctgagttcaagcgattctcctacctcagc

SEQ ID NO: 353905 - DNA, 1122 bp, Homo sapiens
gcaggctggtactgcgtccgaagttcgtatgatcctctttggtgctgggaggcgggccgcagggtagctgttggcgccgccgcgtttctgggcctggccaactcacgtgaccgacgcgggctctgaagcggtgggccgcaccgaggcggcggcggcggcgacgactgcagctcgggaggtagcggcctggcgagggacgggccggctgccctctcggacggccgcggcggagggcaaaaatggcggaggcttcggcggccggggcggactcgggcgccgctgtagccgcccaccggtttttctgccacttttgcaagggcgaggtcagccccaaactaccggaatatatatgtcccagatgtgaatcaggctttattgaagaagtgacagatgattccagttttttaggtggtggcggcagtcggatagacaataccacaacaacacattttgcagagctttggggccatttggatcacacgatgttttttcaagattttagaccctttctaagtagcagtccactggaccaagataatagagccaatgaaaggggtcaccagactcacactgacttctggggagcaagacctccacggttgccattgggtcggagatacagatctcgaggaagttctcgtcctgacagatctccagctattgaaggaatactacaacacatctttgcaggattctttgcaaattctgccattcctggatctccacaccctttttcctggagcgggatgctgcactccaaccctggggactatgcctggggtcagacagggcttgatgccattgtaacccagcttttaggacaactggaaaacacaggccctcccccagctgacaaggaaaagatcacatctcttccaacagtgacagtaactcaggaacaagttgatatggctttagagtgtccaggagagaatgtgttctctctctgggctccagccctgatggggtggggataagatccaagatttataggaatagggggaaacattatggaaggccccaatatgtaatgagctttcatatacaagatatgcaagacatagccctctttttatgtttaaaggggactatgtaatgttttaaagtttgtgtgaaggtgtg

SEQ ID NO: 353906 - DNA, 1205 bp, Homo sapiens
gcaggctggtactgcgtccgaagttcgtatgatcctctttggtgctgggaggcgggccgcagggtagctgttggcgccgccgcgtttctgggcctggccaactcacgtgaccgacgcgggctctgaagcggtgggccgcaccgaggcggcggcggcggcgacgactgcagctcgggaggtagcggcctggcgagggacgggccggctgccctctcggacggccgcggcggagggcaaaaatggcggaggcttcggcggccggggcggactcgggcgccgctgtagccgcccaccggtttttctgccacttttgcaagggcgaggtcagccccaaactaccggaatatatatgtcccagatgtgaatcaggctttattgaagaagtgacagatgattccagttttttaggtggtggcggcagtcggatagacaataccacaacaacacattttgcagagctttggggccatttggatcacacgatgttttttcaagattttagaccctttctaagtagcagtccactggaccaagataatagagccaatgaaaggggtcaccagactcacactgacttctggggagcaagacctccacggttgccattgggtcggagatacagatctcgaggaagttctcgtcctgacagatctccagctattgaaggaatactacaacacatctttgcaggattctttgcaaattctgccattcctggatctccacaccctttttcctggagcgggatgctgcactccaaccctggggactatgcctggggtcagacagggcttgatgccattgtaacccaggtgaggagctgccttttgagggtgtctgttcagtgtgtctcatggttccacaggcttcctgctttccttctgctactttctgaaatggcagtcactctgctttctctaatattttgagctttggggtttccattttactaaagggatgaatgatttatggggttagctcagcatccatgcacttcctaggtctgagggaatttctagaagatggtttcacctccataggaagaaaagacttctataacaaatagtattttgtatttttgtctctcttgctcagttctataaggattctattaacaaatatttcacaaaaaaaggagggtttcctcacatgttgaagcagggatttctgctagatggagcaaagtaggggaaggaagcagagaa

SEQ ID NO: 353907 - DNA, 703 bp, Homo sapiens
aaacattcctgctttttatttgcattttcttgttttggcccagccacaaaaggcggtttccacaccattgcttttgactctggaggagcagggacgggaggacttggccacagccctgcggcccccaccctgggacatggcttatcagagcaggcggtggcttctgctttctctggaaatcagcagctcctgtttggggagtttgtgcaaatgctggcttgtcagcactctttcaaatcaggaaaccacgctttccgaccagcttgtgtgttgatcttggcaggaattctgacgaatggaaaaaagaaggctgttcctcgaaggtcacgtcaggggctatttctggccacagggcctgggctcctcatgatctcacctctttgcaggcttgcatgaaaatatcctgttgcagccatgacctgaagaaggaggtcgaccttcttcagcacctccaggtgagcccacctgtctcggggctccagaaggtggtgctggacgtcctgaggcacgcgctgtcctggctggaggaggtggagcagctcctcgggacctcgggatcctgccctccaggcccaacaaaggttactgggactttttttctcacatggttgcatgactctaaaatgtcgcgttgaatctcagcatgatgggacatctgttgaggaagtcttcctgggtatctggccaagtctattcccttctc

SEQ ID NO: 353908 - DNA, 809 bp, Homo sapiens
atcagtgccctacagaaaggctacagcaaggtgctgtgccagaccctgtcagagcggaactcagaaatcacatccctgaagaatgagggcgagaacttaaagagagacaacgctatcacatcagggatggtgtcatctttgcaaaaagacatattagcaaaggatgagcaagttcaacaactaaaggaagaggtcagtcacctaaaaagtcagaacaaggacaaggaccaccagctggaagcccttggctctagactggagcacttcagaagtcaagtcatcaaggccacctatggacgggcgaagccgttccgggacaagcccgtcaccgaccaacagttaatagagaaaattacccaggtcactgaggacaacatcaattttcagcagaaaaagtggaccctccagaaagagacccagctgagcaactccaagcaggaggagaccaccgagaacatcgagaagctgaggacgtcgctggacagctgccaggcttgcatgaaaatatcctgttgcagccatgacctgaagaaggaggtcgaccttcttcagcacctccaggtgagcccacctgtctcggggctccagaaggtggtgctggacgtcctgaggcacgcgctgtcctggctggaggaggtggagcagctcctcgggacctcgggatcctgccctccaggcccaacaaaggttactgggactttttttctcacatggttgcatgactctaaaatgtcgcgttgaatctcagcatgatgggacatctgttgaggaagtcttcctgggtatctggccaagtctattcccttctc

SEQ ID NO: 353909 - DNA, 797 bp, Homo sapiens
ctgaccacaggcatcgttcgggttaggcaggcgtgcctaaaaagtaattaaagcctgctgttctcttttcttctgtgggtcccgccactccccgtgagcggtgaagattctgataacgcggaatggtcattcaggcgtgcaaaccctgctaagtggtgtttcccgcaccctgccatggaaacgctgcccccacttgccggcccctgctgaccccctgacactgttgccccctctctgctgcagctggagcacttcagaagtcaagtcatcaaggccacctatggacgggcgaagccgttccgggacaagcccgtcaccgaccaacagttaatagagaaaattacccaggtcactgaggacaacatcaattttcagcagaaaaagtggaccctccagaaagagacccagctgagcaactccaagcaggaggagaccaccgagaacatcgagaagctgaggacgtcgctggacagctgccaggcttgcatgaaaatatcctgttgcagccatgacctgaagaaggaggtcgaccttcttcagcacctccaggtgagcccacctgtctcggggctccagaaggtggtgctggacgtcctgaggcacgcgctgtcctggctggaggaggtggagcagctcctcgggacctcgggatcctgccctccaggcccaacaaaggttactgggactttttttctcacatggttgcatgactctaaaatgtcgcgttgaatctcagcatgatgggacatctgttgaggaagtcttcctgggtatctggccaagtctattcccttctc

SEQ ID NO: 353910 - DNA, 1733 bp, Homo sapiens
gttcacttaaaattcatagagagacatgtagaaatacatactagataatgaaaggatccaaacagtgaagaagcagtccctttatatttttgaattttttttcaagagtaaagtgtgttatgatagtcatcttgatttgtttgaaatgatgtttacaaatgctattaaaattataaatcctacattttacttgtgaattttttggtctacctttctagttgtaaaatataaaaatcctaaaagatcatattgattaacttcttggtggaatcacttatcttgttttgatgatagggagcagtatagcatcaagttctagaggaattgggagccattgcaaatctgagggtcaggaggaatctttcgtcccacagagctcagtgcaaccaccagaaggagacagtgaaacaaaagctcctgaagaatcatcagaggatgtgacaaaatatcaggaaggagtatctgcagaaaacccagttgagaaccatatcaatataacacaatcagataagttcacagccaagccattggattccaactcaggagaaagaaatgacctcaatcttgatcgctcttgtggggttccagaagaatctgcttcatctgaaaaagccaaggaaccagaaacttcagatcagactagcactgagagtgctaccaatgaaaataacaccaatcctgagcctcagttccaaacagaagccactgggccttcagctcatgaagaaacatccaccagggactctgctcttcaggacacagatgacagtgatgatgacccagtcctgatcccaggtgcaaggtatcgagcaggacctggtgatagacgctctgctgttgcccgtattcaggagttcttcagacggagaaaagaaaggaaagaaatggaagaattggatactttgaacattagaaggccgctagtaaaaatggtttataaaggccatcgcaactccaggacaatgataaaagaagccaatttctggggtgctaactttgtaatgagtggttctgactgtggccacattttcatctgggatcggcacactgctgagcatttgatgcttctggaagctgataatcatgtggtaaactgcctgcagccacatccgtttgacccaattttagcctcatctggcatagattatgacataaagatctggtcaccattagaagagtcaaggatttttaaccgaaaacttgctgatgaagttataactcgaaacgaactcatgctggaagaaactagaaacaccattacagttccagcctctttcatgttgaggatgttggcttcacttaatcatatccgagctgaccggttggagggtgacagatcagaaggctctggtcaagagaatgaaaatgaggatgaggaataataaactctttttggcaagcacttaaatgttctgaaatttgtataagacatttattatatttttttctttacagagctttagtgcaattttaaggttatggtttttggagtttttccctttttttgggataacctaacattggtttggaatgattgtgtgcatgaatttgggagattgtataaaacaaaactagcagaatgtttttaaaactttttgccgtgtatgaggagtgctagaaaatgcaaagtgcaatattttccctaaccttcaaatgtgggagcttggatcaatgttgaagaataattttcatcatagtgaaaatgttggttcaaataaatttctacacttgcc

SEQ ID NO: 353911 - DNA, 2860 bp, Homo sapiens
acctctctctagagcactgagaaatactttttaaggagaggtttctcatcagaggttttgacaacaattcgttcagggcaccgagcaaacatatttagtgcaaagttcttaccttgtacaaatgataaacagattgtatcctgctctggagatggagtaatattttataccaacgttgagcaagatgcagaaaccaacagacaatgccaatttacgtgtcattatggaactacttatgagattatgactgtacccaatgacccttacacttttctctcttgtggtgaagatggaactgttaggtggtttgatacacgcatcaaaactagctgcacaaaagaagattgtaaagatgatattttaattaactgtcgacgtgctgccacgtctgttgctatttgcccaccaataccatattaccttgctgttggttgttctgacagctcagtacgaatatatgatcggcgaatgctgggcacaagagctacagggaattatgcaggtcgagggactactggaatggttgcccgttttattccttcccatcttaataataagtcctgcagagtgacatctctgtgttacagtgaagatggtcaagagattctcgttagttactcttcagattacatatatctttttgacccgaaagatgatacagcacgagaacttaaaactccttctgcggaagagagaagagaagagttgcgacaaccaccagttaagcgtttgagacttcgtggtgattggtcagatactggacccagagcaaggccggagagtgaacgagaacgagatggagagcagagtcccaatgtgtcattgatgcagagaatgtctgatatgttatcaagatggtttgaagaagcaagtgaggttgcacaaagcaatagaggacgaggaagatctcgacccagaggtggaacaagtcaatcagatatttcaactcttcctacggtcccatcaagtcctgatttggaagtgagtgaaactgcaatggaagtagatactccagctgaacaatttcttcagccttctacatcctctacaatgtcagctcaggctcattcgacatcatctcccacagaaagccctcattctactcctttgctatcttctccagacagtgaacaaaggcagtctgttgaggcatctggacaccacacacatcatcagtctgattctccttcttctgtggttaacaaacagctcggatccatgtcacttgacgagcaacaggataacaataatgaaaagctgagccccaaaccagggacaggtgaaccagttttaagtttgcactacagcacagaaggaacaactacaagcacaataaaactgaactttacagatgaatggagcagtatagcatcaagttctagaggaattgggagccattgcaaatctgagggtcaggaggaatctttcgtcccacagagctcagtgcaaccaccagaaggagacagtgaaacaaaagctcctgaagaatcatcagaggatgtgacaaaatatcaggaaggagtatctgcagaaaacccagttgagaaccatatcaatataacacaatcagataagttcacagccaagccattggattccaactcaggagaaagaaatgacctcaatcttgatcgctcttgtggggttccagaagaatctgcttcatctgaaaaagccaaggaaccagaaacttcagatcagactagcactgagagtgctaccaatgaaaataacaccaatcctgagcctcagttccaaacagaagccactgggccttcagctcatgaagaaacatccaccagggactctgctcttcaggacacagatgacagtgatgatgacccagtcctgatcccaggtgcaaggtatcgagcaggacctggtgatagacgctctgctgttgcccgtattcaggagttcttcagacggagaaaagaaaggaaagaaatggaagaattggatactttgaacattagaaggccgctagtaaaaatggtttataaaggccatcgcaactccaggacaatgataaaagaagccaatttctggggtgctaactttgtaatgagtggttctgactgtggccacattttcatctgggatcggcacactgctgagcatttgatgcttctggaagctgataatcatgtggtaaactgcctgcagccacatccgtttgacccaattttagcctcatctggcatagattatgacataaagatctggtcaccattagaagagtcaaggatttttaaccgaaaacttgctgatgaagttataactcgaaacgaactcatgctggaagaaactagaaacaccattacagttccagcctctttcatgttgaggatgttggcttcacttaatcatatccgagctgaccggttggagggtgacagatcagaaggctctggtcaagagaatgaaaatgaggatgaggaataataaactctttttggcaagcacttaaatgttctgaaatttgtataagacatttattatatttttttctttacagagctttagtgcaattttaaggttatggtttttggagtttttccctttttttgggataacctaacattggtttggaatgattgtgtgcatgaatttgggagattgtataaaacaaaactagcagaatgtttttaaaactttttgccgtgtatgaggagtgctagaaaatgcaaagtgcaatattttccctaaccttcaaatgtgggagcttggatcaatgttgaagaataattttcatcatagtgaaaatgttggttcaaataaatttctacacttgccatttgcatgtttgttgctttctaattaaagaaactggttgttttaagataccctgaaaaaaaat

SEQ ID NO: 353912 - DNA, 3297 bp, Homo sapiens
agctccactttatcgaggagccggtggtaggtggcccgcaggcctcgggcaccggcggccgacatcgccgccgagggatcgttggcagccgggtgggagcgtggctgtgttctcgtccctggctgacaacgaaggggagctagtcacttttcctgccacgacgactcgcgtccgcctctcgcctggagtacccttcccgcggctttccctgcccgctgtgaaccgaaaagctgcggcccgcgccccgcgaaggttgagggggcggaggctgccgactgccagcccccggtccgcctccggcccccggcaggagagagggaggagccatggcaacaggaagaagagaatttatccaaagattaaaacttgaagcaacccttaatgtgcatgatggttgtgttaatacaatctgttggaatgacactggagaatatattttatctggctcagatgacaccaaattagtaattagtaatccttacagcagaaaggttttgacaacaattcgttcagggcaccgagcaaacatatttagtgcaaagttcttaccttgtacaaatgataaacagattgtatcctgctctggagatggagtaatattttataccaacgttgagcaagatgcagaaaccaacagacaatgccaatttacgtgtcattatggaactacttatgagattatgactgtacccaatgacccttacacttttctctcttgtggtgaagatggaactgttaggtggtttgatacacgcatcaaaactagctgcacaaaagaagattgtaaagatgatattttaattaactgtcgacgtgctgccacgtctgttgctatttgcccaccaataccatattaccttgctgttggttgttctgacagctcagtacgaatatatgatcggcgaatgctgggcacaagagctacagggaattatgcaggtcgagggactactggaatggttgcccgttttattccttcccatcttaataataagtcctgcagagtgacatctctgtgttacagtgaagatggtcaagagattctcgttagttactcttcagattacatatatctttttgacccgaaagatgatacagcacgagaacttaaaactccttctgcggaagagagaagagaagagttgcgacaaccaccagttaagcgtttgagacttcgtggtgattggtcagatactggacccagagcaaggccggagagtgaacgagaacgagatggagagcagagtcccaatgtgtcattgatgcagagaatgtctgatatgttatcaagatggtttgaagaagcaagtgaggttgcacaaagcaatagaggacgaggaagatctcgacccagaggtggaacaagtcaatcagatatttcaactcttcctacggtcccatcaagtcctgatttggaagtgagtgaaactgcaatggaagtagatactccagctgaacaatttcttcagccttctacatcctctacaatgtcagctcaggctcattcgacatcatctcccacagaaagccctcattctactcctttgctatcttctccagacagtgaacaaaggcagtctgttgaggcatctggacaccacacacatcatcagtctgattctccttcttctgtggttaacaaacagctcggatccatgtcacttgacgagcaacaggataacaataatgaaaagctgagccccaaaccagggacaggtgaaccagttttaagtttgcactacagcacagaaggaacaactacaagcacaataaaactgaactttacagatgaatggagcagtatagcatcaagttctagaggaattgggagccattgcaaatctgagggtcaggaggaatctttcgtcccacagagctcagtgcaaccaccagaaggagacagtgaaacaaaagctcctgaagaatcatcagaggatgtgacaaaatatcaggaaggagtatctgcagaaaacccagttgagaaccatatcaatataacacaatcagataagttcacagccaagccattggattccaactcaggagaaagaaatgacctcaatcttgatcgctcttgtggggttccagaagaatctgcttcatctgaaaaagccaaggaaccagaaacttcagatcagactagcactgagagtgctaccaatgaaaataacaccaatcctgagcctcagttccaaacagaagccactgggccttcagctcatgaagaaacatccaccagggactctgctcttcaggacacagatgacagtgatgatgacccagtcctgatcccaggtgcaaggtatcgagcaggacctggtgatagacgctctgctgttgcccgtattcaggagttcttcagacggagaaaagaaaggaaagaaatggaagaattggatactttgaacattagaaggccgctagtaaaaatggtttataaaggccatcgcaactccaggacaatgataaaagaagccaatttctggggtgctaactttgtaatgagtggttctgactgtggccacattttcatctgggatcggcacactgctgagcatttgatgcttctggaagctgataatcatgtggtaaactgcctgcagccacatccgtttgacccaattttagcctcatctggcatagattatgacataaagatctggtcaccattagaagagtcaaggatttttaaccgaaaacttgctgatgaagttataactcgaaacgaactcatgctggaagaaactagaaacaccattacagttccagcctctttcatgttgaggatgttggcttcacttaatcatatccgagctgaccggttggagggtgacagatcagaaggctctggtcaagagaatgaaaatgaggatgaggaataataaactctttttggcaagcacttaaatgttctgaaatttgtataagacatttattatatttttttctttacagagctttagtgcaattttaaggttatggtttttggagtttttccctttttttgggataacctaacattggtttggaatgattgtgtgcatgaatttgggagattgtataaaacaaaactagcagaatgtttttaaaactttttgccgtgtatgaggagtgctagaaaatgcaaagtgcaatattttccctaaccttcaaatgtgggagcttggatcaatgttgaagaataattttcatcatagtgaaaatgttggttcaaataaatttctacacttgccatttgcatgtttgttgctttctaattaaagaaactggttgttttaagataccctgaaaaaaaat

SEQ ID NO: 353913 - DNA, 3459 bp, Homo sapiens
gtgaccaccggtgctcacagcccctgtcacgtaccccctggcttactcaatcgatcacgaccctctcatgcggacccccttagagttgtgagcccttaaaagggacagaagttgagcatcagacgagctcggattttgagacgctagcctgccgattctcccagctgattaaagccactcccttcactatctcggtgtctgaggggttttgtctgcggctcatcctgctacatttcttggttccctgaccgggaagcaaggtgattaacagatggtcgaggcagctccttaggcggctttagcctgccctgtggaacatccctgctggggactccaaccagccagagtgacgcggatcctgagagctctcctgggtaggcatttgccccggtgggacacctcgccagagcagtgtgtggcaggcccccgtggaggatcaacagagtggctgaacaccgggaaggaattggcacttggagtccggacaactaaaacttggaagaagagaatttatccaaagattaaaacttgaagcaacccttaatgtgcatgatggttgtgttaatacaatctgttggaatgacactggagaatatattttatctggctcagatgacaccaaattagtaattagtaatccttacagcagaaaggttttgacaacaattcgttcagggcaccgagcaaacatatttagtgcaaagttcttaccttgtacaaatgataaacagattgtatcctgctctggagatggagtaatattttataccaacgttgagcaagatgcagaaaccaacagacaatgccaatttacgtgtcattatggaactacttatgagattatgactgtacccaatgacccttacacttttctctcttgtggtgaagatggaactgttaggtggtttgatacacgcatcaaaactagctgcacaaaagaagattgtaaagatgatattttaattaactgtcgacgtgctgccacgtctgttgctatttgcccaccaataccatattaccttgctgttggttgttctgacagctcagtacgaatatatgatcggcgaatgctgggcacaagagctacagggaattatgcaggtcgagggactactggaatggttgcccgttttattccttcccatcttaataataagtcctgcagagtgacatctctgtgttacagtgaagatggtcaagagattctcgttagttactcttcagattacatatatctttttgacccgaaagatgatacagcacgagaacttaaaactccttctgcggaagagagaagagaagagttgcgacaaccaccagttaagcgtttgagacttcgtggtgattggtcagatactggacccagagcaaggccggagagtgaacgagaacgagatggagagcagagtcccaatgtgtcattgatgcagagaatgtctgatatgttatcaagatggtttgaagaagcaagtgaggttgcacaaagcaatagaggacgaggaagatctcgacccagaggtggaacaagtcaatcagatatttcaactcttcctacggtcccatcaagtcctgatttggaagtgagtgaaactgcaatggaagtagatactccagctgaacaatttcttcagccttctacatcctctacaatgtcagctcaggctcattcgacatcatctcccacagaaagccctcattctactcctttgctatcttctccagacagtgaacaaaggcagtctgttgaggcatctggacaccacacacatcatcagtctgattctccttcttctgtggttaacaaacagctcggatccatgtcacttgacgagcaacaggataacaataatgaaaagctgagccccaaaccagggacaggtgaaccagttttaagtttgcactacagcacagaaggaacaactacaagcacaataaaactgaactttacagatgaatggagcagtatagcatcaagttctagaggaattgggagccattgcaaatctgagggtcaggaggaatctttcgtcccacagagctcagtgcaaccaccagaaggagacagtgaaacaaaagctcctgaagaatcatcagaggatgtgacaaaatatcaggaaggagtatctgcagaaaacccagttgagaaccatatcaatataacacaatcagataagttcacagccaagccattggattccaactcaggagaaagaaatgacctcaatcttgatcgctcttgtggggttccagaagaatctgcttcatctgaaaaagccaaggaaccagaaacttcagatcagactagcactgagagtgctaccaatgaaaataacaccaatcctgagcctcagttccaaacagaagccactgggccttcagctcatgaagaaacatccaccagggactctgctcttcaggacacagatgacagtgatgatgacccagtcctgatcccaggtgcaaggtatcgagcaggacctggtgatagacgctctgctgttgcccgtattcaggagttcttcagacggagaaaagaaaggaaagaaatggaagaattggatactttgaacattagaaggccgctagtaaaaatggtttataaaggccatcgcaactccaggacaatgataaaagaagccaatttctggggtgctaactttgtaatgagtggttctgactgtggccacattttcatctgggatcggcacactgctgagcatttgatgcttctggaagctgataatcatgtggtaaactgcctgcagccacatccgtttgacccaattttagcctcatctggcatagattatgacataaagatctggtcaccattagaagagtcaaggatttttaaccgaaaacttgctgatgaagttataactcgaaacgaactcatgctggaagaaactagaaacaccattacagttccagcctctttcatgttgaggatgttggcttcacttaatcatatccgagctgaccggttggagggtgacagatcagaaggctctggtcaagagaatgaaaatgaggatgaggaataataaactctttttggcaagcacttaaatgttctgaaatttgtataagacatttattatatttttttctttacagagctttagtgcaattttaaggttatggtttttggagtttttccctttttttgggataacctaacattggtttggaatgattgtgtgcatgaatttgggagattgtataaaacaaaactagcagaatgtttttaaaactttttgccgtgtatgaggagtgctagaaaatgcaaagtgcaatattttccctaaccttcaaatgtgggagcttggatcaatgttgaagaataattttcatcatagtgaaaatgttggttcaaataaatttctacacttgccatttgcatgtttgttgctttctaattaaagaaactggttgttttaagataccctgaaaaaaaat

SEQ ID NO: 353914 - DNA, 2916 bp, Homo sapiens
acctctctctagagcactgagaaatactttttaaggagaggtttctcatcagaggttatatagtgatgtttgaatgggcctggctggctgtttgaagctggatcttacaggttttgacaacaattcgttcagggcaccgagcaaacatatttagtgcaaagttcttaccttgtacaaatgataaacagattgtatcctgctctggagatggagtaatattttataccaacgttgagcaagatgcagaaaccaacagacaatgccaatttacgtgtcattatggaactacttatgagattatgactgtacccaatgacccttacacttttctctcttgtggtgaagatggaactgttaggtggtttgatacacgcatcaaaactagctgcacaaaagaagattgtaaagatgatattttaattaactgtcgacgtgctgccacgtctgttgctatttgcccaccaataccatattaccttgctgttggttgttctgacagctcagtacgaatatatgatcggcgaatgctgggcacaagagctacagggaattatgcaggtcgagggactactggaatggttgcccgttttattccttcccatcttaataataagtcctgcagagtgacatctctgtgttacagtgaagatggtcaagagattctcgttagttactcttcagattacatatatctttttgacccgaaagatgatacagcacgagaacttaaaactccttctgcggaagagagaagagaagagttgcgacaaccaccagttaagcgtttgagacttcgtggtgattggtcagatactggacccagagcaaggccggagagtgaacgagaacgagatggagagcagagtcccaatgtgtcattgatgcagagaatgtctgatatgttatcaagatggtttgaagaagcaagtgaggttgcacaaagcaatagaggacgaggaagatctcgacccagaggtggaacaagtcaatcagatatttcaactcttcctacggtcccatcaagtcctgatttggaagtgagtgaaactgcaatggaagtagatactccagctgaacaatttcttcagccttctacatcctctacaatgtcagctcaggctcattcgacatcatctcccacagaaagccctcattctactcctttgctatcttctccagacagtgaacaaaggcagtctgttgaggcatctggacaccacacacatcatcagtctgattctccttcttctgtggttaacaaacagctcggatccatgtcacttgacgagcaacaggataacaataatgaaaagctgagccccaaaccagggacaggtgaaccagttttaagtttgcactacagcacagaaggaacaactacaagcacaataaaactgaactttacagatgaatggagcagtatagcatcaagttctagaggaattgggagccattgcaaatctgagggtcaggaggaatctttcgtcccacagagctcagtgcaaccaccagaaggagacagtgaaacaaaagctcctgaagaatcatcagaggatgtgacaaaatatcaggaaggagtatctgcagaaaacccagttgagaaccatatcaatataacacaatcagataagttcacagccaagccattggattccaactcaggagaaagaaatgacctcaatcttgatcgctcttgtggggttccagaagaatctgcttcatctgaaaaagccaaggaaccagaaacttcagatcagactagcactgagagtgctaccaatgaaaataacaccaatcctgagcctcagttccaaacagaagccactgggccttcagctcatgaagaaacatccaccagggactctgctcttcaggacacagatgacagtgatgatgacccagtcctgatcccaggtgcaaggtatcgagcaggacctggtgatagacgctctgctgttgcccgtattcaggagttcttcagacggagaaaagaaaggaaagaaatggaagaattggatactttgaacattagaaggccgctagtaaaaatggtttataaaggccatcgcaactccaggacaatgataaaagaagccaatttctggggtgctaactttgtaatgagtggttctgactgtggccacattttcatctgggatcggcacactgctgagcatttgatgcttctggaagctgataatcatgtggtaaactgcctgcagccacatccgtttgacccaattttagcctcatctggcatagattatgacataaagatctggtcaccattagaagagtcaaggatttttaaccgaaaacttgctgatgaagttataactcgaaacgaactcatgctggaagaaactagaaacaccattacagttccagcctctttcatgttgaggatgttggcttcacttaatcatatccgagctgaccggttggagggtgacagatcagaaggctctggtcaagagaatgaaaatgaggatgaggaataataaactctttttggcaagcacttaaatgttctgaaatttgtataagacatttattatatttttttctttacagagctttagtgcaattttaaggttatggtttttggagtttttccctttttttgggataacctaacattggtttggaatgattgtgtgcatgaatttgggagattgtataaaacaaaactagcagaatgtttttaaaactttttgccgtgtatgaggagtgctagaaaatgcaaagtgcaatattttccctaaccttcaaatgtgggagcttggatcaatgttgaagaataattttcatcatagtgaaaatgttggttcaaataaatttctacacttgccatttgcatgtttgttgctttctaattaaagaaactggttgttttaagataccctgaaaaaaaat

SEQ ID NO: 353915 - DNA, 3556 bp, Homo sapiens
agggtatccaggacgaggagagggaggagtcgccatcgcctccgcctccgcctcctcctgttggaggggggctgagggaggagactgttgctgatctttggatgttctggttagtctaagaaggagagtatgaggcgagctccggcccgggtgcggccgggcttcaggggcccaggcgccgctgctgccaccgccatctaacgctgcgccctggaggcccggcgcgcggatggtgccggtgcggctcgggtgttgaaacgggtgtcccctccccctcctcccctccccacgcggtggtctcccctcccacccggctcaggcagagccatgtctcggggtggctcctacccacacctgttgtgggacgtgaggaaaaggtccctcgggctggaggacccgtcccggctgcggagtcgctacctgggaagaagagaatttatccaaagattaaaacttgaagcaacccttaatgtgcatgatggttgtgttaatacaatctgttggaatgacactggagaatatattttatctggctcagatgacaccaaattagtaattagtaatccttacagcagaaaggttttgacaacaattcgttcagggcaccgagcaaacatatttagtgcaaagttcttaccttgtacaaatgataaacagattgtatcctgctctggagatggagtaatattttataccaacgttgagcaagatgcagaaaccaacagacaatgccaatttacgtgtcattatggaactacttatgagattatgactgtacccaatgacccttacacttttctctcttgtggtgaagatggaactgttaggtggtttgatacacgcatcaaaactagctgcacaaaagaagattgtaaagatgatattttaattaactgtcgacgtgctgccacgtctgttgctatttgcccaccaataccatattaccttgctgttggttgttctgacagctcagtacgaatatatgatcggcgaatgctgggcacaagagctacagggaattatgcaggtcgagggactactggaatggttgcccgttttattccttcccatcttaataataagtcctgcagagtgacatctctgtgttacagtgaagatggtcaagagattctcgttagttactcttcagattacatatatctttttgacccgaaagatgatacagcacgagaacttaaaactccttctgcggaagagagaagagaagagttgcgacaaccaccagttaagcgtttgagacttcgtggtgattggtcagatactggacccagagcaaggccggagagtgaacgagaacgagatggagagcagagtcccaatgtgtcattgatgcagagaatgtctgatatgttatcaagatggtttgaagaagcaagtgaggttgcacaaagcaatagaggacgaggaagatctcgacccagaggtggaacaagtcaatcagatatttcaactcttcctacggtcccatcaagtcctgatttggaagtgagtgaaactgcaatggaagtagatactccagctgaacaatttcttcagccttctacatcctctacaatgtcagctcaggctcattcgacatcatctcccacagaaagccctcattctactcctttgctatcttctccagacagtgaacaaaggcagtctgttgaggcatctggacaccacacacatcatcagtctgaatttttaaggggccctgagatagctttgcttcgtaagcgcctgcaacaactgaggcttaagaaggctgagcagcagaggcagcaagagctagctgcacatacccagcaacagccttccacttctgatcagtcttctcatgagggctcttcacaggaccctcatgcttcagattctccttcttctgtggttaacaaacagctcggatccatgtcacttgacgagcaacaggataacaataatgaaaagctgagccccaaaccagggacaggtgaaccagttttaagtttgcactacagcacagaaggaacaactacaagcacaataaaactgaactttacagatgaatggagcagtatagcatcaagttctagaggaattgggagccattgcaaatctgagggtcaggaggaatctttcgtcccacagagctcagtgcaaccaccagaaggagacagtgaaacaaaagctcctgaagaatcatcagaggatgtgacaaaatatcaggaaggagtatctgcagaaaacccagttgagaaccatatcaatataacacaatcagataagttcacagccaagccattggattccaactcaggagaaagaaatgacctcaatcttgatcgctcttgtggggttccagaagaatctgcttcatctgaaaaagccaaggaaccagaaacttcagatcagactagcactgagagtgctaccaatgaaaataacaccaatcctgagcctcagttccaaacagaagccactgggccttcagctcatgaagaaacatccaccagggactctgctcttcaggacacagatgacagtgatgatgacccagtcctgatcccaggtgcaaggtatcgagcaggacctggtgatagacgctctgctgttgcccgtattcaggagttcttcagacggagaaaagaaaggaaagaaatggaagaattggatactttgaacattagaaggccgctagtaaaaatggtttataaaggccatcgcaactccaggacaatgataaaagaagccaatttctggggtgctaactttgtaatgagtggttctgactgtggccacattttcatctgggatcggcacactgctgagcatttgatgcttctggaagctgataatcatgtggtaaactgcctgcagccacatccgtttgacccaattttagcctcatctggcatagattatgacataaagatctggtcaccattagaagagtcaaggatttttaaccgaaaacttgctgatgaagttataactcgaaacgaactcatgctggaagaaactagaaacaccattacagttccagcctctttcatgttgaggatgttggcttcacttaatcatatccgagctgaccggttggagggtgacagatcagaaggctctggtcaagagaatgaaaatgaggatgaggaataataaactctttttggcaagcacttaaatgttctgaaatttgtataagacatttattatatttttttctttacagagctttagtgcaattttaaggttatggtttttggagtttttccctttttttgggataacctaacattggtttggaatgattgtgtgcatgaatttgggagattgtataaaacaaaactagcagaatgtttttaaaactttttgccgtgtatgaggagtgctagaaaatgcaaagtgcaatattttccctaaccttcaaatgtgggagcttggatcaatgttgaagaataattttcatcatagtgaaaatgttggttcaaataaatttctacacttgccatttgcatgtttgttgctttctaattaaagaaactggttgttttaagataccctgaaaaaaaat

SEQ ID NO: 353916 - DNA, 3321 bp, Homo sapiens
agggtatccaggacgaggagagggaggagtcgccatcgcctccgcctccgcctcctcctgttggaggggggctgagggaggagactgttgctgatctttggatgttctggttagtctaagaaggagagtatgaggcgagctccggcccgggtgcggccgggcttcaggggcccaggcgccgctgctgccaccgccatctaacgctgcgccctggaggcccggcgcgcggatggtgccggtgcggctcgggtgttgaaacgggtgtcccctccccctcctcccctccccacgcggtggtctcccctcccacccggctcaggcagagccatgtctcggggtggctcctacccacacctgttgtgggacgtgaggaaaaggtccctcgggctggaggacccgtcccggctgcggagtcgctacctgggaagaagagaatttatccaaagattaaaacttgaagcaacccttaatgtgcatgatggttgtgttaatacaatctgttggaatgacactggagaatatattttatctggctcagatgacaccaaattagtaattagtaatccttacagcagaaaggttttgacaacaattcgttcagggcaccgagcaaacatatttagtgcaaagttcttaccttgtacaaatgataaacagattgtatcctgctctggagatggagtaatattttataccaacgttgagcaagatgcagaaaccaacagacaatgccaatttacgtgtcattatggaactacttatgagattatgactgtacccaatgacccttacacttttctctcttgtggtgaagatggaactgttaggtggtttgatacacgcatcaaaactagctgcacaaaagaagattgtaaagatgatattttaattaactgtcgacgtgctgccacgtctgttgctatttgcccaccaataccatattaccttgctgttggttgttctgacagctcagtacgaatatatgatcggcgaatgctgggcacaagagctacagggaattatgcaggtcgagggactactggaatggttgcccgttttattccttcccatcttaataataagtcctgcagagtgacatctctgtgttacagtgaagatggtcaagagattctcgttagttactcttcagattacatatatctttttgacccgaaagatgatacagcacgagaacttaaaactccttctgcggaagagagaagagaagagttgcgacaaccaccagttaagcgtttgagacttcgtggtgattggtcagatactggacccagagcaaggccggagagtgaacgagaacgagatggagagcagagtcccaatgtgtcattgatgcagagaatgtctgatatgttatcaagatggtttgaagaagcaagtgaggttgcacaaagcaatagaggacgaggaagatctcgacccagaggtggaacaagtcaatcagatatttcaactcttcctacggtcccatcaagtcctgatttggaagtgagtgaaactgcaatggaagtagatactccagctgaacaatttcttcagccttctacatcctctacaatgtcagctcaggctcattcgacatcatctcccacagaaagccctcattctactcctttgctatcttctccagacagtgaacaaaggcagtctgttgaggcatctggacaccacacacatcatcagtctgattctccttcttctgtggttaacaaacagctcggatccatgtcacttgacgagcaacaggataacaataatgaaaagctgagccccaaaccagggacaggtgaaccagttttaagtttgcactacagcacagaaggaacaactacaagcacaataaaactgaactttacagatgaatggagcagtatagcatcaagttctagaggaattgggagccattgcaaatctgagggtcaggaggaatctttcgtcccacagagctcagtgcaaccaccagaaggagacagtgaaacaaaagctcctgaagaatcatcagaggatgtgacaaaatatcaggaaggagtatctgcagaaaacccagttgagaaccatatcaatataacacaatcagataagttcacagccaagccattggattccaactcaggagaaagaaatgacctcaatcttgatcgctcttgtggggttccagaagaatctgcttcatctgaaaaagccaaggaaccagaaacttcagatcagactagcactgagagtgctaccaatgaaaataacaccaatcctgagcctcagttccaaacagaagccactgggccttcagctcatgaagaaacatccaccagggactctgctcttcaggacacagatgacagtgatgatgacccagtcctgatcccaggtgcaaggtatcgagcaggacctggtgatagacgctctgctgttgcccgtattcaggagttcttcagacggagaaaagaaaggaaagaaatggaagaattggatactttgaacattagaaggccgctagtaaaaatggtttataaaggccatcgcaactccaggacaatgataaaagaagccaatttctggggtgctaactttgtaatgagtggttctgactgtggccacattttcatctgggatcggcacactgctgagcatttgatgcttctggaagctgataatcatgtggtaaactgcctgcagccacatccgtttgacccaattttagcctcatctggcatagattatgacataaagatctggtcaccattagaagagtcaaggatttttaaccgaaaacttgctgatgaagttataactcgaaacgaactcatgctggaagaaactagaaacaccattacagttccagcctctttcatgttgaggatgttggcttcacttaatcatatccgagctgaccggttggagggtgacagatcagaaggctctggtcaagagaatgaaaatgaggatgaggaataataaactctttttggcaagcacttaaatgttctgaaatttgtataagacatttattatatttttttctttacagagctttagtgcaattttaaggttatggtttttggagtttttccctttttttgggataacctaacattggtttggaatgattgtgtgcatgaatttgggagattgtataaaacaaaactagcagaatgtttttaaaactttttgccgtgtatgaggagtgctagaaaatgcaaagtgcaatattttccctaaccttcaaatgtgggagcttggatcaatgttgaagaataattttcatcatagtgaaaatgttggttcaaataaatttctacacttgcc

SEQ ID NO: 353917 - DNA, 1680 bp, Homo sapiens
cttgtgctgtggttgttaattacatggtccggttctttgttaatttgacagagcaacaggataacaataatgaaaagctgagccccaaaccagggacaggtgaaccagttttaagtttgcactacagcacagaaggaacaactacaagcacaataaaactgaactttacagatgaatggagcagtatagcatcaagttctagaggaattgggagccattgcaaatctgagggtcaggaggaatctttcgtcccacagagctcagtgcaaccaccagaaggagacagtgaaacaaaagctcctgaagaatcatcagaggatgtgacaaaatatcaggaaggagtatctgcagaaaacccagttgagaaccatatcaatataacacaatcagataagttcacagccaagccattggattccaactcaggagaaagaaatgacctcaatcttgatcgctcttgtggggttccagaagaatctgcttcatctgaaaaagccaaggaaccagaaacttcagatcagactagcactgagagtgctaccaatgaaaataacaccaatcctgagcctcagttccaaacagaagccactgggccttcagctcatgaagaaacatccaccagggactctgctcttcaggacacagatgacagtgatgatgacccagtcctgatcccaggtgcaaggtatcgagcaggacctggtgatagacgctctgctgttgcccgtattcaggagttcttcagacggagaaaagaaaggaaagaaatggaagaattggatactttgaacattagaaggccgctagtaaaaatggtttataaaggccatcgcaactccaggacaatgataaaagaagccaatttctggggtgctaactttgtaatgagtggttctgactgtggccacattttcatctgggatcggcacactgctgagcatttgatgcttctggaagctgataatcatgtggtaaactgcctgcagccacatccgtttgacccaattttagcctcatctggcatagattatgacataaagatctggtcaccattagaagagtcaaggatttttaaccgaaaacttgctgatgaagttataactcgaaacgaactcatgctggaagaaactagaaacaccattacagttccagcctctttcatgttgaggatgttggcttcacttaatcatatccgagctgaccggttggagggtgacagatcagaaggctctggtcaagagaatgaaaatgaggatgaggaataataaactctttttggcaagcacttaaatgttctgaaatttgtataagacatttattatatttttttctttacagagctttagtgcaattttaaggttatggtttttggagtttttccctttttttgggataacctaacattggtttggaatgattgtgtgcatgaatttgggagattgtataaaacaaaactagcagaatgtttttaaaactttttgccgtgtatgaggagtgctagaaaatgcaaagtgcaatattttccctaaccttcaaatgtgggagcttggatcaatgttgaagaataattttcatcatagtgaaaatgttggttcaaataaatttctacacttgccatttgcatgtttgttgctttctaattaaagaaactggttgttttaagataccctgaaaaaaaat

SEQ ID NO: 353918 - DNA, 3120 bp, Homo sapiens
  misc_feature (2981)..(2981): n is a, c, g, or t
  misc_feature (2985)..(2985): n is a, c, g, or t
agggtatccaggacgaggagagggaggagtcgccatcgcctccgcctccgcctcctcctgttggaggggggctgagggaggagactgttgctgatctttggatgttctggttagtctaagaaggagagtatgaggcgagctccggcccgggtgcggccgggcttcaggggcccaggcgccgctgctgccaccgccatctaacgctgcgccctggaggcccggcgcgcggatggtgccggtgcggctcgggtgttgaaacgggtgtcccctccccctcctcccctccccacgcggtggtctcccctcccacccggctcaggcagagccatgtctcggggtggctcctacccacacctgttgtgggacgtgaggaaaaggtccctcgggctggaggacccgtcccggctgcggagtcgctacctgggaagaagagaatttatccaaagattaaaacttgaagcaacccttaatgtgcatgatggttgtgttaatacaatctgttggaatgacactggagaatatattttatctggctcagatgacaccaaattagtaattagtaatccttacagcagaaaggttttgacaacaattcgttcagggcaccgagcaaacatatttagtgcaaagttcttaccttgtacaaatgataaacagattgtatcctgctctggagatggagtaatattttataccaacgttgagcaagatgcagaaaccaacagacaatgccaatttacgtgtcattatggaactacttatgagattatgactgtacccaatgacccttacacttttctctcttgtggtgaagatggaactgttaggtggtttgatacacgcatcaaaactagctgcacaaaagaagattgtaaagatgatattttaattaactgtcgacgtgctgccacgtctgttgctatttgcccaccaataccatattaccttgctgttggttgttctgacagctcagtacgaatatatgatcggcgaatgctgggcacaagagctacagggaattatgcaggtcgagggactactggaatggttgcccgttttattccttcccatcttaataataagtcctgcagagtgacatctctgtgttacagtgaagatggtcaagagattctcgttagttactcttcagattacatatatctttttgacccgaaagatgatacagcacgagaacttaaaactccttctgcggaagagagaagagaagagttgcgacaaccaccagttaagcgtttgagacttcgtggtgattggtcagatactggacccagagcaaggccggagagtgaacgagaacgagatggagagcagagtcccaatgtgtcattgatgcagagaatgtctgatatgttatcaagatggtttgaagaagcaagtgaggttgcacaaagcaatagaggacgaggaagatctcgacccagaggtggaacaagtcaatcagatatttcaactcttcctacggtcccatcaagtcctgatttggaagtgagtgaaactgcaatggaagtagatactccagctgaacaatttcttcagccttctacatcctctacaatgtcagctcaggctcattcgacatcatctcccacagaaagccctcattctactcctttgctatcttctccagacagtgaacaaaggcagtctgttgaggcatctggacaccacacacatcatcagtctgataacaataatgaaaagctgagccccaaaccagggacaggtgaaccagttttaagtttgcactacagcacagaaggaacaactacaagcacaataaaactgaactttacagatgaatggagcagtatagcatcaagttctagaggaattgggagccattgcaaatctgagggtcaggaggaatctttcgtcccacagagctcagtgcaaccaccagaaggagacagtgaaacaaaagctcctgaagaatcatcagaggatgtgacaaaatatcaggaaggagtatctgcagaaaacccagttgagaaccatatcaatataacacaatcagataagttcacagccaagccattggattccaactcaggagaaagaaatgacctcaatcttgatcgctcttgtggggttccagaagaatctgcttcatctgaaaaagccaaggaaccagaaacttcagatcagactagcactgagagtgctaccaatgaaaataacaccaatcctgagcctcagttccaaacagaagccactgggccttcagctcatgaagaaacatccaccagggactctgctcttcaggacacagatgacagtgatgatgacccagtcctgatcccaggtgcaaggtatcgagcaggacctggtgatagacgctctgctgttgcccgtattcaggagttcttcagacggagaaaagaaaggaaagaaatggaagaattggatactttgaacattagaaggccgctagtaaaaatggtttataaaggccatcgcaactccaggacaatgataaaagaagccaatttctggggtgctaactttgtaatgagtggttctgactgtggccacattttcatctgggatcggcacactgctgagcatttgatgcttctggaagctgataatcatgtggtaaactgcctgcagccacatccgtttgacccaattttagcctcatctggcatagattatgacataaagatctggtcaccattagaagagtcaaggatttttaaccgaaaacttgctgatgaagttataactcgaaacgaactcatgctggaagaaactagaaacaccattacagttccagcctctttcatgttgaggatgttggcttcacttaatcatatccgagctgaccggttggagggtgacagatcagaaggctctggtcaagagaatgaaaatgaggatgaggaataataaactctttttggcaagcacttaaatgttctgaaatttgtataagacatttattatatttttttctttancttnagagcttcagaattacgggttgggtggaggtcctctctgggaaccacatgggggcagactcggtcgctcgggaggtccaacccccagtgtcacctgcggtgaggggcaaaagacgtcccacgagggggccacaac

SEQ ID NO: 353919 - DNA, 2929 bp, Homo sapiens
agggtatccaggacgaggagagggaggagtcgccatcgcctccgcctccgcctcctcctgttggaggggggctgagggaggagactgttgctgatctttggatgttctggttagtctaagaaggagagtatgaggcgagctccggcccgggtgcggccgggcttcaggggcccaggcgccgctgctgccaccgccatctaacgctgcgccctggaggcccggcgcgcggatggtgccggtgcggctcgggtgttgaaacgggtgtcccctccccctcctcccctccccacgcggtggtctcccctcccacccggctcaggcagagccatgtctcggggtggctcctacccacacctgttgtgggacgtgaggaaaaggtccctcgggctggaggacccgtcccggctgcggagtcgctacctgggaagaagagaatttatccaaagattaaaacttgaagcaacccttaatgtgcatgatggttgtgttaatacaatctgttggaatgacactggagaatatattttatctggctcagatgacaccaaattagtaattagtaatccttacagcagaaaggttttgacaacaattcgttcagggcaccgagcaaacatatttagtgcaaagttcttaccttgtacaaatgataaacagattgtatcctgctctggagatggagtaatattttataccaacgttgagcaagatgcagaaaccaacagacaatgccaatttacgtgtcattatggaactacttatgagattatgactgtacccaatgacccttacacttttctctcttgtggtgaagatggaactgttaggtggtttgatacacgcatcaaaactagctgcacaaaagaagattgtaaagatgatattttaattaactgtcgacgtgctgccacgtctgttgctatttgcccaccaataccatattaccttgctgttggttgttctgacagctcagtacgaatatatgatcggcgaatgctgggcacaagagctacagggaattatgcaggtcgagggactactggaatggttgcccgttttattccttcccatcttaataataagtcctgcagagtgacatctctgtgttacagtgaagatggtcaagagattctcgttagttactcttcagattacatatatctttttgacccgaaagatgatacagcacgagaacttaaaactccttctgcggaagagagaagagaagagttgcgacaaccaccagttaagcgtttgagacttcgtggtgattggtcagatactggacccagagcaaggccggagagtgaacgagaacgagatggagagcagagtcccaatgtgtcattgatgcagagaatgtctgatatgttatcaagatggtttgaagaagcaagtgaggttgcacaaagcaatagaggacgaggaagatctcgacccagaggtggaacaagtcaatcagatatttcaactcttcctacggtcccatcaagtcctgatttggaagtgagtgaaactgcaatggaagtagatactccagctgaacaatttcttcagccttctacatcctctacaatgtcagctcaggctcattcgacatcatctcccacagaaagccctcattctactcctttgctatcttctccagacagtgaacaaaggcagtctgttgaggcatctggacaccacacacatcatcagtctgataacaataatgaaaagctgagccccaaaccagggacaggtgaaccagttttaagtttgcactacagcacagaaggaacaactacaagcacaataaaactgaactttacagatgaatggagcagtatagcatcaagttctagaggaattgggagccattgcaaatctgagggtcaggaggaatctttcgtcccacagagctcagtgcaaccaccagaaggagacagtgaaacaaaagctcctgaagaatcatcagaggatgtgacaaaatatcaggaaggagtatctgcagaaaacccagttgagaaccatatcaatataacacaatcagataagttcacagccaagccattggattccaactcaggagaaagaaatgacctcaatcttgatcgctcttgtggggttccagaagaatctgcttcatctgaaaaagccaaggaaccagaaacttcagatcagactagcactgagagtgctaccaatgaaaataacaccaatcctgagcctcagttccaaacagaagccactgggccttcagctcatgaagaaacatccaccagggactctgctcttcaggacacagatgacagtgatgatgacccagtcctgatcccaggtgcaaggtatcgagcaggacctggtgatagacgctctgctgttgcccgtattcaggagttcttcagacggagaaaagaaaggaaagaaatggaagaattggatactttgaacattagaaggccgctagtaaaaatggtttataaaggccatcgcaactccaggacaatgataaaagaagccaatttctggggtgctaactttgtaatgagtggttctgactgtggccacattttcatctgggatcggcacactgctgagcatttgatgcttctggaagctgataatcatgtggtaaactgcctgcagccacatccgtttgacccaattttagcctcatctggcatagattatgacataaagatctggtcaccattagaagagtcaaggatttttaaccgaaaacttgctgatgaagttataactcgaaacgaactcatgctggaagaaactagaaacaccattacagttccagcctctttcatgttgaggatgttggcttcacttaatcatatccgagctgaccggttggagggtgacagatcagaaggctctggtcaagagaatgaaaatgaggatgaggaataataaactctttttggcaagc

SEQ ID NO: 353920 - DNA, 1797 bp, Homo sapiens
gttcacttaaaattcatagagagacatgtagaaatacatactagataatgaaaggatccaaacagtgaagaagcagtccctttatatttttgaattttttttcaagagtaaagtgtgttatgatagtcatcttgatttgtttgaaatgatgtttacaaatgctattaaaattataaatcctacattttacttgtgaattttttggtctacctttctagttgtaaaatataaaaatcctaaaagatcatattgattaacttcttggtggaatcacttatcttgttttgatgatagggagcagtatagcatcaagttctagaggaattgggagccattgcaaatctgagggtcaggaggaatctttcgtcccacagagctcagtgcaaccaccagaaggagacagtgaaacaaaagctcctgaagaatcatcagaggatgtgacaaaatatcaggaaggagtatctgcagaaaacccagttgagaaccatatcaatataacacaatcagataagttcacagccaagccattggattccaactcaggagaaagaaatgacctcaatcttgatcgctcttgtggggttccagaagaatctgcttcatctgaaaaagccaaggaaccagaaacttcagatcagactagcactgagagtgctaccaatgaaaataacaccaatcctgagcctcagttccaaacagaagccactgggccttcagctcatgaagaaacatccaccagggactctgctcttcaggacacagatgacagtgatgatgacccagtcctgatcccaggtgcaaggtatcgagcaggacctggtgatagacgctctgctgttgcccgtattcaggagttcttcagacggagaaaagaaaggaaagaaatggaagaattggatactttgaacattagaaggccgctagtaaaaatggtttataaaggccatcgcaactccaggacaatgataaaagaagccaatttctggggtgctaactttgtaatgagtggttctgactgtggccacattttcatctgggatcggcacactgctgagcatttgatgcttctggaagctgataatcatgtggtaaactgcctgcagccacatccgtttgacccaattttagcctcatctggcatagattatgacataaagatctggtcaccattagaagagtcaaggatttttaaccgaaaacttgctgatgaagttataactcgaaacgaactcatgctggaagaaactagaaacaccattacagttccagcctctttcatgttgaggatgttggcttcacttaatcatatccgagctgaccggttggagggtgacagatcagaaggctctggtcaagagaatgaaaatgaggatgaggaataataaactctttttggcaagcacttaaatgttctgaaatttgtataagacatttattatatttttttctttacagagctttagtgcaattttaaggttatggtttttggagtttttccctttttttgggataacctaacattggtttggaatgattgtgtgcatgaatttgggagattgtataaaacaaaactagcagaatgtttttaaaactttttgccgtgtatgaggagtgctagaaaatgcaaagtgcaatattttccctaaccttcaaatgtgggagcttggatcaatgttgaagaataattttcatcatagtgaaaatgttggttcaaataaatttctacacttgccatttgcatgtttgttgctttctaattaaagaaactggttgttttaagataccctgaaaaaaaat

SEQ ID NO: 353921 - DNA, 2880 bp, Homo sapiens
agggtatccaggacgaggagagggaggagtcgccatcgcctccgcctccgcctcctcctgttggaggggggctgagggaggagactgttgctgatctttggatgttctggttagtctaagaaggagagtatgaggcgagctccggcccgggtgcggccgggcttcaggggcccaggcgccgctgctgccaccgccatctaacgctgcgccctggaggcccggcgcgcggatggtgccggtgcggctcgggtgttgaaacgggtgtcccctccccctcctcccctccccacgcggtggtctcccctcccacccggctcaggcagagccatgtctcggggtggctcctacccacacctgttgtgggacgtgaggaaaaggtccctcgggctggaggacccgtcccggctgcggagtcgctacctgggaagaagagaatttatccaaagattaaaacttgaagcaacccttaatgtgcatgatggttgtgttaatacaatctgttggaatgacactggagaatatattttatctggctcagatgacaccaaattagtaattagtaatccttacagcagaaaggttttgacaacaattcgttcagggcaccgagcaaacatatttagtgcaaagttcttaccttgtacaaatgataaacagattgtatcctgctctggagatggagtaatattttataccaacgttgagcaagatgcagaaaccaacagacaatgccaatttacgtgtcattatggaactacttatgagattatgactgtacccaatgacccttacacttttctctcttgtggtgaagatggaactgttaggtggtttgatacacgcatcaaaactagctgcacaaaagaagattgtaaagatgatattttaattaactgtcgacgtgctgccacgtctgttgctatttgcccaccaataccatattaccttgctgttggttgttctgacagctcagtacgaatatatgatcggcgaatgctgggcacaagagctacagggaattatgcaggtcgagggactactggaatggttgcccgttttattccttcccatcttaataataagtcctgcagagtgacatctctgtgttacagtgaagatggtcaagagattctcgttagttactcttcagattacatatatctttttgacccgaaagatgatacagcacgagaacttaaaactccttctgcggaagagagaagagaagagttgcgacaaccaccagttaagcgtttgagacttcgtggtgattggtcagatactggacccagagcaaggccggagagtgaacgagaacgagatggagagcagagtcccaatgtgtcattgatgcagagaatgtctgatatgttatcaagatggtttgaagaagcaagtgaggttgcacaaagcaatagaggacgaggaagatctcgacccagaggtggaacaagtcaatcagatatttcaactcttcctacggtcccatcaagtcctgatttggaagtgagtgaaactgcaatggaagtagatactccagctgaacaatttcttcagccttctacatcctctacaatgtcagctcaggctcattcgacatcatctcccacagaaagccctcattctactcctttgctatcttctccagacagtgaacaaaggcagtctgttgaggcatctggacaccacacacatcatcagtctgataacaataatgaaaagctgagccccaaaccagggacaggtgaaccagttttaagtttgcactacagcacagaaggaacaactacaagcacaataaaactgaactttacagatgaatggagcagtatagcatcaagttctagaggaattgggagccattgcaaatctgagggtcaggaggaatctttcgtcccacagagctcagtgcaaccaccagaaggagacagtgaaacaaaagctcctgaagaatcatcagaggatgtgacaaaatatcaggaaggagtatctgcagaaaacccagttgagaaccatatcaatataacacaatcagataagttcacagccaagccattggattccaactcaggagaaagaaatgacctcaatcttgatcgctcttgtggggttccagaagaatctgcttcatctgaaaaagccaaggaaccagaaacttcagatcagactagcactgagagtgctaccaatgaaaataacaccaatcctgagcctcagttccaaacagaagccactgggccttcagctcatgaagaaacatccaccagggactctgctcttcaggacacagatgacagtgatgatgacgctctgctgttgcccgtattcaggagttcttcagacggagaaaagaaaggaaagaaatggaagaattggatactttgaacattagaaggccgctagtaaaaatggtttataaaggccatcgcaactccaggacaatgataaaagaagccaatttctggggtgctaactttgtaatgagtggttctgactgtggccacattttcatctgggatcggcacactgctgagcatttgatgcttctggaagctgataatcatgtggtaaactgcctgcagccacatccgtttgacccaattttagcctcatctggcatagattatgacataaagatctggtcaccattagaagagtcaaggatttttaaccgaaaacttgctgatgaagttataactcgaaacgaactcatgctggaagaaactagaaacaccattacagttccagcctctttcatgttgaggatgttggcttcacttaatcatatccgagctgaccggttggagggtgacagatcagaaggctctggtcaagagaatgaaaatgaggatgaggaataataaactctttttggcaagc

SEQ ID NO: 353922 - DNA, 1481 bp, Homo sapiens
attattctttttacctaaagtagtctgtttttggaacatctttaaaccacattttaaataaaatatcaaaatagaagtctatccactgctattatatattacctttagtttcttttcatttctctttatgtgttttcttaatatggagaagaggggaaagaacattggataaaatttgttatatttgtagtaaaattgcacatgaattttgtctgtattatgtttttataaaatagccctttaaaaaccagtttgccgcatgctattgcctttacttttcatccagtaccaaatttctaagtgatctcttaactaaaatactttgttgtagtaactcaactagtctgacttctcactgttgtgtctgcgtttttatgcttttggttgggggtgccttattgagatagtgtgtttatgtatttcctagacttactatattttcataagtttctcattattctttgtgaatatttttatttatttttgtttttttaatatgtaattcatataacgctctgctgttgcccgtattcaggagttcttcagacggagaaaagaaaggaaagaaatggaagaattggatactttgaacattagaaggccgctagtaaaaatggtttataaaggccatcgcaactccaggacaatgataaaagaagccaatttctggggtgctaactttgtaatgagtggttctgactgtggccacattttcatctgggatcggcacactgctgagcatttgatgcttctggaagctgataatcatgtggtaaactgcctgcagccacatccgtttgacccaattttagcctcatctggcatagattatgacataaagatctggtcaccattagaagagtcaaggatttttaaccgaaaacttgctgatgaagttataactcgaaacgaactcatgctggaagaaactagaaacaccattacagttccagcctctttcatgttgaggatgttggcttcacttaatcatatccgagctgaccggttggagggtgacagatcagaaggctctggtcaagagaatgaaaatgaggatgaggaataataaactctttttggcaagcacttaaatgttctgaaatttgtataagacatttattatatttttttctttacagagctttagtgcaattttaaggttatggtttttggagtttttccctttttttgggataacctaacattggtttggaatgattgtgtgcatgaatttgggagattgtataaaacaaaactagcagaatgtttttaaaactttttgccgtgtatgaggagtgctagaaaatgcaaagtgcaatattttccctaaccttcaaatgtgggagcttggatcaatgttgaagaataattttcatcatagtgaaaatgttggttcaaataaatttctacacttgccatttgcatgtttgttgctttctaattaaagaaactggttgttttaagataccctgaaaaaaaat

SEQ ID NO: 353923 - DNA, 2010 bp, Homo sapiens
agggtatccaggacgaggagagggaggagtcgccatcgcctccgcctccgcctcctcctgttggaggggggctgagggaggagactgttgctgatctttggatgttctggttagtctaagaaggagagtatgaggcgagctccggcccgggtgcggccgggcttcaggggcccaggcgccgctgctgccaccgccatctaacgctgcgccctggaggcccggcgcgcggatggtgccggtgcggctcgggtgttgaaacgggtgtcccctccccctcctcccctccccacgcggtggtctcccctcccacccggctcaggcagagccatgtctcggggtggctcctacccacacctgttgtgggacgtgaggaaaaggtccctcgggctggaggacccgtcccggctgcggagtcgctacctgggaagaagagaatttatccaaagattaaaacttgaagcaacccttaatgtgcatgatggttgtgttaatacaatctgttggaatgacactggagaatatattttatctggctcagatgacaccaaattagtaattagtaatccttacagcagaaaggttttgacaacaattcgttcagggcaccgagcaaacatatttagtgcaaagttcttaccttgtacaaatgataaacagattgtatcctgctctggagatggagtaatattttataccaacgttgagcaagatgcagaaaccaacagacaatgccaatttacgtgtcattatggaactacttatgagattatgactgtacccaatgacccttacacttttctctcttgtggtgaagatggaactgttaggtggtttgatacacgcatcaaaactagctgcacaaaagaagattgtaaagatgatattttaattaactgtcgacgtgctgccacgtctgttgctatttgcccaccaataccatattaccttgctgttggttgttctgacagctcagtacgaatatatgatcggcgaatgctgggcacaagagctacagggaattatgcaggtcgagggactactggaatggttgcccgttttattccttcccatcttaataataagtcctgcagagtgacatctctgtgttacagtgaagatggtcaagagattctcgttagttactcttcagattacatatatctttttgacccgaaagatgatacagcacgagaacttaaaactccttctgcggaagagagaagagaagagttgcgacaaccaccagttaagcgtttgagacttcgtggtgattggtcagatactggacccagagcaaggccggagagtgaacgagaacgagatggagagcagagtcccaatgtgtcattgatgcagagaatgtctgatatgttatcaagatggtttgaagaagcaagtgaggttgcacaaagcaatagaggacgaggaagatctcgacccagaggtggaacaagtcaatcagatatttcaactcttcctacggtcccatcaagtcctgatttggaagtgagtgaaactgcaatggaagtagatactccagctgaacaatttcttcagccttctacatcctctacaatgtcagctcaggctcattcgacatcatctcccacagaaagccctcattctactcctttgctatcttctccagacagtgaacaaaggcagtctgttgaggcatctggacaccacacacatcatcagtctgataacaataatgaaaagctgagccccaaaccagggacaggtgaaccagttttaagtttgcactacagcacagaaggaacaactacaagcacaataaaactgaactttacagatgaatggagcagtatagcatcaagttctagaggaattgggagccattgcaaatctgagggtcaggaggaatctttcgtcccacagagctcagtgcaaccaccagaaggagacagtgaaacaaagctcctgaagaatcatcagaggatgcgacactatcagggagtatctgcgagttgctcagaactcatgacg

SEQ ID NO: 353924 - DNA, 771 bp, Homo sapiens
ttaaatacaagttacagtgattatttggcattgaatagacttaaggcagaaatatagacatcagacgcataaagaatgaagtaattcctcctggtactggctgattgtttacggtttgcctgatcttcaaggaaaaaatacagttactttatgatctttgatacgatttttaacttgccttgtaggttataactcgaaacgaactcatgctggaagaaactagaaacaccattacagttccagcctctttcatgttgaggatgttggcttcacttaatcatatccgagctgaccggttggagggtgacagatcagaaggctctggtcaagagaatgaaaatgaggatgaggaataataaactctttttggcaagcacttaaatgttctgaaatttgtataagacatttattatatttttttctttacagagctttagtgcaattttaaggttatggtttttggagtttttccctttttttgggataacctaacattggtttggaatgattgtgtgcatgaatttgggagattgtataaaacaaaactagcagaatgtttttaaaactttttgccgtgtatgaggagtgctagaaaatgcaaagtgcaatattttccctaaccttcaaatgtgggagcttggatcaatgttgaagaataattttcatcatagtgaaaatgttggttcaaataaatttctacacttgccatttgcatgtttgttgctttctaattaaagaaactggttgttttaagataccctgaaaaaaaat

SEQ ID NO: 353925 - DNA, 351 bp, Homo sapiens
tgcccgttttattccttcccatcttaataataagtcctgcagagtgacatctctgtgttacagtgaagatggtcaagagattctcgttagttactcttcagattacatatatctttttgacccgaaagatgatacagcacgagaacttaaaactccttctgcggaagagagaagagaagaggtaggtttactcaaaaccatgtcctttggccgggcgcggtggctcacgcctgtaatcccagcgctttgggaggccgaggtgggtggatcacctgcggttgggagtttgcaaccagcctgaccaacatggagaaaccccgtctttactaaaaacacaaaattagctgagcg

SEQ ID NO: 353926 - DNA, 483 bp, Homo sapiens
gacatcatctcccacagaaagccctcattctactcctttgctatcttctccagacagtgaacaaaggcagtctgttgaggcatctggacaccacacacatcatcagtctggtgaggataagtatgctgtggttcatctaatgatttttgatagtgaaaatttctttactggctattttgaaagatactaaatcacatcaacttcttgttggaataaatgatcaaaatgacatgtaatatatggttatgtaacttaaacacaaaaattaattatgtcttacttgcatgaattttaacaaatagcaggaatcttcaatttatataaaacaattgttttaaaagtacaagtaccaaaagatagtgttttgacatagtttaatgtgcctgacttaaatattattttatagattattagagaccaaaatatctttctagatttatttggttttatgtctatattaaagtgattatgaaaatatcagta

SEQ ID NO: 353927 - DNA, 234 bp, Homo sapiens
attctcttatctgtgtttccagaccggttggagggtgacagatcagaaggctctggtcaagagaatgaaaatgaggatgaggaataataaactctttttggcaagcacttaaatgttctgaaatttgtataagacatttattatatttttttctttacagagctttagtgcaattttaaggttatggtttttggagtttttccctttttttgggataacctaacattggtttgg

SEQ ID NO: 353928 - DNA, 463 bp, Homo sapiens
cgggtgtcccctccccctcctcccctccccacgcggtggtctcccctcccacccggctcaggcagagccatgtctcggggtggctcctacccacacctgttgtgggacgtgaggaaaaggtccctcgggctggaggacccgtcccggctgcggagtcgctacctgggtgagcgggggccccggggcggaggcgctgaggtcgccgcctagagtgggggagggggcacgctgccgggtctgttggaggtgggacggcgtctcggtgggggcgcccggagactctggggtgttgggtggggccttggttgccgaattccgtgccggtgcctcccccagtcaagccccctgtgcatgctgccagccgccgcccttgctgggtttttctcggagggccgggccgtgggcagaaggtactggcttgtaaaggtgttggggtcgctgatgggttgggactcgggagact

SEQ ID NO: 353929 - DNA, 2450 bp, Homo sapiens
aaagaattcggcacgagtaaggagaggtttctcatcagaggttttgacaacaattcgttcagggcaccgagcaaacatatttagtgcaaagttcttaccttgtacaaatgataaacagattgtatcctgctctggagatggagtaatattttataccaacgttgagcaagatgcagaaaccaacagacaatgccaatttacgtgtcattatggaactacttatgagattatgactgtacccaatgacccttacacttttctctcttgtggtgaagatggaactgttaggtggtttgatacacgcatcaaaactagctgcacaaaagaagattgtaaagatgatattttaattaactgtcgacgtgctgccacgtctgttgctatttgcccaccaataccatattaccttgctgttggttgttctgacagctcagtacgaatatatgatcggcgaatgctgggcacaagagctacagggaattatgcaggtcgagggactactggaatggttgcccgttttattccttcccatcttaataataagtcctgcagagtgacatctctgtgttacagtgaagatggtcaagagattctcgttagttactcttcagattacatatatctttttgacccgaaagatgatacagcacgagaacttaaaactccttctgcggaagagagaagagaagagttgcgacaaccaccagttaagcgtttgagacttcgtggtgattggtcagatactggacccagagcaaggccggagagtgaacgagaacgagatggagagcagagtcccaatgtgtcattgatgcagagaatgtctgatatgttatcaagatggtttgaagaagcaagtgaggttgcacaaagcaatagaggacgaggaagatctcgacccagaggtggaacaagtcaatcagatatttcaactcttcctacggtcccatcaagtcctgatttggaagtgagtgaaactgcaatggaagtagatactccagctgaacaatttcttcagccttctacatcctctacaatgtcagctcaggctcattcgacatcatctcccacagaaagccctcattctactcctttgctatcttctccagacagtgaacaaaggcagtctgttgaggcatctggacaccacacacatcatcagtctgattctccttcttctgtggttaacaaacagctcggatccatgtcacttgacgagcaacaggataacaataatgaaaagctgagccccaaaccagggacaggtgaaccagttttaagtttgcactacagcacagaaggaacaactacaagcacaataaaactgaactttacagatgaatggagcagtatagcatcaagttctagaggaattgggagccattgcaaatctgagggtcaggaggaatctttcgtcccacagagctcagtgcaaccaccagaaggagacagtgaaacaaaagctcctgaagaatcatcagaggatgtgacaaaatatcaggaaggagtatctgcagaaaacccagttgagaaccatatcaatataacacaatcagataagttcacagccaagccattggattccaactcaggagaaagaaatgacctcaatcttgatcgctcttgtggggttccagaagaatctgcttcatctgaaaaagccaaggaaccagaaacttcagatcagactagcactgagagtgctaccaatgaaaataacaccaatcctgagcctcagttccaaacagaagccactgggccttcagctcatgaagaaacatccaccagggactctgctcttcaggacacagatgacagtgatgatgacccagtcctgatcccaggtgcaaggtatcgagcaggacctggtgatagacgctctgctgttgcccgtattcaggagttcttcagacggagaaaagaaaggaaagaaatggaagaattggatactttgaacattagaaggccgctagtaaaaatggtttataaaggccatcgcaactccaggacaatgataaaagaagccaatttctggggtgctaactttgtaatgagtggttctgactgtggccacattttcatctgggatcggcacactgctgagcatttgatgcttctggaagctgataatcatgtggtaaactgcctgcagccacatccgtttgacccaattttagcctcatctggcatagattatgacataaagatctggtcaccattagaagagtcaaggatttttaaccgaaaacttgctgatgaagttataactcgaaacgaactcatgctggaagaaactagaaacaccattacagttccagcctctttcatgttgaggatgttggcttcacttaatcatatccgagctgaccggttggagggtgacagatcagaaggctctggtcaagagaatgaaaatgaggatgaggaataataaactctttttggcaagc

SEQ ID NO: 353930 - DNA, 3385 bp, Homo sapiens
agggtatccaggacgaggagagggaggagtcgccatcgcctccgcctccgcctcctcctgttggaggggggctgagggaggagactgttgctgatctttggatgttctggttagtctaagaaggagagtatgaggcgagctccggcccgggtgcggccgggcttcaggggcccaggcgccgctgctgccaccgccatctaacgctgcgccctggaggcccggcgcgcggatggtgccggtgcggctcgggtgttgaaacgggtgtcccctccccctcctcccctccccacgcggtggtctcccctcccacccggctcaggcagagccatgtctcggggtggctcctacccacacctgttgtgggacgtgaggaaaaggtccctcgggctggaggacccgtcccggctgcggagtcgctacctgggaagaagagaatttatccaaagattaaaacttgaagcaacccttaatgtgcatgatggttgtgttaatacaatctgttggaatgacactggagaatatattttatctggctcagatgacaccaaattagtaattagtaatccttacagcagaaaggttttgacaacaattcgttcagggcaccgagcaaacatatttagtgcaaagttcttaccttgtacaaatgataaacagattgtatcctgctctggagatggagtaatattttataccaacgttgagcaagatgcagaaaccaacagacaatgccaatttacgtgtcattatggaactacttatgagattatgactgtacccaatgacccttacacttttctctcttgtggtgaagatggaactgttaggtggtttgatacacgcatcaaaactagctgcacaaaagaagattgtaaagatgatattttaattaactgtcgacgtgctgccacgtctgttgctatttgcccaccaataccatattaccttgctgttggttgttctgacagctcagtacgaatatatgatcggcgaatgctgggcacaagagctacagggaattatgcaggtcgagggactactggaatggttgcccgttttattccttcccatcttaataataagtcctgcagagtgacatctctgtgttacagtgaagatggtcaagagattctcgttagttactcttcagattacatatatctttttgacccgaaagatgatacagcacgagaacttaaaactccttctgcggaagagagaagagaagagttgcgacaaccaccagttaagcgtttgagacttcgtggtgattggtcagatactggacccagagcaaggccggagagtgaacgagaacgagatggagagcagagtcccaatgtgtcattgatgcagagaatgtctgatatgttatcaagatggtttgaagaagcaagtgaggttgcacaaagcaatagaggacgaggaagatctcgacccagaggtggaacaagtcaatcagatatttcaactcttcctacggtcccatcaagtcctgatttggaagtgagtgaaactgcaatggaagtagatactccagctgaacaatttcttcagccttctacatcctctacaatgtcagctcaggctcattcgacatcatctcccacagaaagccctcattctactcctttgctatcttctccagacagtgaacaaaggcagtctgttgaggcatctggacaccacacacatcatcagtctgattctccttcttctgtggttaacaaacagctcggatccatgtcacttgacgagcaacaggataacaataatgaaaagctgagccccaaaccagggacaggtgaaccagttttaagtttgcactacagcacagaaggaacaactacaagcacaataaaactgaactttacagatgaatggagcagtatagcatcaagttctagaggaattgggagccattgcaaatctgagggtcaggaggaatctttcgtcccacagagctcagtgcaaccaccagaaggagacagtgaaacaaaagctcctgaagaatcatcagaggatgtgacaaaatatcaggaaggagtatctgcagaaaacccagttgagaaccatatcaatataacacaatcagataagttcacagccaagccattggattccaactcaggagaaagaaatgacctcaatcttgatcgctcttgtggggttccagaagaatctgcttcatctgaaaaagccaaggaaccagaaacttcagatcagactagcactgagagtgctaccaatgaaaataacaccaatcctgagcctcagttccaaacagaagccactgggccttcagctcatgaagaaacatccaccagggactctgctcttcaggacacagatgacagtgatgatgacccagtcctgatcccaggtgcaaggtatcgagcaggacctggtgatagacgctctgctgttgcccgtattcaggagttcttcagacggagaaaagaaaggaaagaaatggaagaattggatactttgaacattagaaggccgctagtaaaaatggtttataaaggccatcgcaactccaggacaatgataaaagaagccaatttctggggtgctaactttgtaatgagtggttctgactgtggccacattttcatctgggatcggcacactgctgagcatttgatgcttctggaagctgataatcatgtggtaaactgcctgcagccacatccgtttgacccaattttagcctcatctggcatagattatgacataaagatctggtcaccattagaagagtcaaggatttttaaccgaaaacttgctgatgaagttataactcgaaacgaactcatgctggaagaaactagaaacaccattacagttccagcctctttcatgttgaggatgttggcttcacttaatcatatccgagctgaccggttggagggtgacagatcagaaggctctggtcaagagaatgaaaatgaggatgaggaataataaactctttttggcaagcacttaaatgttctgaaatttgtataagacatttattatatttttttctttacagagctttagtgcaattttaaggttatggtttttggagtttttccctttttttgggataacctaacattggtttggaatgattgtgtgcatgaatttgggagattgtataaaacaaaactagcagaatgtttttaaaactttttgccgtgtatgaggagtgctagaaaatgcaaagtgcaatattttccctaaccttcaaatgtgggagcttggatcaatgttgaagaataattttcatcatagtgaaaatgttggttcaaataaatttctacacttgccatttgcatgtttgttgctttctaattaaagaaactggttgttttaagataccctgaaaaaaaat

SEQ ID NO: 353931 - DNA, 3065 bp, Homo sapiens
tgccgaattccgtgccggtgcctcccccagtcaagccccctgtgcatgctgccagccgccgcccttgctgggtttttctcggagggccgggccgtgggcagaaggaagaagagaatttatccaaagattaaaacttgaagcaacccttaatgtgcatgatggttgtgttaatacaatctgttggaatgacactggagaatatattttatctggctcagatgacaccaaattagtaattagtaatccttacagcagaaaggttttgacaacaattcgttcagggcaccgagcaaacatatttagtgcaaagttcttaccttgtacaaatgataaacagattgtatcctgctctggagatggagtaatattttataccaacgttgagcaagatgcagaaaccaacagacaatgccaatttacgtgtcattatggaactacttatgagattatgactgtacccaatgacccttacacttttctctcttgtggtgaagatggaactgttaggtggtttgatacacgcatcaaaactagctgcacaaaagaagattgtaaagatgatattttaattaactgtcgacgtgctgccacgtctgttgctatttgcccaccaataccatattaccttgctgttggttgttctgacagctcagtacgaatatatgatcggcgaatgctgggcacaagagctacagggaattatgcaggtcgagggactactggaatggttgcccgttttattccttcccatcttaataataagtcctgcagagtgacatctctgtgttacagtgaagatggtcaagagattctcgttagttactcttcagattacatatatctttttgacccgaaagatgatacagcacgagaacttaaaactccttctgcggaagagagaagagaagagttgcgacaaccaccagttaagcgtttgagacttcgtggtgattggtcagatactggacccagagcaaggccggagagtgaacgagaacgagatggagagcagagtcccaatgtgtcattgatgcagagaatgtctgatatgttatcaagatggtttgaagaagcaagtgaggttgcacaaagcaatagaggacgaggaagatctcgacccagaggtggaacaagtcaatcagatatttcaactcttcctacggtcccatcaagtcctgatttggaagtgagtgaaactgcaatggaagtagatactccagctgaacaatttcttcagccttctacatcctctacaatgtcagctcaggctcattcgacatcatctcccacagaaagccctcattctactcctttgctatcttctccagacagtgaacaaaggcagtctgttgaggcatctggacaccacacacatcatcagtctgattctccttcttctgtggttaacaaacagctcggatccatgtcacttgacgagcaacaggataacaataatgaaaagctgagccccaaaccagggacaggtgaaccagttttaagtttgcactacagcacagaaggaacaactacaagcacaataaaactgaactttacagatgaatggagcagtatagcatcaagttctagaggaattgggagccattgcaaatctgagggtcaggaggaatctttcgtcccacagagctcagtgcaaccaccagaaggagacagtgaaacaaaagctcctgaagaatcatcagaggatgtgacaaaatatcaggaaggagtatctgcagaaaacccagttgagaaccatatcaatataacacaatcagataagttcacagccaagccattggattccaactcaggagaaagaaatgacctcaatcttgatcgctcttgtggggttccagaagaatctgcttcatctgaaaaagccaaggaaccagaaacttcagatcagactagcactgagagtgctaccaatgaaaataacaccaatcctgagcctcagttccaaacagaagccactgggccttcagctcatgaagaaacatccaccagggactctgctcttcaggacacagatgacagtgatgatgacccagtcctgatcccaggtgcaaggtatcgagcaggacctggtgatagacgctctgctgttgcccgtattcaggagttcttcagacggagaaaagaaaggaaagaaatggaagaattggatactttgaacattagaaggccgctagtaaaaatggtttataaaggccatcgcaactccaggacaatgataaaagaagccaatttctggggtgctaactttgtaatgagtggttctgactgtggccacattttcatctgggatcggcacactgctgagcatttgatgcttctggaagctgataatcatgtggtaaactgcctgcagccacatccgtttgacccaattttagcctcatctggcatagattatgacataaagatctggtcaccattagaagagtcaaggatttttaaccgaaaacttgctgatgaagttataactcgaaacgaactcatgctggaagaaactagaaacaccattacagttccagcctctttcatgttgaggatgttggcttcacttaatcatatccgagctgaccggttggagggtgacagatcagaaggctctggtcaagagaatgaaaatgaggatgaggaataataaactctttttggcaagcacttaaatgttctgaaatttgtataagacatttattatatttttttctttacagagctttagtgcaattttaaggttatggtttttggagtttttccctttttttgggataacctaacattggtttggaatgattgtgtgcatgaatttgggagattgtataaaacaaaactagcagaatgtttttaaaactttttgccgtgtatgaggagtgctagaaaatgcaaagtgcaatattttccctaaccttcaaatgtgggagcttggatcaatgttgaagaataattttcatcatagtgaaaatgttggttcaaataaatttctacacttgccatttgcatgtttgttgctttctaattaaagaaactggttgttttaagataccctgaaaaaaaat

SEQ ID NO: 353932 - DNA, 3325 bp, Homo sapiens
agggtatccaggacgaggagagggaggagtcgccatcgcctccgcctccgcctcctcctgttggaggggggctgagggaggagactgttgctgatctttggatgttctggttagtctaagaaggagagtatgaggcgagctccggcccgggtgcggccgggcttcaggggcccaggcgccgctgctgccaccgccatctaacgctgcgccctggaggcccggcgcgcggatggtgccggtgcggctcgggtgttgaaacgggtgtcccctccccctcctcccctccccacgcggtggtctcccctcccacccggctcaggcagagccatgtctcggggtggctcctacccacacctgttgtgggacgtgaggaaaaggtccctcgggctggaggacccgtcccggctgcggagtcgctacctgggaagaagagaatttatccaaagattaaaacttgaagcaacccttaatgtgcatgatggttgtgttaatacaatctgttggaatgacactggagaatatattttatctggctcagatgacaccaaattagtaattagtaatccttacagcagaaaggttttgacaacaattcgttcagggcaccgagcaaacatatttagtgcaaagttcttaccttgtacaaatgataaacagattgtatcctgctctggagatggagtaatattttataccaacgttgagcaagatgcagaaaccaacagacaatgccaatttacgtgtcattatggaactacttatgagattatgactgtacccaatgacccttacacttttctctcttgtggtgaagatggaactgttaggtggtttgatacacgcatcaaaactagctgcacaaaagaagattgtaaagatgatattttaattaactgtcgacgtgctgccacgtctgttgctatttgcccaccaataccatattaccttgctgttggttgttctgacagctcagtacgaatatatgatcggcgaatgctgggcacaagagctacagggaattatgcaggtcgagggactactggaatggttgcccgttttattccttcccatcttaataataagtcctgcagagtgacatctctgtgttacagtgaagatggtcaagagattctcgttagttactcttcagattacatatatctttttgacccgaaagatgatacagcacgagaacttaaaactccttctgcggaagagagaagagaagagttgcgacaaccaccagttaagcgtttgagacttcgtggtgattggtcagatactggacccagagcaaggccggagagtgaacgagaacgagatggagagcagagtcccaatgtgtcattgatgcagagaatgtctgatatgttatcaagatggtttgaagaagcaagtgaggttgcacaaagcaatagaggacgaggaagatctcgacccagaggtggaacaagtcaatcagatatttcaactcttcctacggtcccatcaagtcctgatttggaagtgagtgaaactgcaatggaagtagatactccagctgaacaatttcttcagccttctacatcctctacaatgtcagctcaggctcattcgacatcatctcccacagaaagccctcattctactcctttgctatcttctccagacagtgaacaaaggcagtctgttgaggcatctggacaccacacacatcatcagtctgataacaataatgaaaagctgagccccaaaccagggacaggtgaaccagttttaagtttgcactacagcacagaaggaacaactacaagcacaataaaactgaactttacagatgaatggagcagtatagcatcaagttctagaggaattgggagccattgcaaatctgagggtcaggaggaatctttcgtcccacagagctcagtgcaaccaccagaaggagacagtgaaacaaaagctcctgaagaatcatcagaggatgtgacaaaatatcaggaaggagtatctgcagaaaacccagttgagaaccatatcaatataacacaatcagataagttcacagccaagccattggattccaactcaggagaaagaaatgacctcaatcttgatcgctcttgtggggttccagaagaatctgcttcatctgaaaaagccaaggaaccagaaacttcagatcagactagcactgagagtgctaccaatgaaaataacaccaatcctgagcctcagttccaaacagaagccactgggccttcagctcatgaagaaacatccaccagggactctgctcttcaggacacagatgacagtgatgatgacccagtcctgatcccaggtgcaaggtatcgagcaggacctggtgatagacgctctgctgttgcccgtattcaggagttcttcagacggagaaaagaaaggaaagaaatggaagaattggatactttgaacattagaaggccgctagtaaaaatggtttataaaggccatcgcaactccaggacaatgataaaagaagccaatttctggggtgctaactttgtaatgagtggttctgactgtggccacattttcatctgggatcggcacactgctgagcatttgatgcttctggaagctgataatcatgtggtaaactgcctgcagccacatccgtttgacccaattttagcctcatctggcatagattatgacataaagatctggtcaccattagaagagtcaaggatttttaaccgaaaacttgctgatgaagttataactcgaaacgaactcatgctggaagaaactagaaacaccattacagttccagcctctttcatgttgaggatgttggcttcacttaatcatatccgagctgaccggttggagggtgacagatcagaaggctctggtcaagagaatgaaaatgaggatgaggaataataaactctttttggcaagcacttaaatgttctgaaatttgtataagacatttattatatttttttctttacagagctttagtgcaattttaaggttatggtttttggagtttttccctttttttgggataacctaacattggtttggaatgattgtgtgcatgaatttgggagattgtataaaacaaaactagcagaatgtttttaaaactttttgccgtgtatgaggagtgctagaaaatgcaaagtgcaatattttccctaaccttcaaatgtgggagcttggatcaatgttgaagaataattttcatcatagtgaaaatgttggttcaaataaatttctacacttgccatttgcatgtttgttgctttctaattaaagaaactggttgttttaagataccctgaaaaaaaat

SEQ ID NO: 353933 - DNA, 3207 bp, Homo sapiens
agggtatccaggacgaggagagggaggagtcgccatcgcctccgcctccgcctcctcctgttggaggggggctgagggaggagactgttgctgatctttggatgttctggttagtctaagaaggagagtatgaggcgagctccggcccgggtgcggccgggcttcaggggcccaggcgccgctgctgccaccgccatctaacgctgcgccctggaggcccggcgcgcggatggtgccggtgcggctcgggtgttgaaacgggtgtcccctccccctcctcccctccccacgcggtggtctcccctcccacccggctcaggcagagccatgtctcggggtggctcctacccacacctgttgtgggacgtgaggaaaaggtccctcgggctggaggacccgtcccggctgcggagtcgctacctgggaagaagagaatttatccaaagattaaaacttgaagcaacccttaatgtgcatgatggttgtgttaatacaatctgttggaatgacactggagaatatattttatctggctcagatgacaccaaattagtaattagtaatccttacagcagaaaggttttgacaacaattcgttcagggcaccgagcaaacatatttagtgcaaagttcttaccttgtacaaatgataaacagattgtatcctgctctggagatggagtaatattttataccaacgttgagcaagatgcagaaaccaacagacaatgccaatttacgtgtcattatggaactacttatgagattatgactgtacccaatgacccttacacttttctctcttgtggtgaagatggaactgttaggtggtttgatacacgcatcaaaactagctgcacaaaagaagattgtaaagatgatattttaattaactgtcgacgtgctgccacgtctgttgctatttgcccaccaataccatattaccttgctgttggttgttctgacagctcagtacgaatatatgatcggcgaatgctgggcacaagagctacagggaattatgcaggtcgagggactactggaatggttgcccgttttattccttcccatcttaataataagtcctgcagagtgacatctctgtgttacagtgaagatggtcaagagattctcgttagttactcttcagattacatatatctttttgacccgaaagatgatacagcacgagaacttaaaactccttctgcggaagagagaagagaagagttgcgacaaccaccagttaagcgtttgagacttcgtggtgattggtcagatactggacccagagcaaggccggagagtgaacgagaacgagatggagagcagagtcccaatgtgtcattgatgcagagaatgtctgatatgttatcaagatggtttgaagaagcaagtgaggttgcacaaagcaatagaggacgaggaagatctcgacccagaggtggaacaagtcaatcagatatttcaactcttcctacggtcccatcaagtcctgatttggaagtgagtgaaactgcaatggaagtagatactccagctgaacaatttcttcagccttctacatcctctacaatgtcagctcaggctcattcgacatcatctcccacagaaagccctcattctactcctttgctatcttctccagacagtgaacaaaggcagtctgttgaggcatctggacaccacacacatcatcagtctggagcagtatagcatcaagttctagaggaattgggagccattgcaaatctgagggtcaggaggaatctttcgtcccacagagctcagtgcaaccaccagaaggagacagtgaaacaaaagctcctgaagaatcatcagaggatgtgacaaaatatcaggaaggagtatctgcagaaaacccagttgagaaccatatcaatataacacaatcagataagttcacagccaagccattggattccaactcaggagaaagaaatgacctcaatcttgatcgctcttgtggggttccagaagaatctgcttcatctgaaaaagccaaggaaccagaaacttcagatcagactagcactgagagtgctaccaatgaaaataacaccaatcctgagcctcagttccaaacagaagccactgggccttcagctcatgaagaaacatccaccagggactctgctcttcaggacacagatgacagtgatgatgacccagtcctgatcccaggtgcaaggtatcgagcaggacctggtgatagacgctctgctgttgcccgtattcaggagttcttcagacggagaaaagaaaggaaagaaatggaagaattggatactttgaacattagaaggccgctagtaaaaatggtttataaaggccatcgcaactccaggacaatgataaaagaagccaatttctggggtgctaactttgtaatgagtggttctgactgtggccacattttcatctgggatcggcacactgctgagcatttgatgcttctggaagctgataatcatgtggtaaactgcctgcagccacatccgtttgacccaattttagcctcatctggcatagattatgacataaagatctggtcaccattagaagagtcaaggatttttaaccgaaaacttgctgatgaagttataactcgaaacgaactcatgctggaagaaactagaaacaccattacagttccagcctctttcatgttgaggatgttggcttcacttaatcatatccgagctgaccggttggagggtgacagatcagaaggctctggtcaagagaatgaaaatgaggatgaggaataataaactctttttggcaagcacttaaatgttctgaaatttgtataagacatttattatatttttttctttacagagctttagtgcaattttaaggttatggtttttggagtttttccctttttttgggataacctaacattggtttggaatgattgtgtgcatgaatttgggagattgtataaaacaaaactagcagaatgtttttaaaactttttgccgtgtatgaggagtgctagaaaatgcaaagtgcaatattttccctaaccttcaaatgtgggagcttggatcaatgttgaagaataattttcatcatagtgaaaatgttggttcaaataaatttctacacttgccatttgcatgtttgttgctttctaattaaagaaactggttgttttaagataccctgaaaaaaaat

SEQ ID NO: 353934 - DNA, 1963 bp, Homo sapiens
gccctgctagagagactaggagatttggggctgcggccgtttcctccggagcacccacgggactgtgtgctggggtccctccaccggctgtgtcctttattcttctttctcacccaacgatttacctgaacggttataaagtgcacgttatttccctaaggtcccctgaagtcatgggttgctggctcctgctcagagtgacagcaccctgtggagtctgctggtactgacctaaccaccacagagccccactggagcatggagccagcctagagagggtcagattctccttcttctgtggttaacaaacagctcggatccatgtcacttgacgagcaacaggataacaataatgaaaagctgagccccaaaccagggacaggtgaaccagttttaagtttgcactacagcacagaaggaacaactacaagcacaataaaactgaactttacagatgaatggagcagtatagcatcaagttctagaggaattgggagccattgcaaatctgagggtcaggaggaatctttcgtcccacagagctcagtgcaaccaccagaaggagacagtgaaacaaaagctcctgaagaatcatcagaggatgtgacaaaatatcaggaaggagtatctgcagaaaacccagttgagaaccatatcaatataacacaatcagataagttcacagccaagccattggattccaactcaggagaaagaaatgacctcaatcttgatcgctcttgtggggttccagaagaatctgcttcatctgaaaaagccaaggaaccagaaacttcagatcagactagcactgagagtgctaccaatgaaaataacaccaatcctgagcctcagttccaaacagaagccactgggccttcagctcatgaagaaacatccaccagggactctgctcttcaggacacagatgacagtgatgatgacccagtcctgatcccaggtgcaaggtatcgagcaggacctggtgatagacgctctgctgttgcccgtattcaggagttcttcagacggagaaaagaaaggaaagaaatggaagaattggatactttgaacattagaaggccgctagtaaaaatggtttataaaggccatcgcaactccaggacaatgataaaagaagccaatttctggggtgctaactttgtaatgagtggttctgactgtggccacattttcatctgggatcggcacactgctgagcatttgatgcttctggaagctgataatcatgtggtaaactgcctgcagccacatccgtttgacccaattttagcctcatctggcatagattatgacataaagatctggtcaccattagaagagtcaaggatttttaaccgaaaacttgctgatgaagttataactcgaaacgaactcatgctggaagaaactagaaacaccattacagttccagcctctttcatgttgaggatgttggcttcacttaatcatatccgagctgaccggttggagggtgacagatcagaaggctctggtcaagagaatgaaaatgaggatgaggaataataaactctttttggcaagcacttaaatgttctgaaatttgtataagacatttattatatttttttctttacagagctttagtgcaattttaaggttatggtttttggagtttttccctttttttgggataacctaacattggtttggaatgattgtgtgcatgaatttgggagattgtataaaacaaaactagcagaatgtttttaaaactttttgccgtgtatgaggagtgctagaaaatgcaaagtgcaatattttccctaaccttcaaatgtgggagcttggatcaatgttgaagaataattttcatcatagtgaaaatgttggttcaaataaatttctacacttgccatttgcatgtttgttgctttctaattaaagaaactggttgttttaagataccctgaaaaaaaat

SEQ ID NO: 353935 - DNA, 3025 bp, Homo sapiens
agggtatccaggacgaggagagggaggagtcgccatcgcctccgcctccgcctcctcctgttggaggggggctgagggaggagactgttgctgatctttggatgttctggttagtctaagaaggagagtatgaggcgagctccggcccgggtgcggccgggcttcaggggcccaggcgccgctgctgccaccgccatctaacgctgcgccctggaggcccggcgcgcggatggtgccggtgcggctcgggtgttgaaacgggtgtcccctccccctcctcccctccccacgcggtggtctcccctcccacccggctcaggcagagccatgtctcggggtggctcctacccacacctgttgtgggacgtgaggaaaaggtccctcgggctggaggacccgtcccggctgcggagtcgctacctgggaagaagagaatttatccaaagattaaaacttgaagcaacccttaatgtgcatgatggttgtgttaatacaatctgttggaatgacactggagaatatattttatctggctcagatgacaccaaattagtaattagtaatccttacagcagaaaggttttgacaacaattcgttcagggcaccgagcaaacatatttagtgcaaagttcttaccttgtacaaatgataaacagattgtatcctgctctggagatggagtaatattttataccaacgttgagcaagatgcagaaaccaacagacaatgccaatttacgtgtcattatggaactacttatgagattatgactgtacccaatgacccttacacttttctctcttgtggtgaagatggaactgttaggtggtttgatacacgcatcaaaactagctgcacaaaagaagattgtaaagatgatattttaattaactgtcgacgtgctgccacgtctgttgctatttgcccaccaataccatattaccttgctgttggttgttctgacagctcagtacgaatatatgatcggcgaatgctgggcacaagagctacagggaattatgcaggtcgagggactactggaatggttgcccgttttattccttcccatcttaataataagtcctgcagagtgacatctctgtgttacagtgaagatggtcaagagattctcgttagttactcttcagattacatatatctttttgacccgaaagatgatacagcacgagaacttaaaactccttctgcggaagagagaagagaagagttgcgacaaccaccagttaagcgtttgagacttcgtggtgattggtcagatactggacccagagcaaggccggagagtgaacgagaacgagatggagagcagagtcccaatgtgtcattgatgcagagaatgtctgatatgttatcaagatggtttgaagaagcaagtgaggttgcacaaagcaatagaggacgaggaagatctcgacccagaggtggaacaagtcaatcagatatttcaactcttcctacggtcccatcaagtcctgatttggaagtgagtgaaactgcaatggaagtagatactccagctgaacaatttcttcagccttctacatcctctacaatgtcagctcaggctcattcgacatcatctcccacagaaagccctcattctactcctttgctatcttctccagacagtgaacaaaggcagtctgttgaggcatctggacaccacacacatcatcagtctgataacaataatgaaaagctgagccccaaaccagggacaggtgaaccagttttaagtttgcactacagcacagaaggaacaactacaagcacaataaaactgaactttacagatgaatggagcagtatagcatcaagttctagaggaattgggagccattgcaaatctgagggtcaggaggaatctttcgtcccacagagctcagtgcaaccaccagaaggagacagtgaaacaaaagctcctgaagaatcatcagaggatgtgacaaaatatcaggaaggagtatctgcagaaaacccagttgagaaccatatcaatataacacaatcagataagttcacagccaagccattggattccaactcaggagaaagaaatgacctcaatcttgatcgctcttgtggggttccagaagaatctgcttcatctgaaaaagccaaggaaccagaaacttcagatcagactagcactgagagtgctaccaatgaaaataacaccaatcctgagcctcagttccaaacagaagccactgggccttcagctcatgaagaaacatccaccagggactctgctcttcaggacacagatgacagtgatgatgacccagtcctgatcccaggtgcaaggtatcgagcaggacctggtgatagacgctctgctgttgcccgtattcaggagttcttcagacggagaaaagaaaggaaagaaatggaagaattggatactttgaacattagaaggccgctagtaaaaatggtttataaaggccatcgcaactccaggacaatgataaaagaagccaatttctggggtgctaactttgtaatgagtggttctgactgtggccacattttcatctgggatcggcacactgctgagcatttgatgcttctggaagctgataatcatgtggtaaactgcctgcagccacatccgtttgacccaattttagcctcatctggcatagattatgacataaagatctggtcaccattagaagagtcaaggatttttaaccgaaaacttgctgatgaagttataactcgaaacgaactcatgctggaagaaactagaaacaccattacagttccagcctctttcatgttgaggatgttggcttcacttaatcatatccgagctgaccggttggagggtgacagatcagaaggctctggtcaagagaatgaaaatgaggatgaggaataataaactctttttggcaagcacttaaatgttctgaaatttgtataagacatttattatatttttttctttacaaccaggttgcagtagcagtggatgttagcgtgagcgcattagg

SEQ ID NO: 353936 - DNA, 1333 bp, Homo sapiens
accacctgttacatacaactttattttctgacagcacaatcagataagttcacagccaagccattggattccaactcaggagaaagaaatgacctcaatcttgatcgctcttgtggggttccagaagaatctgcttcatctgaaaaagccaaggaaccagaaacttcagatcagactagcactgagagtgctaccaatgaaaataacaccaatcctgagcctcagttccaaacagaagccactgggccttcagctcatgaagaaacatccaccagggactctgctcttcaggacacagatgacagtgatgatgacccagtcctgatcccaggtgcaaggtatcgagcaggacctggtgatagacgctctgctgttgcccgtattcaggagttcttcagacggagaaaagaaaggaaagaaatggaagaattggatactttgaacattagaaggccgctagtaaaaatggtttataaaggccatcgcaactccaggacaatgataaaagaagccaatttctggggtgctaactttgtaatgagtggttctgactgtggccacattttcatctgggatcggcacactgctgagcatttgatgcttctggaagctgataatcatgtggtaaactgcctgcagccacatccgtttgacccaattttagcctcatctggcatagattatgacataaagatctggtcaccattagaagagtcaaggatttttaaccgaaaacttgctgatgaagttataactcgaaacgaactcatgctggaagaaactagaaacaccattacagttccagcctctttcatgttgaggatgttggcttcacttaatcatatccgagctgaccggttggagggtgacagatcagaaggctctggtcaagagaatgaaaatgaggatgaggaataataaactctttttggcaagcacttaaatgttctgaaatttgtataagacatttattatatttttttctttacagagctttagtgcaattttaaggttatggtttttggagtttttccctttttttgggataacctaacattggtttggaatgattgtgtgcatgaatttgggagattgtataaaacaaaactagcagaatgtttttaaaactttttgccgtgtatgaggagtgctagaaaatgcaaagtgcaatattttccctaaccttcaaatgtgggagcttggatcaatgttgaagaataattttcatcatagtgaaaatgttggttcaaataaatttctacacttgccatttgcatgtttgttgctttctaattaaagaaactggttgttttaagataccctgaaaaaaaat

SEQ ID NO: 353937 - DNA, 2701 bp, Homo sapiens
agggtatccaggacgaggagagggaggagtcgccatcgcctccgcctccgcctcctcctgttggaggggggctgagggaggagactgttgctgatctttggatgttctggttagtctaagaaggagagtatgaggcgagctccggcccgggtgcggccgggcttcaggggcccaggcgccgctgctgccaccgccatctaacgctgcgccctggaggcccggcgcgcggatggtgccggtgcggctcgggtgttgaaacgggtgtcccctccccctcctcccctccccacgcggtggtctcccctcccacccggctcaggcagagccatgtctcggggtggctcctacccacacctgttgtgggacgtgaggaaaaggtccctcgggctggaggacccgtcccggctgcggagtcgctacctgggaagaagagaatttatccaaagattaaaacttgaagcaacccttaatgtgcatgatggttgtgttaatacaatctgttggaatgacactggagaatatattttatctggctcagatgacaccaaattagtaattagtaatccttacagcagaaaggttttgacaacaattcgttcagggcaccgagcaaacatatttagtgcaaagttcttaccttgtacaaatgataaacagattgtatcctgctctggagatggagtaatattttataccaacgttgagcaagatgcagaaaccaacagacaatgccaatttacgtgtcattatggaactacttatgagattatgactgtacccaatgacccttacacttttctctcttgtggtgaagatggaactgttaggtggtttgatacacgcatcaaaactagctgcacaaaagaagattgtaaagatgatattttaattaactgtcgacgtgctgccacgtctgttgctatttgcccaccaataccatattaccttgctgttggttgttctgacagctcagtacgaatatatgatcggcgaatgctgggcacaagagctacagggaattatgcaggtcgagggactactggaatggttgcccgttttattccttcccatcttaataataagtcctgcagagtgacatctctgtgttacagtgaagatggtcaagagattctcgttagttactcttcagattacatatatctttttgacccgaaagatgatacagcacgagaacttaaaactccttctgcggaagagagaagagaagagttgcgacaaccaccagttaagcgtttgagacttcgtggtgattggtcagatactggacccagagcaaggccggagagtgaacgagaacgagatggagagcagagtcccaatgtgtcattgatgcagagaatgtctgatatgttatcaagatggtttgaagaagcaagtgaggttgcacaaagcaatagaggacgaggaagatctcgacccagaggtggaacaagtcaatcagatatttcaactcttcctacggtcccatcaagtcctgatttggaagtgagtgaaactgcaatggaagtagatactccagctgaacaatttcttcagccttctacatcctctacaatgtcagctcaggctcattcgacatcatctcccacagaaagccctcattctactcctttgctatcttctccagacagtgaacaaaggcagtctgttgaggcatctggacaccacacacatcatcagtctgataacaataatgaaaagctgagccccaaaccagggacaggtgaaccagttttaagtttgcactacagcacagaaggaacaactacaagcacaataaaactgaactttacagatgaatggagcagtatagcatcaagttctagaggaattgggagccattgcaaatctgagggtcaggaggaatctttcgtcccacagagctcagtgcaaccaccagaaggagacagtgaaacaaaagctcctgaagaatcatcagaggatgtgacaaaatatcaggaaggagtatctgcagaaaacccagttgagaaccatatcaatataacacaatcagataagttcacagccaagccattggattccaactcaggagaaagaaatgacctcaatcttgatcgctcttgtggggttccagaagaatctgcttcatctgaaaaagccaaggaaccagaaacttcagatcagactagcactgagagtgctaccaatgaaaataacaccaatcctgagcctcagttccaaacagaagccactgggccttcagctcatgaagaaacatccaccagggactctgctcttcaggacacagatgacagtgatgatgacccagtcctgatcccaggtgcaaggtatcgagcaggacctggtgatagacgctctgctgttgcccgtattcaggagttcttcagacggagaaaagaaaggaaagaaatggaagaattggatactttgaacattagaaggccgctagtaaaaatggtttataaaggccatcgcaactccaggacaatggtaccaaatgttcatggcattttttggtgaaattgcagtttcatgctctgagtgtttttccataatgatttatcttcatatattgccaatgggatttcagtattacattattaaatcttcagttatctctttatccaacatggttcttttagccctataatatattgtgaaagatcattattttttacaagaaaactctactaaaaaa

SEQ ID NO: 353938 - DNA, 2992 bp, Homo sapiens
agggtatccaggacgaggagagggaggagtcgccatcgcctccgcctccgcctcctcctgttggaggggggctgagggaggagactgttgctgatctttggatgttctggttagtctaagaaggagagtatgaggcgagctccggcccgggtgcggccgggcttcaggggcccaggcgccgctgctgccaccgccatctaacgctgcgccctggaggcccggcgcgcggatggtgccggtgcggctcgggtgttgaaacgggtgtcccctccccctcctcccctccccacgcggtggtctcccctcccacccggctcaggcagagccatgtctcggggtggctcctacccacacctgttgtgggacgtgaggaaaaggtccctcgggctggaggacccgtcccggctgcggagtcgctacctgggaagaagagaatttatccaaagattaaaacttgaagcaacccttaatgtgcatgatggttgtgttaatacaatctgttggaatgacactggagaatatattttatctggctcagatgacaccaaattagtaattagtaatccttacagcagaaaggttttgacaacaattcgttcagggcaccgagcaaacatatttagtgcaaagttcttaccttgtacaaatgataaacagattgtatcctgctctggagatggagtaatattttataccaacgttgagcaagatgcagaaaccaacagacaatgccaatttacgtgtcattatggaactacttatgagattatgactgtacccaatgacccttacacttttctctcttgtggtgaagatggaactgttaggtggtttgatacacgcatcaaaactagctgcacaaaagaagattgtaaagatgatattttaattaactgtcgacgtgctgccacgtctgttgctatttgcccaccaataccatattaccttgctgttggttgttctgacagctcagtacgaatatatgatcggcgaatgctgggcacaagagctacagggaattatgcaggtcgagggactactggaatggttgcccgttttattccttcccatcttaataataagtcctgcagagtgacatctctgtgttacagtgaagatggtcaagagattctcgttagttactcttcagattacatatatctttttgacccgaaagatgatacagcacgagaacttaaaactccttctgcggaagagagaagagaagagttgcgacaaccaccagttaagcgtttgagacttcgtggtgattggtcagatactggacccagagcaaggccggagagtgaacgagaacgagatggagagcagagtcccaatgtgtcattgatgcagagaatgtctgatatgttatcaagatggtttgaagaagcaagtgaggttgcacaaagcaatagaggacgaggaagatctcgacccagaggtggaacaagtcaatcagatatttcaactcttcctacggtcccatcaagtcctgatttggaagtgagtgaaactgcaatggaagtagatactccagctgaacaatttcttcagccttctacatcctctacaatgtcagctcaggctcattcgacatcatctcccacagaaagccctcattctactcctttgctatcttctccagacagtgaacaaaggcagtctgttgaggcatctggacaccacacacatcatcagtctgataacaataatgaaaagctgagccccaaaccagggacaggtgaaccagttttaagtttgcactacagcacagaaggaacaactacaagcacaataaaactgaactttacagatgaatggagcagtatagcatcaagttctagaggaattgggagccattgcaaatctgagggtcaggaggaatctttcgtcccacagagctcagtgcaaccaccagaaggagacagtgaaacaaaagctcctgaagaatcatcagaggatgtgacaaaatatcaggaaggagtatctgcagaaaacccagttgagaaccatatcaatataacacaatcagataagttcacagccaagccattggattccaactcaggagaaagaaatgacctcaatcttgatcgctcttgtggggttccagaagaatctgcttcatctgaaaaagccaaggaaccagaaacttcagatcagactagcactgagagtgctaccaatgaaaataacaccaatcctgagcctcagttccaaacagaagccactgggccttcagctcatgaagaaacatccaccagggactctgctcttcaggacacagatgacagtgatgatgacccagtcctgatcccaggtgcaaggtatcgagcaggacctggtgataggttggtaaatttttaattaacatgaactgtaaaaaatgtatttcacaaggatttgtttgaagtcattgaagggaatctctccatttttgacagttgcttcctctaagagtgtctcattcatataaacttaaagaaactttacagtttactgtaaatgattttacgtattatattctttgagcactgtgcattaatagggaaataaaaagtcttcattctccatatctctagcactgaggcttgcttctgaatttacagatcaagagaaaagaatgttaagaatgacccacaggttatttatgaagtcaaggttatacttagctctcagattatcttgtagatatccaggcctttatcagtgttgttttggttttaatgttaattttttctgcttttctattgaccctggattaaggtagtgtgttagtagttctgtttttgggaacactgtttttctttgatttctactaaacttagtgactgaatttagaaaatgaaaaattataccaaataaataccatagcagcaataaaaaattgaattgccaacatgtttttatagtttttctatattttatgtgatcacaaggatatattttcttttgtgggagttaaaataaatttttaaagtatactgca

SEQ ID NO: 353939 - DNA, 2299 bp, Homo sapiens
agggtatccaggacgaggagagggaggagtcgccatcgcctccgcctccgcctcctcctgttggaggggggctgagggaggagactgttgctgatctttggatgttctggttagtctaagaaggagagtatgaggcgagctccggcccgggtgcggccgggcttcaggggcccaggcgccgctgctgccaccgccatctaacgctgcgccctggaggcccggcgcgcggatggtgccggtgcggctcgggtgttgaaacgggtgtcccctccccctcctcccctccccacgcggtggtctcccctcccacccggctcaggcagagccatgtctcggggtggctcctacccacacctgttgtgggacgtgaggaaaaggtccctcgggctggaggacccgtcccggctgcggagtcgctacctgggaagaagagaatttatccaaagattaaaacttgaagcaacccttaatgtgcatgatggttgtgttaatacaatctgttggaatgacactggagaatatattttatctggctcagatgacaccaaattagtaattagtaatccttacagcagaaaggttttgacaacaattcgttcagggcaccgagcaaacatatttagtgcaaagttcttaccttgtacaaatgataaacagattgtatcctgctctggagatggagtaatattttataccaacgttgagcaagatgcagaaaccaacagacaatgccaatttacgtgtcattatggaactacttatgagattatgactgtacccaatgacccttacacttttctctcttgtggtgaagatggaactgttaggtggtttgatacacgcatcaaaactagctgcacaaaagaagattgtaaagatgatattttaattaactgtcgacgtgctgccacgtctgttgctatttgcccaccaataccatattaccttgctgttggttgttctgacagctcagtacgaatatatgatcggcgaatgctgggcacaagagctacagggaattatgcaggtcgagggactactggaatggttgcccgttttattccttcccatcttaataataagtcctgcagagtgacatctctgtgttacagtgaagatggtcaagagattctcgttagttactcttcagattacatatatctttttgacccgaaagatgatacagcacgagaacttaaaactccttctgcggaagagagaagagaagagttgcgacaaccaccagttaagcgtttgagacttcgtggtgattggtcagatactggacccagagcaaggccggagagtgaacgagaacgagatggagagcagagtcccaatgtgtcattgatgcagagaatgtctgatatgttatcaagatggtttgaagaagcaagtgaggttgcacaaagcaatagaggacgaggaagatctcgacccagaggtggaacaagtcaatcagatatttcaactcttcctacggtcccatcaagtcctgatttggaagtgagtgaaactgcaatggaagtagatactccagctgaacaatttcttcagccttctacatcctctacaatgtcagctcaggctcattcgacatcatctcccacagaaagccctcattctactcctttgctatcttctccagacagtgaacaaaggcagtctgttgaggcatctggacaccacacacatcatcagtctgaatttttaaggggccctgagatagctttgcttcgtaagcgcctgcaacaactgaggcttaagaaggctgagcagcagaggcagcaagagctagctgcacatacccagcaacagccttccacttctgatcagtcttctcatgagggctcttcacaggaccctcatgcttcaggtcccctgaagtcatgggttgctggctcctgctcagagtgacagcaccctgtggagtctgctggtactgacctaaccaccacagagccccactggagcatggagccagcctagagagggtcaggtaggaactgttttttcactttatggcacggttttaccaattggaaaaaagtaatttttataccccaaaagggtgtaaaacattggtgattatttttgaaaaagggcttttcaaaactgagccatattggaaaaaatcagcacttacccgatcctgtgcaagcaggctctaaacaacaccagatttcccacagtgtccataatgacagtcacatggcagcacttctcagatggatgcattggatctatgtgtttgatgtttataagtagttaataaattagatatattagtctggttctg

SEQ ID NO: 353940 - DNA, 487 bp, Homo sapiens
cagctttattttcacactgtaaatatcaatattgtataaacttgtcattattgggactaatcagcaaattgttttgtgtcatgctagagatagcaaggtacaaacctttctattaattaatgaagtaatttttaccaaagacattaaatatgggtggaccaaaagtgtatagtctagcacttctataaacatagtgtctgggaggagcttgagagatttgtaatgttacttgtaaacagaccgtgtggggaagaccgcagacagcacatcattttttgtctttattggtctttatgactaacacttcatctctgcatcacttctgctttgctgtaaaacttagcaagtacattaggatagtggcaaataaagattaagattgaggacagatgtttgtaaaataactgggcgattttaagattataggtgtaacttgttaagaagaagataactggtgtggaaataaaatctggcagccaaaaaaaaa

SEQ ID NO: 353941 - DNA, 440 bp, Homo sapiens
cagctttattttcacactgtaaatatcaatattgtataaacttgtcattattgggactaatcagcaaattgttttgtgtcatgctagagatagcaaggtacaaacctttctattaattaatgaagtaatttttaccaaagacattaaatatgggtggaccaaaagtgtatagtctagcacttctataaacatagtgtctgggaggagcttgagagatttgtaatgttacttgtaaacagaccgtgtggggaagaccgcagacagcacatcattttttgtctttattggtctttatgactaacacttcatctctgcatcacttctgctttgctgtaaaacttagcaagtacattaggatagtggcaaataaagattaagattgaggacagatgtttgtaaaataactgggcgattagggttagtgatcctctagcacctcc

SEQ ID NO: 353942 - DNA, 304 bp, Homo sapiens
ctgaattcttaggtggcaacaattaaccagagctgctccctcccagtacaccatcccattctatgctccttctctgattctaagctagagtatttgtttccatctatcatcatgtttttctattgtttttcttgtaatagaaaaatattctatctctatcaagtatttgatctctacctaaaataaaaatagatggctagagctgcctgtttcttacacctggcccactaaggcatttcagccacctgccagaaggcatagaatttgaacagacactcagatgtatgcttcctaaatctgtttg

SEQ ID NO: 353943 - DNA, 319 bp, Homo sapiens
tgtacagtcactcacctgtggtccagagagggagctaagggttggatggagaggtgagggctgtcttcaaaggggcttagatatccccactggtagaagcaaaatggttctagcatgttcccagcaccagagatatgtacttggtccaatgggagttgagttttaaccagcagagtacagtaagcccagtttcttcctcaggaatgtttctggttccatctattgatctcaccatactgggggtataatgttctttctttttaaaaaatttctgtctcgcaatcctttccttagtactctctggaagggatttttactt

SEQ ID NO: 353944 - DNA, 1151 bp, Homo sapiens
gccttcgaggagaatccaggggtagctggagagcagggcgtgtgcggagagcagggcacagtgaggctggggaaggggaagtgaatttaatgagaaacttggggttgtgagtgggggaaggatttgggtgtgggatgaaggtgcaggacagggctgggccgggccattggactcaggtatgcctaggcttggggtggagcttcaaggcagcgcgggctccagcccctggaagagccaccccccacccacctgagatttcccaaattccagctgccgctctagttgcttctgcaagcaaaggagcccttgtggtcagaggggcctctgaagcctgggccaggctctcccgccctctcagggcacacacacctccattcagcccaagccccgccctttgggggggctgggggccagggcgggctgcccccacgtcagtcgtcagttgggggccacctgacccaaaggctgggcgggcagtggggttgataagacctggaccccactggtcccacaaccgtgccggctgctgcccgtgctgccagaactatgagggtcctctctggcactagcctcatgctctgcagcctgctgctgctgctccaggccctgtgcagccctggcctcgccccccagtccagaggtgagggggcttgcgtgagatgggggctactgagctagtgggccctgaccctcagcactgggggctgggtaccgatatggcagggagcacacgggatccaggatggggaagggagcagggcggcagtggtgggcagtgggctggtgcaggagcagacagggaccatggtgcttataagggtcagggcaggggtgctcctcagccctcagggaccatgcatgaggcagggaccttggtcttccaggtctctggggagcagaagctactcagagagctggctgacgtctggagctgcaccaagcccagggctgagcccatggctctttgatgacagcagacctgggatgccaagagctcatgccccctttgcaggtccttccagccttgggctccctgggggcaataacaccccccagagtttcaggtttgggcactgagtcctggaatgcccattcttcctgtacagatggggaaactgaggtcagtgagggcctaagaccacacagtgaga

SEQ ID NO: 353945 - DNA, 4340 bp, Homo sapiens
  misc_feature (4339)..(4339): n is a, c, g, or t
gccttcgaggagaatccaggggtagctggagagcagggcgtgtgcggagagcagggcacagtgaggctggggaaggggaagtgaatttaatgagaaacttggggttgtgagtgggggaaggatttgggtgtgggatgaaggtgcaggacagggctgggccgggccattggactcaggtatgcctaggcttggggtggagcttcaaggcagcgcgggctccagcccctggaagagccaccccccacccacctgagatttcccaaattccagctgccgctctagttgcttctgcaagcaaaggagcccttgtggtcagaggggcctctgaagcctgggccaggctctcccgccctctcagggcacacacacctccattcagcccaagccccgccctttgggggggctgggggccagggcgggctgcccccacgtcagtcgtcagttgggggccacctgacccaaaggctgggcgggcagtggggttgataagacctggaccccactggtcccacaaccgtgccggctgctgcccgtgctgccagaactatgagggtcctctctggcactagcctcatgctctgcagcctgctgctgctgctccaggccctgtgcagccctggcctcgccccccagtccagaggccatctctgccggacgcggcccacagacctggtgtttgttgtcgacagctctcgcagcgttcggcctgttgaatttgagaaagtgaaggtattcctgtcccaggtcatcgagtcgctggacgtggggcccaatgccacccgggtgggcatggtcaactatgccagcaccgtgaagcaggagttctcgctgcgggctcatgtctccaaggccgcactgctgcaggctgtgcgccgtatccagccgctgtccacaggcaccatgaccggcctggccatccagttcgctatcaccaaagccttcggcgatgcagagggtggtcgttccaggtcccctgacatcagcaaggtggtcatcgtggtgacagacgggaggccccaggacagcgtgcaggacgtgtctgcgcgggcccgggccagcggcgtcgagctgttcgccatcggagtgggcagcgtggacaaggccacgctgcggcagatcgccagcgagccgcaggacgaacacgtcgattacgtggagagctacagcgtcatcgagaagctgtccaggaagttccaggaggccttctgcgtggtgtcagacctgtgcgccacaggggaccatgactgtgagcaggtgtgcatcagctcccccggttcctacacctgcgcctgccacgagggcttcactctgaacagcgacggcaagacctgcaatgtctgcagtggtggtggtggcagctcggccactgacctggtcttcctcattgacggatccaagagtgtgaggccagagaactttgagctggtgaagaagttcatcagtcagatcgtggatacgctggacgtgtcagacaagctggcccaggtggggctggtgcagtactcaagctctgtgcgccaggagttccccctgggtcgcttccacaccaagaaggacatcaaggcggctgtgcggaatatgtcctacatggagaagggcacaatgaccggggctgctctcaagtacctcattgacaattccttcactgtgtccagtggggctaggcccggggcccagaaggtgggcattgtcttcactgatggccggagccaggactacattaatgatgctgccaagaaggccaaagacctcggctttaagatgtttgctgtgggtgtgggcaatgccgtggaggatgagctgagggaaatagcctcagagcctgtggcagagcactacttctacacggctgacttcaagaccatcaaccagataggcaagaagttgcagaagaagatctgtgtggaggaagacccgtgtgcctgcgagtccctggtgaaattccaagccaaagtggaggggctgctgcaggccctgaccaggaaactggaagctgtgagtaagcggctggccatcctggagaacacagttgtctaaggctgcctgtcaccactgtggcctctccaagcgtcctgcacgtgtccgccgtagctttaccattttagtgagggaagccagcccgggggtgggagggggtgtgtctgggtgtgcctattgagagcgtgtaatggcgtttgggagctcgtgtgtgtatgtgtgcgtgtgtgtatgcgtgcatgtgtgtgtgtgtgtgtgtgtgcacgtgcgcctgagggtgggcatgagtcttgccagaatgtgagtgtgagagtgataatgcaggggtgagtgtgagagggactgcgtttgcatttttataatcaaaagcttaatatattcccatctttttttagttaaccctttcttgactctgagtgctgtgaatttctttactgatttctctattctccggtgagaaacaattaaatgtgatttaacgtaagcagtgaatggggctagaggcagtgtggttatttggggaccagggaaaaggatggatgaagatgtggtgggaggggatggttggaaggatggtaacagtggtggtgacagtgatgacagtgaccacaccaaaaccagctggtgtttgtcctgccttttcagttacatattcatttagttgacctcatttcacttccagtaaccttacccagaaaagactcaaattatccccattacaaatgggaaagctgagagtctaaatgatgaaatgacttgctcagcagtgggtcgctgagagacaggacttgaatctaggactgaagaacatcaaaagaaaaaggcttcagagaaaaagggcaatgacaccagataggactcatttgttcattcattcattcgttcactcattcgttcaggtatcatgtacttacagggcaatggcggtgggggggatggtgctgtatgagacagacgtagttcctgccctaagagacatacagttgagcagggtgctcatgtcacccccaccagccagagggaccagccagaggaaaagagagtgggtttaggtcgtaccaggggtttgtgcctcctcttgatacctgggagccacggggtgagtgtgtgtgtgagatgatgggaagggctccagcctgggcctgggctgccctaggtgcctctcccctcccgcccccaacatgccctgttggagttctgtttgtttcctgtgcacaggcggcatcacccccaacccaaagtccccaacgcagatgcagcagccccacctcagagactgcacaagagaaagactcctggccccatgttcccttcctccagccctatgtggggtctgcaggtcacaccctgagatctcggtcacctcccccaggcccctattggaccagtgctgctccggaatctccatctctgtcctctcagagggggagctttggtgattttctgaacctattcttgtttaatggagcatttttagtgttactactagattcacacttgagagcatgtctaaaaggcttttacaagaagctcagaccacaccgaaagatcttcctcggaggcagttcaaagaggcagaataacaacacgaacggtacccaagagccacatcagtacaacagcacaactacacaagcgcgacttaactggggcacagccaccctcgcccccatgacctgactccacctcctacacagttcaccaagccctttctctctgtctgtccctggggcagcagtttttctgctgtccaaggaggctccttgacacagccacctgagaagttatgactctgctcattcttcctttcttctgagattatccactcccctctcctccccacacaggtggggagggggagaggcagccatgttgatatggactgagaaggctcagcagtgtgtccccaaggaggaggagagggtcattagcagacgccatggcctgggagctggtgggcagaagcaacagatgtccctgatgagtggagtcagagatggggtggaagccctgcctgggaataggacctcgttcttccctgcccggtgggtggagtagtggcaggaccttgtcaccaggctctgatgaaggcagggaccagcttcttgggatcttttaatcccaaactcttgcccttcactcatcgcagttctccccacggctactccaggtcctcttgaaatccgtcctctccatggacttcccacatccctctctgctctaggtttgattaacagaaggttgtaaatgaaaaccagcatctccctagggcagccatggtctactgacagatggcaagttactttgtaacctgtaattttgtttttttgaattttgtataaataaacaggactaaactaana

SEQ ID NO: 353946 - DNA, 3639 bp, Homo sapiens
  misc_feature (3638)..(3638): n is a, c, g, or t
catggccctgaccttagagaccccaatttggcgatggggcatcacatccctccgggcatctcagagctgcctgcccgagggaggcgaacagatggaaagccccccagccacgtctctcagtcagaggaaacgggtctcctcttcggccagccgggtcctcttcccccgggtgccgcctggctgtgcgacccggcagtcctcccgcctctccgggcctcagcctcctctcctggacagtcccgtgggcttccgggagcccggtgtcacaccgccccgcgtgtcgcaggtggtcatcgtggtgacagacgggaggccccaggacagcgtgcaggacgtgtctgcgcgggcccgggccagcggcgtcgagctgttcgccatcggagtgggcagcgtggacaaggccacgctgcggcagatcgccagcgagccgcaggacgaacacgtcgattacgtggagagctacagcgtcatcgagaagctgtccaggaagttccaggaggccttctgcgtggtgtcagacctgtgcgccacaggggaccatgactgtgagcaggtgtgcatcagctcccccggttcctacacctgcgcctgccacgagggcttcactctgaacagcgacggcaagacctgcaatgtctgcagtggtggtggtggcagctcggccactgacctggtcttcctcattgacggatccaagagtgtgaggccagagaactttgagctggtgaagaagttcatcagtcagatcgtggatacgctggacgtgtcagacaagctggcccaggtggggctggtgcagtactcaagctctgtgcgccaggagttccccctgggtcgcttccacaccaagaaggacatcaaggcggctgtgcggaatatgtcctacatggagaagggcacaatgaccggggctgctctcaagtacctcattgacaattccttcactgtgtccagtggggctaggcccggggcccagaaggtgggcattgtcttcactgatggccggagccaggactacattaatgatgctgccaagaaggccaaagacctcggctttaagatgtttgctgtgggtgtgggcaatgccgtggaggatgagctgagggaaatagcctcagagcctgtggcagagcactacttctacacggctgacttcaagaccatcaaccagataggcaagaagttgcagaagaagatctgtgtggaggaagacccgtgtgcctgcgagtccctggtgaaattccaagccaaagtggaggggctgctgcaggccctgaccaggaaactggaagctgtgagtaagcggctggccatcctggagaacacagttgtctaaggctgcctgtcaccactgtggcctctccaagcgtcctgcacgtgtccgccgtagctttaccattttagtgagggaagccagcccgggggtgggagggggtgtgtctgggtgtgcctattgagagcgtgtaatggcgtttgggagctcgtgtgtgtatgtgtgcgtgtgtgtatgcgtgcatgtgtgtgtgtgtgtgtgtgtgcacgtgcgcctgagggtgggcatgagtcttgccagaatgtgagtgtgagagtgataatgcaggggtgagtgtgagagggactgcgtttgcatttttataatcaaaagcttaatatattcccatctttttttagttaaccctttcttgactctgagtgctgtgaatttctttactgatttctctattctccggtgagaaacaattaaatgtgatttaacgtaagcagtgaatggggctagaggcagtgtggttatttggggaccagggaaaaggatggatgaagatgtggtgggaggggatggttggaaggatggtaacagtggtggtgacagtgatgacagtgaccacaccaaaaccagctggtgtttgtcctgccttttcagttacatattcatttagttgacctcatttcacttccagtaaccttacccagaaaagactcaaattatccccattacaaatgggaaagctgagagtctaaatgatgaaatgacttgctcagcagtgggtcgctgagagacaggacttgaatctaggactgaagaacatcaaaagaaaaaggcttcagagaaaaagggcaatgacaccagataggactcatttgttcattcattcattcgttcactcattcgttcaggtatcatgtacttacagggcaatggcggtgggggggatggtgctgtatgagacagacgtagttcctgccctaagagacatacagttgagcagggtgctcatgtcacccccaccagccagagggaccagccagaggaaaagagagtgggtttaggtcgtaccaggggtttgtgcctcctcttgatacctgggagccacggggtgagtgtgtgtgtgagatgatgggaagggctccagcctgggcctgggctgccctaggtgcctctcccctcccgcccccaacatgccctgttggagttctgtttgtttcctgtgcacaggcggcatcacccccaacccaaagtccccaacgcagatgcagcagccccacctcagagactgcacaagagaaagactcctggccccatgttcccttcctccagccctatgtggggtctgcaggtcacaccctgagatctcggtcacctcccccaggcccctattggaccagtgctgctccggaatctccatctctgtcctctcagagggggagctttggtgattttctgaacctattcttgtttaatggagcatttttagtgttactactagattcacacttgagagcatgtctaaaaggcttttacaagaagctcagaccacaccgaaagatcttcctcggaggcagttcaaagaggcagaataacaacacgaacggtacccaagagccacatcagtacaacagcacaactacacaagcgcgacttaactggggcacagccaccctcgcccccatgacctgactccacctcctacacagttcaccaagccctttctctctgtctgtccctggggcagcagtttttctgctgtccaaggaggctccttgacacagccacctgagaagttatgactctgctcattcttcctttcttctgagattatccactcccctctcctccccacacaggtggggagggggagaggcagccatgttgatatggactgagaaggctcagcagtgtgtccccaaggaggaggagagggtcattagcagacgccatggcctgggagctggtgggcagaagcaacagatgtccctgatgagtggagtcagagatggggtggaagccctgcctgggaataggacctcgttcttccctgcccggtgggtggagtagtggcaggaccttgtcaccaggctctgatgaaggcagggaccagcttcttgggatcttttaatcccaaactcttgcccttcactcatcgcagttctccccacggctactccaggtcctcttgaaatccgtcctctccatggacttcccacatccctctctgctctaggtttgattaacagaaggttgtaaatgaaaaccagcatctccctagggcagccatggtctactgacagatggcaagttactttgtaacctgtaattttgtttttttgaattttgtataaataaacaggactaaactaana

SEQ ID NO: 353947 - DNA, 934 bp, Homo sapiens
tttttaaagtaatccttatttctaagaaatacatactgatgtttttacagagaaaaattatgtaataactggaatttagtaataatacagcaggagagaaaaaagtggaaaatgatacacacaaacaagatcggccatatagttattataggtaaagtggggatggatttcattactctccctatgtttgtatatgttaggcaacacaaatgtcaaacaagacagaggaagaaaggcggcaaaatcctttgcatacctgggggttttctttctttgccttaattactaactttctgcattaggttaccttcacatgctaagaacagttgaattttcaatttcctaaggcatcagcttgcccttttctttacaagaggggctggggacataaaaaaagcaaaggtgcttcctcaaaagcttcagtgcctggcagctttattcccactgacttccccttcctcccctggactttccttctctattctgccctcacagccatcttccttcaagtcaaacccagtgctgtgtggttaggctcatttagactcagttgtattggttttctaggaagagagaagatttcactacgcagcattccccagtgccatgtcccaccggaatcggtctttctctttcaatcctcacccgggatatttgaccccttccatgaaggtaaattggttctaatggttttaatgcattatacaattccattggtttcgtttttcttaaaggtaaccacaggttatttaagggctggtgtacgctcagaaaaatattcattggaaaaaaaaaaacccacttgtttatatctatggctgggcggattatgtgtgatttttattttttatgggattttgtattttccaaattttctagaataaatgtgtgtcagtattaagaatagctctatctaggtgatgggagggagaag

SEQ ID NO: 353948 - DNA, 2129 bp, Homo sapiens
  misc_feature (1600)..(1600): n is a, c, g, or t
atccatctccagattttttgtttaagaggttgtgaacatacatatttatttataatacaaaatgaagattggagggaaaagtgctttaaaaaatagcatgtaagtgtataaatgaaattgttgcttcttctccgatacaattttgattgggtgagcattatttgcttttacaataatgctttgttttttgcattgcattgcactaacctgtccattaatacaaacagaaaaagaaggtggaggacgtgcccagccgcgtggtcagcgtgccgaacctcgcctcctatgcaaagaactttctgagtggcgatctgagttccaggattaatgcccctccaataactacatcacccagcttggacccaagccccagctgtggccggacctacaaacccaaccagtctacagatgcaaaaactgccacaaggaccccagatggtgaaacggcccaagccaaagaagcccagcagaaacagggctctccgcaccaggaatggttcaccaagtacttttctttctaagctaacctttgggatacatcacagaggatacttgaaaaacatttattttaaatcatccgattgaaggaatgaactaacaccaaccaaccaaataatatgcttatgatttatatatgatagctaaaacaaattttggcgttaacacttcatactgttctgccaggcacagcagctcacgcctgtaatcccatcactttgggaggctgaggcagatggactgcttgagtccaggaatttgagaccagcctggccaatatggtgaaaccccatctctacaaaatatacaaaaattagccaggcatggtggcgtgtgcctgtggtcccaggtacttgggggactgaggcgggaggatcacttgaacctaggaggcagaggttgcagtgagccaagttcgaactcctgcattccaaccagcctgggtgacagagggagaccctgtctccaaaaaaaaaaaaaaaaattgacattaaaccagtgttattaaaagtcatctataggaaaatgttattagcgttactaatgacccataccttgtatttctagtgtccataacatcatactccattttgtggaacatcagactttgtgatttccatgatctatttcaaaagtggttgtacttgtccttaggatgctagtcaactccactggaaagctgtttctatgtaaaatgatgcaattccaaaatgcacatctaacctcaataggaagacaaataacagttaaacaggaaagccaactaaaaacaaaccaaacctaccagaaatggatggtagcatgcttggactgaatactttcacttccttggtctaagacaagcagcagattatagatgggataacacccacctctaaaagggctttgcaaggattaagcaagataacataaattaacatgaattggaattaagtaccacaaggtttttctgtaaataaccaatcctagcccagttataggtctcagtgtaatgaccatagtgccaacatgatcacttgtgaaggtctctagattatctgttctttgaagtcaaagatcttctagactgggcacatggctcatgcctgtaatcccaacactntgggaggctgagatgggaggagagcttgaggccaggaatttgagaccagcctgggcaacacagcgagacctccatctctacaaaaaaataattagcccaaagaaaacccagctacttggaagtctgaggtaggacagcatgagcccaagagttcgagaccagcctgggcaagatagtgagatcccatctctacagattaaaaaaatatatatatatatcccctgaacctctggtctttgggtttgagccatttgcctcatggtgtgttgcttcttcactgcatgaattcccagtgggttaaaggaaccgcaatggctgttcacggtgctgaccttgctctcagtccacactgatttgtcttaccttctgacagagcaatgtgatttgacaagactcaataacaacttttagggggcaaaatattttttcagtctttggtgctggcccagaaggtggcccacaaaccaatgttaattctatgcattgtcaaatctttgctctttgaataaaactttgaataactgggcaa

SEQ ID NO: 353949 - DNA, 6990 bp, Homo sapiens
  misc_feature (1496)..(1496): n is a, c, g, or t
  misc_feature (1954)..(1954): n is a, c, g, or t
  misc_feature (2376)..(2376): n is a, c, g, or t
  misc_feature (4288)..(4288): n is a, c, g, or t
gtctgagtgctgggcgcgttttagcgatggcttctgctctcaacagcaaaattaacccgcccggcacttgccagggctccaaagccgacggtggcgccggctggagaatggactgtgatccccagatgcacgtgaaaatgtgcaagaagatcgcccagctcaccaaggtgatttatgccctgaacacccgccaggatgaggctgaggccagcatggaggcgctgcgggaagcgcaccaggaggagctccagaatgcggtggcagagaccaaggccaggctcctgcaggaacagggctgcgcagaggaggaagcccttctacagcgcatccaggccctggagagcgccctggagctgcagaagaggctgacggaggaggcgctggctgagtcggcctcgtgcaggctggagacgaaggagagagagctgagggtggaggcagagcacgccgagcgagtcctcacgctctccagggaaatgctggagctcaaggctgactacgagaggaggctccagcacctgacgagccacgaggctaccccgcagggccggctgccccaggagagccctgaaaccaagtcggagccaggccagggcccggagatgcaggaggtcctgctagaggtgcagcggctgcgagtggagaaccagcagctgagcaaggactacgcccgcaaggccgaggagctgcaggccacctacgagagggaaaacgaggccatccggcaggccatgcagcagtcggtgagccaggccctgtggcagtggcaggagaaggagtcggacctccgcaagaacttccaggtccaggagtcagccctgcaggctcaggtccggaagctggaaggagacctggagcacagaggccgcaagataagtgacctgaagaagtacgcccagaagctgaaggagaggattcaggacctggatgtgcagcttaaggaggctcgacaggagaattcagagttgaaaggcactgcaaaaaaacttggggagaagctggctgttgccaaagacagaatgatgctgcaggagtgtcgtgggacacagcagacagatgccatgaagactgagttagtttcagagaacaaagtcctgcgggaagagaatgacttggaagccggcaatcttcatcctcagcaggatcaaagctgtctcaaggagtgcccttgcatgaaaggaggcacagatatgcagaccaagaaagaggcaagtgctgagacagaatatatgaagcaacaatatgaagaagaccttcgtaaaatcaaacatcagacagaagaggagaagaaacatctcaaagaccagctagtgaagcgactagaagacttggtaaagaagcacaccgtggaaatcaaatccgttcgctcgtccgtggaggctgaaagaaagaaactgcagagggaagtagaagcacagttggaggaagtgaggaagaaatcagaaaaggagataaagcagctggaagaagagaaagcagccctcaatgtgaagctncagaattctctgcttgaggttttaaggctggaagaatttatccaacaaaataagacacgccccacaggagctgaggaaagtccccaggaattaggccgccagcactgcagcattctggagacccaggatccatgcttgaagctggatgaaacttcgccgagaggagaggagtatcaagataagttagcagctgaagaaggaaccagcagtgatgaagaagaaaggaccaaagtgcttctcaaggagggaagtgacccacaacctccactgggctctttgttgaaggagaaaacatccaaaatccagcgtctagaggaggactggcaaagccagaaggccaaattgcaagcccaggtctcacagatgcagcaggctctggagcagtgcaccagcaactacagggaggacctgcaggcactcaagcagctctcggacctggagagggagaagctgcagcntgagctccaggagaccactcagcagaaccacgccatgaaagcccagctcgaggcttcccaccagagagccctgcgcatgctggagaaggccagacatcaggaactcaaggccacagaggaacgcttgaagaaggaatccagccacagcctccagatccaacaccagacacaccgactggagctccaggccttggaggaaaaggccaggcaagagctgcaggaggagcgtgagaggatgcaggcacagcaggccctgctgctagagtcgctcagacaggagctgtcggagcagcaagctgcctgttctgggcaccagaaggacttggaggcactgcaggccgagctgagggctctgggcagacagcaagccagcagccagtgtccaggagacagcaaggatcacataatcgccacagaggagnggggcggcccgggccaggccggctccccaccgggcgctgctgggcagggttccggcgagggatgcgggctctgggaggagaacgcgcagctccaggacgcggtgcggcggctgcgcgcggaggtggagcagcatcagcaggaggcgcagaagctccgagaccagcgcaggttcctggaggagactcagcaagcccagcgggccagggaggtggagacactgcgccaggaacaccggaaggagatgcaggccatggtggcagatttcagtagtgcccaggcccagctccaggcccggctggctgccctggaagccgaactgaaagattccggagagaagccagggaagggagcgtccaggcccgaggaccttcagctcattggccgcctgcagacccgcctgaaggagagagaggacatcatcaagcagctcacggaagagagaagatttcactacgcagcattccccagtgccatgtcccaccggaatcggtctttctctttcaatcctcacccgggatatttgaccccttccatgaagaaaaagaaggtggaggacgtgcccagccgcgtggtcagcgtgccgaacctcgcctcctatgcaaagaactttctgagtggcgatctgagttccaggattaatgcccctccaataactacatcacccagcttggacccaagccccagctgtggccggacctacaaacccaaccagtctacagatgcaaaaactgccacaaggaccccagatggtgaaacggcccaagccaaagaagcccagcagaaacagggctctccgcaccaggaatggttcaccaagtacttttctttctaagctaacctttgggatacatcacagaggatacttgaaaaacatttattttaaatcatccgattgaaggaatgaactaacaccaaccaaccaaataatatgcttatgatttatatatgatagctaaaacaaattttggcgttaacacttcatactgttctgccaggcacagcagctcacgcctgtaatcccatcactttgggaggctgaggcagatggactgcttgagtccaggaatttgagaccagcctggccaatatggtgaaaccccatctctacaaaatatacaaaaattagccaggcatggtggcgtgtgcctgtggtcccaggtacttgggggactgaggcgggaggatcacttgaacctaggaggcagaggttgcagtgagccaagttcgaactcctgcattccaaccagcctgggtgacagagggagaccctgtctccaaaaaaaaaaaaaaaaattgacattaaaccagtgttattaaaagtcatctataggaaaatgttattagcgttactaatgacccataccttgtatttctagtgtccataacatcatactccattttgtggaacatcagactttgtgatttccatgatctatttcaaaagtggttgtacttgtccttaggatgctagtcaactccactggaaagctgtttctatgtaaaatgatgcaattccaaaatgcacatctaacctcaataggaagacaaataacagttaaacaggaaagccaactaaaaacaaaccaaacctaccagaaatggatggtagcatgcttggactgaatactttcacttccttggtctaagacaagcagcagattatagatgggataacacccacctctaaaagggctttgcaaggattaagcaagataacataaattaacatgaattggaattaagtaccacaaggtttttctgtaaataaccaatcctagcccagttataggtctcagtgtaatgaccatagtgccaacatgatcacttgtgaaggtctctagattatctgttctttgaagtcaaagatcttctagactgggcacatggctcatgcctgtaatcccaacactntgggaggctgagatgggaggagagcttgaggccaggaatttgagaccagcctgggcaacacagcgagacctccatctctacaaaaaaataattagcccaaagaaaacccagctacttggaagtctgaggtaggacagcatgagcccaagagttcgagaccagcctgggcaagatagtgagatcccatctctacagattaaaaaaatatatatatatatcccctgaacctctggtctttgggtttgagccatttgcctcatggtgtgttgcttcttcactgcatgaattcccagtgggttaaaggaaccgcaatggctgttcacggtgctgaccttgctctcagtccacactgatttgtcttaccttctgacagagcaatgtgatttgacaagactcaataacaacttttagggggcaaaatattttttcagtctttggtgctggcccagaaggtggcccacaaaccaatgttaattctatgcattgtcaaatctttgctctttgaataaaactttgaataactgggcaataaaaatggttgacttgtattgattttccacagaaaggtaaaattagatgaagacagcttagaaatagaaagttcagttcacattaacctcaatcacaccatcttaaaaaaaaaaagctgattacatataactgtcaaacttacgtattaaaggtaaatttactgcctaatcaaaacgaggctccaatgcatttttaaatgcaaacaaacacttgtcaccatacattaacacaccatactgtttttcactaccaaatattttttgtgagtttcccgcttagagtgtcttagttcgttcaggctgctctaacaaaatatcttacttatactggataatttataaacaatagaaatatgtcactcacagtcctagaggctaagtccaagatcaaggcaccagcagatatggagtctggggagggcccattcttcagaaatgggtgcctgctacgtgtccttacatggtggaagaggcaagagcgcctccctgagcctcttttgtaagggtacttatcctactcatgagggtgaagccctcatgactccattgcttcccaaaagccccacctcttaatactattacattgacattaggttccaacatatgaattttggaagggacatcaacattcaggacatagcagtgaaccctgtaggactgctctttattttgtgctttcaaaaagactacatacaggtggttctatttttgtgtgttgaaacactttcccaggctgcactttgcatttctgtccttaaactcagcatgatccctgggcaaggagaaaattttactagttgagatcgtacataggttttgactcctttcttgctgcaggtgactgaaaagatctttcagtcttaaatttctaaattctaccctgcaatgattatatctttgttaacaaaatctttgcatgcttccataattttttattgaggccatatgccttgggtattgaagtaaggcatttaaggacacaaacttaagctttttgtttgttattaccaaactgccattcagaaagtttctaacaatttacacccttaccagcagtaaatgaacctactgtgccctaacactattgacaaagaaatacaatttgatagataaaacattctattttagtttgcataatgattccatcaatctctcaacagcagagcggtctagagatgacagtgatggcgtagaggtgacagtgaagatgaagagaaattatccaattcgggattaagttaagagagagaaaaaaacagtatttgatggtaaatctcttcaggctgtattatgacaggggtggaagagttaatatgttcctgcagcaaaactgaaaggaatactatctgttccacatgaaagcaaactgttttgtaattggggtaggtaaaaatggattcacccagtcaatggctgcacaccacatacctgagcccttaactgctctaacactgatgtaatatccaacccaacatttgtgattgaggctacttggttaatttttctccaggatccatctggattctgcagatgaggctggcaaattaaatggaactatgatagggaccatcttactgtatctgtcagatttccaagggtagcactgatctctaccgtcacctcacctccacccctaggatacagtactgtgtgtttgtttttgagacggagtcttgctctgtcacccaagctggggtgcagtggcgccatctcagctcactgcaacctcggcctcccgggttcaagcgattctcctgcctcagcctcccgagtagctgggactacaggcacccgccaccatgctaattaatgtatttttagtagagacagggtttcaccatgttggccaggctggtcatgaactcctgacctcaaagtgatcctccaagataacgacagaggccccgggcactcacagtcacctcatcagttcctcactatccctctgcagggaacagacactctactgtccttgtgtgcagtactcctcttatcttccacagtttgactcctcccattcccctccacagggatattttcccagggtaccactggtggaatcctcagcaactgggccaccccctcgtgtgagtgagtgtccatacctcacacgctgctccagatgggttttgctaccagttgggcagtgagtgagccagtccccaagcctca

SEQ ID NO: 353950 - DNA, 5365 bp, Homo sapiens
  misc_feature (2663)..(2663): n is a, c, g, or t
atccatctccagattttttgtttaagaggttgtgaacatacatatttatttataatacaaaatgaagattggagggaaaagtgctttaaaaaatagcatgtaagtgtataaatgaaattgttgcttcttctccgatacaattttgattgggtgagcattatttgcttttacaataatgctttgttttttgcattgcattgcactaacctgtccattaatacaaacagaaaaagaaggtggaggacgtgcccagccgcgtggtcagcgtgccgaacctcgcctcctatgcaaagaactttctgagtggcgatctgagttccaggattaatgcccctccaataactacatcacccagcttggacccaagccccagctgtggccggacctacaaacccaaccagtctacagatgcaaaaactgccacaaggtttgggggatgttggggacaggggcccttattctatttccctgtagataagaggggaagtaggattctttctagcacctggtaccaaattccagaaggccttttttcatggatgattagacaagggacactgaatcacttacctgaaaacttcagcatgggttatacaaaaggtggactccatctggcctggaggtctgaattcaaattacagtcttcctcattcttagctctgtggccttggacaggtcacttgacctctccaggtctccatataccttgcctttaaaattaagataatacagcacctatctcatcagactgacgtgagactaaaggaattaatccataggatgtgcttagcacaggacttggcacaaaaatcttcaatatagtttcagtattattactaacattattcctcaagatttactctatcaccttggaattctaaagtctcttaatcgggccgggcttggtggctcacgcctgtaatcccagcactttgggagatggaggtgggtggatcacctaaggtcaggagttcgagaccagcctgggcaacatggtgaaacccatctctacaaaaaatacaaaaattagccaggtgtggtggtatgcgcctgtaattccagctccccgggaggctgaggcacaatgatcgcttgaacgcaggaggctggaggttgcagtgagccgagatcatgccactgcactccagcctgggtgacagagggagactctgtcacaaaaaataaaaacaaagtctcttgatctgtaggtttggttaatcctgcattattagagctacaaccactaagtctcaaaggaacaatggagaaccaaacaatggtgaaccttctgttttcaaaatgaggattaggtactccctccccagccccatcctttacaatttgtttcccactactaatgttggccagtcccatttgggtgtttttgaagagtaaacaagcagttatctttccctgaaaagatggtgggtattaagctgcttcttgcatagttttcaaaaccatataaaaaaacctttttttgcttttaggaccccagatggtgaaacggcccaagccaaagaagcccagcagaaacagggctctccgcaccaggaatggttcaccaagtacttttctttctaagctaacctttgggatacatcacagaggatacttgaaaaacatttattttaaatcatccgattgaaggaatgaactaacaccaaccaaccaaataatatgcttatgatttatatatgatagctaaaacaaattttggcgttaacacttcatactgttctgccaggcacagcagctcacgcctgtaatcccatcactttgggaggctgaggcagatggactgcttgagtccaggaatttgagaccagcctggccaatatggtgaaaccccatctctacaaaatatacaaaaattagccaggcatggtggcgtgtgcctgtggtcccaggtacttgggggactgaggcgggaggatcacttgaacctaggaggcagaggttgcagtgagccaagttcgaactcctgcattccaaccagcctgggtgacagagggagaccctgtctccaaaaaaaaaaaaaaaaattgacattaaaccagtgttattaaaagtcatctataggaaaatgttattagcgttactaatgacccataccttgtatttctagtgtccataacatcatactccattttgtggaacatcagactttgtgatttccatgatctatttcaaaagtggttgtacttgtccttaggatgctagtcaactccactggaaagctgtttctatgtaaaatgatgcaattccaaaatgcacatctaacctcaataggaagacaaataacagttaaacaggaaagccaactaaaaacaaaccaaacctaccagaaatggatggtagcatgcttggactgaatactttcacttccttggtctaagacaagcagcagattatagatgggataacacccacctctaaaagggctttgcaaggattaagcaagataacataaattaacatgaattggaattaagtaccacaaggtttttctgtaaataaccaatcctagcccagttataggtctcagtgtaatgaccatagtgccaacatgatcacttgtgaaggtctctagattatctgttctttgaagtcaaagatcttctagactgggcacatggctcatgcctgtaatcccaacactntgggaggctgagatgggaggagagcttgaggccaggaatttgagaccagcctgggcaacacagcgagacctccatctctacaaaaaaataattagcccaaagaaaacccagctacttggaagtctgaggtaggacagcatgagcccaagagttcgagaccagcctgggcaagatagtgagatcccatctctacagattaaaaaaatatatatatatatcccctgaacctctggtctttgggtttgagccatttgcctcatggtgtgttgcttcttcactgcatgaattcccagtgggttaaaggaaccgcaatggctgttcacggtgctgaccttgctctcagtccacactgatttgtcttaccttctgacagagcaatgtgatttgacaagactcaataacaacttttagggggcaaaatattttttcagtctttggtgctggcccagaaggtggcccacaaaccaatgttaattctatgcattgtcaaatctttgctctttgaataaaactttgaataactgggcaataaaaatggttgacttgtattgattttccacagaaaggtaaaattagatgaagacagcttagaaatagaaagttcagttcacattaacctcaatcacaccatcttaaaaaaaaaaagctgattacatataactgtcaaacttacgtattaaaggtaaatttactgcctaatcaaaacgaggctccaatgcatttttaaatgcaaacaaacacttgtcaccatacattaacacaccatactgtttttcactaccaaatattttttgtgagtttcccgcttagagtgtcttagttcgttcaggctgctctaacaaaatatcttacttatactggataatttataaacaatagaaatatgtcactcacagtcctagaggctaagtccaagatcaaggcaccagcagatatggagtctggggagggcccattcttcagaaatgggtgcctgctacgtgtccttacatggtggaagaggcaagagcgcctccctgagcctcttttgtaagggtacttatcctactcatgagggtgaagccctcatgactccattgcttcccaaaagccccacctcttaatactattacattgacattaggttccaacatatgaattttggaagggacatcaacattcaggacatagcagtgaaccctgtaggactgctctttattttgtgctttcaaaaagactacatacaggtggttctatttttgtgtgttgaaacactttcccaggctgcactttgcatttctgtccttaaactcagcatgatccctgggcaaggagaaaattttactagttgagatcgtacataggttttgactcctttcttgctgcaggtgactgaaaagatctttcagtcttaaatttctaaattctaccctgcaatgattatatctttgttaacaaaatctttgcatgcttccataattttttattgaggccatatgccttgggtattgaagtaaggcatttaaggacacaaacttaagctttttgtttgttattaccaaactgccattcagaaagtttctaacaatttacacccttaccagcagtaaatgaacctactgtgccctaacactattgacaaagaaatacaatttgatagataaaacattctattttagtttgcataatgattccatcaatctctcaacagcagagcggtctagagatgacagtgatggcgtagaggtgacagtgaagatgaagagaaattatccaattcgggattaagttaagagagagaaaaaaacagtatttgatggtaaatctcttcaggctgtattatgacaggggtggaagagttaatatgttcctgcagcaaaactgaaaggaatactatctgttccacatgaaagcaaactgttttgtaattggggtaggtaaaaatggattcacccagtcaatggctgcacaccacatacctgagcccttaactgctctaacactgatgtaatatccaacccaacatttgtgattgaggctacttggttaatttttctccaggatccatctggattctgcagatgaggctggcaaattaaatggaactatgatagggaccatcttactgtatctgtcagatttccaagggtagcactgatctctaccgtcacctcacctccacccctaggatacagtactgtgtgtttgtttttgagacggagtcttgctctgtcacccaagctggggtgcagtggcgccatctcagctcactgcaacctcggcctcccgggttcaagcgattctcctgcctcagcctcccgagtagctgggactacaggcacccgccaccatgctaattaatgtatttttagtagagacagggtttcaccatgttggccaggctggtcatgaactcctgacctcaaagtgatcctccaagataacgacagaggccccgggcactcacagtcacctcatcagttcctcactatccctctgcagggaacagacactctactgtccttgtgtgcagtactcctcttatcttccacagtttgactcctcccattcccctccacagggatattttcccagggtaccactggtggaatcctcagcaactgggccaccccctcgtgtgagtgagtgtccatacctcacacgctgctccagatgggttttgctaccagttgggcagtgagtgagccagtccccaagcctca

SEQ ID NO: 353951 - DNA, 4482 bp, Homo sapiens
atccatctccagattttttgtttaagaggttgtgaacatacatatttatttataatacaaaatgaagattggagggaaaagtgctttaaaaaatagcatgtaagtgtataaatgaaattgttgcttcttctccgatacaattttgattgggtgagcattatttgcttttacaataatgctttgttttttgcattgcattgcactaacctgtccattaatacaaacagaaaaagaaggtggaggacgtgcccagccgcgtggtcagcgtgccgaacctcgcctcctatgcaaagaactttctgagtggcgatctgagttccaggattaatgcccctccaataactacatcacccagcttggacccaagccccagctgtggccggacctacaaacccaaccagtctacagatgcaaaaactgccacaaggtttgggggatgttggggacaggggcccttattctatttccctgtagataagaggggaagtaggattctttctagcacctggtaccaaattccagaaggccttttttcatggatgattagacaagggacactgaatcacttacctgaaaacttcagcatgggttatacaaaaggtggactccatctggcctggaggtctgaattcaaattacagtcttcctcattcttagctctgtggccttggacaggtcacttgacctctccaggtctccatataccttgcctttaaaattaagataatacagcacctatctcatcagactgacgtgagactaaaggaattaatccataggatgtgcttagcacaggacttggcacaaaaatcttcaatatagtttcagtattattactaacattattcctcaagatttactctatcaccttggaattctaaagtctcttaatcgggccgggcttggtggctcacgcctgtaatcccagcactttgggagatggaggtgggtggatcacctaaggtcaggagttcgagaccagcctgggcaacatggtgaaacccatctctacaaaaaatacaaaaattagccaggtgtggtggtatgcgcctgtaattccagctccccgggaggctgaggcacaatgatcgcttgaacgcaggaggctggaggttgcagtgagccgagatcatgccactgcactccagcctgggtgacagagggagactctgtcacaaaaaataaaaacaaagtctcttgatctgtaggtttggttaatcctgcattattagagctacaaccactaagtctcaaaggaacaatggagaaccaaacaatggtgaaccttctgttttcaaaatgaggattaggtactccctccccagccccatcctttacaatttgtttcccactactaatgttggccagtcccatttgggtgtttttgaagagtaaacaagcagttatctttccctgaaaagatggtgggtattaagctgcttcttgcatagttttcaaaaccatataaaaaaacctttttttgcttttaggaccccagatggtgaaacggcccaagccaaagaagcccagcagaaacagggctctccgcaccaggaatggttcaccaagtacttttctttctaagctaacctttgggatacatcacagaggatacttgaaaaacatttattttaaatcatccgattgaaggaatgaactaacaccaaccaaccaaataatatgcttatgatttatatatgatagctaaaacaaattttggcgttaacacttcatactgttctgccaggcacagcagctcacgcctgtaatcccatcactttgggaggctgaggcagatggactgcttgagtccaggaatttgagaccagcctgggcaacacagcgagacctccatctctacaaaaaaataattagcccaaagaaaacccagctacttggaagtctgaggtaggacagcatgagcccaagagttcgagaccagcctgggcaagatagtgagatcccatctctacagattaaaaaaatatatatatatatcccctgaacctctggtctttgggtttgagccatttgcctcatggtgtgttgcttcttcactgcatgaattcccagtgggttaaaggaaccgcaatggctgttcacggtgctgaccttgctctcagtccacactgatttgtcttaccttctgacagagcaatgtgatttgacaagactcaataacaacttttagggggcaaaatattttttcagtctttggtgctggcccagaaggtggcccacaaaccaatgttaattctatgcattgtcaaatctttgctctttgaataaaactttgaataactgggcaataaaaatggttgacttgtattgattttccacagaaaggtaaaattagatgaagacagcttagaaatagaaagttcagttcacattaacctcaatcacaccatcttaaaaaaaaaaagctgattacatataactgtcaaacttacgtattaaaggtaaatttactgcctaatcaaaacgaggctccaatgcatttttaaatgcaaacaaacacttgtcaccatacattaacacaccatactgtttttcactaccaaatattttttgtgagtttcccgcttagagtgtcttagttcgttcaggctgctctaacaaaatatcttacttatactggataatttataaacaatagaaatatgtcactcacagtcctagaggctaagtccaagatcaaggcaccagcagatatggagtctggggagggcccattcttcagaaatgggtgcctgctacgtgtccttacatggtggaagaggcaagagcgcctccctgagcctcttttgtaagggtacttatcctactcatgagggtgaagccctcatgactccattgcttcccaaaagccccacctcttaatactattacattgacattaggttccaacatatgaattttggaagggacatcaacattcaggacatagcagtgaaccctgtaggactgctctttattttgtgctttcaaaaagactacatacaggtggttctatttttgtgtgttgaaacactttcccaggctgcactttgcatttctgtccttaaactcagcatgatccctgggcaaggagaaaattttactagttgagatcgtacataggttttgactcctttcttgctgcaggtgactgaaaagatctttcagtcttaaatttctaaattctaccctgcaatgattatatctttgttaacaaaatctttgcatgcttccataattttttattgaggccatatgccttgggtattgaagtaaggcatttaaggacacaaacttaagctttttgtttgttattaccaaactgccattcagaaagtttctaacaatttacacccttaccagcagtaaatgaacctactgtgccctaacactattgacaaagaaatacaatttgatagataaaacattctattttagtttgcataatgattccatcaatctctcaacagcagagcggtctagagatgacagtgatggcgtagaggtgacagtgaagatgaagagaaattatccaattcgggattaagttaagagagagaaaaaaacagtatttgatggtaaatctcttcaggctgtattatgacaggggtggaagagttaatatgttcctgcagcaaaactgaaaggaatactatctgttccacatgaaagcaaactgttttgtaattggggtaggtaaaaatggattcacccagtcaatggctgcacaccacatacctgagcccttaactgctctaacactgatgtaatatccaacccaacatttgtgattgaggctacttggttaatttttctccaggatccatctggattctgcagatgaggctggcaaattaaatggaactatgatagggaccatcttactgtatctgtcagatttccaagggtagcactgatctctaccgtcacctcacctccacccctaggatacagtactgtgtgtttgtttttgagacggagtcttgctctgtcacccaagctggggtgcagtggcgccatctcagctcactgcaacctcggcctcccgggttcaagcgattctcctgcctcagcctcccgagtagctgggactacaggcacccgccaccatgctaattaatgtatttttagtagagacagggtttcaccatgttggccaggctggtcatgaactcctgacctcaaagtgatcctccaagataacgacagaggccccgggcactcacagtcacctcatcagttcctcactatccctctgcagggaacagacactctactgtccttgtgtgcagtactcctcttatcttccacagtttgactcctcccattcccctccacagggatattttcccagggtaccactggtggaatcctcagcaactgggccaccccctcgtgtgagtgagtgtccatacctcacacgctgctccagatgggttttgctaccagttgggcagtgagtgagccagtccccaagcctca

SEQ ID NO: 353952 - DNA, 4817 bp, Homo sapiens
  misc_feature (1496)..(1496): n is a, c, g, or t
  misc_feature (1954)..(1954): n is a, c, g, or t
  misc_feature (2376)..(2376): n is a, c, g, or t
  misc_feature (4288)..(4288): n is a, c, g, or t
gtctgagtgctgggcgcgttttagcgatggcttctgctctcaacagcaaaattaacccgcccggcacttgccagggctccaaagccgacggtggcgccggctggagaatggactgtgatccccagatgcacgtgaaaatgtgcaagaagatcgcccagctcaccaaggtgatttatgccctgaacacccgccaggatgaggctgaggccagcatggaggcgctgcgggaagcgcaccaggaggagctccagaatgcggtggcagagaccaaggccaggctcctgcaggaacagggctgcgcagaggaggaagcccttctacagcgcatccaggccctggagagcgccctggagctgcagaagaggctgacggaggaggcgctggctgagtcggcctcgtgcaggctggagacgaaggagagagagctgagggtggaggcagagcacgccgagcgagtcctcacgctctccagggaaatgctggagctcaaggctgactacgagaggaggctccagcacctgacgagccacgaggctaccccgcagggccggctgccccaggagagccctgaaaccaagtcggagccaggccagggcccggagatgcaggaggtcctgctagaggtgcagcggctgcgagtggagaaccagcagctgagcaaggactacgcccgcaaggccgaggagctgcaggccacctacgagagggaaaacgaggccatccggcaggccatgcagcagtcggtgagccaggccctgtggcagtggcaggagaaggagtcggacctccgcaagaacttccaggtccaggagtcagccctgcaggctcaggtccggaagctggaaggagacctggagcacagaggccgcaagataagtgacctgaagaagtacgcccagaagctgaaggagaggattcaggacctggatgtgcagcttaaggaggctcgacaggagaattcagagttgaaaggcactgcaaaaaaacttggggagaagctggctgttgccaaagacagaatgatgctgcaggagtgtcgtgggacacagcagacagatgccatgaagactgagttagtttcagagaacaaagtcctgcgggaagagaatgacttggaagccggcaatcttcatcctcagcaggatcaaagctgtctcaaggagtgcccttgcatgaaaggaggcacagatatgcagaccaagaaagaggcaagtgctgagacagaatatatgaagcaacaatatgaagaagaccttcgtaaaatcaaacatcagacagaagaggagaagaaacatctcaaagaccagctagtgaagcgactagaagacttggtaaagaagcacaccgtggaaatcaaatccgttcgctcgtccgtggaggctgaaagaaagaaactgcagagggaagtagaagcacagttggaggaagtgaggaagaaatcagaaaaggagataaagcagctggaagaagagaaagcagccctcaatgtgaagctncagaattctctgcttgaggttttaaggctggaagaatttatccaacaaaataagacacgccccacaggagctgaggaaagtccccaggaattaggccgccagcactgcagcattctggagacccaggatccatgcttgaagctggatgaaacttcgccgagaggagaggagtatcaagataagttagcagctgaagaaggaaccagcagtgatgaagaagaaaggaccaaagtgcttctcaaggagggaagtgacccacaacctccactgggctctttgttgaaggagaaaacatccaaaatccagcgtctagaggaggactggcaaagccagaaggccaaattgcaagcccaggtctcacagatgcagcaggctctggagcagtgcaccagcaactacagggaggacctgcaggcactcaagcagctctcggacctggagagggagaagctgcagcntgagctccaggagaccactcagcagaaccacgccatgaaagcccagctcgaggcttcccaccagagagccctgcgcatgctggagaaggccagacatcaggaactcaaggccacagaggaacgcttgaagaaggaatccagccacagcctccagatccaacaccagacacaccgactggagctccaggccttggaggaaaaggccaggcaagagctgcaggaggagcgtgagaggatgcaggcacagcaggccctgctgctagagtcgctcagacaggagctgtcggagcagcaagctgcctgttctgggcaccagaaggacttggaggcactgcaggccgagctgagggctctgggcagacagcaagccagcagccagtgtccaggagacagcaaggatcacataatcgccacagaggagnggggcggcccgggccaggccggctccccaccgggcgctgctgggcagggttccggcgagggatgcgggctctgggaggagaacgcgcagctccaggacgcggtgcggcggctgcgcgcggaggtggagcagcatcagcaggaggcgcagaagctccgagaccagcgcaggttcctggaggagactcagcaagcccagcgggccagggaggtggagacactgcgccaggaacaccggaaggagatgcaggccatggtggcagatttcagtagtgcccaggcccagctccaggcccggctggctgccctggaagccgaactgaaagattccggagagaagccagggaagggagcgtccaggcccgaggaccttcagctcattggccgcctgcagacccgcctgaaggagagagaggacatcatcaagcagctcacggaagagagaagatttcactacgcagcattccccagtgccatgtcccaccggaatcggtctttctctttcaatcctcacccgggatatttgaccccttccatgaagaaaaagaaggtggaggacgtgcccagccgcgtggtcagcgtgccgaacctcgcctcctatgcaaagaactttctgagtggcgatctgagttccaggattaatgcccctccaataactacatcacccagcttggacccaagccccagctgtggccggacctacaaacccaaccagtctacagatgcaaaaactgccacaaggaccccagatggtgaaacggcccaagccaaagaagcccagcagaaacagggctctccgcaccaggaatggttcaccaagtacttttctttctaagctaacctttgggatacatcacagaggatacttgaaaaacatttattttaaatcatccgattgaaggaatgaactaacaccaaccaaccaaataatatgcttatgatttatatatgatagctaaaacaaattttggcgttaacacttcatactgttctgccaggcacagcagctcacgcctgtaatcccatcactttgggaggctgaggcagatggactgcttgagtccaggaatttgagaccagcctggccaatatggtgaaaccccatctctacaaaatatacaaaaattagccaggcatggtggcgtgtgcctgtggtcccaggtacttgggggactgaggcgggaggatcacttgaacctaggaggcagaggttgcagtgagccaagttcgaactcctgcattccaaccagcctgggtgacagagggagaccctgtctccaaaaaaaaaaaaaaaaattgacattaaaccagtgttattaaaagtcatctataggaaaatgttattagcgttactaatgacccataccttgtatttctagtgtccataacatcatactccattttgtggaacatcagactttgtgatttccatgatctatttcaaaagtggttgtacttgtccttaggatgctagtcaactccactggaaagctgtttctatgtaaaatgatgcaattccaaaatgcacatctaacctcaataggaagacaaataacagttaaacaggaaagccaactaaaaacaaaccaaacctaccagaaatggatggtagcatgcttggactgaatactttcacttccttggtctaagacaagcagcagattatagatgggataacacccacctctaaaagggctttgcaaggattaagcaagataacataaattaacatgaattggaattaagtaccacaaggtttttctgtaaataaccaatcctagcccagttataggtctcagtgtaatgaccatagtgccaacatgatcacttgtgaaggtctctagattatctgttctttgaagtcaaagatcttctagactgggcacatggctcatgcctgtaatcccaacactntgggaggctgagatgggaggagagcttgaggccaggaatttgagaccagcctgggcaacacagcgagacctccatctctacaaaaaaataattagcccaaagaaaacccagctacttggaagtctgaggtaggacagcatgagcccaagagttcgagaccagcctgggcaagatagtgagatcccatctctacagattaaaaaaatatatatatatatcccctgaacctctggtctttgggtttgagccatttgcctcatggtgtgttgcttcttcactgcatgaattcccagtgggttaaaggaaccgcaatggctgttcacggtgctgaccttgctctcagtccacactgatttgtcttaccttctgacagagcaatgtgatttgacaagactcaataacaacttttagggggcaaaatattttttcagtctttggtgctggcccagaaggtggcccacaaaccaatgttaattctatgcattgtcaaatctttgctctttgaataaaactttgaataactgggcaa

SEQ ID NO: 353953 - DNA, 4302 bp, Homo sapiens
  misc_feature (1600)..(1600): n is a, c, g, or t
atccatctccagattttttgtttaagaggttgtgaacatacatatttatttataatacaaaatgaagattggagggaaaagtgctttaaaaaatagcatgtaagtgtataaatgaaattgttgcttcttctccgatacaattttgattgggtgagcattatttgcttttacaataatgctttgttttttgcattgcattgcactaacctgtccattaatacaaacagaaaaagaaggtggaggacgtgcccagccgcgtggtcagcgtgccgaacctcgcctcctatgcaaagaactttctgagtggcgatctgagttccaggattaatgcccctccaataactacatcacccagcttggacccaagccccagctgtggccggacctacaaacccaaccagtctacagatgcaaaaactgccacaaggaccccagatggtgaaacggcccaagccaaagaagcccagcagaaacagggctctccgcaccaggaatggttcaccaagtacttttctttctaagctaacctttgggatacatcacagaggatacttgaaaaacatttattttaaatcatccgattgaaggaatgaactaacaccaaccaaccaaataatatgcttatgatttatatatgatagctaaaacaaattttggcgttaacacttcatactgttctgccaggcacagcagctcacgcctgtaatcccatcactttgggaggctgaggcagatggactgcttgagtccaggaatttgagaccagcctggccaatatggtgaaaccccatctctacaaaatatacaaaaattagccaggcatggtggcgtgtgcctgtggtcccaggtacttgggggactgaggcgggaggatcacttgaacctaggaggcagaggttgcagtgagccaagttcgaactcctgcattccaaccagcctgggtgacagagggagaccctgtctccaaaaaaaaaaaaaaaaattgacattaaaccagtgttattaaaagtcatctataggaaaatgttattagcgttactaatgacccataccttgtatttctagtgtccataacatcatactccattttgtggaacatcagactttgtgatttccatgatctatttcaaaagtggttgtacttgtccttaggatgctagtcaactccactggaaagctgtttctatgtaaaatgatgcaattccaaaatgcacatctaacctcaataggaagacaaataacagttaaacaggaaagccaactaaaaacaaaccaaacctaccagaaatggatggtagcatgcttggactgaatactttcacttccttggtctaagacaagcagcagattatagatgggataacacccacctctaaaagggctttgcaaggattaagcaagataacataaattaacatgaattggaattaagtaccacaaggtttttctgtaaataaccaatcctagcccagttataggtctcagtgtaatgaccatagtgccaacatgatcacttgtgaaggtctctagattatctgttctttgaagtcaaagatcttctagactgggcacatggctcatgcctgtaatcccaacactntgggaggctgagatgggaggagagcttgaggccaggaatttgagaccagcctgggcaacacagcgagacctccatctctacaaaaaaataattagcccaaagaaaacccagctacttggaagtctgaggtaggacagcatgagcccaagagttcgagaccagcctgggcaagatagtgagatcccatctctacagattaaaaaaatatatatatatatcccctgaacctctggtctttgggtttgagccatttgcctcatggtgtgttgcttcttcactgcatgaattcccagtgggttaaaggaaccgcaatggctgttcacggtgctgaccttgctctcagtccacactgatttgtcttaccttctgacagagcaatgtgatttgacaagactcaataacaacttttagggggcaaaatattttttcagtctttggtgctggcccagaaggtggcccacaaaccaatgttaattctatgcattgtcaaatctttgctctttgaataaaactttgaataactgggcaataaaaatggttgacttgtattgattttccacagaaaggtaaaattagatgaagacagcttagaaatagaaagttcagttcacattaacctcaatcacaccatcttaaaaaaaaaaagctgattacatataactgtcaaacttacgtattaaaggtaaatttactgcctaatcaaaacgaggctccaatgcatttttaaatgcaaacaaacacttgtcaccatacattaacacaccatactgtttttcactaccaaatattttttgtgagtttcccgcttagagtgtcttagttcgttcaggctgctctaacaaaatatcttacttatactggataatttataaacaatagaaatatgtcactcacagtcctagaggctaagtccaagatcaaggcaccagcagatatggagtctggggagggcccattcttcagaaatgggtgcctgctacgtgtccttacatggtggaagaggcaagagcgcctccctgagcctcttttgtaagggtacttatcctactcatgagggtgaagccctcatgactccattgcttcccaaaagccccacctcttaatactattacattgacattaggttccaacatatgaattttggaagggacatcaacattcaggacatagcagtgaaccctgtaggactgctctttattttgtgctttcaaaaagactacatacaggtggttctatttttgtgtgttgaaacactttcccaggctgcactttgcatttctgtccttaaactcagcatgatccctgggcaaggagaaaattttactagttgagatcgtacataggttttgactcctttcttgctgcaggtgactgaaaagatctttcagtcttaaatttctaaattctaccctgcaatgattatatctttgttaacaaaatctttgcatgcttccataattttttattgaggccatatgccttgggtattgaagtaaggcatttaaggacacaaacttaagctttttgtttgttattaccaaactgccattcagaaagtttctaacaatttacacccttaccagcagtaaatgaacctactgtgccctaacactattgacaaagaaatacaatttgatagataaaacattctattttagtttgcataatgattccatcaatctctcaacagcagagcggtctagagatgacagtgatggcgtagaggtgacagtgaagatgaagagaaattatccaattcgggattaagttaagagagagaaaaaaacagtatttgatggtaaatctcttcaggctgtattatgacaggggtggaagagttaatatgttcctgcagcaaaactgaaaggaatactatctgttccacatgaaagcaaactgttttgtaattggggtaggtaaaaatggattcacccagtcaatggctgcacaccacatacctgagcccttaactgctctaacactgatgtaatatccaacccaacatttgtgattgaggctacttggttaatttttctccaggatccatctggattctgcagatgaggctggcaaattaaatggaactatgatagggaccatcttactgtatctgtcagatttccaagggtagcactgatctctaccgtcacctcacctccacccctaggatacagtactgtgtgtttgtttttgagacggagtcttgctctgtcacccaagctggggtgcagtggcgccatctcagctcactgcaacctcggcctcccgggttcaagcgattctcctgcctcagcctcccgagtagctgggactacaggcacccgccaccatgctaattaatgtatttttagtagagacagggtttcaccatgttggccaggctggtcatgaactcctgacctcaaagtgatcctccaagataacgacagaggccccgggcactcacagtcacctcatcagttcctcactatccctctgcagggaacagacactctactgtccttgtgtgcagtactcctcttatcttccacagtttgactcctcccattcccctccacagggatattttcccagggtaccactggtggaatcctcagcaactgggccaccccctcgtgtgagtgagtgtccatacctcacacgctgctccagatgggttttgctaccagttgggcagtgagtgagccagtccccaagcctca

SEQ ID NO: 353954 - DNA, 2553 bp, Homo sapiens
atccatctccagattttttgtttaagaggttgtgaacatacatatttatttataatacaaaatgaagattggagggaaaagtgctttaaaaaatagcatgtaagtgtataaatgaaattgttgcttcttctccgatacaattttgattgggtgagcattatttgcttttacaataatgctttgttttttgcattgcattgcactaacctgtccattaatacaaacagaaaaagaaggtggaggacgtgcccagccgcgtggtcagcgtgccgaacctcgcctcctatgcaaagaactttctgagtggcgatctgagttccaggattaatgcccctccaataactacatcacccagcttggacccaagccccagctgtggccggacctacaaacccaaccagtctacagatgcaaaaactgccacaaggtttgggggatgttggggacaggggcccttattctatttccctgtagataagaggggaagtaggattctttctagcacctggtaccaaattccagaaggccttttttcatggatgattagacaagggacactgaatcacttacctgaaaacttcagcatgggttatacaaaaggtggactccatctggcctggaggtctgaattcaaattacagtcttcctcattcttagctctgtggccttggacaggtcacttgacctctccaggtctccatataccttgcctttaaaattaagataatacagcacctatctcatcagactgacgtgagactaaaggaattaatccataggatgtgcttagcacaggacttggcacaaaaatcttcaatatagtttcagtattattactaacattattcctcaagatttactctatcaccttggaattctaaagtctcttaatcgggccgggcttggtggctcacgcctgtaatcccagcactttgggagatggaggtgggtggatcacctaaggtcaggagttcgagaccagcctgggcaacatggtgaaacccatctctacaaaaaatacaaaaattagccaggtgtggtggtatgcgcctgtaattccagctccccgggaggctgaggcacaatgatcgcttgaacgcaggaggctggaggttgcagtgagccgagatcatgccactgcactccagcctgggtgacagagggagactctgtcacaaaaaataaaaacaaagtctcttgatctgtaggtttggttaatcctgcattattagagctacaaccactaagtctcaaaggaacaatggagaaccaaacaatggtgaaccttctgttttcaaaatgaggattaggtactccctccccagccccatcctttacaatttgtttcccactactaatgttggccagtcccatttgggtgtttttgaagagtaaacaagcagttatctttccctgaaaagatggtgggtattaagctgcttcttgcatagttttcaaaaccatataaaaaaacctttttttgcttttaggaccccagatggtgaaacggcccaagccaaagaagcccagcagaaacagggctctccgcaccaggaatggttcaccaagtacttttctttctaagctaacctttgggatacatcacagaggatacttgaaaaacatttattttaaatcatccgattgaaggaatgaactaacaccaaccaaccaaataatatgcttatgatttatatatgatagctaaaacaaattttggcgttaacacttcatactgttctgccaggcacagcagctcacgcctgtaatcccatcactttgggaggctgaggcagatggactgcttgagtccaggaatttgagaccagcctggccaatatggtgaaaccccatatttgtgattgaggctacttggttaatttttctccaggatccatctggattctgcagatgaggctggcaaattaaatggaactatgatagggaccatcttactgtatctgtcagatttccaagggtagcactgatctctaccgtcacctcacctccacccctaggatacagtactgtgtgtttgtttttgagacggagtcttgctctgtcacccaagctggggtgcagtggcgccatctcagctcactgcaacctcggcctcccgggttcaagcgattctcctgcctcagcctcccgagtagctgggactacaggcacccgccaccatgctaattaatgtatttttagtagagacagggtttcaccatgttggccaggctggtcatgaactcctgacctcaaagtgatcctccaagataacgacagaggccccgggcactcacagtcacctcatcagttcctcactatccctctgcagggaacagacactctactgtccttgtgtgcagtactcctcttatcttccacagtttgactcctcccattcccctccacagggatattttcccagggtaccactggtggaatcctcagcaactgggccaccccctcgtgtgagtgagtgtccatacctcacacgctgctccagatgggttttgctaccagttgggcagtgagtgagccagtccccaagcctca

SEQ ID NO: 353955 - DNA, 317 bp, Homo sapiens
gatccatgcttgaagctggatgaaacttcgccgagaggagaggagtatcaagataagttagcagctgaagaaggaaccagcagtgatgaagaagaaaggtacaggaggacatgcagacttctgagtgctccattgaatgaggactcagatgtggaaggattcatccattcattcattctatcctcaagtatttatcactgctccttgcagcatgcttggggaggcaacaagcatatcttgtatgtcttcagcacagctatgggcttcacataaactgtgttacttaattgttacaacaacccagagaagccattttt

SEQ ID NO: 353956 - DNA, 5810 bp, Homo sapiens
  misc_feature (3108)..(3108): n is a, c, g, or t
tttttaaagtaatccttatttctaagaaatacatactgatgtttttacagagaaaaattatgtaataactggaatttagtaataatacagcaggagagaaaaaagtggaaaatgatacacacaaacaagatcggccatatagttattataggtaaagtggggatggatttcattactctccctatgtttgtatatgttaggcaacacaaatgtcaaacaagacagaggaagaaaggcggcaaaatcctttgcatacctgggggttttctttctttgccttaattactaactttctgcattaggttaccttcacatgctaagaacagttgaattttcaatttcctaaggcatcagcttgcccttttctttacaagaggggctggggacataaaaaaagcaaaggtgcttcctcaaaagcttcagtgcctggcagctttattcccactgacttccccttcctcccctggactttccttctctattctgccctcacagccatcttccttcaagtcaaacccagtgctgtgtggttaggctcatttagactcagttgtattggttttctaggaagagagaagatttcactacgcagcattccccagtgccatgtcccaccggaatcggtctttctctttcaatcctcacccgggatatttgaccccttccatgaagaaaaagaaggtggaggacgtgcccagccgcgtggtcagcgtgccgaacctcgcctcctatgcaaagaactttctgagtggcgatctgagttccaggattaatgcccctccaataactacatcacccagcttggacccaagccccagctgtggccggacctacaaacccaaccagtctacagatgcaaaaactgccacaaggtttgggggatgttggggacaggggcccttattctatttccctgtagataagaggggaagtaggattctttctagcacctggtaccaaattccagaaggccttttttcatggatgattagacaagggacactgaatcacttacctgaaaacttcagcatgggttatacaaaaggtggactccatctggcctggaggtctgaattcaaattacagtcttcctcattcttagctctgtggccttggacaggtcacttgacctctccaggtctccatataccttgcctttaaaattaagataatacagcacctatctcatcagactgacgtgagactaaaggaattaatccataggatgtgcttagcacaggacttggcacaaaaatcttcaatatagtttcagtattattactaacattattcctcaagatttactctatcaccttggaattctaaagtctcttaatcgggccgggcttggtggctcacgcctgtaatcccagcactttgggagatggaggtgggtggatcacctaaggtcaggagttcgagaccagcctgggcaacatggtgaaacccatctctacaaaaaatacaaaaattagccaggtgtggtggtatgcgcctgtaattccagctccccgggaggctgaggcacaatgatcgcttgaacgcaggaggctggaggttgcagtgagccgagatcatgccactgcactccagcctgggtgacagagggagactctgtcacaaaaaataaaaacaaagtctcttgatctgtaggtttggttaatcctgcattattagagctacaaccactaagtctcaaaggaacaatggagaaccaaacaatggtgaaccttctgttttcaaaatgaggattaggtactccctccccagccccatcctttacaatttgtttcccactactaatgttggccagtcccatttgggtgtttttgaagagtaaacaagcagttatctttccctgaaaagatggtgggtattaagctgcttcttgcatagttttcaaaaccatataaaaaaacctttttttgcttttaggaccccagatggtgaaacggcccaagccaaagaagcccagcagaaacagggctctccgcaccaggaatggttcaccaagtacttttctttctaagctaacctttgggatacatcacagaggatacttgaaaaacatttattttaaatcatccgattgaaggaatgaactaacaccaaccaaccaaataatatgcttatgatttatatatgatagctaaaacaaattttggcgttaacacttcatactgttctgccaggcacagcagctcacgcctgtaatcccatcactttgggaggctgaggcagatggactgcttgagtccaggaatttgagaccagcctggccaatatggtgaaaccccatctctacaaaatatacaaaaattagccaggcatggtggcgtgtgcctgtggtcccaggtacttgggggactgaggcgggaggatcacttgaacctaggaggcagaggttgcagtgagccaagttcgaactcctgcattccaaccagcctgggtgacagagggagaccctgtctccaaaaaaaaaaaaaaaaattgacattaaaccagtgttattaaaagtcatctataggaaaatgttattagcgttactaatgacccataccttgtatttctagtgtccataacatcatactccattttgtggaacatcagactttgtgatttccatgatctatttcaaaagtggttgtacttgtccttaggatgctagtcaactccactggaaagctgtttctatgtaaaatgatgcaattccaaaatgcacatctaacctcaataggaagacaaataacagttaaacaggaaagccaactaaaaacaaaccaaacctaccagaaatggatggtagcatgcttggactgaatactttcacttccttggtctaagacaagcagcagattatagatgggataacacccacctctaaaagggctttgcaaggattaagcaagataacataaattaacatgaattggaattaagtaccacaaggtttttctgtaaataaccaatcctagcccagttataggtctcagtgtaatgaccatagtgccaacatgatcacttgtgaaggtctctagattatctgttctttgaagtcaaagatcttctagactgggcacatggctcatgcctgtaatcccaacactntgggaggctgagatgggaggagagcttgaggccaggaatttgagaccagcctgggcaacacagcgagacctccatctctacaaaaaaataattagcccaaagaaaacccagctacttggaagtctgaggtaggacagcatgagcccaagagttcgagaccagcctgggcaagatagtgagatcccatctctacagattaaaaaaatatatatatatatcccctgaacctctggtctttgggtttgagccatttgcctcatggtgtgttgcttcttcactgcatgaattcccagtgggttaaaggaaccgcaatggctgttcacggtgctgaccttgctctcagtccacactgatttgtcttaccttctgacagagcaatgtgatttgacaagactcaataacaacttttagggggcaaaatattttttcagtctttggtgctggcccagaaggtggcccacaaaccaatgttaattctatgcattgtcaaatctttgctctttgaataaaactttgaataactgggcaataaaaatggttgacttgtattgattttccacagaaaggtaaaattagatgaagacagcttagaaatagaaagttcagttcacattaacctcaatcacaccatcttaaaaaaaaaaagctgattacatataactgtcaaacttacgtattaaaggtaaatttactgcctaatcaaaacgaggctccaatgcatttttaaatgcaaacaaacacttgtcaccatacattaacacaccatactgtttttcactaccaaatattttttgtgagtttcccgcttagagtgtcttagttcgttcaggctgctctaacaaaatatcttacttatactggataatttataaacaatagaaatatgtcactcacagtcctagaggctaagtccaagatcaaggcaccagcagatatggagtctggggagggcccattcttcagaaatgggtgcctgctacgtgtccttacatggtggaagaggcaagagcgcctccctgagcctcttttgtaagggtacttatcctactcatgagggtgaagccctcatgactccattgcttcccaaaagccccacctcttaatactattacattgacattaggttccaacatatgaattttggaagggacatcaacattcaggacatagcagtgaaccctgtaggactgctctttattttgtgctttcaaaaagactacatacaggtggttctatttttgtgtgttgaaacactttcccaggctgcactttgcatttctgtccttaaactcagcatgatccctgggcaaggagaaaattttactagttgagatcgtacataggttttgactcctttcttgctgcaggtgactgaaaagatctttcagtcttaaatttctaaattctaccctgcaatgattatatctttgttaacaaaatctttgcatgcttccataattttttattgaggccatatgccttgggtattgaagtaaggcatttaaggacacaaacttaagctttttgtttgttattaccaaactgccattcagaaagtttctaacaatttacacccttaccagcagtaaatgaacctactgtgccctaacactattgacaaagaaatacaatttgatagataaaacattctattttagtttgcataatgattccatcaatctctcaacagcagagcggtctagagatgacagtgatggcgtagaggtgacagtgaagatgaagagaaattatccaattcgggattaagttaagagagagaaaaaaacagtatttgatggtaaatctcttcaggctgtattatgacaggggtggaagagttaatatgttcctgcagcaaaactgaaaggaatactatctgttccacatgaaagcaaactgttttgtaattggggtaggtaaaaatggattcacccagtcaatggctgcacaccacatacctgagcccttaactgctctaacactgatgtaatatccaacccaacatttgtgattgaggctacttggttaatttttctccaggatccatctggattctgcagatgaggctggcaaattaaatggaactatgatagggaccatcttactgtatctgtcagatttccaagggtagcactgatctctaccgtcacctcacctccacccctaggatacagtactgtgtgtttgtttttgagacggagtcttgctctgtcacccaagctggggtgcagtggcgccatctcagctcactgcaacctcggcctcccgggttcaagcgattctcctgcctcagcctcccgagtagctgggactacaggcacccgccaccatgctaattaatgtatttttagtagagacagggtttcaccatgttggccaggctggtcatgaactcctgacctcaaagtgatcctccaagataacgacagaggccccgggcactcacagtcacctcatcagttcctcactatccctctgcagggaacagacactctactgtccttgtgtgcagtactcctcttatcttccacagtttgactcctcccattcccctccacagggatattttcccagggtaccactggtggaatcctcagcaactgggccaccccctcgtgtgagtgagtgtccatacctcacacgctgctccagatgggttttgctaccagttgggcagtgagtgagccagtccccaagcctca

SEQ ID NO: 353957 - DNA, 7273 bp, Homo sapiens
  misc_feature (716)..(716): n is a, c, g, or t
  misc_feature (1174)..(1174): n is a, c, g, or t
  misc_feature (1596)..(1596): n is a, c, g, or t
  misc_feature (4571)..(4571): n is a, c, g, or t
ttgttggcggcctgctgaggttgaagcacaagcggctggaagcagaactggctgcgcatgagccggctattcagggtgtcctggacactggcaagaagctgtccgatgacaacaccatcgggaaagaggagaggattcaggacctggatgtgcagcttaaggaggctcgacaggagaattcagagttgaaaggcactgcaaaaaaacttggggagaagctggctgttgccaaagacagaatgatgctgcaggagtgtcgtgggacacagcagacagatgccatgaagactgagttagtttcagagaacaaagtcctgcgggaagagaatgacttggaagccggcaatcttcatcctcagcaggatcaaagctgtctcaaggagtgcccttgcatgaaaggaggcacagatatgcagaccaagaaagaggcaagtgctgagacagaatatatgaagcaacaatatgaagaagaccttcgtaaaatcaaacatcagacagaagaggagaagaaacatctcaaagaccagctagtgaagcgactagaagacttggtaaagaagcacaccgtggaaatcaaatccgttcgctcgtccgtggaggctgaaagaaagaaactgcagagggaagtagaagcacagttggaggaagtgaggaagaaatcagaaaaggagataaagcagctggaagaagagaaagcagccctcaatgtgaagctncagaattctctgcttgaggttttaaggctggaagaatttatccaacaaaataagacacgccccacaggagctgaggaaagtccccaggaattaggccgccagcactgcagcattctggagacccaggatccatgcttgaagctggatgaaacttcgccgagaggagaggagtatcaagataagttagcagctgaagaaggaaccagcagtgatgaagaagaaaggaccaaagtgcttctcaaggagggaagtgacccacaacctccactgggctctttgttgaaggagaaaacatccaaaatccagcgtctagaggaggactggcaaagccagaaggccaaattgcaagcccaggtctcacagatgcagcaggctctggagcagtgcaccagcaactacagggaggacctgcaggcactcaagcagctctcggacctggagagggagaagctgcagcntgagctccaggagaccactcagcagaaccacgccatgaaagcccagctcgaggcttcccaccagagagccctgcgcatgctggagaaggccagacatcaggaactcaaggccacagaggaacgcttgaagaaggaatccagccacagcctccagatccaacaccagacacaccgactggagctccaggccttggaggaaaaggccaggcaagagctgcaggaggagcgtgagaggatgcaggcacagcaggccctgctgctagagtcgctcagacaggagctgtcggagcagcaagctgcctgttctgggcaccagaaggacttggaggcactgcaggccgagctgagggctctgggcagacagcaagccagcagccagtgtccaggagacagcaaggatcacataatcgccacagaggagnggggcggcccgggccaggccggctccccaccgggcgctgctgggcagggttccggcgagggatgcgggctctgggaggagaacgcgcagctccaggacgcggtgcggcggctgcgcgcggaggtggagcagcatcagcaggaggcgcagaagctccgagaccagcgcaggttcctggaggagactcagcaagcccagcgggccagggaggtggagacactgcgccaggaacaccggaaggagatgcaggccatggtggcagatttcagtagtgcccaggcccagctccaggcccggctggctgccctggaagccgaactgaaagattccggagagaagccagggaagggagcgtccaggcccgaggaccttcagctcattggccgcctgcagacccgcctgaaggagagagaggacatcatcaagcagctcacggaagagagaagatttcactacgcagcattccccagtgccatgtcccaccggaatcggtctttctctttcaatcctcacccgggatatttgaccccttccatgaagaaaaagaaggtggaggacgtgcccagccgcgtggtcagcgtgccgaacctcgcctcctatgcaaagaactttctgagtggcgatctgagttccaggattaatgcccctccaataactacatcacccagcttggacccaagccccagctgtggccggacctacaaacccaaccagtctacagatgcaaaaactgccacaaggtttgggggatgttggggacaggggcccttattctatttccctgtagataagaggggaagtaggattctttctagcacctggtaccaaattccagaaggccttttttcatggatgattagacaagggacactgaatcacttacctgaaaacttcagcatgggttatacaaaaggtggactccatctggcctggaggtctgaattcaaattacagtcttcctcattcttagctctgtggccttggacaggtcacttgacctctccaggtctccatataccttgcctttaaaattaagataatacagcacctatctcatcagactgacgtgagactaaaggaattaatccataggatgtgcttagcacaggacttggcacaaaaatcttcaatatagtttcagtattattactaacattattcctcaagatttactctatcaccttggaattctaaagtctcttaatcgggccgggcttggtggctcacgcctgtaatcccagcactttgggagatggaggtgggtggatcacctaaggtcaggagttcgagaccagcctgggcaacatggtgaaacccatctctacaaaaaatacaaaaattagccaggtgtggtggtatgcgcctgtaattccagctccccgggaggctgaggcacaatgatcgcttgaacgcaggaggctggaggttgcagtgagccgagatcatgccactgcactccagcctgggtgacagagggagactctgtcacaaaaaataaaaacaaagtctcttgatctgtaggtttggttaatcctgcattattagagctacaaccactaagtctcaaaggaacaatggagaaccaaacaatggtgaaccttctgttttcaaaatgaggattaggtactccctccccagccccatcctttacaatttgtttcccactactaatgttggccagtcccatttgggtgtttttgaagagtaaacaagcagttatctttccctgaaaagatggtgggtattaagctgcttcttgcatagttttcaaaaccatataaaaaaacctttttttgcttttaggaccccagatggtgaaacggcccaagccaaagaagcccagcagaaacagggctctccgcaccaggaatggttcaccaagtacttttctttctaagctaacctttgggatacatcacagaggatacttgaaaaacatttattttaaatcatccgattgaaggaatgaactaacaccaaccaaccaaataatatgcttatgatttatatatgatagctaaaacaaattttggcgttaacacttcatactgttctgccaggcacagcagctcacgcctgtaatcccatcactttgggaggctgaggcagatggactgcttgagtccaggaatttgagaccagcctggccaatatggtgaaaccccatctctacaaaatatacaaaaattagccaggcatggtggcgtgtgcctgtggtcccaggtacttgggggactgaggcgggaggatcacttgaacctaggaggcagaggttgcagtgagccaagttcgaactcctgcattccaaccagcctgggtgacagagggagaccctgtctccaaaaaaaaaaaaaaaaattgacattaaaccagtgttattaaaagtcatctataggaaaatgttattagcgttactaatgacccataccttgtatttctagtgtccataacatcatactccattttgtggaacatcagactttgtgatttccatgatctatttcaaaagtggttgtacttgtccttaggatgctagtcaactccactggaaagctgtttctatgtaaaatgatgcaattccaaaatgcacatctaacctcaataggaagacaaataacagttaaacaggaaagccaactaaaaacaaaccaaacctaccagaaatggatggtagcatgcttggactgaatactttcacttccttggtctaagacaagcagcagattatagatgggataacacccacctctaaaagggctttgcaaggattaagcaagataacataaattaacatgaattggaattaagtaccacaaggtttttctgtaaataaccaatcctagcccagttataggtctcagtgtaatgaccatagtgccaacatgatcacttgtgaaggtctctagattatctgttctttgaagtcaaagatcttctagactgggcacatggctcatgcctgtaatcccaacactntgggaggctgagatgggaggagagcttgaggccaggaatttgagaccagcctgggcaacacagcgagacctccatctctacaaaaaaataattagcccaaagaaaacccagctacttggaagtctgaggtaggacagcatgagcccaagagttcgagaccagcctgggcaagatagtgagatcccatctctacagattaaaaaaatatatatatatatcccctgaacctctggtctttgggtttgagccatttgcctcatggtgtgttgcttcttcactgcatgaattcccagtgggttaaaggaaccgcaatggctgttcacggtgctgaccttgctctcagtccacactgatttgtcttaccttctgacagagcaatgtgatttgacaagactcaataacaacttttagggggcaaaatattttttcagtctttggtgctggcccagaaggtggcccacaaaccaatgttaattctatgcattgtcaaatctttgctctttgaataaaactttgaataactgggcaataaaaatggttgacttgtattgattttccacagaaaggtaaaattagatgaagacagcttagaaatagaaagttcagttcacattaacctcaatcacaccatcttaaaaaaaaaaagctgattacatataactgtcaaacttacgtattaaaggtaaatttactgcctaatcaaaacgaggctccaatgcatttttaaatgcaaacaaacacttgtcaccatacattaacacaccatactgtttttcactaccaaatattttttgtgagtttcccgcttagagtgtcttagttcgttcaggctgctctaacaaaatatcttacttatactggataatttataaacaatagaaatatgtcactcacagtcctagaggctaagtccaagatcaaggcaccagcagatatggagtctggggagggcccattcttcagaaatgggtgcctgctacgtgtccttacatggtggaagaggcaagagcgcctccctgagcctcttttgtaagggtacttatcctactcatgagggtgaagccctcatgactccattgcttcccaaaagccccacctcttaatactattacattgacattaggttccaacatatgaattttggaagggacatcaacattcaggacatagcagtgaaccctgtaggactgctctttattttgtgctttcaaaaagactacatacaggtggttctatttttgtgtgttgaaacactttcccaggctgcactttgcatttctgtccttaaactcagcatgatccctgggcaaggagaaaattttactagttgagatcgtacataggttttgactcctttcttgctgcaggtgactgaaaagatctttcagtcttaaatttctaaattctaccctgcaatgattatatctttgttaacaaaatctttgcatgcttccataattttttattgaggccatatgccttgggtattgaagtaaggcatttaaggacacaaacttaagctttttgtttgttattaccaaactgccattcagaaagtttctaacaatttacacccttaccagcagtaaatgaacctactgtgccctaacactattgacaaagaaatacaatttgatagataaaacattctattttagtttgcataatgattccatcaatctctcaacagcagagcggtctagagatgacagtgatggcgtagaggtgacagtgaagatgaagagaaattatccaattcgggattaagttaagagagagaaaaaaacagtatttgatggtaaatctcttcaggctgtattatgacaggggtggaagagttaatatgttcctgcagcaaaactgaaaggaatactatctgttccacatgaaagcaaactgttttgtaattggggtaggtaaaaatggattcacccagtcaatggctgcacaccacatacctgagcccttaactgctctaacactgatgtaatatccaacccaacatttgtgattgaggctacttggttaatttttctccaggatccatctggattctgcagatgaggctggcaaattaaatggaactatgatagggaccatcttactgtatctgtcagatttccaagggtagcactgatctctaccgtcacctcacctccacccctaggatacagtactgtgtgtttgtttttgagacggagtcttgctctgtcacccaagctggggtgcagtggcgccatctcagctcactgcaacctcggcctcccgggttcaagcgattctcctgcctcagcctcccgagtagctgggactacaggcacccgccaccatgctaattaatgtatttttagtagagacagggtttcaccatgttggccaggctggtcatgaactcctgacctcaaagtgatcctccaagataacgacagaggccccgggcactcacagtcacctcatcagttcctcactatccctctgcagggaacagacactctactgtccttgtgtgcagtactcctcttatcttccacagtttgactcctcccattcccctccacagggatattttcccagggtaccactggtggaatcctcagcaactgggccaccccctcgtgtgagtgagtgtccatacctcacacgctgctccagatgggttttgctaccagttgggcagtgagtgagccagtccccaagcctca

SEQ ID NO: 353958 - DNA, 629 bp, Homo sapiens
agtcaggtctcccaccctcatgcccactttcatgccttcttgttcccactttttcccacaggccacagaggaacgcttgaagaaggaatccagccacagcctccagatccaacaccagacacaccgactggagctccaggccttggaggaaaaggccaggcaagagctgcaggaggagcgtgagaggatgcaggcacagcaggccctgctgctaggtatacacccaatagtgtactgaggagggcctggccaactgcagggtctgcatgtagaaaccagagacaagctgagggccagggctccagggttctcgggctcacaggccacggctccgggaatctcaggctcacaggccagggctccagggctctcagattcacaggccagggctccaggctctcaggcacacaggccagggctccaggggtctcgggctcacaggccagggctccaggaatctcaggcacacatgtcagggacaatcctggctctgccaccaactagctgtgaaacctgggatggcttactgtgagtctcattttccttttgtataaaattgaattacagttgtccctacctcataggctcactgtgtggattaaatgagatattaaacataaaggccgggt

SEQ ID NO: 353959 - DNA, 1221 bp, Homo sapiens
gtttcccgctctgcgaggtggggtcaggccaagacgaggaggagcccgcgcaagcgcactcaccaccacggcggtgaccggctggcccgggatgtaggacatctcgaccctgctctggtcgcccagcgccgctccgagaagccggcagcagagtacccgcggtcgcccctcgctgcttaacaaaggccgccccgctcggcccgccccctcatgaatagttaacaaacctccagccaatcactggccggagcgccactccgctttcggaagtccctgcgcgtgcgcagaaaagcgggcagagggcggagcgtgtccggggcgcccacggcgcaggcgcggagggcggggcgggatctgggcgcgtgcgcagcccgagacctcccggcagtcttccgagcaagatggcgccgcgggcatttcttccactgcccgtctgagggaacgctaagtagtgtgtccggcgccgtgttccagctccgcgttgttccgcgagaaagcgagaggccgagcccgggctggtgcgatggccgcggtggtggccaagcgggaagggccgccgttcatcagcgaggcggccgtgcggggcaacgccgccgtcctggattattgccggacctcggtgtcagcgctgtcgggggccacggccggcatcctcggcctcaccggcctctacggcttcatcttctacctgctcgcctccgtcctgctctccctgctcctcattctcaaggcgggaaggaggtggaacaaatatttcaaatcacggagacctctctttacaggaggcctcatcgggggcctcttcacctacgtcctgttctggacgttcctctacggcatggtgcacgtctactgaaatgggggcccgggggacttttttaaaaaaccagatcgggaggactgtggccagcaattaacaccatgtagacttccttagttcttaagtggttgaattcgctgcttgttctgtaacgttataaataatttatatctgaagacggagagcctgtaatattcttcagattaaatgaagcgtgagacacaaaaaacaccaccccacacacccccccgcggcgccatttccgggcgcggaacaaacgggttctcgacaacgggcccctggccacagccggctcctgaccccgcttctctcgcccaccgggaactccccggtccccacaacggccccaaaatcccaaaacccggaccgtcccccccccg

SEQ ID NO: 353960 - DNA, 1420 bp, Homo sapiens
gtttcccgctctgcgaggtggggtcaggccaagacgaggaggagcccgcgcaagcgcactcaccaccacggcggtgaccggctggcccgggatgtaggacatctcgaccctgctctggtcgcccagcgccgctccgagaagccggcagcagagtacccgcggtcgcccctcgctgcttaacaaaggccgccccgctcggcccgccccctcatgaatagttaacaaacctccagccaatcactggccggagcgccactccgctttcggaagtccctgcgcgtgcgcagaaaagcgggcagagggcggagcgtgtccggggcgcccacggcgcaggcgcggagggcggggcgggatctgggcgcgtgcgcagcccgagacctcccggcagtcttccgagcaagatggcgccgcgggcatttcttccactgcccgtctgagggaacgctaagtagtgtgtccggcgccgtgttccaggtaactgggccaccgtggccggggaacgcagacgcgccaccacctcccggccggcccggaccctcaatctcctcggcgtctttggaagatccgaggcccaggactggtgccaggtctcggaagctccagggggagggggcggcgtgaacccaactcaccgagctccgggcgccacttgtaacttggttttctccgcagcctccgcgttgttccgcgagaaagcgagaggccgagcccgggctggtgcgatggccgcggtggtggccaagcgggaagggccgccgttcatcagcgaggcggccgtgcggggcaacgccgccgtcctggattattgccggacctcggtgtcagcgctgtcgggggccacggccggcatcctcggcctcaccggcctctacggcttcatcttctacctgctcgcctccgtcctgctctccctgctcctcattctcaaggcgggaaggaggtggaacaaatatttcaaatcacggagacctctctttacaggaggcctcatcgggggcctcttcacctacgtcctgttctggacgttcctctacggcatggtgcacgtctactgaaatgggggcccgggggacttttttaaaaaaccagatcgggaggactgtggccagcaattaacaccatgtagacttccttagttcttaagtggttgaattcgctgcttgttctgtaacgttataaataatttatatctgaagacggagagcctgtaatattcttcagattaaatgaagcgtgagacacaaaaaacaccaccccacacacccccccgcggcgccatttccgggcgcggaacaaacgggttctcgacaacgggcccctggccacagccggctcctgaccccgcttctctcgcccaccgggaactccccggtccccacaacggccccaaaatcccaaaacccggaccgtcccccccccg

SEQ ID NO: 353961 - DNA, 1350 bp, Homo sapiens
gtttcccgctctgcgaggtggggtcaggccaagacgaggaggagcccgcgcaagcgcactcaccaccacggcggtgaccggctggcccgggatgtaggacatctcgaccctgctctggtcgcccagcgccgctccgagaagccggcagcagagtacccgcggtcgcccctcgctgcttaacaaaggccgccccgctcggcccgccccctcatgaatagttaacaaacctccagccaatcactggccggagcgccactccgctttcggaagtccctgcgcgtgcgcagaaaagcgggcagagggcggagcgtgtccggggcgcccacggcgcaggcgcggagggcggggcgggatctgggcgcgtgcgcagcccgagacctcccggcagtcttccgagcaagatggcgccgcgggcatttcttccactgcccgtctgagggaacgctaagtagtgtgtccggcgccgtgttccaggtaactgggccaccgtggccggggaacgcagacgcgccaccacctcccggccggcccggaccctcaatctcctcggcgtctttggaagatccgaggcccaggactggtgccagctccgcgttgttccgcgagaaagcgagaggccgagcccgggctggtgcgatggccgcggtggtggccaagcgggaagggccgccgttcatcagcgaggcggccgtgcggggcaacgccgccgtcctggattattgccggacctcggtgtcagcgctgtcgggggccacggccggcatcctcggcctcaccggcctctacggcttcatcttctacctgctcgcctccgtcctgctctccctgctcctcattctcaaggcgggaaggaggtggaacaaatatttcaaatcacggagacctctctttacaggaggcctcatcgggggcctcttcacctacgtcctgttctggacgttcctctacggcatggtgcacgtctactgaaatgggggcccgggggacttttttaaaaaaccagatcgggaggactgtggccagcaattaacaccatgtagacttccttagttcttaagtggttgaattcgctgcttgttctgtaacgttataaataatttatatctgaagacggagagcctgtaatattcttcagataatgagggggagaaaaaaaacaaaggggggggcaaatatccgagggcaaggtaggtcccgcttttggccagggctaaggggggttaagacaggcgggcgggttaaagggaggggaagggatggttgggggccatcgggggatggaaccacagaacccgatctaagttggactctgaagtgaaaaaacaaaaacaagaagttgacgccgaaatt

SEQ ID NO: 353962 - DNA, 1108 bp, Homo sapiens
gtttcccgctctgcgaggtggggtcaggccaagacgaggaggagcccgcgcaagcgcactcaccaccacggcggtgaccggctggcccgggatgtaggacatctcgaccctgctctggtcgcccagcgccgctccgagaagccggcagcagagtacccgcggtcgcccctcgctgcttaacaaaggccgccccgctcggcccgccccctcatgaatagttaacaaacctccagccaatcactggccggagcgccactccgctttcggaagtccctgcgcgtgcgcagaaaagcgggcagagggcggagcgtgtccggggcgcccacggcgcaggcgcggagggcggggcgggatctgggcgcgtgcgcagcccgagacctcccggcagtcttccgagcaagatggcgccgcgggcatttcttccactgcccgtctgagggaacgctaagtagtgtgtccggcgccgtgttccaggtaactgggccaccgtggccggggaacgcagacgcgccaccacctcccggccggcccggaccctcaatctcctcggcgtctttggaagatccgaggcccaggactggtgccagctccgcgttgttccgcgagaaagcgagaggccgagcccgggctggtgcgatggccgcggtggtggccaagcgggaagggccgccgttcatcagcgaggcggccgtgcggggcaacgccgccgtcctggattattgccggacctcggtgtcagcgctgtcgggggccacggccggcatcctcggcctcaccggcctctacggcttcatcttctacctgctcgcctccgtcctgctctccctgctcctcattctcaaggcgggaaggaggtggaacaaatatttcaaatcacggagacctctctttacaggaggcctcatcgggggcctcttcacctacgtcctgttctggacgttcctctacggcatggtgcacgtctactgaaatgggggcccgggggacttttttaaaaaaccagatcgggaggactgtggccagcaattaacaccatgtagacttccttagttcttaagtggttgaattcgctgcttgttctgtaacgttataaataatttatatctga

SEQ ID NO: 353963 - DNA, 825 bp, Homo sapiens
gtttcccgctctgcgaggtggggtcaggccaagacgaggaggagcccgcgcaagcgcactcaccaccacggcggtgaccggctggcccgggatgtaggacatctcgaccctgctctggtcgcccagcgccgctccgagaagccggcagcagagtacccgcggtcgcccctcgctgcttaacaaaggccgccccgctcggcccgccccctcatgaatagttaacaaacctccagccaatcactggccggagcgccactccgctttcggaagtccctgcgcgtgcgcagaaaagcgggcagagggcggagcgtgtccggggcgcccacggcgcaggcgcggagggcggggcgggatctgggcgcgtgcgcagcccgagacctcccggcagtcttccgagcaagatggcgccgcgggcatttcttccactgcccgtctgagggaacgctaagtagtgtgtccggcgccgtgttccagctccgcgttgttccgcgagaaagcgagaggccgagcccgggctggtgcgatggccgcggtggtggccaagcgggaagggccgccgttcatcagcgaggcggccgtgcggggcaacgccgccgtcctggattattgccggacctcggtgtcagcgctgtcgggggccacggccggcatcctcggcctcaccggcctctacggcttcatcttctacctgctcgcctccgtcctgctctccctgctcctcattctcaaggcgggaaggaggtggaacaaatatttcaaatcacggagagcctgtaatatttgttccaccccctgctcctcattctcaaggcgggaaggaggtgg

SEQ ID NO: 353964 - DNA, 1334 bp, Homo sapiens
gtttcccgctctgcgaggtggggtcaggccaagacgaggaggagcccgcgcaagcgcactcaccaccacggcggtgaccggctggcccgggatgtaggacatctcgaccctgctctggtcgcccagcgccgctccgagaagccggcagcagagtacccgcggtcgcccctcgctgcttaacaaaggccgccccgctcggcccgccccctcatgaatagttaacaaacctccagccaatcactggccggagcgccactccgctttcggaagtccctgcgcgtgcgcagaaaagcgggcagagggcggagcgtgtccggggcgcccacggcgcaggcgcggagggcggggcgggatctgggcgcgtgcgcagcccgagacctcccggcagtcttccgagcaagatggcgccgcgggcatttcttccactgcccgtctgagggaacgctaagtagtgtgtccggcgccgtgttccaggtaactgggccaccgtggccggggaacgcagacgcgccaccacctcccggccggcccggaccctcaatctcctcggcgtctttggaagatccgaggcccaggactggtgccagctccgcgttgttccgcgagaaagcgagaggccgagcccgggctggtgcgatggccgcggtggtggccaagcgggaagggccgccgttcatcagcgaggcggccgtgcggggcaacgccgccgtcctggattattgccggacctcggtgtcagcgctgtcgggggccacggccggcatcctcggcctcaccggcctctacggcttcatcttctacctgctcgcctccgtcctgctctccctgctcctcattctcaaggcgggaaggaggtggaacaaatatttcaaatcacggagacctctctttacaggaggcctcatcgggggcctcttcacctacgtcctgttctggacgttcctctacggcatggtgcacgtctactgaaatgggggcccgggggacttttttaaaaaaccagatcgggaggactgtggccagcaattaacaccatgtagacttccttagttcttaagtggttgaattcgctgcttgttctgtaacgttataaataatttatatctgaagacggagagcctgtaatattcttcagattaaatgaagcgtgagacacaaaaaacaccaccccacacacccccccgcggcgccatttccgggcgcggaacaaacgggttctcgacaacgggcccctggccacagccggctcctgaccccgcttctctcgcccaccgggaactccccggtccccacaacggccccaaaatcccaaaacccggaccgtcccccccccg

SEQ ID NO: 353965 - DNA, 995 bp, Homo sapiens
gtttcccgctctgcgaggtggggtcaggccaagacgaggaggagcccgcgcaagcgcactcaccaccacggcggtgaccggctggcccgggatgtaggacatctcgaccctgctctggtcgcccagcgccgctccgagaagccggcagcagagtacccgcggtcgcccctcgctgcttaacaaaggccgccccgctcggcccgccccctcatgaatagttaacaaacctccagccaatcactggccggagcgccactccgctttcggaagtccctgcgcgtgcgcagaaaagcgggcagagggcggagcgtgtccggggcgcccacggcgcaggcgcggagggcggggcgggatctgggcgcgtgcgcagcccgagacctcccggcagtcttccgagcaagatggcgccgcgggcatttcttccactgcccgtctgagggaacgctaagtagtgtgtccggcgccgtgttccagctccgcgttgttccgcgagaaagcgagaggccgagcccgggctggtgcgatggccgcggtggtggccaagcgggaagggccgccgttcatcagcgaggcggccgtgcggggcaacgccgccgtcctggattattgccggacctcggtgtcagcgctgtcgggggccacggccggcatcctcggcctcaccggcctctacggcttcatcttctacctgctcgcctccgtcctgctctccctgctcctcattctcaaggcgggaaggaggtggaacaaatatttcaaatcacggagacctctctttacaggaggcctcatcgggggcctcttcacctacgtcctgttctggacgttcctctacggcatggtgcacgtctactgaaatgggggcccgggggacttttttaaaaaaccagatcgggaggactgtggccagcaattaacaccatgtagacttccttagttcttaagtggttgaattcgctgcttgttctgtaacgttataaataatttatatctga

SEQ ID NO: 353966 - DNA, 932 bp, Homo sapiens
gtttcccgctctgcgaggtggggtcaggccaagacgaggaggagcccgcgcaagcgcactcaccaccacggcggtgaccggctggcccgggatgtaggacatctcgaccctgctctggtcgcccagcgccgctccgagaagccggcagcagagtacccgcggtcgcccctcgctgcttaacaaaggccgccccgctcggcccgccccctcatgaatagttaacaaacctccagccaatcactggccggagcgccactccgctttcggaagtccctgcgcgtgcgcagaaaagcgggcagagggcggagcgtgtccggggcgcccacggcgcaggcgcggagggcggggcgggatctgggcgcgtgcgcagcccgagacctcccggcagtcttccgagcaagatggcgccgcgggcatttcttccactgcccgtctgagggaacgctaagtagtgtgtccggcgccgtgttccagctccgcgttgttccgcgagaaagcgagaggccgagcccgggctggtgcgatggccgcggtggtggccaagcgggaagggccgccgttcatcagcgaggcggccgtgcggggcaacgccgccgtcctggattattgccggacctcggtgtcagcgctgtcgggggccacggccggcatcctcggcctcaccggcctctacggcttcatcttctacctgctcgcctccgtcctgctctccctgctcctcattctcaaggcgggaaggaggtggaacaaatatttcaaatcacggagacctctctttacaggaggcctcatcgggggcctcttcacctacgtcctgttctggacgttcctctacggcatggtgcacgtctactgaaatggggggccccggtggggagaaactttattttttttaaaaaaaaaacccagattcgggggaggacttgtggcca

SEQ ID NO: 353967 - DNA, 5517 bp, Homo sapiens
  misc_feature (2)..(2): n is a, c, g, or t
  misc_feature (689)..(689): n is a, c, g, or t
  misc_feature (5517)..(5517): n is a, c, g, or t
cnggcagggcgagagccgatcagcggatcaccgagtctcgccaggtggtggagctggcagtgaaggagcacaaggctgagattctcgctctgcagcaggctctcaaagagcagaagctgaaggccgagagcctctctgacaagctcaatgacctggagaagaagcatgctatgcttgaaatgaatgcccgaagcttacagcagaagctggagactgaacgagagctcaaacagaggcttctggaagagcaagccaaattacagcagcagatggacctgcagaaaaatcacattttccgtctgactcaaggactgcaagaagctctagatcgggctgatctactgaagacagaaagaagtgacttggagtatcagctggaaaacattcaggttctctattctcatgaaaaggtgaaaatggaaggcactatttctcaacaaaccaaactcattgattttctgcaagccaaaatggaccaacctgctaaaaagaaaaaggttcctctgcagtacaatgagctgaagctggccctggagaaggagaaagctcgctgtgcagagctagaggaagcccttcagaagacccgcatcgagctccggtccgcccgggaggaagctgcccaccgcaaagcaacggaccacccacacccatccacgccagccaccgcgaggcagcagatcgccatgtcngccatcgtgcggtcgccagagcaccagcccagtgccatgagcctgctggccccgccatccagccgcagaaaggagtcttcaactccagaggaatttagtcggcgtcttaaggaacgcatgcaccacaatattcctcaccgattcaacgtaggactgaacatgcgagccacaaagtgtgctgtgtgtctggataccgtgcactttggacgccaggcatccaaatgtctcgaatgtcaggtgatgtgtcaccccaagtgctccacgtgcttgccagccacctgcggcttgcctgctgaatatgccacacacttcaccgaggccttctgccgtgacaaaatgaactccccaggtctccagaccaaggagcccagcagcagcttgcacctggaagggtggatgaaggtgcccaggaataacaaacgaggacagcaaggctgggacaggaagtacattgtcctggagggatcaaaagtcctcatttatgacaatgaagccagagaagctggacagaggccggtggaagaatttgagctgtgccttcccgacggggatgtatctattcatggtgccgttggtgcttccgaactcgcaaatacagccaaagcagatgtcccatacatactgaagatggaatctcacccgcacaccacctgctggcccgggagaaccctctacttgctagctcccagcttccctgacaaacagcgctgggtcaccgccttagaatcagttgtcgcaggtgggagagtttctagggaaaaagcagaagctgatgctaaactgcttggaaactccctgctgaaactggaaggtgatgaccgtctagacatgaactgcacgctgcccttcagtgaccaggtggtgttggtgggcaccgaggaagggctctacgccctgaatgtcttgaaaaactccctaacccatgtcccaggaattggagcagtcttccaaatttatattatcaaggacctggagaagctactcatgatagcaggagaagagcgggcactgtgtcttgtggacgtgaagaaagtgaaacagtccctggcccagtcccacctgcctgcccagcccgacatctcacccaacatttttgaagctgtcaagggctgccacttgtttggggcaggcaagattgagaacgggctctgcatctgtgcagccatgcccagcaaagtcgtcattctccgctacaacgaaaacctcagcaaatactgcatccggaaagagatagagacctcagagccctgcagctgtatccacttcaccaattacagtatcctcattggaaccaataaattctacgaaatcgacatgaagcagtacacgctcgaggaattcctggataagaatgaccattccttggcacctgctgtgtttgccgcctcttccaacagcttccctgtctcaatcgtgcaggtgaacagcgcagggcagcgagaggagtacttgctgtgtttccacgaatttggagtgttcgtggattcttacggaagacgtagccgcacagacgatctcaagtggagtcgcttacctttggcctttgcctacagagaaccctatctgtttgtgacccacttcaactcactcgaagtaattgagatccaggcacgctcctcagcagggacccctgcccgagcgtacctggacatcccgaacccgcgctacctgggccctgccatttcctcaggagcgatttacttggcgtcctcataccaggataaattaagggtcatttgctgcaagggaaacctcgtgaaggagtccggcactgaacaccaccggggcccgtccacctcccgcagcagccccaacaagcgaggcccacccacgtacaacgagcacatcaccaagcgcgtggcctccagcccagcgccgcccgaaggccccagccacccgcgagagccaagcacaccccaccgctaccgcgaggggcggaccgagctgcgcagggacaagtctcctggccgccccctggagcgagagaagtcccccggccggatgctcagcacgcggagagagcggtcccccgggaggctgtttgaagacagcagcaggggccggctgcctgcgggagccgtgaggaccccgctgtcccaggtgaacaaggtctgggaccagtcttcagtataaatctcagccagaaaaaccaactcctcatcttgatctgcaggaaaacaccaaacacactatggaactctgctgatggggacccaagcgcccacgtgctcagccaccctctggctcagcggggcccagacccacctcggcacggacacccctgtctccaggaggggcaggtggctgaggctcttcggagctgtcagcgcccggtgcctgccctgggcacctccctgcagtcatctctttgcactttgttactctttcaaagcattcacaaacttttgtacctagctctagcctgtaccagttagttcatcaaaggaaaccaaccgggatgctaactacaacatggttagaatcctaattagctactttaagatcctaggattggttggtttttcttttttttttctcttggtttctttccttttttttttttttttttaagacaacagaattcttaatagatttgaatagcgacgtatttccgggttgtagtcatttttagctcgaccacatcatcaggtctttgccaccgaggcatagtgtagaacagtcccggtcagttggccaacctcccgcagccaagtaggttcatccttgttcctgttcattctcatagatggccctgctttccccagggtgacatcgtagccaaatgtttactgttttcattgccttttatggccttgacgacttcccctcccaccagctgagaatgtatggaggtcatcggggcctcagctcggaggcagtgacttggggccaagggacctcgagacgctttccttccccaccccccagcgtcatctccccagcctgctgttcccgctttccatatagctttggccaggaaagcatgcaatagacttgctcggagcccagcactcctgggtctcggggtcggggaggggacgggggcacccacttccttgtctgtgacggcgtgttgttccccactctgggatggggaagaggcccgtcgggagttctgcatggcagttcactgcatgtgctgcccccttgggttgctctgccaatgtattaataccatcccatagctcctgccaaatcgagaccctctgacgacttgccgactaactggccaccacaagctgcagtctgtagcactgaacaaacaaaaaacaaaacgctcaagccttacgaccagagaaggatttcagcaaaccaccacctcccactcagtgtcccctccaaacttcacacttccctgcctgcagaggatgactctgttcacacccaatccagcgcggttctaccccacgaaactgtgactttccaaatgagcctttccctagggctagacctaagaccaggaagtttgagaaagcagccgcagctcaactcttccagctccgccagggttgggaagtccttaggtgcagtgcggctcccactgggtctgcggaccctcctattagagtacgaaattcctggcaactggtacagaaccaacctagaggctttgcagttggcaagctaactcgcggccttatttctgcctttaatctcccacaaggcatctgttgctttgggtcctccacgactcttaggcccgcctcaacaacccaggcacctcctaggtaggctcaaaggtagacccgtttccaccgcagcaggtgaacatgaccgtgttttcaactgtgtccacagttcagatccctttccagattgcaacctggcctgcatcccagctccttcctgctcgtgtcttaacctaagtgctttcttgtttgaaacgcctacaaacctccatgtggtagctcctttggcaaatgtcctgctgtggcgttttatgtgttgcttggagtctgtggggtcgtactccctcccctcccgtccccagggcagatttgattgaatgtttgctgaagttttgtctcttggtccacagtatttggaaaggtcactgaaaatgggtctttcagtcttggcatttcatttaggatctccatgagaaatgggcttcttgagccctgaaaatgtatattgtgtgtctcatctgtgaactgctttctgctatatagaactagctcaaaagactgtacatatttacaagaaactttatattcgtaaaaaaaaaaagaggaaattgaattggtttctacttttttattgtaaaaggtgcatttttcaacacttacttttggtttcaatggtggtagttgtggacagccatcttcactggagggtggggagctccgtgtgaccaccaagatgccagcaggatataccgtaacacgaaattgctgtcaaaagcttattagcatcaatcaagattctaggtctccaaaagtacaggctttttcttcattaccttttttattcagaacgaggaagagaacacaaggaatgattcaagatccaccttgagaggaatgaactttgttgttgaacaattagtgaaataaagcaatgatctaaactaaaaaaaaaaaaaaacaaacaaaaaaacgtggtggggcgcctgcgacctggaaaaagttttccaaacccttcgtgggggcgcggcccagaggtaggtaaccatggccaaaactggtccaaagaacaccgcgcatagatcatgggtcgcgtcctcccataaaaaagcgcggcgaacggggggtcgaacaactcgagggggtctcgggcacacggtcttcaagggtccacgagtcaacaccccccgggacgcagaacn

SEQ ID NO: 353968 - DNA, 5697 bp, Homo sapiens
  misc_feature (869)..(869): n is a, c, g, or t
  misc_feature (5697)..(5697): n is a, c, g, or t
gcggggcggaacagatcgcagacctgggggttcgcagagccgccagtggggagatgttgaagttcaaatatggagcgcggaatcctttggatgctggtgctgctgaacccattgccagccgggcctccaggctgaatctgttcttccaggggaaaccaccctttatgactcaacagcagatgtctcctctttcccgagaagggatattagatgccctctttgttctctttgaagaatgcagtcagcctgctctgatgaagattaagcacgtgagcaactttgtccggaagtattccgacaccatagctgagttacaggagctccagccttcggcaaaggacttcgaagtcagaagtcttgtaggttgtggtcactttgctgaagtgcaggtggtaagagagaaagcaaccggggacatctatgctatgaaagtgatgaagaagaaggctttattggcccaggagcaggtttcattttttgaggaagagcggaacatattatctcgaagcacaagcccgtggatcccccaattacagtatgcctttcaggacaaaaatcacctttatctggttctctattctcatgaaaaggtgaaaatggaaggcactatttctcaacaaaccaaactcattgattttctgcaagccaaaatggaccaacctgctaaaaagaaaaaggttcctctgcagtacaatgagctgaagctggccctggagaaggagaaagctcgctgtgcagagctagaggaagcccttcagaagacccgcatcgagctccggtccgcccgggaggaagctgcccaccgcaaagcaacggaccacccacacccatccacgccagccaccgcgaggcagcagatcgccatgtcngccatcgtgcggtcgccagagcaccagcccagtgccatgagcctgctggccccgccatccagccgcagaaaggagtcttcaactccagaggaatttagtcggcgtcttaaggaacgcatgcaccacaatattcctcaccgattcaacgtaggactgaacatgcgagccacaaagtgtgctgtgtgtctggataccgtgcactttggacgccaggcatccaaatgtctcgaatgtcaggtgatgtgtcaccccaagtgctccacgtgcttgccagccacctgcggcttgcctgctgaatatgccacacacttcaccgaggccttctgccgtgacaaaatgaactccccaggtctccagaccaaggagcccagcagcagcttgcacctggaagggtggatgaaggtgcccaggaataacaaacgaggacagcaaggctgggacaggaagtacattgtcctggagggatcaaaagtcctcatttatgacaatgaagccagagaagctggacagaggccggtggaagaatttgagctgtgccttcccgacggggatgtatctattcatggtgccgttggtgcttccgaactcgcaaatacagccaaagcagatgtcccatacatactgaagatggaatctcacccgcacaccacctgctggcccgggagaaccctctacttgctagctcccagcttccctgacaaacagcgctgggtcaccgccttagaatcagttgtcgcaggtgggagagtttctagggaaaaagcagaagctgatgctaaactgcttggaaactccctgctgaaactggaaggtgatgaccgtctagacatgaactgcacgctgcccttcagtgaccaggtggtgttggtgggcaccgaggaagggctctacgccctgaatgtcttgaaaaactccctaacccatgtcccaggaattggagcagtcttccaaatttatattatcaaggacctggagaagctactcatgatagcaggagaagagcgggcactgtgtcttgtggacgtgaagaaagtgaaacagtccctggcccagtcccacctgcctgcccagcccgacatctcacccaacatttttgaagctgtcaagggctgccacttgtttggggcaggcaagattgagaacgggctctgcatctgtgcagccatgcccagcaaagtcgtcattctccgctacaacgaaaacctcagcaaatactgcatccggaaagagatagagacctcagagccctgcagctgtatccacttcaccaattacagtatcctcattggaaccaataaattctacgaaatcgacatgaagcagtacacgctcgaggaattcctggataagaatgaccattccttggcacctgctgtgtttgccgcctcttccaacagcttccctgtctcaatcgtgcaggtgaacagcgcagggcagcgagaggagtacttgctgtgtttccacgaatttggagtgttcgtggattcttacggaagacgtagccgcacagacgatctcaagtggagtcgcttacctttggcctttgcctacagagaaccctatctgtttgtgacccacttcaactcactcgaagtaattgagatccaggcacgctcctcagcagggacccctgcccgagcgtacctggacatcccgaacccgcgctacctgggccctgccatttcctcaggagcgatttacttggcgtcctcataccaggataaattaagggtcatttgctgcaagggaaacctcgtgaaggagtccggcactgaacaccaccggggcccgtccacctcccgcagcagccccaacaagcgaggcccacccacgtacaacgagcacatcaccaagcgcgtggcctccagcccagcgccgcccgaaggccccagccacccgcgagagccaagcacaccccaccgctaccgcgaggggcggaccgagctgcgcagggacaagtctcctggccgccccctggagcgagagaagtcccccggccggatgctcagcacgcggagagagcggtcccccgggaggctgtttgaagacagcagcaggggccggctgcctgcgggagccgtgaggaccccgctgtcccaggtgaacaaggtctgggaccagtcttcagtataaatctcagccagaaaaaccaactcctcatcttgatctgcaggaaaacaccaaacacactatggaactctgctgatggggacccaagcgcccacgtgctcagccaccctctggctcagcggggcccagacccacctcggcacggacacccctgtctccaggaggggcaggtggctgaggctcttcggagctgtcagcgcccggtgcctgccctgggcacctccctgcagtcatctctttgcactttgttactctttcaaagcattcacaaacttttgtacctagctctagcctgtaccagttagttcatcaaaggaaaccaaccgggatgctaactacaacatggttagaatcctaattagctactttaagatcctaggattggttggtttttcttttttttttctcttggtttctttccttttttttttttttttttaagacaacagaattcttaatagatttgaatagcgacgtatttccgggttgtagtcatttttagctcgaccacatcatcaggtctttgccaccgaggcatagtgtagaacagtcccggtcagttggccaacctcccgcagccaagtaggttcatccttgttcctgttcattctcatagatggccctgctttccccagggtgacatcgtagccaaatgtttactgttttcattgccttttatggccttgacgacttcccctcccaccagctgagaatgtatggaggtcatcggggcctcagctcggaggcagtgacttggggccaagggacctcgagacgctttccttccccaccccccagcgtcatctccccagcctgctgttcccgctttccatatagctttggccaggaaagcatgcaatagacttgctcggagcccagcactcctgggtctcggggtcggggaggggacgggggcacccacttccttgtctgtgacggcgtgttgttccccactctgggatggggaagaggcccgtcgggagttctgcatggcagttcactgcatgtgctgcccccttgggttgctctgccaatgtattaataccatcccatagctcctgccaaatcgagaccctctgacgacttgccgactaactggccaccacaagctgcagtctgtagcactgaacaaacaaaaaacaaaacgctcaagccttacgaccagagaaggatttcagcaaaccaccacctcccactcagtgtcccctccaaacttcacacttccctgcctgcagaggatgactctgttcacacccaatccagcgcggttctaccccacgaaactgtgactttccaaatgagcctttccctagggctagacctaagaccaggaagtttgagaaagcagccgcagctcaactcttccagctccgccagggttgggaagtccttaggtgcagtgcggctcccactgggtctgcggaccctcctattagagtacgaaattcctggcaactggtacagaaccaacctagaggctttgcagttggcaagctaactcgcggccttatttctgcctttaatctcccacaaggcatctgttgctttgggtcctccacgactcttaggcccgcctcaacaacccaggcacctcctaggtaggctcaaaggtagacccgtttccaccgcagcaggtgaacatgaccgtgttttcaactgtgtccacagttcagatccctttccagattgcaacctggcctgcatcccagctccttcctgctcgtgtcttaacctaagtgctttcttgtttgaaacgcctacaaacctccatgtggtagctcctttggcaaatgtcctgctgtggcgttttatgtgttgcttggagtctgtggggtcgtactccctcccctcccgtccccagggcagatttgattgaatgtttgctgaagttttgtctcttggtccacagtatttggaaaggtcactgaaaatgggtctttcagtcttggcatttcatttaggatctccatgagaaatgggcttcttgagccctgaaaatgtatattgtgtgtctcatctgtgaactgctttctgctatatagaactagctcaaaagactgtacatatttacaagaaactttatattcgtaaaaaaaaaaagaggaaattgaattggtttctacttttttattgtaaaaggtgcatttttcaacacttacttttggtttcaatggtggtagttgtggacagccatcttcactggagggtggggagctccgtgtgaccaccaagatgccagcaggatataccgtaacacgaaattgctgtcaaaagcttattagcatcaatcaagattctaggtctccaaaagtacaggctttttcttcattaccttttttattcagaacgaggaagagaacacaaggaatgattcaagatccaccttgagaggaatgaactttgttgttgaacaattagtgaaataaagcaatgatctaaactaaaaaaaaaaaaaaacaaacaaaaaaacgtggtggggcgcctgcgacctggaaaaagttttccaaacccttcgtgggggcgcggcccagaggtaggtaaccatggccaaaactggtccaaagaacaccgcgcatagatcatgggtcgcgtcctcccataaaaaagcgcggcgaacggggggtcgaacaactcgagggggtctcgggcacacggtcttcaagggtccacgagtcaacaccccccgggacgcagaacn

SEQ ID NO: 353969 - DNA, 5643 bp, Homo sapiens
  misc_feature (869)..(869): n is a, c, g, or t
  misc_feature (5643)..(5643): n is a, c, g, or t
gcggggcggaacagatcgcagacctgggggttcgcagagccgccagtggggagatgttgaagttcaaatatggagcgcggaatcctttggatgctggtgctgctgaacccattgccagccgggcctccaggctgaatctgttcttccaggggaaaccaccctttatgactcaacagcagatgtctcctctttcccgagaagggatattagatgccctctttgttctctttgaagaatgcagtcagcctgctctgatgaagattaagcacgtgagcaactttgtccggaagtattccgacaccatagctgagttacaggagctccagccttcggcaaaggacttcgaagtcagaagtcttgtaggttgtggtcactttgctgaagtgcaggtggtaagagagaaagcaaccggggacatctatgctatgaaagtgatgaagaagaaggctttattggcccaggagcaggtttcattttttgaggaagagcggaacatattatctcgaagcacaagcccgtggatcccccaattacagtatgcctttcaggacaaaaatcacctttatctggttctctattctcatgaaaaggtgaaaatggaaggcactatttctcaacaaaccaaactcattgattttctgcaagccaaaatggaccaacctgctaaaaagaaaaaggttcctctgcagtacaatgagctgaagctggccctggagaaggagaaagctcgctgtgcagagctagaggaagcccttcagaagacccgcatcgagctccggtccgcccgggaggaagctgcccaccgcaaagcaacggaccacccacacccatccacgccagccaccgcgaggcagcagatcgccatgtcngccatcgtgcggtcgccagagcaccagcccagtgccatgagcctgctggccccgccatccagccgcagaaaggagtcttcaactccagaggaatttagtcggcgtcttaaggaacgcatgcaccacaatattcctcaccgattcaacgtaggactgaacatgcgagccacaaagtgtgctgtgtgtctggataccgtgcactttggacgccaggcatccaaatgtctcgaatgtcaggtgatgtgtcaccccaagtgctccacgtgcttgccagccacctgcggcttgcctgctgaatatgccacacacttcaccgaggccttctgccgtgacaaaatgaactccccaggtctccagaccaaggagcccagcagcagcttgcacctggaagggtggatgaaggtgcccaggaataacaaacgaggacagcaaggctgggacaggaagtacattgtcctggagggatcaaaagtcctcatttatgacaatgaagccagagaagctggacagaggccggtggaagaatttgagctgtgccttcccgacggggatgtatctattcatggtgccgttggtgcttccgaactcgcaaatacagccaaagcagatgtcccatacatactgaagatggaatctcacccgcacaccacctgctggcccgggagaaccctctacttgctagctcccagcttccctgacaaacagcgctgggtcaccgccttagaatcagttgtcgcaggtgggagagtttctagggaaaaagcagaagctgatgctaaactgcttggaaactccctgctgaaactggaaggtgatgaccgtctagacatgaactgcacgctgcccttcagtgaccaggtggtgttggtgggcaccgaggaagggctctacgccctgaatgtcttgaaaaactccctaacccatgtcccaggaattggagcagtcttccaaatttatattatcaaggacctggagaagctactcatgatagcaggagaagagcgggcactgtgtcttgtggacgtgaagaaagtgaaacagtccctggcccagtcccacctgcctgcccagcccgacatctcacccaacatttttgaagctgtcaagggctgccacttgtttggggcaggcaagattgagaacgggctctgcatctgtgcagccatgcccagcaaagtcgtcattctccgctacaacgactgtatccacttcaccaattacagtatcctcattggaaccaataaattctacgaaatcgacatgaagcagtacacgctcgaggaattcctggataagaatgaccattccttggcacctgctgtgtttgccgcctcttccaacagcttccctgtctcaatcgtgcaggtgaacagcgcagggcagcgagaggagtacttgctgtgtttccacgaatttggagtgttcgtggattcttacggaagacgtagccgcacagacgatctcaagtggagtcgcttacctttggcctttgcctacagagaaccctatctgtttgtgacccacttcaactcactcgaagtaattgagatccaggcacgctcctcagcagggacccctgcccgagcgtacctggacatcccgaacccgcgctacctgggccctgccatttcctcaggagcgatttacttggcgtcctcataccaggataaattaagggtcatttgctgcaagggaaacctcgtgaaggagtccggcactgaacaccaccggggcccgtccacctcccgcagcagccccaacaagcgaggcccacccacgtacaacgagcacatcaccaagcgcgtggcctccagcccagcgccgcccgaaggccccagccacccgcgagagccaagcacaccccaccgctaccgcgaggggcggaccgagctgcgcagggacaagtctcctggccgccccctggagcgagagaagtcccccggccggatgctcagcacgcggagagagcggtcccccgggaggctgtttgaagacagcagcaggggccggctgcctgcgggagccgtgaggaccccgctgtcccaggtgaacaaggtctgggaccagtcttcagtataaatctcagccagaaaaaccaactcctcatcttgatctgcaggaaaacaccaaacacactatggaactctgctgatggggacccaagcgcccacgtgctcagccaccctctggctcagcggggcccagacccacctcggcacggacacccctgtctccaggaggggcaggtggctgaggctcttcggagctgtcagcgcccggtgcctgccctgggcacctccctgcagtcatctctttgcactttgttactctttcaaagcattcacaaacttttgtacctagctctagcctgtaccagttagttcatcaaaggaaaccaaccgggatgctaactacaacatggttagaatcctaattagctactttaagatcctaggattggttggtttttcttttttttttctcttggtttctttccttttttttttttttttttaagacaacagaattcttaatagatttgaatagcgacgtatttccgggttgtagtcatttttagctcgaccacatcatcaggtctttgccaccgaggcatagtgtagaacagtcccggtcagttggccaacctcccgcagccaagtaggttcatccttgttcctgttcattctcatagatggccctgctttccccagggtgacatcgtagccaaatgtttactgttttcattgccttttatggccttgacgacttcccctcccaccagctgagaatgtatggaggtcatcggggcctcagctcggaggcagtgacttggggccaagggacctcgagacgctttccttccccaccccccagcgtcatctccccagcctgctgttcccgctttccatatagctttggccaggaaagcatgcaatagacttgctcggagcccagcactcctgggtctcggggtcggggaggggacgggggcacccacttccttgtctgtgacggcgtgttgttccccactctgggatggggaagaggcccgtcgggagttctgcatggcagttcactgcatgtgctgcccccttgggttgctctgccaatgtattaataccatcccatagctcctgccaaatcgagaccctctgacgacttgccgactaactggccaccacaagctgcagtctgtagcactgaacaaacaaaaaacaaaacgctcaagccttacgaccagagaaggatttcagcaaaccaccacctcccactcagtgtcccctccaaacttcacacttccctgcctgcagaggatgactctgttcacacccaatccagcgcggttctaccccacgaaactgtgactttccaaatgagcctttccctagggctagacctaagaccaggaagtttgagaaagcagccgcagctcaactcttccagctccgccagggttgggaagtccttaggtgcagtgcggctcccactgggtctgcggaccctcctattagagtacgaaattcctggcaactggtacagaaccaacctagaggctttgcagttggcaagctaactcgcggccttatttctgcctttaatctcccacaaggcatctgttgctttgggtcctccacgactcttaggcccgcctcaacaacccaggcacctcctaggtaggctcaaaggtagacccgtttccaccgcagcaggtgaacatgaccgtgttttcaactgtgtccacagttcagatccctttccagattgcaacctggcctgcatcccagctccttcctgctcgtgtcttaacctaagtgctttcttgtttgaaacgcctacaaacctccatgtggtagctcctttggcaaatgtcctgctgtggcgttttatgtgttgcttggagtctgtggggtcgtactccctcccctcccgtccccagggcagatttgattgaatgtttgctgaagttttgtctcttggtccacagtatttggaaaggtcactgaaaatgggtctttcagtcttggcatttcatttaggatctccatgagaaatgggcttcttgagccctgaaaatgtatattgtgtgtctcatctgtgaactgctttctgctatatagaactagctcaaaagactgtacatatttacaagaaactttatattcgtaaaaaaaaaaagaggaaattgaattggtttctacttttttattgtaaaaggtgcatttttcaacacttacttttggtttcaatggtggtagttgtggacagccatcttcactggagggtggggagctccgtgtgaccaccaagatgccagcaggatataccgtaacacgaaattgctgtcaaaagcttattagcatcaatcaagattctaggtctccaaaagtacaggctttttcttcattaccttttttattcagaacgaggaagagaacacaaggaatgattcaagatccaccttgagaggaatgaactttgttgttgaacaattagtgaaataaagcaatgatctaaactaaaaaaaaaaaaaaacaaacaaaaaaacgtggtggggcgcctgcgacctggaaaaagttttccaaacccttcgtgggggcgcggcccagaggtaggtaaccatggccaaaactggtccaaagaacaccgcgcatagatcatgggtcgcgtcctcccataaaaaagcgcggcgaacggggggtcgaacaactcgagggggtctcgggcacacggtcttcaagggtccacgagtcaacaccccccgggacgcagaacn

SEQ ID NO: 353970 - DNA, 1872 bp, Homo sapiens
  misc_feature (1872)..(1872): n is a, c, g, or t
ggcccctgtgacgtcgtgaacttagggatcagatcacgtaatcaacgctctgggatcgctgcaacctggcacttcaaggtaagtgcaccgataacgtctagaccggcaaacacagatctagaggtggccaactgatcactgtaggagctgactggcaaagtcaaccaggcccaaccaagagtgaccaagacaacgattaggataacccacaggcactcctcgtcataaggccaacgacacagacaggctggcaaataaagggtttaatcctaagttcagagccaggcctggctctgaacttaggaaacaaaaaacaaaacgctcaagccttacgaccagagaaggatttcagcaaaccaccacctcccactcagtgtcccctccaaacttcacacttccctgcctgcagaggatgactctgttcacacccaatccagcgcggttctaccccacgaaactgtgactttccaaatgagcctttccctagggctagacctaagaccaggaagtttgagaaagcagccgcagctcaactcttccagctccgccagggttgggaagtccttaggtgcagtgcggctcccactgggtctgcggaccctcctattagagtacgaaattcctggcaactggtacagaaccaacctagaggctttgcagttggcaagctaactcgcggccttatttctgcctttaatctcccacaaggcatctgttgctttgggtcctccacgactcttaggcccgcctcaacaacccaggcacctcctaggtaggctcaaaggtagacccgtttccaccgcagcaggtgaacatgaccgtgttttcaactgtgtccacagttcagatccctttccagattgcaacctggcctgcatcccagctccttcctgctcgtgtcttaacctaagtgctttcttgtttgaaacgcctacaaacctccatgtggtagctcctttggcaaatgtcctgctgtggcgttttatgtgttgcttggagtctgtggggtcgtactccctcccctcccgtccccagggcagatttgattgaatgtttgctgaagttttgtctcttggtccacagtatttggaaaggtcactgaaaatgggtctttcagtcttggcatttcatttaggatctccatgagaaatgggcttcttgagccctgaaaatgtatattgtgtgtctcatctgtgaactgctttctgctatatagaactagctcaaaagactgtacatatttacaagaaactttatattcgtaaaaaaaaaaagaggaaattgaattggtttctacttttttattgtaaaaggtgcatttttcaacacttacttttggtttcaatggtggtagttgtggacagccatcttcactggagggtggggagctccgtgtgaccaccaagatgccagcaggatataccgtaacacgaaattgctgtcaaaagcttattagcatcaatcaagattctaggtctccaaaagtacaggctttttcttcattaccttttttattcagaacgaggaagagaacacaaggaatgattcaagatccaccttgagaggaatgaactttgttgttgaacaattagtgaaataaagcaatgatctaaactaaaaaaaaaaaaaaacaaacaaaaaaacgtggtggggcgcctgcgacctggaaaaagttttccaaacccttcgtgggggcgcggcccagaggtaggtaaccatggccaaaactggtccaaagaacaccgcgcatagatcatgggtcgcgtcctcccataaaaaagcgcggcgaacggggggtcgaacaactcgagggggtctcgggcacacggtcttcaagggtccacgagtcaacaccccccgggacgcagaacn

SEQ ID NO: 353971 - DNA, 2356 bp, Homo sapiens
  misc_feature (869)..(869): n is a, c, g, or t
gcggggcggaacagatcgcagacctgggggttcgcagagccgccagtggggagatgttgaagttcaaatatggagcgcggaatcctttggatgctggtgctgctgaacccattgccagccgggcctccaggctgaatctgttcttccaggggaaaccaccctttatgactcaacagcagatgtctcctctttcccgagaagggatattagatgccctctttgttctctttgaagaatgcagtcagcctgctctgatgaagattaagcacgtgagcaactttgtccggaagtattccgacaccatagctgagttacaggagctccagccttcggcaaaggacttcgaagtcagaagtcttgtaggttgtggtcactttgctgaagtgcaggtggtaagagagaaagcaaccggggacatctatgctatgaaagtgatgaagaagaaggctttattggcccaggagcaggtttcattttttgaggaagagcggaacatattatctcgaagcacaagcccgtggatcccccaattacagtatgcctttcaggacaaaaatcacctttatctggttctctattctcatgaaaaggtgaaaatggaaggcactatttctcaacaaaccaaactcattgattttctgcaagccaaaatggaccaacctgctaaaaagaaaaaggttcctctgcagtacaatgagctgaagctggccctggagaaggagaaagctcgctgtgcagagctagaggaagcccttcagaagacccgcatcgagctccggtccgcccgggaggaagctgcccaccgcaaagcaacggaccacccacacccatccacgccagccaccgcgaggcagcagatcgccatgtcngccatcgtgcggtcgccagagcaccagcccagtgccatgagcctgctggccccgccatccagccgcagaaaggagtcttcaactccagaggaatttagtcggcgtcttaaggaacgcatgcaccacaatattcctcaccgattcaacgtaggactgaacatgcgagccacaaagtgtgctgtgtgtctggataccgtgcactttggacgccaggcatccaaatgtctcgaatgtcaggtgatgtgtcaccccaagtgctccacgtgcttgccagccacctgcggcttgcctgctgaatatgccacacacttcaccgaggccttctgccgtgacaaaatgaactccccaggtctccagaccaaggagcccagcagcagcttgcacctggaagggtggatgaaggtgcccaggaataacaaacgaggacagcaaggctgggacaggaagtacattgtcctggagggatcaaaagtcctcatttatgacaatgaagccagagaagctggacagaggccggtggaagaatttgagctgtgccttcccgacggggatgtatctattcatggtgccgttggtgcttccgaactcgcaaatacagccaaagcagatgtcccatacatactgaagatggaatctcacccgcacaccacctgctggcccgggagaaccctctacttgctagctcccagcttccctgacaaacagcgctgggtcaccgccttagaatcagttgtcgcaggtgggagagtttctagggaaaaagcagaagctgatgctaaactgcttggaaactccctgctgaaactggaaggtgatgaccgtctagacatgaactgcacgctgcccttcagtgaccaggtggtgttggtgggcaccgaggaagggctctacgccctgaatgtcttgaaaaactccctaacccatgtcccaggaattggagcagtcttccaaatttatattatcaaggacctggagaagctactcatgatagcaggagaagagcgggcactgtgtcttgtggacgtgaagaaagtgaaacagtccctggcccagtcccacctgcctgcccagcccgacatctcacccaacatttttgaagctgtcaagggctgccacttgtttggggcaggcaagattgagaacgggctctgcatctgtgcagccatgcccagcaaagtcgtcattctccgctacaacgaaaacctcagcaaatactgcatccggaaagagatagagacctcagagccctgcagctgtatccacttcaccaattacagtatcctcattggaaccaataaattctacgaaatcgacatgaagcagtacacgctcgaggaattcctggataacacgttcgcgagagataacacgttcgcgagggataacacgttcgcgagagataacacgttcgcgagggataacacgttcgcgagagataacacgttcgcgagggataacacgttcgcgagagataacacgttcgcgag

SEQ ID NO: 353972 - DNA, 1987 bp, Homo sapiens
  misc_feature (869)..(869): n is a, c, g, or t
gcggggcggaacagatcgcagacctgggggttcgcagagccgccagtggggagatgttgaagttcaaatatggagcgcggaatcctttggatgctggtgctgctgaacccattgccagccgggcctccaggctgaatctgttcttccaggggaaaccaccctttatgactcaacagcagatgtctcctctttcccgagaagggatattagatgccctctttgttctctttgaagaatgcagtcagcctgctctgatgaagattaagcacgtgagcaactttgtccggaagtattccgacaccatagctgagttacaggagctccagccttcggcaaaggacttcgaagtcagaagtcttgtaggttgtggtcactttgctgaagtgcaggtggtaagagagaaagcaaccggggacatctatgctatgaaagtgatgaagaagaaggctttattggcccaggagcaggtttcattttttgaggaagagcggaacatattatctcgaagcacaagcccgtggatcccccaattacagtatgcctttcaggacaaaaatcacctttatctggttctctattctcatgaaaaggtgaaaatggaaggcactatttctcaacaaaccaaactcattgattttctgcaagccaaaatggaccaacctgctaaaaagaaaaaggttcctctgcagtacaatgagctgaagctggccctggagaaggagaaagctcgctgtgcagagctagaggaagcccttcagaagacccgcatcgagctccggtccgcccgggaggaagctgcccaccgcaaagcaacggaccacccacacccatccacgccagccaccgcgaggcagcagatcgccatgtcngccatcgtgcggtcgccagagcaccagcccagtgccatgagcctgctggccccgccatccagccgcagaaaggagtcttcaactccagaggaatttagtcggcgtcttaaggaacgcatgcaccacaatattcctcaccgattcaacgtaggactgaacatgcgagccacaaagtgtgctgtgtgtctggataccgtgcactttggacgccaggcatccaaatgtctcgaatgtcaggtgatgtgtcaccccaagtgctccacgtgcttgccagccacctgcggcttgcctgctgaatatgccacacacttcaccgaggccttctgccgtgacaaaatgaactccccaggtctccagaccaaggagcccagcagcagcttgcacctggaagggtggatgaaggtgcccaggaataacaaacgaggacagcaaggctgggacaggaagtacattgtcctggagggatcaaaagtcctcatttatgacaatgaagccagagaagctggacagaggccggtggaagaatttgagctgtgccttcccgacggggatgtatctattcatggtgccgttggtgcttccgaactcgcaaatacagccaaagcagatgtcccatacatactgaagatggaatctcacccgcacaccacctgctggcccgggagaaccctctacttgctagctcccagcttccctgacaaacagcgctgggtcaccgccttagaatcagttgtcgcaggtgggagagtttctagggaaaaagcagaagctgatgctgtgagtatgaaagcgggccctggaggttgtctttgtaaagggggctgacttggtaactggtgttaacgacgagaatcccattggccattttgattcccctcaggctctctctctgagggctgatggctctagactgtgtcatggccaggagtctggtggtgatgaaggcacaagcaccaaggtagcttgtgtggcatcatgatccatttagaatgtgggaatcagggatgcggtggctcatgcctgtggtcccagtgacccaggaggccaaggcaggaggatcacttgagcccaggagtttgaaaccagactgggcaagatagcaagatcccatctcttaa

SEQ ID NO: 353973 - DNA, 413 bp, Homo sapiens
gatcactgttcatcctgagaggcatgaaaggtgaatggggcgtgtgcagtggctcaagcttgtaattctaatgctttgggaggctgaggtgggaggattgcttgagcccagcagtttgaggctgcagtgagctatgatcacaccactgcactctaacctaggtgacagagcgagatcttgtctccaaaaaaaaaaaaagatgaatggctctctatgacaacgtgaacaagcttggtgacaatgttctccagggcttggctagatgctgtaggcagaagcagaacagctgtggaccttggctgccctgtgttacctctcacatccttctcttctgctctcatgtctcaggagatagagacctcagagccctgcagctgtatccacttcaccaattacagtatcctcattggaac

SEQ ID NO: 353974 - DNA, 529 bp, Homo sapiens
ctctctgaaatctcctagatgtcccatacatactgaagatggaatctcacccgcacaccacctgctggcccgggagaaccctctacttgctagctcccagcttccctgacaaacagcgctgggtcaccgccttagaatcagttgtcgcaggtgggagagtttctagggaaaaagcagaagctgatgctgtgagtatgaaagcgggccctggaggttgtctttgtaaagggggctgacttggtaactggtgttaacgacgagaatcccattggccattttgattcccctcaggctctctctctgagggctgatggctctagactgtgtcatggccaggagtctggtggtgatgaaggcacaagcaccaaggtagcttgtgtggcatcatgatccatttagaatgtgggaatcagggatgcggtggctcatgcctgtggtcccagtgacccaggaggccaaggcaggaggatcacttgagcccaggagtttgaaaccagactgggcaagatagcaagatcccatctcttaa

SEQ ID NO: 353975 - DNA, 5740 bp, Homo sapiens
  misc_feature (912)..(912): n is a, c, g, or t
  misc_feature (5740)..(5740): n is a, c, g, or t
atgcatgtagtcgcagtcagcgttgattattatttactcgctggcatgtcagtatattactccgttagcagctttcctccgttaaactggttcttgctttttcccttgtttcaaacttagaaataatttccatcctcatataataacctatggaagactcaccagtgacagggacttctgtatttagaaaaaagcaacctttacgttctgacctttagaactcaatattctttctccgtgaaggttcgtggacattcataaacgttgtcagcatctaacattcctaagtgtggcattatgccaatctttccaaatgtctagctcaatgacctggagaagaagcatgctatgcttgaaatgaatgcccgaagcttacagcagaagctggagactgaacgagagctcaaacagaggcttctggaagagcaagccaaattacagcagcagatggacctgcagaaaaatcacattttccgtctgactcaaggactgcaagaagctctagatcgggctgatctactgaagacagaaagaagtgacttggagtatcagctggaaaacattcaggttctctattctcatgaaaaggtgaaaatggaaggcactatttctcaacaaaccaaactcattgattttctgcaagccaaaatggaccaacctgctaaaaagaaaaagggtttatttagtcgacggaaagaggaccctgctttacccacacaggttcctctgcagtacaatgagctgaagctggccctggagaaggagaaagctcgctgtgcagagctagaggaagcccttcagaagacccgcatcgagctccggtccgcccgggaggaagctgcccaccgcaaagcaacggaccacccacacccatccacgccagccaccgcgaggcagcagatcgccatgtcngccatcgtgcggtcgccagagcaccagcccagtgccatgagcctgctggccccgccatccagccgcagaaaggagtcttcaactccagaggaatttagtcggcgtcttaaggaacgcatgcaccacaatattcctcaccgattcaacgtaggactgaacatgcgagccacaaagtgtgctgtgtgtctggataccgtgcactttggacgccaggcatccaaatgtctcgaatgtcaggtgatgtgtcaccccaagtgctccacgtgcttgccagccacctgcggcttgcctgctgaatatgccacacacttcaccgaggccttctgccgtgacaaaatgaactccccaggtctccagaccaaggagcccagcagcagcttgcacctggaagggtggatgaaggtgcccaggaataacaaacgaggacagcaaggctgggacaggaagtacattgtcctggagggatcaaaagtcctcatttatgacaatgaagccagagaagctggacagaggccggtggaagaatttgagctgtgccttcccgacggggatgtatctattcatggtgccgttggtgcttccgaactcgcaaatacagccaaagcagatgtcccatacatactgaagatggaatctcacccgcacaccacctgctggcccgggagaaccctctacttgctagctcccagcttccctgacaaacagcgctgggtcaccgccttagaatcagttgtcgcaggtgggagagtttctagggaaaaagcagaagctgatgctaaactgcttggaaactccctgctgaaactggaaggtgatgaccgtctagacatgaactgcacgctgcccttcagtgaccaggtggtgttggtgggcaccgaggaagggctctacgccctgaatgtcttgaaaaactccctaacccatgtcccaggaattggagcagtcttccaaatttatattatcaaggacctggagaagctactcatgatagcaggagaagagcgggcactgtgtcttgtggacgtgaagaaagtgaaacagtccctggcccagtcccacctgcctgcccagcccgacatctcacccaacatttttgaagctgtcaagggctgccacttgtttggggcaggcaagattgagaacgggctctgcatctgtgcagccatgcccagcaaagtcgtcattctccgctacaacgaaaacctcagcaaatactgcatccggaaagagatagagacctcagagccctgcagctgtatccacttcaccaattacagtatcctcattggaaccaataaattctacgaaatcgacatgaagcagtacacgctcgaggaattcctggataagaatgaccattccttggcacctgctgtgtttgccgcctcttccaacagcttccctgtctcaatcgtgcaggtgaacagcgcagggcagcgagaggagtacttgctgtgtttccacgaatttggagtgttcgtggattcttacggaagacgtagccgcacagacgatctcaagtggagtcgcttacctttggcctttgcctacagagaaccctatctgtttgtgacccacttcaactcactcgaagtaattgagatccaggcacgctcctcagcagggacccctgcccgagcgtacctggacatcccgaacccgcgctacctgggccctgccatttcctcaggagcgatttacttggcgtcctcataccaggataaattaagggtcatttgctgcaagggaaacctcgtgaaggagtccggcactgaacaccaccggggcccgtccacctcccgcagcagccccaacaagcgaggcccacccacgtacaacgagcacatcaccaagcgcgtggcctccagcccagcgccgcccgaaggccccagccacccgcgagagccaagcacaccccaccgctaccgcgaggggcggaccgagctgcgcagggacaagtctcctggccgccccctggagcgagagaagtcccccggccggatgctcagcacgcggagagagcggtcccccgggaggctgtttgaagacagcagcaggggccggctgcctgcgggagccgtgaggaccccgctgtcccaggtgaacaaggtctgggaccagtcttcagtataaatctcagccagaaaaaccaactcctcatcttgatctgcaggaaaacaccaaacacactatggaactctgctgatggggacccaagcgcccacgtgctcagccaccctctggctcagcggggcccagacccacctcggcacggacacccctgtctccaggaggggcaggtggctgaggctcttcggagctgtcagcgcccggtgcctgccctgggcacctccctgcagtcatctctttgcactttgttactctttcaaagcattcacaaacttttgtacctagctctagcctgtaccagttagttcatcaaaggaaaccaaccgggatgctaactacaacatggttagaatcctaattagctactttaagatcctaggattggttggtttttcttttttttttctcttggtttctttccttttttttttttttttttaagacaacagaattcttaatagatttgaatagcgacgtatttccgggttgtagtcatttttagctcgaccacatcatcaggtctttgccaccgaggcatagtgtagaacagtcccggtcagttggccaacctcccgcagccaagtaggttcatccttgttcctgttcattctcatagatggccctgctttccccagggtgacatcgtagccaaatgtttactgttttcattgccttttatggccttgacgacttcccctcccaccagctgagaatgtatggaggtcatcggggcctcagctcggaggcagtgacttggggccaagggacctcgagacgctttccttccccaccccccagcgtcatctccccagcctgctgttcccgctttccatatagctttggccaggaaagcatgcaatagacttgctcggagcccagcactcctgggtctcggggtcggggaggggacgggggcacccacttccttgtctgtgacggcgtgttgttccccactctgggatggggaagaggcccgtcgggagttctgcatggcagttcactgcatgtgctgcccccttgggttgctctgccaatgtattaataccatcccatagctcctgccaaatcgagaccctctgacgacttgccgactaactggccaccacaagctgcagtctgtagcactgaacaaacaaaaaacaaaacgctcaagccttacgaccagagaaggatttcagcaaaccaccacctcccactcagtgtcccctccaaacttcacacttccctgcctgcagaggatgactctgttcacacccaatccagcgcggttctaccccacgaaactgtgactttccaaatgagcctttccctagggctagacctaagaccaggaagtttgagaaagcagccgcagctcaactcttccagctccgccagggttgggaagtccttaggtgcagtgcggctcccactgggtctgcggaccctcctattagagtacgaaattcctggcaactggtacagaaccaacctagaggctttgcagttggcaagctaactcgcggccttatttctgcctttaatctcccacaaggcatctgttgctttgggtcctccacgactcttaggcccgcctcaacaacccaggcacctcctaggtaggctcaaaggtagacccgtttccaccgcagcaggtgaacatgaccgtgttttcaactgtgtccacagttcagatccctttccagattgcaacctggcctgcatcccagctccttcctgctcgtgtcttaacctaagtgctttcttgtttgaaacgcctacaaacctccatgtggtagctcctttggcaaatgtcctgctgtggcgttttatgtgttgcttggagtctgtggggtcgtactccctcccctcccgtccccagggcagatttgattgaatgtttgctgaagttttgtctcttggtccacagtatttggaaaggtcactgaaaatgggtctttcagtcttggcatttcatttaggatctccatgagaaatgggcttcttgagccctgaaaatgtatattgtgtgtctcatctgtgaactgctttctgctatatagaactagctcaaaagactgtacatatttacaagaaactttatattcgtaaaaaaaaaaagaggaaattgaattggtttctacttttttattgtaaaaggtgcatttttcaacacttacttttggtttcaatggtggtagttgtggacagccatcttcactggagggtggggagctccgtgtgaccaccaagatgccagcaggatataccgtaacacgaaattgctgtcaaaagcttattagcatcaatcaagattctaggtctccaaaagtacaggctttttcttcattaccttttttattcagaacgaggaagagaacacaaggaatgattcaagatccaccttgagaggaatgaactttgttgttgaacaattagtgaaataaagcaatgatctaaactaaaaaaaaaaaaaaacaaacaaaaaaacgtggtggggcgcctgcgacctggaaaaagttttccaaacccttcgtgggggcgcggcccagaggtaggtaaccatggccaaaactggtccaaagaacaccgcgcatagatcatgggtcgcgtcctcccataaaaaagcgcggcgaacggggggtcgaacaactcgagggggtctcgggcacacggtcttcaagggtccacgagtcaacaccccccgggacgcagaacn

SEQ ID NO: 353976 - DNA, 1168 bp, Homo sapiens
  misc_feature (54)..(54): n is a, c, g, or t
  misc_feature (1168)..(1168): n is a, c, g, or t
tatccccggttctgggtaacatcctcattggtgacagacttcacaacatcaggnccagtgatgaacaggtaggctcaaaggtagacccgtttccaccgcagcaggtgaacatgaccgtgttttcaactgtgtccacagttcagatccctttccagattgcaacctggcctgcatcccagctccttcctgctcgtgtcttaacctaagtgctttcttgtttgaaacgcctacaaacctccatgtggtagctcctttggcaaatgtcctgctgtggcgttttatgtgttgcttggagtctgtggggtcgtactccctcccctcccgtccccagggcagatttgattgaatgtttgctgaagttttgtctcttggtccacagtatttggaaaggtcactgaaaatgggtctttcagtcttggcatttcatttaggatctccatgagaaatgggcttcttgagccctgaaaatgtatattgtgtgtctcatctgtgaactgctttctgctatatagaactagctcaaaagactgtacatatttacaagaaactttatattcgtaaaaaaaaaaagaggaaattgaattggtttctacttttttattgtaaaaggtgcatttttcaacacttacttttggtttcaatggtggtagttgtggacagccatcttcactggagggtggggagctccgtgtgaccaccaagatgccagcaggatataccgtaacacgaaattgctgtcaaaagcttattagcatcaatcaagattctaggtctccaaaagtacaggctttttcttcattaccttttttattcagaacgaggaagagaacacaaggaatgattcaagatccaccttgagaggaatgaactttgttgttgaacaattagtgaaataaagcaatgatctaaactaaaaaaaaaaaaaaacaaacaaaaaaacgtggtggggcgcctgcgacctggaaaaagttttccaaacccttcgtgggggcgcggcccagaggtaggtaaccatggccaaaactggtccaaagaacaccgcgcatagatcatgggtcgcgtcctcccataaaaaagcgcggcgaacggggggtcgaacaactcgagggggtctcgggcacacggtcttcaagggtccacgagtcaacaccccccgggacgcagaacn

SEQ ID NO: 353977 - DNA, 621 bp, Homo sapiens
gcggggcggaacagatcgcagacctgggggttcgcagagccgccagtggggagatgttgaagttcaaatatggagcgcggaatcctttggatgctggtgctgctgaacccattgccagccgggcctccaggctgaatctgttcttccaggggaaaccaccctttatgactcaacagcagatgtctcctctttcccgagaagggatattagatgccctctttgttctctttgaagaatgcagtcagcctgctctgatgaagattaagcacgtgagcaactttgtccggaagtattccgacaccatagctgagttacaggagctccagccttcggcaaaggacttcgaagtcagaagtcttgtaggttgtggtcactttgctgaagtgcaggtggtaagagagaaagcaaccggggacatctatgctatgaaagtgatgaagaagaaggctttattggcccaggagcaggtttcattttttgaggaagagcggaacatattatctcgaagcacaagcccgtggatcccccaattacagtatgcctttcaggacaaaaatcacctttatctggtcatggaatatcagcctggaggggacttgctgtcacttttgaatagatatg

SEQ ID NO: 353978 - DNA, 354 bp, Homo sapiens
ccggatgtcctggaggaggagacccaggctgagaaccagtgggtctggcagcctcctgtgtctctgcagatgcgggagaacccagagctggtggagggccgtgacctgctgagctgcaccagctctgagcctctgaccctctgagagatgatgtcctgcccaggcccgatggccactaggaccctgcaagcaactctgctctgtgaccaggccaggattcctggagctggcctgagagggctcaatggaccctcggggacccaagtggggctttcaaccctctcccccaccacccagcccactgcactgaaatgagactttattctgaaattattaaaaagaacagagatgctc

SEQ ID NO: 353979 - DNA, 1915 bp, Homo sapiens
agcggggggtcgggcggcccggggggtgacgggaagggaggccggtccggcgccgcccagccccgggctccgggcgggaagtgggcgagcgcgacggtgcggggcgcgcgggcgacgggccagcgggatgggagcagggtcccccggcggcccgcagcctcgggagccgcgctgaagccgggggcgggaccagcgcggagccgacatgtgtctgcgcctcggaggcctgagtgtgggcgacttccggaaggtgctgatgaagacaggcctggtgctggtggtgctgggccatgtgagcttcatcacagctgccctgttccatggcacagtgctgcgctacgtgggcacccctcaagatgcggtggctctgcagtactgcgtggtcaacatcctctctgtcacttccgccatcgtggtcatcacttcaggcatcgcagccatcgtgttgtcacgctacctccctagcacccccctgcgctggacagtgtttagctcgagcgtggcctgtgctctcctttctctgacctgtgccctcggcctcttggcctccatcgccatgacctttgccacccagggcaaggcactgctggctgcctgcacttttgggagctctgaactactggccctcgcacctgactgtcccttcgaccccacacgcatttatagctccagcctgtgcctctggggcatcgccctagtgctctgcgtggcggagaacgtgtttgctgtacgctgtgctcagctcacccaccagctgctggagctgaggccctggtgggggaaaagcagccaccacatgatgcgggagaacccagagctggtggagggccgtgacctgctgagctgcaccagctctgagcctctgaccctctgagagatgatgtcctgcccaggcccgatggccactaggaccctgcaagcaactctgctctgtgaccaggccaggattcctggagctggcctgagagggctcaatggaccctcggggacccaagtggggctttcaaccctctcccccaccacccagcccactgcactgaaatgagactttattctgaaattattaaaaagaacagagatgctccatttggctgcatgcagggggggcggttggggggacagaggggaggacaggggctcagccagggggaccgtgtctctttcccacgcaggacactgtgcatggggctctgggtgcatctgcccatctgtctatgggcctgtgtgtgtgtgagaggccaaacacagagagctccgtgggtctgtgtgtatccaagtgctaaaaggcaggctggctttctggggcccacagctggcgggctagtatcctggaaggtttcacttggtggcttggcctagggaccagcaagggctggggtgggaagggtggctcaaggaagcctctttctccaactccacacccctagaatccttctctcccctccagataaaaagtctcctcccctgggcatgactccccccaccccgcaagctgagacctgcaagaaggggactgcccctttgggggaggggtcgggccttggggctggtgggtgggtaagggggcctgactgaggggcagaccaacccagcctgtgtctctattgttgcctctgggattggggggtgctaaccgcttacttgctttggcctgggggtaccgcagggttcccttttccggaagccccccacagggcagacccggggagaagggcttccccaatctggcccccagccagaatacacacaagggagtggaagctaagagccgggagggggccggtgaagggagggaggaaggggaacctggctcctctcagaactgggaggcgctgctggggtcgcactgcagcagacgcacgatggacgggtcgcttttggccccgcggatgaactcctccaaggacagcttgcc

SEQ ID NO: 353980 - DNA, 1781 bp, Homo sapiens
agcggggggtcgggcggcccggggggtgacgggaagggaggccggtccggcgccgcccagccccgggctccgggcgggaagtgggcgagcgcgacggtgcggggcgcgcgggcgacgggccagcgggatgggagcagggtcccccggcggcccgcagcctcgggagccgcgctgaagccgggggcgggaccagcgcggagccgacatgtgtctgcgcctcggaggcctgagtgtgggcgacttccggaaggtgctgatgaagacaggcctggtgctggtggtgctgggccatgtgagcttcatcacagctgccctgttccatggcacagtgctgcgctacgtgggcacccctcaagatgcggtggctctgcagtactgcgtggtcaacatcctctctgtcacttccgccatcgtggtcatcacttcaggcatcgcagccatcgtgttgtcacgctacctccctagcacccccctgcgctggacagtgtttagctcgagcgtggcctgtgctctcctttctctgacctgtgccctcggcctcttggcctccatcgccatgacctttgccacccagggcaaggcactgctggctgcctgcacttttgggagctctgaactactggccctcgcacctgactgtcccttcgaccccacacgcatttatagctccagcctgtgcctctggggcatcgccctagtgctctgcgtggcggagaacgtgtttgctgtacgctgtgctcagctcacccaccagctgctggagctgaggccctggtgggggaaaagcagccaccacatgatgcgggagaacccagagctggtggagggccgtgacctgctgagctgcaccagctctgagcctctgaccctctgagagatgatgtcctgcccaggcccgatggccactaggaccctgcaagcaactctgctctgtgaccaggccaggattcctggagctggcctgagagggctcaatggaccctcggggacccaagtggggctttcaaccctctcccccaccacccagcccactgcactgaaatgagactttattctgaaattattaaaaagaacagagatgctcaaaaaaaaataaatagaaaaacaaaaaaaacattttttgggcggctgtcgccctttgaaaaggttttaaaaacccaatcctggttgtggcgggcggccccacaatagagtacagagtgaacactgtgggcacatgagggtgtccccaaaagagcaactggtggtgacaatcaaagggtggggtggggattctctccccaataaaaaaacacgccggggggggacacaccacggagacgggttttgtggaaaacaacacaccacaagaaagggggggccttttcgagtaagagatggcggtctcgctcccccaccaataggggggatcctcatacaacacaagcggggtggcttcacacgggcggaagacgccttccttcacggcgcataacaaatctattaaatattactatttcaaataagcaacactataaacacatacatcatgtcatctatgctttagacagtacagcagaagttacagaatggagcagggctgtatcgaagtccaccatctgcatcctaggccgaccgcacacggcagacgccgcagtcgagtcgcttcagtcgccctctaccactcaggtgcagcatatcagtacatagctcgtcactctctgacgtgagcagtaactggtgcagttcgaaagcgaggttattggtggtcagtagacagctatgattgtagttgacgggtt

SEQ ID NO: 353981 - DNA, 1157 bp, Homo sapiens
agcggggggtcgggcggcccggggggtgacgggaagggaggccggtccggcgccgcccagccccgggctccgggcgggaagtgggcgagcgcgacggtgcggggcgcgcgggcgacgggccagcgggatgggagcagggtcccccggcggcccgcagcctcgggagccgcgctgaagccgggggcgggaccagcgcggagccgacatgtgtctgcgcctcggaggcctgagtgtgggcgacttccggaaggtgctgatgaagacaggcctggtgctggtggtgctgggccatgtgagcttcatcacagctgccctgttccatggcacagtgctgcgctacgtgggcacccctcaagatgcggtggctctgcagtactgcgtggtcaacatcctctctgtcacttccgccatcgtggtcatcacttcaggcatcgcagccatcgtgttgtcacgctacctccctagcacccccctgcgctggacagtgtttagctcgagcgtggcctgtgctctcctttctctgacctgtgccctcggcctcttggcctccatcgccatgacctttgccacccagggcaaggcactgctggctgcctgcacttttgggagctctgaactactggccctcgcacctgactgtcccttcgaccccacacgcatttatagctccagcctgtgcctctggggcatcgccctagtgctctgcgtggcggagaacgtgtttgctgtacgctgtgctcagctcacccaccagctgctggagctgaggccctggtgggggaaaagcagccaccacatgatgcgggagaacccagagctggtggagggccgtgacctgctgagctgcaccagctctgagcctctgaccctctgagagatgatgtcctgcccaggcccgatggccactaggaccctgcaagcaactctgctctgtgaccaggccaggattcctggagctggcctgagagggctcaatggaccctcggggacccaagtggggctttcaaccctctcccccaccacccagcccccccattctctctccactcccggagtggagagagaacggctgagggttgggggagaggcccttctctaggcagggctagactcctcggggatttaagtgctgaactgtgagagagggagaagatgag

SEQ ID NO: 353982 - DNA, 985 bp, Homo sapiens
agcggggggtcgggcggcccggggggtgacgggaagggaggccggtccggcgccgcccagccccgggctccgggcgggaagtgggcgagcgcgacggtgcggggcgcgcgggcgacgggccagcgggatgggagcagggtcccccggcggcccgcagcctcgggagccgcgctgaagccgggggcgggaccagcgcggagccgacatgtgtctgcgcctcggaggcctgagtgtgggcgacttccggaaggtgctgatgaagacaggcctggtgctggtggtgctgggccatgtgagcttcatcacagctgccctgttccatggcacagtgctgcgctacgtgggcacccctcaagatgcggtggctctgcagtactgcgtggtcaacatcctctctgtcacttccgccatcgtggtcatcacttcaggcatcgcagccatcgtgttgtcacgctacctccctagcacccccctgggcaaggcactgctggctgcctgcacttttgggagctctgaactactggccctcgcacctgactgtcccttcgaccccacacgcatttatagctccagcctgtgcctctggggcatcgccctagtgctctgcgtggcggagaacgtgtttgctgtacgctgtgctcagctcacccaccagctgctggagctgaggccctggtgggggaaaagcagccaccacatgatgcgggagaacccagagctggtggagggccgtgacctgctgagctgcaccagctctgagcctctgaccctctgagagatgatgtcctgcccaggcccgatggccactaggaccctgcaagcaactctgctctgtgaccaggccaggattcctggagctggcctgagagggctcaatggaccctcggggacccaagtggggctttcaaccctctcccccaccacccagcccactgcactgaaatgagactttattctgaaattattaaaaagaacagagatgctc

SEQ ID NO: 353983 - DNA, 1024 bp, Homo sapiens
agcggggggtcgggcggcccggggggtgacgggaagggaggccggtccggcgccgcccagccccgggctccgggcgggaagtgggcgagcgcgacggtgcggggcgcgcgggcgacgggccagcgggatgggagcagggtcccccggcggcccgcagcctcgggagccgcgctgaagccgggggcgggaccagcgcggagccgacatgtgtctgcgcctcggaggcctgagtgtgggcgacttccggaaggtgctgatgaagacaggcctggtgctggtggtgctgggccatgtgagcttcatcacagctgccctgttccatggcacagtgctgcgctacgtgggcacccctcaagatgcggtggctctgcagtactgcgtggtcaacatcctctctgtcacttccgccatcgtgcgctggacagtgtttagctcgagcgtggcctgtgctctcctttctctgacctgtgccctcggcctcttggcctccatcgccatgacctttgccacccagggcaaggcactgctggctgcctgcacttttgggagctctgaactactggccctcgcacctgactgtcccttcgaccccacacgcatttatagctccagcctgtgcctctggggcatcgccctagtgctctgcgtggcggagaacgtgtttgctgtacgctgtgctcagctcacccaccagctgctggagctgaggccctggtgggggaaaagcagccaccacatgatgcgggagaacccagagctggtggagggccgtgacctgctgagctgcaccagctctgagcctctgaccctctgagagatgatgtcctgcccaggcccgatggccactaggaccctgcaagcaactctgctctgtgaccaggccaggattcctggagctggcctgagagggctcaatggaccctcggggacccaagtggggctttcaaccctctcccccaccacccagcccactgcactgaaatgagactttattctgaaattattaaaaagaacagagatgctc

SEQ ID NO: 353984 - DNA, 925 bp, Homo sapiens
agcggggggtcgggcggcccggggggtgacgggaagggaggccggtccggcgccgcccagccccgggctccgggcgggaagtgggcgagcgcgacggtgcggggcgcgcgggcgacgggccagcgggatgggagcagggtcccccggcggcccgcagcctcgggagccgcgctgaagccgggggcgggaccagcgcggagccgacatgtgtctgcgcctcggaggcctgagtgtgggcgacttccggaaggtgctgatgaagacaggcctggtgctggtggtgctgggccatgtgagcttcatcacagctgccctgttccatggcacagtgctgcgctacgtgggcacccctcaagatgcggtggctctgcagtactgcgtggtcaacatcctctctgtcacttccgccatcgtgggcaaggcactgctggctgcctgcacttttgggagctctgaactactggccctcgcacctgactgtcccttcgaccccacacgcatttatagctccagcctgtgcctctggggcatcgccctagtgctctgcgtggcggagaacgtgtttgctgtacgctgtgctcagctcacccaccagctgctggagctgaggccctggtgggggaaaagcagccaccacatgatgcgggagaacccagagctggtggagggccgtgacctgctgagctgcaccagctctgagcctctgaccctctgagagatgatgtcctgcccaggcccgatggccactaggaccctgcaagcaactctgctctgtgaccaggccaggattcctggagctggcctgagagggctcaatggaccctcggggacccaagtggggctttcaaccctctcccccaccacccagcccactgcactgaaatgagactttattctgaaattattaaaaagaacagagatgctc

SEQ ID NO: 353985 - DNA, 1199 bp, Homo sapiens
agcggggggtcgggcggcccggggggtgacgggaagggaggccggtccggcgccgcccagccccgggctccgggcgggaagtgggcgagcgcgacggtgcggggcgcgcgggcgacgggccagcgggatgggagcagggtcccccggcggcccgcagcctcgggagccgcgctgaagccgggggcgggaccagcgcggagccgacatgtgtctgcgcctcggaggcctgagtgtgggcgacttccggaaggtgctgatgaagacaggcctggtgctggtggtgctgggccatgtgagcttcatcacagctgccctgttccatggcacagtgctgcgctacgtgggcacccctcaagatgcggtggctctgcagtactgcgtggtcaacatcctctctgtcacttccgccatcgtggtcatcacttcaggcatcgcagccatcgtgttgtcacgctacctccctagcacccccctgcgctggacagtgtttagctcgagcgtggcctgtgctctcctttctctgacctgtgccctcggcctcttggcctccatcgccatgacctttgccacccagggcaaggcactgctggctgcctgcacttttgggagctctgaactactggccctcgcacctgactgtcccttcgaccccacacgcatttatgtgagtacctaggcctggagtaggggcaccaggccctcgcacgggtgggaagggctcttggaatccaccctccacccccaactccagccagccatctctgccccatgccccgcagagctccagcctgtgcctctggggcatcgccctagtgctctgcgtggcggagaacgtgtttgctgtacgctgtgctcagctcacccaccagctgctggagctgaggccctggtgggggaaaagcagccaccacatgatgcgggagaacccagagctggtggagggccgtgacctgctgagctgcaccagctctgagcctctgaccctctgagagatgatgtcctgcccaggcccgatggccactaggaccctgcaagcaactctgctctgtgaccaggccaggattcctggagctggcctgagagggctcaatggaccctcggggacccaagtggggctttcaaccctctcccccaccacccagcccactgcactgaaatgagactttattctgaaattattaaaaagaacagagatgctc

SEQ ID NO: 353986 - DNA, 1114 bp, Homo sapiens
tacaggatcttatgtgctttggacggcggaaggggaagctgttatccatacaagatgaatttagcctctgaaccccatgatgtcctgcccaggcccgatggccactaggaccctgcaagcaactctgctctgtgaccaggccaggattcctggagctggcctgagagggctcaatggaccctcggggacccaagtggggctttcaaccctctcccccaccacccagcccactgcactgaaatgagactttattctgaaattattaaaaagaacagagatgctccatttggctgcatgcagggggggcggttggggggacagaggggaggacaggggctcagccagggggaccgtgtctctttcccacgcaggacactgtgcatggggctctgggtgcatctgcccatctgtctatgggcctgtgtgtgtgtgagaggccaaacacagagagctccgtgggtctgtgtgtatccaagtgctaaaaggcaggctggctttctggggcccacagctggcgggctagtatcctggaaggtttcacttggtggcttggcctagggaccagcaagggctggggtgggaagggtggctcaaggaagcctctttctccaactccacacccctagaatccttctctcccctccagataaaaagtctcctcccctgggcatgactccccccaccccgcaagctgagacctgcaagaaggggactgcccctttgggggaggggtcgggccttggggctggtgggtgggtaagggggcctgactgaggggcagaccaacccagcctgtgtctctattgttgcctctgggattggggggtgctaaccgcttacttgctttggcctgggggtaccgcagggttcccttttccggaagccccccacagggcagacccggggagaagggcttccccaatctggcccccagccagaatacacacaagggagtggaagctaagagccgggagggggccggtgaagggagggaggaaggggaacctggctcctctcagaactgggaggcgctgctggggtcgcactgcagcagacgcacgatggacgggtcgcttttggccccgcggatgaactcctccaaggacagcttgcc

SEQ ID NO: 353987 - DNA, 464 bp, Homo sapiens
tggctccaagtcattcagaaatacatttagaacccaatgtccatcactagggccagggcctcagcttccccttctgcccagcaggataagccccacgcacagccctgacatagctgtcccccacaggaggcctgagtgtgggcgacttccggaaggtgctgatgaagacaggcctggtgctggtggtgctgggccatgtgagcttcatcacagctgccctgttccatggcacagtgctgcgctacgtgggcacccctcaagatgcggtggctctgcagtactgcgtggtcaacatcctctctgtcacttccgccatcgtggtatggccaggctgggagggtggttggtgggaggaggctggagggggcttgaagggtcttcaacaggtccccacccagagcctgtggtggtaagcagacagcctcaaggactaaccctttgtctgccacttaccaactgcccaa

SEQ ID NO: 353988 - DNA, 1084 bp, Homo sapiens
agcggggggtcgggcggcccggggggtgacgggaagggaggccggtccggcgccgcccagccccgggctccgggcgggaagtgggcgagcgcgacggtgcggggcgcgcgggcgacgggccagcgggatgggagcagggtcccccggcggcccgcagcctcgggagccgcgctgaagccgggggcgggaccagcgcggagccgacatgtgtctgcgcctcggaggcctgagtgtgggcgacttccggaaggtgctgatgaagacaggcctggtgctggtggtgctgggccatgtgagcttcatcacagctgccctgttccatggcacagtgctgcgctacgtgggcacccctcaagatgcggtggctctgcagtactgcgtggtcaacatcctctctgtcacttccgccatcgtggtcatcacttcaggcatcgcagccatcgtgttgtcacgctacctccctagcacccccctgcgctggacagtgtttagctcgagcgtggcctgtgctctcctttctctgacctgtgccctcggcctcttggcctccatcgccatgacctttgccacccagggcaaggcactgctggctgcctgcacttttgggagctctgaactactggccctcgcacctgactgtcccttcgaccccacacgcatttatagctccagcctgtgcctctggggcatcgccctagtgctctgcgtggcggagaacgtgtttgctgtacgctgtgctcagctcacccaccagctgctggagctgaggccctggtgggggaaaagcagccaccacatgatgcgggagaacccagagctggtggagggccgtgacctgctgagctgcaccagctctgagcctctgaccctctgagagatgatgtcctgcccaggcccgatggccactaggaccctgcaagcaactctgctctgtgaccaggccaggattcctggagctggcctgagagggctcaatggaccctcggggacccaagtggggctttcaaccctctcccccaccacccagcccactgcactgaaatgagactttattctgaaattattaaaaagaacagagatgctc

SEQ ID NO: 353989 - DNA, 1349 bp, Homo sapiens
agcggggggtcgggcggcccggggggtgacgggaagggaggccggtccggcgccgcccagccccgggctccgggcgggaagtgggcgagcgcgacggtgcggggcgcgcgggcgacgggccagcgggatgggagcagggtcccccggcggcccgcagcctcgggagccgcgctgaagccgggggcgggaccagcgcggagccgacatgtgtctgcgcctcggaggcctgagtgtgggcgacttccggaaggtgctgatgaagacaggcctggtgctggtggtgctgggccatgtgagcttcatcacagctgccctgttccatggcacagtgctgcgctacgtgggcacccctcaagatgcggtggctctgcagtactgcgtggtcaacatcctctctgtcacttccgccatcgtggtcatcacttcaggcatcgcagccatcgtgttgtcacgctacctccctagcacccccctgcgctggacagtgtttagctcgagcgtggcctgtgctctcctttctctgacctgtgccctcggcctcttggcctccatcgccatgacctttgccacccagggcaaggcactgctggctgcctgcacttttgggagctctgaactactggccctcgcacctgactgtcccttcgaccccacacgcatttatagctccagcctgtgcctctggggcatcgccctagtgctctgcgtggcggagaacgtgtttgctgtacgctgtgctcagctcacccaccagctgctggagctgaggccctggtgggggaaaagcagccaccacatgatgcgggagaacccagagctggtggagggccgtgacctgctgagctgcaccagctctgagcctctgaccctctgagagatgatgtcctgcccaggcccgatggccactaggaccctgcaagcaactctgctctgtgaccaggccaggattcctggagctggcctgagagggctcaatggaccctcggggacccaagtggggctttcaaccctctcccccaccacccagcccactgcactgaaatgagactttattctgaaattattaaaaagaacagagatgctcaaaaaaaaacaaaaaaacaaaaaaaaccccaggggacctctataggcgagagagggcgggaaaaagggggcaacgcaaagggcactgggccaaaaggggtccccggaccacgacgtttctggtgaacaaaggggacaaatggagaggaaaaccccaaatgaggagagccgatacaaatcgcggagaagcacggttacccggggtaagagacggggacacgcaacggaacgagaacaaacagagcacacaagacagacgaggaaac

SEQ ID NO: 353990 - DNA, 891 bp, Homo sapiens
ggagggtttcacagagtgcaggcctctgacctggaaaggggtgtcccatgcataccctggcatgccccggtggccccaggatacatgaacctgcttgagacacaggcttaggagtggggactcatggaaggttgtagagagggagtgactgttttagaaacatcatgtcaggctggactatgaggaggcagatggagatgtgaggcccaggctaagcagcaggtcatcacttcaggcatcgcagccatcgtgttgtcacgctacctccctagcacccccctgcgctggacagtgtttagctcgagcgtggcctgtgctctcctttctctgacctgtgccctcggcctcttggcctccatcgccatgacctttgccacccagggcaaggcactgctggctgcctgcacttttgggagctctgaactactggccctcgcacctgactgtcccttcgaccccacacgcatttatagctccagcctgtgcctctggggcatcgccctagtgctctgcgtggcggagaacgtgtttgctgtacgctgtgctcagctcacccaccagctgctggagctgaggccctggtgggggaaaagcagccaccacatgatgcgggagaacccagagctggtggagggccgtgacctgctgagctgcaccagctctgagcctctgaccctctgagagatgatgtcctgcccaggcccgatggccactaggaccctgcaagcaactctgctctgtgaccaggccaggattcctggagctggcctgagagggctcaatggaccctcggggacccaagtggggctttcaaccctctcccccaccacccagcccactgcactgaaatgagactttattctgaaattattaaaaagaacagagatgctc

SEQ ID NO: 353991 - DNA, 1059 bp, Homo sapiens
agcggggggtcgggcggcccggggggtgacgggaagggaggccggtccggcgccgcccagccccgggctccgggcgggaagtgggcgagcgcgacggtgcggggcgcgcgggcgacgggccagcgggatgggagcagggtcccccggcggcccgcagcctcgggagccgcgctgaagccgggggcgggaccagcgcggagccgacatgtgtctgcgcctcggaggcctgagtgtgggcgacttccggaaggtgctgatgaagacaggcctggtgctggtggtgctgggccatgtgagcttcatcacagctgccctgttccatggcacagtgctgcgctacgtgggcacccctcaagatgcggtggctctgcagtactgcgtggtcaacatcctctctgtcacttccgccatcgtggtcatcacttcaggcatcgcagccatcgtgttgtcacgctacctccctagcacccccctgcgctggacagtgtttagctcgagcgtggcctgtgctctcctttctctgacctgtgccctcggcctcttggcctccatcgccatgacctttgccacccagggcaaggcactgctggctgcctgcacttttgggagctctgaactactggccctcgcacctgactgtcccttcgaccccacacgcatttatagctccagcctgtgcctctggggcatcgccctagtgctctgcgtggcggagaacgtgtttgctgtacgctgtgctcagctcacccaccagctgctggagctgaggccctggtgggggaaaagcagccaccacatgatgcgggagaacccagagctggtggagggccgtgacctgctgagctgcaccagctctgagcctctgaccctctgagagatgatgtcctgcccaggcccgatggccactaggaccctgcaagcaactctgctctgtgaccaggccaggattcctggagctggctgaaggtccatggactcgggaccaggggcttaacctttccccacacagcatggtgatgagatttctgaatttaagaccggtgtccaaaaaaccaaaag

SEQ ID NO: 353992 - DNA, 949 bp, Homo sapiens
agcggggggtcgggcggcccggggggtgacgggaagggaggccggtccggcgccgcccagccccgggctccgggcgggaagtgggcgagcgcgacggtgcggggcgcgcgggcgacgggccagcgggatgggagcagggtcccccggcggcccgcagcctcgggagccgcgctgaagccgggggcgggaccagcgcggagccgacatgtgtctgcgcctcggaggcctgagtgtgggcgacttccggaaggtgctgatgaagacaggcctggtgctggtggtgctgggccatgtgagcttcatcacagctgccctgttccatggcacagtgctgcgctaccgctggacagtgtttagctcgagcgtggcctgtgctctcctttctctgacctgtgccctcggcctcttggcctccatcgccatgacctttgccacccagggcaaggcactgctggctgcctgcacttttgggagctctgaactactggccctcgcacctgactgtcccttcgaccccacacgcatttatagctccagcctgtgcctctggggcatcgccctagtgctctgcgtggcggagaacgtgtttgctgtacgctgtgctcagctcacccaccagctgctggagctgaggccctggtgggggaaaagcagccaccacatgatgcgggagaacccagagctggtggagggccgtgacctgctgagctgcaccagctctgagcctctgaccctctgagagatgatgtcctgcccaggcccgatggccactaggaccctgcaagcaactctgctctgtgaccaggccaggattcctggagctggcctgagagggctcaatggaccctcggggacccaagtggggctttcaaccctctcccccaccacccagcccactgcactgaaatgagactttattctgaaattattaaaaagaacagagatgctc

SEQ ID NO: 353993 - DNA, 866 bp, Homo sapiens
agcggggggtcgggcggcccggggggtgacgggaagggaggccggtccggcgccgcccagccccgggctccgggcgggaagtgggcgagcgcgacggtgcggggcgcgcgggcgacgggccagcgggatgggagcagggtcccccggcggcccgcagcctcgggagccgcgctgaagccgggggcgggaccagcgcggagccgacatgtgtctgcgcctcggaggcctgagtgtgggcgacttccggaaggtgctgatgaagacaggcctggtgctggtggtgctgggccatgtgagcttcatcacagctgccctgttccatggcacagtgctgcgctacgtgggcacccctcaagatgcggtggctctgcagtactgcgtggtcaacatcctctctgtcacttccgccatcgtggtcatcacttcaggcatcgcagccatcgtgttgtcacgctacctccctagcacccccctgggcaaggcactgctggctgcctgcacttttgggagctctgaactactggccctcgcaccagctgctggagctgaggccctggtgggggaaaagcagccaccacatgatgcgggagaacccagagctggtggagggccgtgacctgctgagctgcaccagctctgagcctctgaccctctgagagatgatgtcctgcccaggcccgatggccactaggaccctgcaagcaactctgctctgtgaccaggccaggattcctggagctggcctgagagggctcaatggaccctcggggacccaagtggggctttcaaccctctcccccaccacccagcccactgcactgaaatgagactttattctgaaattattaaaaagaacagagatgctc

SEQ ID NO: 353994 - DNA, 2639 bp, Homo sapiens
ctggagcccgaacaaacctccaccttttttggcctcgacggcggcaacccagcctccctcctaacgccctccgcctttgggaccaaccaggggagctcaagttagtagcagccaaggagaggcgctgccttgccaagactaaaaagggaggggagaagagaggaaaaaagcaagaatcccccacccctctcccgggcggagggggcgggaagagcgcgtcctggccaagccgagtagtgtcttccactcggtgcgtctctctaggagccgcgcgggaaggatgctggtccgcaggggcgcgcgcgcagggcccaggatgccgcggggctggaccgcgctttgcttgctgagtttgctgccttctgggttcatgagtcttgacaacaacggtactgctaccccagagttacctacccagggaacattttcaaatgtttctacaaatgtatcctaccaagaaactacaacacctagtacccttggaagtaccagcctgcaccctgtgtctcaacatggcaatgaggccacaacaaacatcacagaaacgacagtcaaattcacatctacctctgtgataacctcagtttatggaaacacaaactcttctgtccagtcacagacctctgtaatcagcacagtgttcaccaccccagccaacgtttcaactccagagacaaccttgaagcctagcctgtcacctggaaatgtttcagacctttcaaccactagcactagccttgcaacatctcccactaaaccctatacatcatcttctcctatcctaagtgacatcaaggcagaaatcaaatgttcaggcatcagagaagtgaaattgactcagggcatctgcctggagcaaaataagacctccagctgtgcggagtttaagaaggacaggggagagggcctggcccgagtgctgtgtggggaggagcaggctgatgctgatgctggggcccaggtatgctccctgctccttgcccagtctgaggtgaggcctcagtgtctactgctggtcttggccaacagaacagaaatttccagcaaactccaacttatgaaaaagcaccaatctgacctgaaaaagctggggatcctagatttcactgagcaagatgttgcaagccaccagagctattcccaaaagaccctgattgcactggtcacctcgggagccctgctggctgtcttgggcatcactggctatttcctgatgaatcgccgcagctggagccccacaggagaaaggctgggcgaagacccttattacacggaaaacggtggaggccagggctatagctcaggacctgggacctcccctgaggctcagggaaaggccagtgtgaaccgaggggctcaggaaaacgggaccggccaggccacctccagaaacggccattcagcaagacaacacgtggtggctgataccgaattgtgactcggctaggtggggcaaggctgggcagtgtccgagagagcacccctctctgcatctgaccacgtgctacccccatgctggaggtgacatctcttacgcccaacccttccccactgcacacacctcagaggctgttcttggggccctacaccttgaggaggggcaggtaaactcctgtcctttacacattcggctccctggagccagactctggtcttctttgggtaaacgtgtgacgggggaaagccaaggtctggagaagctcccaggaacaactcgatggccttgcagcactcacacaggacccccttcccctaccccctcctctctgccgcaatacaggaacccccaggggaaagatgagcttttctaggctacaattttctcccaggaagctttgatttttaccgtttcttccctgtattttctttctctactttgaggaaaccaaagtaaccttttgcacctgctctcttgtaatgatatagccagaaaaacgtgttgccttgaaccacttccctcatctctcctccaagacactgtggacttggtcaccagctcctcccttgttctctaagttccactgagctccatgtgccccctctaccatttgcagagtcctgcacagttttctggctggagcctagaacaggcctcccaagttttaggacaaacagctcagttctagtctctctggggccacacagaaactctttttgggctcctttttctccctctggatcaaagtaggcaggaccatgggaccaggtcttggagctgagcctctcacctgtactcttccgaaaaatcctcttcctctgaggctggatcctagccttatcctctgatctccatggcttcctcctccctcctgccgactcctgggttgagctgttgcctcagtcccccaacagatgcttttctgtctctgcctccctcaccctgagccccttccttgctctgcacccccatatggtcatagcccagatcagctcctaacccttatcaccagctgcctcttctgtgggtgacccaggtccttgtttgctgttgatttctttccagaggggttgagcagggatcctggtttcaatgacggttggaaatagaaatttccagagaagagagtattgggtagatattttttctgaatacaaagtgatgtgtttaaatactgcaattaaagtgatactgaaacaca

SEQ ID NO: 353995 - DNA, 2834 bp, Homo sapiens
ctggagcccgaacaaacctccaccttttttggcctcgacggcggcaacccagcctccctcctaacgccctccgcctttgggaccaaccaggggagctcaagttagtagcagccaaggagaggcgctgccttgccaagactaaaaagggaggggagaagagaggaaaaaagcaagaatcccccacccctctcccgggcggagggggcgggaagagcgcgtcctggccaagccgagtagtgtcttccactcggtgcgtctctctaggagccgcgcgggaaggatgctggtccgcaggggcgcgcgcgcagggcccaggatgccgcggggctggaccgcgctttgcttgctgagtttgctgccttctgggttcatgagtcttgacaacaacggtactgctaccccagagttacctacccagggaacattttcaaatgtttctacaaatgtatcctaccaagaaactacaacacctagtacccttggaagtaccagcctgcaccctgtgtctcaacatggcaatgaggccacaacaaacatcacagaaacgacagtcaaattcacatctacctctgtgataacctcagtttatggaaacacaaactcttctgtccagtcacagacctctgtaatcagcacagtgttcaccaccccagccaacgtttcaactccagagacaaccttgaagcctagcctgtcacctggaaatgtttcagacctttcaaccactagcactagccttgcaacatctcccactaaaccctatacatcatcttctcctatcctaagtgacatcaaggcagaaatcaaatgttcaggcatcagagaagtgaaattgactcagggcatctgcctggagcaaaataagacctccagctgtgcggagtttaagaaggacaggggagagggcctggcccgagtgctgtgtggggaggagcaggctgatgctgatgctggggcccaggtatgctccctgctccttgcccagtctgaggtgaggcctcagtgtctactgctggtcttggccaacagaacagaaatttccagcaaactccaacttatgaaaaagcaccaatctgacctgaaaaagctggggatcctagatttcactgagcaagatgttgcaagccaccagagctattcccaaaagaccctgattgcactggtcacctcgggagccctgctggctgtcttgggcatcactggctatttcctgatgaatcgccgcagctggagccccacaggagaaaggctggagctggaaccctgaccactcttcaggaagaaaggagtctgcacatgcagctgcaccctccctccgatccttcctcccacctccccctcccccttctcccacccctgcccccacttcctgtttgggcccctctcccatccagtgtctcacagccctgcttaccagataatgctactttatttatacactgtctagggcgaagacccttattacacggaaaacggtggaggccagggctatagctcaggacctgggacctcccctgaggctcagggaaaggccagtgtgaaccgaggggctcaggaaaacgggaccggccaggccacctccagaaacggccattcagcaagacaacacgtggtggctgataccgaattgtgactcggctaggtggggcaaggctgggcagtgtccgagagagcacccctctctgcatctgaccacgtgctacccccatgctggaggtgacatctcttacgcccaacccttccccactgcacacacctcagaggctgttcttggggccctacaccttgaggaggggcaggtaaactcctgtcctttacacattcggctccctggagccagactctggtcttctttgggtaaacgtgtgacgggggaaagccaaggtctggagaagctcccaggaacaactcgatggccttgcagcactcacacaggacccccttcccctaccccctcctctctgccgcaatacaggaacccccaggggaaagatgagcttttctaggctacaattttctcccaggaagctttgatttttaccgtttcttccctgtattttctttctctactttgaggaaaccaaagtaaccttttgcacctgctctcttgtaatgatatagccagaaaaacgtgttgccttgaaccacttccctcatctctcctccaagacactgtggacttggtcaccagctcctcccttgttctctaagttccactgagctccatgtgccccctctaccatttgcagagtcctgcacagttttctggctggagcctagaacaggcctcccaagttttaggacaaacagctcagttctagtctctctggggccacacagaaactctttttgggctcctttttctccctctggatcaaagtaggcaggaccatgggaccaggtcttggagctgagcctctcacctgtactcttccgaaaaatcctcttcctctgaggctggatcctagccttatcctctgatctccatggcttcctcctccctcctgccgactcctgggttgagctgttgcctcagtcccccaacagatgcttttctgtctctgcctccctcaccctgagccccttccttgctctgcacccccatatggtcatagcccagatcagctcctaacccttatcaccagctgcctcttctgtgggtgacccaggtccttgtttgctgttgatttctttccagaggggttgagcagggatcctggtttcaatgacggttggaaatagaaatttccagagaagagagtattgggtagatattttttctgaatacaaagtgatgtgtttaaatactgcaattaaagtgatactgaaacaca

SEQ ID NO: 353996 - DNA, 821 bp, Homo sapiens
attaaactcccttatggtatagttaaagacaaactaaggctcagagaagggagttggcttgcccaatcacccagaattccaaagtcctgaatctgtagttttcccttccatcatatcatcctactcttctgccgagtcctccgtgttactccagttggatgtcatgaagccagtgtggcagtgtgaagataggtttgggacttcacttctggagcatttcatcaacataagctatcctaggcctggccagccaagcaggtcctggaggagccccaggacaaagatcacaggaggccatgaggttcggcttcttcggcgcccacagtgagcccaggaaaattagctgtagggtattacactgttgactatggagagcatatctggaattatcttcagccagattttcatctgaatggataaatgggaataccatctaagtccagataaatagatcacttccatctcatcccttctaggtagattaatcccacacttcctcttcacacaaaaccagtaataggtcatcgattttgtgcaacaggatgctgcttctcttcctaaagcccccatcgaagaggcttccagccaccattcaatcattcatcaagtcttatgatgtgccagacactgcgcgaaatgtgccagaacatctgttatgtgccagacactgttcttgagactggggatacagcaaacactcatgaagcttataattctagcagaagaggacagtaaacaatgtcatctcagtaagtatatacatgtgttttcaggattgagagctatgaaaaacataaaatatattgagaataatggttggt

SEQ ID NO: 353997 - DNA, 1994 bp, Homo sapiens
ctggagcccgaacaaacctccaccttttttggcctcgacggcggcaacccagcctccctcctaacgccctccgcctttgggaccaaccaggggagctcaagttagtagcagccaaggagaggcgctgccttgccaagactaaaaagggaggggagaagagaggaaaaaagcaagaatcccccacccctctcccgggcggagggggcgggaagagcgcgtcctggccaagccgagtagtgtcttccactcggtgcgtctctctaggagccgcgcgggaaggatgctggtccgcaggggcgcgcgcgcagggcccaggatgccgcggggctggaccgcgctttgcttgctgagtttgctgccttctgggttcatgagtcttgacaacaacggtactgctaccccagagttacctacccagggaacattttcaaatgtttctacaaatgtatcctaccaagaaactacaacacctagtacccttggaagtaccagcctgcaccctgtgtctcaacatggcaatgaggccacaacaaacatcacagaaacgacagtcaaattcacatctacctctgtgataacctcagtttatggaaacacaaactcttctgtccagtcacagacctctgtaatcagcacagtgttcaccaccccagccaacgtttcaactccagagacaaccttgaagcctagcctgtcacctggaaatgtttcagacctttcaaccactagcactagccttgcaacatctcccactaaaccctatacatcatcttctcctatcctaagtgacatcaaggcagaaatcaaatgttcaggcatcagagaagtgaaattgactcagggcatctgcctggagcaaaataagacctccagctgtgcggagtttaagaaggacaggggagagggcctggcccgagtgctgtgtggggaggagcaggctgatgctgatgctggggcccaggtatgctccctgctccttgcccagtctgaggtgaggcctcagtgtctactgctggtcttggccaacagaacagaaatttccagcaaactccaacttatgaaaaagcaccaatctgacctgaaaaagctggggatcctagatttcactgagcaagatgttgcaagccaccagagctattcccaaaagaccctgattgcactggtcacctcgggagccctgctggctgtcttgggcatcactggctatttcctgatgaatcgccgcagctggagccccacaggagaaaggctgggcgaagacccttattacacggaaaacggtggaggccagggctatagctcaggacctgggacctcccctgaggctcagggaaaggccagtgtgaaccgaggggctcaggaaaacgggaccggccaggccacctccagaaacggccattcagcaagacaacacgtggtggctgataccgaattgtgactcggctaggtggggcaaggctgggcagtgtccgagagagcacccctctctgcatctgaccacgtgctacccccatgctggaggtgacatctcttacgcccaacccttccccactgcacacacctcagaggctgttcttggggccctacaccttgaggaggggcaggtaaactcctgtcctttacacattcggctccctggagccagactctggtcttctttgggtaaacgtgtgacgggggaaagccaaggtctggagaagctcccaggaacaactcgatggccttgcagcactcacacaggacccccttcccctaccccctcctctctgccgcaatacagatcagctcctaacccttatcaccagctgcctcttctgtgggtgacccaggtccttgtttgctgttgatttctttccagaggggttgagcagggatcctggtttcaatgacggttggaaatagaaatttccagagaagagagtattgggtagatattttttctgaatacaaagtgatgtgtttaaatactgcaattaaagtgatactgaaacaca

SEQ ID NO: 353998 - DNA, 2488 bp, Homo sapiens
ctggagcccgaacaaacctccaccttttttggcctcgacggcggcaacccagcctccctcctaacgccctccgcctttgggaccaaccaggggagctcaagttagtagcagccaaggagaggcgctgccttgccaagactaaaaagggaggggagaagagaggaaaaaagcaagaatcccccacccctctcccgggcggagggggcgggaagagcgcgtcctggccaagccgagtagtgtcttccactcggtgcgtctctctaggagccgcgcgggaaggatgctggtccgcaggggcgcgcgcgcagggcccaggatgccgcggggctggaccgcgctttgcttgctgagtttgctgccttctgggttcatgagtcttgacaacaacggtactgctaccccagagttacctacccagggaacattttcaaatgtttctacaaatgtatcctaccaagaaactacaacacctagtacccttggaagtaccagcctgcaccctgtgtctcaacatggcaatgaggccacaacaaacatcacagaaacgacagtcaaattcacatctacctctgtgataacctcagtttatggaaacacaaactcttctgtccagtcacagacctctgtaatcagcacagtgttcaccaccccagccaacgtttcaactccagagacaaccttgaagcctagcctgtcacctggaaatgtttcagacctttcaaccactagcactagccttgcaacatctcccactaaaccctatacatcatcttctcctatcctaagtgacatcaaggcagaaatcaaatgttcaggcatcagagaagtgaaattgactcagggcatctgcctggagcaaaataagacctccagctgtgcggagtttaagaaggacaggggagagggcctggcccgagtgctgtgtggggaggagcaggctgatgctgatgctggggcccaggtatgctccctgctccttgcccagtctgaggtgaggcctcagtgtctactgctggtcttggccaacagaacagaaatttccagcaaactccaacttatgaaaaagcaccaatctgacctgaaaaagctggggatcctagatttcactgagcaagatgttgcaagccaccagagctattcccaaaagaccctgattgcactggtcacctcgggagccctgctggctgtcttgggcatcactggctatttcctgatgaatcgccgcagctggagccccacaggagaaaggctgggcgaagacccttattacacggaaaacggtggaggccagggctatagctcaggacctgggacctcccctgaggctcagggaaaggccagtgtgaaccgaggggctcaggaaaacgggaccggccaggccacctccagaaacggccattcagcaagacaacacgtggtggctgataccgaattgtgactcggctaggtggggcaaggctgggcagtgtccgagagagcacccctctctgcatctgaccacgtgctacccccatgctggaggtgacatctcttacgcccaacccttccccactgcacacacctcagaggctgttcttggggccctacaccttgaggaggggcaggtaaactcctgtcctttacacattcggctccctggagccagactctggtcttctttgggtaaacgtgtgacgggggaaagccaaggtctggagaagctcccaggaacaactcgatggccttgcagcactcacacaggacccccttcccctaccccctcctctctgccgcaatacaggaacccccaggggaaagatgagcttttctaggctacaattttctcccaggaagctttgatttttaccgtttcttccctgtattttctttctctactttgaggaaaccaaagtaaccttttgcacctgctctcttgtaatgatatagccagaaaaacgtgttgccttgaaccacttccctcatctctcctccaagacactgtggacttggtcaccagctcctcccttgttctctaagttccactgagctccatgtgccccctctaccatttgcagagtcctgcacagttttctggctggagcctagaacaggcctcccaagttttaggacaaacagctcagttctagtctctctggggccacacagaaactctttttgggctcctttttctccctctggatcaaagtaggcaggaccatgggaccaggtcttggagctgagcctctcacctgtactcttccgaaaaatcctcttcctctgaggctggatcctagccttatcctctgatctccatggcttcctcctccctcctgccgactcctgggttgagctgttgcctcagtcccccaacagatgcttttctgttatgttttctccccatctttgtggttttatctacctttggtctttgattatggtgacctacagatggggttttggtgtggatgtcctttttgttaatgttgatgctattcctttctgtttgtta

SEQ ID NO: 353999 - DNA, 1532 bp, Homo sapiens
ctggagcccgaacaaacctccaccttttttggcctcgacggcggcaacccagcctccctcctaacgccctccgcctttgggaccaaccaggggagctcaagttagtagcagccaaggagaggcgctgccttgccaagactaaaaagggaggggagaagagaggaaaaaagcaagaatcccccacccctctcccgggcggagggggcgggaagagcgcgtcctggccaagccgagtagtgtcttccactcggtgcgtctctctaggagccgcgcgggaaggatgctggtccgcaggggcgcgcgcgcagggcccaggatgccgcggggctggaccgcgctttgcttgctgagtttgctgccttctgggttcatgagtcttgacaacaacggtactgctaccccagagttacctacccagggaacattttcaaatgtttctacaaatgtatcctaccaagaaactacaacacctagtacccttggaagtaccagcctgcaccctgtgtctcaacatggcaatgaggccacaacaaacatcacagaaacgacagtcaaattcacatctacctctgtgataacctcagtttatggaaacacaaactcttctgtccagtcacagacctctgtaatcagcacagtgttcaccaccccagccaacgtttcaactccagagacaaccttgaagcctagcctgtcacctggaaatgtttcagacctttcaaccactagcactagccttgcaacatctcccactaaaccctatacatcatcttctcctatcctaagtgacatcaaggcagaaatcaaatgttcaggcatcagagaagtgaaattgactcagggcatctgcctggagcaaaataagacctccagctgtgcggagtttaagaaggacaggggagagggcctggcccgagtgctgtgtggggaggagcaggctgatgctgatgctggggcccaggtatgctccctgctccttgcccagtctgaggtgaggcctcagtgtctactgctggtcttggccaacagaacagaaatttccagcaaactccaacttatgaaaaagcaccaatctgacctgaaaaagctggggatcctagatttcactgagcaagatgttgcaagccaccagagctattcccaaaagaccctgattgcactggtcacctcgggagccctgctggctgtcttgggcatcactggctatttcctgatgaatcgccgcagctggagccccacaggagaaaggctggatgctgcttctcttcctaaagcccccatcgaagaggcttccagccaccattcaatcattcatcaagtcttatgatgtgccagacactgcgcgaaatgtgccagaacatctgttatgtgccagacactgttcttgagactggggatacagcaaacactcatgaagcttataattctagcagaagaggacagtaaacaatgtcatctcagtaagtatatacatgtgttttcaggattgagagctatgaaaaacataaaatatattgagaataatggttggt

SEQ ID NO: 354000 - DNA, 839 bp, Homo sapiens
aagaaagagcatcccaggccatgggaacaacatgtgcaaaggccctagggtaggtctgagcctggaggaggagcgggtgtggcacgaggctggagagaggccctgggcaaccttttaggagatccctaaaaggggtggcctcatccagcttgctacttgtgaagctccctcaggctacactatgcgtctgtgaaagtggcattgctgccaaggtgctgggggtacctgtctccccaaggctgatcccccctcttgccctcagggccaaattctcccagatggctctgccactgaataagcattcagaagttgatcatgcacaggcccatttcattagtgctttgaaagaaaatacccttctctaagggccacccacccatggcacctacagcgtgcagatggtatgagatgaaatcctttgtcttgatcaagatcctggctctgacccttcagacaagagtccctgttgtcaagcccaggtggatgtgcaaccactgcagcttcatgatacatagcagtatgtccagcctctggtggaggaaaagcatcgtaactgcttgcacttggtgatgccttcccctcatgcacagcttgtattcagcaaaccacagactgaaggaacacctactgtgtgttgtggagcttacagttcagcaaggaggacaattagggaagtggccgccatgctgtgaggatgctcaagcagcgcctgaggcctcgtggccaggagcccgtcgctcaccacaggaagtccgagtcccggcactcgcacacgcgggacgtgagcgccgacgtgaagctcctccccttgatgcaccaggacgtggactttcttttcc

SEQ ID NO: 354001 - DNA, 445 bp, Homo sapiens
gtgcaaagacacagaggtggcgatgagcccaatctggttgggacagagtgaaaaaggggttcagctggaggggcctgagaggtgagggtggcagaacgtgtggaggtgtaagctcagcagatggtggacaccctggaggccattgtgaggctctggttctccctctgtgtgatttcaagatccattgcatggttgcagctgagaagtgaacaagccttatgacctggtttctcttgaagaggatctttccggtaggtggccttgagaaaaacacaggagggattgggaggatgtagaaattcctatttgtaagggtttgcgatctgggtatatgtccacttgagccgtgaacttactgtctcgagttctgtattctagttgggactgtttctgctaactgctgggagggtattggcacaatcacttaacgttttattcagaaggg

SEQ ID NO: 354002 - DNA, 323 bp, Homo sapiens
tctcagttcagagtcagattgtcttctctgtttgttgcaggtattgtattgcaaattccaaaattgtatcacatacccttagtcaaatatacatatgaaaatacattccagccctggcatggtggctcacacctgtaatcccagcactttgggaggccaaggcagatggatcacctgaggtcaggagtttgagaccagcctgaccaaaaaggtgaaaccctgtctctactaaaaatacaaaaattagccaggtgtggtagcaggtgcctgtagtcccagctactttggagactgagacaggagaattggttgaattcaggagg

SEQ ID NO: 354003 - DNA, 6008 bp, Homo sapiens
gtgacggactgagtacgggtgcctgtcaggctcttgcggaagtccatgcgccattgggagggcctcggccgcggctctgtgcccttgctgctgagggccacttcctgggtcattcctggaccgggagccgggctggggctcacacgggggctcccgcgtggccgtctcggcgcctgcgtgacctccccgccggcgggatgtggcgactacgtcgggccgctgtggcctgtgaggtctgccagtctttagtgaaacacagctctggaataaaaggaagtttaccactacaaaaactacatctggtttcacgaagcatttatcattcacatcatcctaccttaaagcttcaacgaccccaattaaggacatcctttcagcagttctcttctctgacaaaccttcctttacgtaaactgaaattctctccaattaaatatggctaccagcctcgcaggaatttttggccagcaagattagctacgagactcttaaaacttcgctatctcatactaggatcggctgttgggggtggctacacagccaaaaagacttttgatcagtggaaagatatgataccggaccttagtgaatataaatggattgtgcctgacattgtgtgggaaattgatgagtatatcgattttgagaaaaattagaaaagcccttcctagttcagaagaccttgtaaagttagcaccagactttgacaagattgttgaaagccttagcttattgaaggacttttttacctcaggttctccggaagaaacggcgtttagagcaacagatcgtggatctgaaagtgacaagcattttagaaaggtgtcagacaaagagaaaattgaccaacttcaggaagaacttctgcacactcagttgaagtatcagagaatcttggaacgattagaaaaggagaacaaagaattgagaaaattagtattgcagaaagatgacaaaggcattcatcatagaaagcttaagaaatctttgattgacatgtattctgaagttcttgatgttctctctgattatgatgccagttataatacgcaagatcatctgccacgggttgttgtggttggagatcagagtgctggaaagactagtgtgttggaaatgattgcccaagctcgaatattcccaagaggatctggggagatgatgacacgttctccagttaaggtgactctgagtgaaggtcctcaccatgtggccctatttaaagatagttctcgggagtttgatcttaccaaagaagaagatcttgcagcattaagacatgaaatagaacttcgaatgaggaaaaatgtgaaagaaggctgtaccgttagccctgagaccatatccttaaatgtaaaaggccctggactacagaggatggtgcttgttgacttaccaggtgtgattaatactgtgacatcaggcatggctcctgacacaaaggaaactattttcagtatcagcaaagcttacatgcagaatcctaatgccatcatactgtgtattcaagatggatctgtggatgctgaacgcagtattgttacagacttggtcagtcaaatggaccctcatggaaggagaaccatattcgttttgaccaaagtagacctggcagagaaaaatgtagccagtccaagcaggattcagcagataattgaaggaaagctcttcccaatgaaagctttaggttattttgctgttgtaacaggaaaagggaacagctctgaaagcattgaagctataagagaatatgaagaagagttttttcagaattcaaagctcctaaagacaagcatgctaaaggcacaccaagtgactacaagaaatttaagccttgcagtatcagactgcttttggaaaatggtacgagagtctgttgaacaacaggctgatagtttcaaagcaacacgttttaaccttgaaactgaatggaagaataactatcctcgcctgcgggaacttgaccggaatgaactatttgaaaaagctaaaaatgaaatccttgatgaagttatcagtctgagccaggttacaccaaaacattgggaggaaatccttcaacaatctttgtgggaaagagtatcaactcatgtgattgaaaacatctaccttccagctgcgcagaccatgaattcaggaacttttaacaccacagtggatatcaagcttaaacagtggactgataaacaacttcctaataaagcagtagaggttgcttgggagaccctacaagaagaattttcccgctttatgacagaaccgaaagggaaagagcatgatgacatatttgataaacttaaagaggctgttaaggaagaaagtattaaacgacacaagtggaatgactttgcggaggacagcttgagggttattcaacacaatgctttggaagaccgatccatatctgataaacagcaatgggatgcagctatttattttatggaagaggctctgcaggctcgtctcaaggatactgaaaatgcaattgaaaacatggtgggtccagactggaaaaagaggtggttatactggaagaatcggacccaagaacagtgtgttcacaatgaaaccaagaatgaattggagaagatgttgaaatgtaatgaggagcacccagcttatcttgcaagtgatgaaataaccacagtccggaagaaccttgaatcccgaggagtagaagtagatccaagcttgattaaggatacttggcatcaagtttatagaagacattttttaaaaacagctctaaaccattgtaacctttgtcgaagaggtttttattactaccaaaggcattttgtagattctgagttggaatgcaatgatgtggtcttgttttggcgtatacagcgcatgcttgctatcaccgcaaatactttaaggcaacaacttacaaatactgaagttaggcgattagagaaaaatgttaaagaggtattggaagattttgctgaagatggtgagaagaagattaaattgcttactggtaaacgcgttcaactggcggaagacctcaagaaagttagagaaattcaagaaaaacttgatgctttcattgaagctcttcatcaggagaaataaattaaaatcgtactcataatcagctctgcatacatctgaagaacaaaaacatcaacgtcttttgtccagcctctttttcttctgctgttccacctttctaaacatacaataaagtcatgggataaaaataatcgatgtatgttacgggcgctttaaccatcagctgcctctcgaatggaagaacagtggtaatggattaacatcctattttgttgtactaaagtgacaaatcggaataatataattggtatggccattaggttcagtccttgaagataagaagcttgttctctgtttgttgtcttatttgtggtggcactcgtttaatggattaactgaggttgctcaatgttcagtttcttttccagaaatacaatgctaggtgttttgaaataaaacttatatagcaattgtttaaagttatcaattgtatataaaatcacagtagcctgctaaatcattgtatgtgtctgtagtattctattcccagaaactatttgaccatgataattcagtttatattcaccacatgaaagaaaaatgggtaacagaagaacccctaaaacaggttaatttggattgtaacgttcagtgaaagaaatttcaacccttcatagccagcgaagaaatttgccttggaagccaagtcagtaccagcttacctatttgattcagttgctgttttctcactctctatatccatttgaaattgatttattttagatgttgtatacttacgttaggctttctgttaatagtggtttttctcctgttgacagagccaccggattatgacacaggatgaggaagattaaggataatcaattgactaatttcatttagaatattatcaaacatttcaactaggtatcagaaaaaggctttctttcataagactattttaaatagaaattatttcaacaattaaagtaatgttgaccatccccctctcagctgaataaagaaaaatttagttcaatttattgcaatttaattacaatactaccttcacaacattttcatgtgttttaaataaatattttttaattggctaaaggacattcaagcaaagaaatgctttctttacttaaaatgtctatctcatttgctgccttttcactaagcctttactttgttaataaaagtgtccattgtgtgatgtttttgattttacagtttgctaaatcttattttcttggagttgctttttggtaacagccccattgctactccccattttattgttttacatcaatgcatgcttcgttgtgatccctcaagatgtaacacttggtatgctcggttgaggatatgaaaaaatacttccgaaaccaggaattcagtgtatgtttgttttatactgtttgataagaaaagtaggtccagccttaagcagcacagatgcgctggtagatgcatagtcaggaactttttttatttcttttaggtctagggacaggagtgaatagaaagggaggagagctctattatgttctatacacagattaggagatgaccttactgggtacacccctctaaccagtgcttacaggttaatgcatgttaatgaatatttttgcagttgtaaagcataacaattacaactacacatctatttctaaagaataaaacaggaccatatttatttacttctgtcaactatagaaagaaagaccttcagctgtatttccacagatttctcccaaggaaaaggctaatattagtcactactgttatcacatccctttgtataagttttaaaaagagatggagggagatcttcatttctttgaggagatcagtattgtaacgtatgtgaatagatgataacaattaatattactaaaagtcccacatgagagtcctgacgccctctccatgccccacagtaatgtggcttctttcatgggtttttttttcttctttttagctgatctcatcctaagcatgctttatttttccttgaaagctaggtatttatcaactgcagatgttattgaaagaaaataaaattcagtctcaagagtaaaccctgtgtcttgtgtctgtagttcaaaagtcagaaatgattctaatttaaacaaaaagatactaaatatacagaagttaaattcgaactagccacagaatcatttgtttttatgtcagaatttgcaaagagtggagtggacaaagctctgtatggaagactgaacaactgtaaatagatgatatccaaacttaatttggctaggacttcaattttaaaaatcagtgtacctaggcagtgcacagcacgaaataagtggcccttgcagcttccccgtttaacccactgtgctatagttgcgggtggaacagtcaacctttctagtagtttatgatattgccctctttgtattcccattttccacagttttttccgcagacttctttctgcaaattattcagcctccaaatgcaaatgaatgatataaaaataagtagggaacatggcagagagtggtgcttcccagcctcacaatgtgggaatttgacataggatgagagtcagagtataggtttaaaagataaaatctttagttaataattttgtatttatttattctagatgtatgtatctgaggaaagaaatctggtatttttgctttccaataaaggggatcaaagtaatggtttttctctcagttctctaagctggtctatgttatagctctagcagtatggaaatgtgctttaaaatatgcttaccttttgaatgatcatggctatatgttgttgagatatttgaaacttaccttgttttcacttgtgcactgtgaatgaactttgtattatttttttaaaaccttcacattacgtgtagatattattgcaacttatattttgcctgagcttgatcaaaggtcatttgtgtagatgagtaattaaaaaatatttaaatcaca

SEQ ID NO: 354004 - DNA, 311 bp, Homo sapiens
aatttactgtcttatggaaatcttacttacttgtatttatattgcctagaatgaactatttgaaaaagctaaaaatgaaatccttgatgaagttatcagtctgagccaggttacaccaaaacattgggaggaaatccttcaacaatctttgtgggaaagagtatcaactcatgtgattgaaaacatctaccttccagctgcgcagaccatgaattcaggaacttttaacaccacagtggatatcaagcttaaacagtggactgataaacaacttcctaataaagcagtagaggttaggatataatttaatt

SEQ ID NO: 354005 - DNA, 6403 bp, Homo sapiens
gtgacggactgagtacgggtgcctgtcaggctcttgcggaagtccatgcgccattgggagggcctcggccgcggctctgtgcccttgctgctgagggccacttcctgggtcattcctggaccgggagccgggctggggctcacacgggggctcccgcgtggccgtctcggcgcctgcgtgacctccccgccggcgggatgtggcgactacgtcgggccgctgtggcctgtgaggtctgccagtctttagtgaaacacagctctggaataaaaggaagtttaccactacaaaaactacatctggtttcacgaagcatttatcattcacatcatcctaccttaaagcttcaacgaccccaattaaggacatcctttcagcagttctcttctctgacaaaccttcctttacgtaaactgaaattctctccaattaaatatggctaccagcctcgcaggaatttttggccagcaagattagctacgagactcttaaaacttcgctatctcatactaggatcggctgttgggggtggctacacagccaaaaagacttttgatcagtggaaagatatgataccggaccttagtgaatataaatggattgtgcctgacattgtgtgggaaattgatgagtatatcgattttgagaaaaattagaaaagcccttcctagttcagaagaccttgtaaagttagcaccagactttgacaagattgttgaaagccttagcttattgaaggacttttttacctcaggttctccggaagaaacggcgtttagagcaacagatcgtggatctgaaagtgacaagcattttagaaagggtctgcttggtgagctcattctcttacaacaacaaattcaagagcatgaagaggaagcgcgcagagccgctggccaatatagcacgagctatgcccaacagaagcgcaaggtgtcagacaaagagaaaattgaccaacttcaggaagaacttctgcacactcagttgaagtatcagagaatcttggaacgattagaaaaggagaacaaagaattgagaaaattagtattgcagaaagatgacaaaggcattcatcatagaaagcttaagaaatctttgattgacatgtattctgaagttcttgatgttctctctgattatgatgccagttataatacgcaagatcatctgccacgggttgttgtggttggagatcagagtgctggaaagactagtgtgttggaaatgattgcccaagctcgaatattcccaagaggatctggggagatgatgacacgttctccagttaaggtgactctgagtgaaggtcctcaccatgtggccctatttaaagatagttctcgggagtttgatcttaccaaagaagaagatcttgcagcattaagacatgaaatagaacttcgaatgaggaaaaatgtgaaagaaggctgtaccgttagccctgagaccatatccttaaatgtaaaaggccctggactacagaggatggtgcttgttgacttaccaggtgtgattaatactgtgacatcaggcatggctcctgacacaaaggaaactattttcagtatcagcaaagcttacatgcagaatcctaatgccatcatactgtgtattcaagatggatctgtggatgctgaacgcagtattgttacagacttggtcagtcaaatggaccctcatggaaggagaaccatattcgttttgaccaaagtagacctggcagagaaaaatgtagccagtccaagcaggattcagcagataattgaaggaaagctcttcccaatgaaagctttaggttattttgctgttgtaacaggaaaagggaacagctctgaaagcattgaagctataagagaatatgaagaagagttttttcagaattcaaagctcctaaagacaagcatgctaaaggcacaccaagtgactacaagaaatttaagccttgcagtatcagactgcttttggaaaatggtacgagagtctgttgaacaacaggctgatagtttcaaagcaacacgttttaaccttgaaactgaatggaagaataactatcctcgcctgcgggaacttgaccggaatgaactatttgaaaaagctaaaaatgaaatccttgatgaagttatcagtctgagccaggttacaccaaaacattgggaggaaatccttcaacaatctttgtgggaaagagtatcaactcatgtgattgaaaacatctaccttccagctgcgcagaccatgaattcaggaacttttaacaccacagtggatatcaagcttaaacagtggactgataaacaacttcctaataaagcagtagaggttgcttgggagaccctacaagaagaattttcccgctttatgacagaaccgaaagggaaagagcatgatgacatatttgataaacttaaagaggctgttaaggaagaaagtattaaacgacacaagtggaatgactttgcggaggacagcttgagggttattcaacacaatgctttggaagaccgatccatatctgataaacagcaatgggatgcagctatttattttatggaagaggctctgcaggctcgtctcaaggatactgaaaatgcaattgaaaacatggtgggtccagactggaaaaagaggtggttatactggaagaatcggacccaagaacagtgtgttcacaatgaaaccaagaatgaattggagaagatgttgaaatgtaatgaggagcacccagcttatcttgcaagtgatgaaataaccacagtccggaagaaccttgaatcccgaggagtagaagtagatccaagcttgattaaggatacttggcatcaagtttatagaagacattttttaaaaacagctctaaaccattgtaacctttgtcgaagaggtttttattactaccaaaggcattttgtagattctgagttggaatgcaatgatgtggtcttgttttggcgtatacagcgcatgcttgctatcaccgcaaatactttaaggcaacaacttacaaatactgaagttaggcgattagagaaaaatgttaaagaggtattggaagattttgctgaagatggtgagaagaagattaaattgcttactggtaaacgcgttcaactggcggaagacctcaagaaagttagagaaattcaagaaaaacttgatgctttcattgaagctcttcatcaggagaaataaattaaaatcgtactcataatcagctctgcatacatctgaagaacaaaaacatcaacgtcttttgtccagcctctttttcttctgctgttccacctttctaaacatacaataaagtcatgggataaaaataatcgatgtatgttacgggcgctttaaccatcagctgcctctcgaatggaagaacagtggtaatggattaacatcctattttgttgtactaaagtgacaaatcggaataatataattggtatggccattaggttcagtccttgaagataagaagcttgttctctgtttgttgtcttatttgtggtggcactcgtttaatggattaactgaggttgctcaatgttcagtttcttttccagaaatacaatgctaggtgttttgaaataaaacttatatagcaattgtttaaagttatcaattgtatataaaatcacagtagcctgctaaatcattgtatgtgtctgtagtattctattcccagaaactatttgaccatgataattcagtttatattcaccacatgaaagaaaaatgggtaacagaagaacccctaaaacaggttaatttggattgtaacgttcagtgaaagaaatttcaacccttcatagccagcgaagaaatttgccttggaagccaagtcagtaccagcttacctatttgattcagttgctgttttctcactctctatatccatttgaaattgatttattttagatgttgtatacttacgttaggctttctgttaatagtggtttttctcctgttgacagagccaccggattatgacacaggatgaggaagattaaggataatcaattgactaatttcatttagaatattatcaaacatttcaactaggtatcagaaaaaggctttctttcataagactattttaaatagaaattatttcaacaattaaagtaatgttgaccatccccctctcagctgaataaagaaaaatttagttcaatttattgcaatttaattacaatactaccttcacaacattttcatgtgttttaaataaatattttttaattggctaaaggacattcaagcaaagaaatgctttctttacttaaaatgtctatctcatttgctgccttttcactaagcctttactttgttaataaaagtgtccattgtgtgatgtttttgattttacagtttgctaaatcttattttcttggagttgctttttggtaacagccccattgctactccccattttattgttttacatcaatgcatgcttcgttgtgatccctcaagatgtaacacttggtatgctcggttgaggatatgaaaaaatacttccgaaaccaggaattcagtgtatgtttgttttatactgtttgataagaaaagtaggtccagccttaagcagcacagatgcgctggtagatgcatagtcaggaactttttttatttcttttaggtctagggacaggagtgaatagaaagggaggagagctctattatgttctatacacagattaggagatgaccttactgggtacacccctctaaccagtgcttacaggttaatgcatgttaatgaatatttttgcagttgtaaagcataacaattacaactacacatctatttctaaagaataaaacaggaccatatttatttacttctgtcaactatagaaagaaagaccttcagctgtatttccacagatttctcccaaggaaaaggctaatattagtcactactgttatcacatccctttgtataagttttaaaaagagatggagggagatcttcatttctttgaggagatcagtattgtaacgtatgtgaatagatgataacaattaatattactaaaagtcccacatgagagtcctgacgccctctccatgccccacagtaatgtggcttctttcatgggtttttttttcttctttttagctgatctcatcctaagcatgctttatttttccttgaaagctaggtatttatcaactgcagatgttattgaaagaaaataaaattcagtctcaagagtaaaccctgtgtcttgtgtctgtagttcaaaagtcagaaatgattctaatttaaacaaaaagatactaaatatacagaagttaaattcgaactagccacagaatcatttgtttttatgtcagaatttgcaaagagtggagtggacaaagctctgtatggaagactgaacaactgtaaatagatgatatccaaacttaatttggctaggacttcaattttaaaaatcagtgtacctaggcagtgcacagcacgaaataagtggcccttgcagcttccccgtttaacccactgtgctatagttgcgggtggaacagtcaacctttctagtagtttatgatattgccctctttgtattcccattttccacagttttttccgcagacttctttctgcaaattattcagcctccaaatgcaaatgaatgatataaaaataagtagggaacatggcagagagtggtgcttcccagcctcacaatgtgggaatttgacataggatgagagtcagagtataggtttaaaagataaaatctttagttaataattttgtatttatttattctagatgtatgtatctgaggaaagaaatctggtatttttgctttccaataaaggggatcaaagtaatggtttttctctcagttctctaagctggtctatgttatagctctagcagtatggaaatgtgctttaaaatatgcttaccttttgaatgatcatggctatatgttgttgagatatttgaaacttaccttgttttcacttgtgcactgtgaatgaactttgtattatttttttaaaaccttcacattacgtgtagatattattgcaacttatattttgcctgagcttgatcaaaggtcatttgtgtagatgagtaattaaaaaatatttaaatcacattataattctattattggagagcatcttttaaatttttttctgttttaacgagggaaagagaaacctgtatacctagggtcattatttgaccccatagtataaccagattcatggtctaacaagctctcagtgtggcttttctctgaatgcttgaatttcacatgccttgcatttcacagttgtactccatggtcaaccggtgctttttttcacatcgtggtacttgtcaaaacattttgttattttccttggtaaaatatataaaaaaggttttctaatttca

SEQ ID NO: 354006 - DNA, 7810 bp, Homo sapiens
  misc_feature (1931)..(1931): n is a, c, g, or t
gtgacggactgagtacgggtgcctgtcaggctcttgcggaagtccatgcgccattgggagggcctcggccgcggctctgtgcccttgctgctgagggccacttcctgggtcattcctggaccgggagccgggctggggctcacacgggggctcccgcgtggccgtctcggcgcctgcgtgacctccccgccggcgggatgtggcgactacgtcgggccgctgtggcctgtgaggtctgccagtctttagtgaaacacagctctggaataaaaggaagtttaccactacaaaaactacatctggtttcacgaagcatttatcattcacatcatcctaccttaaagcttcaacgaccccaattaaggacatcctttcagcagttctcttctctgacaaaccttcctttacgtaaactgaaattctctccaattaaatatggctaccagcctcgcaggaatttttggccagcaagattagctacgagactcttaaaacttcgctatctcatactaggatcggctgttgggggtggctacacagccaaaaagacttttgatcagtggaaagatatgataccggaccttagtgaatataaatggattgtgcctgacattgtgtgggaaattgatgagtatatcgattttggtttgtatcatgaacattaaaatactttttttggtcatctcgaggaaagagaaatagtttattgagatagtttcttaacttatgaacctaatatatcacggttttattttaatgatataagtaatagaatatcaatgaaaaaatctgtataaaagaaatacccagtagcccataattttaccacagctgccactaactgtttggagcattttcttttaattatacttactatatgtggttagtatctttttaacttatcgattgagacaggatcttgctctgtcactcaggctgaagtgcggtcttggaatcataactcactgcagccctgaactggctaaagtagtccttccgactctgcctcccaagtagccgggactacatgtgtgtgccaccatgcccgactgattttttaatttcttgtagagatgaagtctcactatgttgcccaggctagtctcaaattccttagctcaaacctctcacctcagcctctcaaagcactgagattacaagtgtgagccactatgcctggcttgagtttttttcttttaatttttttcttttcatgaatactaccacagaatagtattttagttccctttttaaaaattatgtaatcatggtgaatattcactttggtattttgtcttttgctacctaacatattttgtcagcatttccatgctgccaagtagcctttctattaataatatcattttctgcattatgtaatgttgcccagagcatatttattgtgacccacctagctagctccttttgattggataccttggttatctctaccttttgtagccaagttctttaaaagtctgttagtatccagggtaatttcttttcttagttggccactgccctccctttttcaataggtggatgagaaaaaagtatattggatcgctatgattgccagtaattcatggtgatctttaagaaatatattttcatcaaatttttttaaaacctttgtcagatttcttagtttaggtgtatgtggaggtggaattaatctatacttgcacttattcacagaatttataaagataaaactgttctatgttgacgaatccatttgcaaaaaaagcacactttcaaattgttcttctaatattaatgaggagagctttcaaattgatgtatttgccagtaccacagcgtagtggctgagagcctgtattctggagctggactgcctgggctggaacccgggctcctccacttccttgctgtgtaccttagtttctcatctgtaaatggtgttgatnatagtagctgttttgtagggttgtcatgaggattaaacaagttaatactttagccctttataagaatagtatctgacatattttcttagtttcatactctatatgttttgatcttttccagagaaaaattagaaaagcccttcctagttcagaagaccttgtaaagttagcaccagactttgacaagattgttgaaagccttagcttattgaaggacttttttacctcaggttctccggaagaaacggcgtttagagcaacagatcgtggatctgaaagtgacaagcattttagaaagggtctgcttggtgagctcattctcttacaacaacaaattcaagagcatgaagaggaagcgcgcagagccgctggccaatatagcacgagctatgcccaacagaagcgcaaggtgtcagacaaagagaaaattgaccaacttcaggaagaacttctgcacactcagttgaagtatcagagaatcttggaacgattagaaaaggagaacaaagaattgagaaaattagtattgcagaaagatgacaaaggcattcatcatagaaagcttaagaaatctttgattgacatgtattctgaagttcttgatgttctctctgattatgatgccagttataatacgcaagatcatctgccacgggttgttgtggttggagatcagagtgctggaaagactagtgtgttggaaatgattgcccaagctcgaatattcccaagaggatctggggagatgatgacacgttctccagttaaggtgactctgagtgaaggtcctcaccatgtggccctatttaaagatagttctcgggagtttgatcttaccaaagaagaagatcttgcagcattaagacatgaaatagaacttcgaatgaggaaaaatgtgaaagaaggctgtaccgttagccctgagaccatatccttaaatgtaaaaggccctggactacagaggatggtgcttgttgacttaccaggtgtgattaatactgtgacatcaggcatggctcctgacacaaaggaaactattttcagtatcagcaaagcttacatgcagaatcctaatgccatcatactgtgtattcaagatggatctgtggatgctgaacgcagtattgttacagacttggtcagtcaaatggaccctcatggaaggagaaccatattcgttttgaccaaagtagacctggcagagaaaaatgtagccagtccaagcaggattcagcagataattgaaggaaagctcttcccaatgaaagctttaggttattttgctgttgtaacaggaaaagggaacagctctgaaagcattgaagctataagagaatatgaagaagagttttttcagaattcaaagctcctaaagacaagcatgctaaaggcacaccaagtgactacaagaaatttaagccttgcagtatcagactgcttttggaaaatggtacgagagtctgttgaacaacaggctgatagtttcaaagcaacacgttttaaccttgaaactgaatggaagaataactatcctcgcctgcgggaacttgaccggaatgaactatttgaaaaagctaaaaatgaaatccttgatgaagttatcagtctgagccaggttacaccaaaacattgggaggaaatccttcaacaatctttgtgggaaagagtatcaactcatgtgattgaaaacatctaccttccagctgcgcagaccatgaattcaggaacttttaacaccacagtggatatcaagcttaaacagtggactgataaacaacttcctaataaagcagtagaggttgcttgggagaccctacaagaagaattttcccgctttatgacagaaccgaaagggaaagagcatgatgacatatttgataaacttaaagaggctgttaaggaagaaagtattaaacgacacaagtggaatgactttgcggaggacagcttgagggttattcaacacaatgctttggaagaccgatccatatctgataaacagcaatgggatgcagctatttattttatggaagaggctctgcaggctcgtctcaaggatactgaaaatgcaattgaaaacatggtgggtccagactggaaaaagaggtggttatactggaagaatcggacccaagaacagtgtgttcacaatgaaaccaagaatgaattggagaagatgttgaaatgtaatgaggagcacccagcttatcttgcaagtgatgaaataaccacagtccggaagaaccttgaatcccgaggagtagaagtagatccaagcttgattaaggatacttggcatcaagtttatagaagacattttttaaaaacagctctaaaccattgtaacctttgtcgaagaggtttttattactaccaaaggcattttgtagattctgagttggaatgcaatgatgtggtcttgttttggcgtatacagcgcatgcttgctatcaccgcaaatactttaaggcaacaacttacaaatactgaagttaggcgattagagaaaaatgttaaagaggtattggaagattttgctgaagatggtgagaagaagattaaattgcttactggtaaacgcgttcaactggcggaagacctcaagaaagttagagaaattcaagaaaaacttgatgctttcattgaagctcttcatcaggagaaataaattaaaatcgtactcataatcagctctgcatacatctgaagaacaaaaacatcaacgtcttttgtccagcctctttttcttctgctgttccacctttctaaacatacaataaagtcatgggataaaaataatcgatgtatgttacgggcgctttaaccatcagctgcctctcgaatggaagaacagtggtaatggattaacatcctattttgttgtactaaagtgacaaatcggaataatataattggtatggccattaggttcagtccttgaagataagaagcttgttctctgtttgttgtcttatttgtggtggcactcgtttaatggattaactgaggttgctcaatgttcagtttcttttccagaaatacaatgctaggtgttttgaaataaaacttatatagcaattgtttaaagttatcaattgtatataaaatcacagtagcctgctaaatcattgtatgtgtctgtagtattctattcccagaaactatttgaccatgataattcagtttatattcaccacatgaaagaaaaatgggtaacagaagaacccctaaaacaggttaatttggattgtaacgttcagtgaaagaaatttcaacccttcatagccagcgaagaaatttgccttggaagccaagtcagtaccagcttacctatttgattcagttgctgttttctcactctctatatccatttgaaattgatttattttagatgttgtatacttacgttaggctttctgttaatagtggtttttctcctgttgacagagccaccggattatgacacaggatgaggaagattaaggataatcaattgactaatttcatttagaatattatcaaacatttcaactaggtatcagaaaaaggctttctttcataagactattttaaatagaaattatttcaacaattaaagtaatgttgaccatccccctctcagctgaataaagaaaaatttagttcaatttattgcaatttaattacaatactaccttcacaacattttcatgtgttttaaataaatattttttaattggctaaaggacattcaagcaaagaaatgctttctttacttaaaatgtctatctcatttgctgccttttcactaagcctttactttgttaataaaagtgtccattgtgtgatgtttttgattttacagtttgctaaatcttattttcttggagttgctttttggtaacagccccattgctactccccattttattgttttacatcaatgcatgcttcgttgtgatccctcaagatgtaacacttggtatgctcggttgaggatatgaaaaaatacttccgaaaccaggaattcagtgtatgtttgttttatactgtttgataagaaaagtaggtccagccttaagcagcacagatgcgctggtagatgcatagtcaggaactttttttatttcttttaggtctagggacaggagtgaatagaaagggaggagagctctattatgttctatacacagattaggagatgaccttactgggtacacccctctaaccagtgcttacaggttaatgcatgttaatgaatatttttgcagttgtaaagcataacaattacaactacacatctatttctaaagaataaaacaggaccatatttatttacttctgtcaactatagaaagaaagaccttcagctgtatttccacagatttctcccaaggaaaaggctaatattagtcactactgttatcacatccctttgtataagttttaaaaagagatggagggagatcttcatttctttgaggagatcagtattgtaacgtatgtgaatagatgataacaattaatattactaaaagtcccacatgagagtcctgacgccctctccatgccccacagtaatgtggcttctttcatgggtttttttttcttctttttagctgatctcatcctaagcatgctttatttttccttgaaagctaggtatttatcaactgcagatgttattgaaagaaaataaaattcagtctcaagagtaaaccctgtgtcttgtgtctgtagttcaaaagtcagaaatgattctaatttaaacaaaaagatactaaatatacagaagttaaattcgaactagccacagaatcatttgtttttatgtcagaatttgcaaagagtggagtggacaaagctctgtatggaagactgaacaactgtaaatagatgatatccaaacttaatttggctaggacttcaattttaaaaatcagtgtacctaggcagtgcacagcacgaaataagtggcccttgcagcttccccgtttaacccactgtgctatagttgcgggtggaacagtcaacctttctagtagtttatgatattgccctctttgtattcccattttccacagttttttccgcagacttctttctgcaaattattcagcctccaaatgcaaatgaatgatataaaaataagtagggaacatggcagagagtggtgcttcccagcctcacaatgtgggaatttgacataggatgagagtcagagtataggtttaaaagataaaatctttagttaataattttgtatttatttattctagatgtatgtatctgaggaaagaaatctggtatttttgctttccaataaaggggatcaaagtaatggtttttctctcagttctctaagctggtctatgttatagctctagcagtatggaaatgtgctttaaaatatgcttaccttttgaatgatcatggctatatgttgttgagatatttgaaacttaccttgttttcacttgtgcactgtgaatgaactttgtattatttttttaaaaccttcacattacgtgtagatattattgcaacttatattttgcctgagcttgatcaaaggtcatttgtgtagatgagtaattaaaaaatatttaaatcacattataattctattattggagagcatcttttaaatttttttctgttttaacgagggaaagagaaacctgtatacctagggtcattatttgaccccatagtataaccagattcatggtctaacaagctctcagtgtggcttttctctgaatgcttgaatttcacatgccttgcatttcacagttgtactccatggtcaaccggtgctttttttcacatcgtggtacttgtcaaaacattttgttattttccttggtaaaatatataaaaaaggttttctaatttca

SEQ ID NO: 354007 - DNA, 6350 bp, Homo sapiens
gtgacggactgagtacgggtgcctgtcaggctcttgcggaagtccatgcgccattgggagggcctcggccgcggctctgtgcccttgctgctgagggccacttcctgggtcattcctggaccgggagccgggctggggctcacacgggggctcccgcgtggccgtctcggcgcctgcgtgacctccccgccggcgggatgtggcgactacgtcgggccgctgtggcctgtgaggtctgccagtctttagtgaaacacagctctggaataaaaggaagtttaccactacaaaaactacatctggtttcacgaagcatttatcattcacatcatcctaccttaaagcttcaacgaccccaattaaggacatcctttcagcagttctcttctctgacaaaccttcctttacgtaaactgaaattctctccaattaaatatggctaccagcctcgcaggaatttttggccagcaagattagctacgagactcttaaaacttcgctatctcatactaggatcggctgttgggggtggctacacagccaaaaagacttttgatcagtggaaagatatgataccggaccttagtgaatataaatggattgtgcctgacattgtgtgggaaattgatgagtatatcgattttgagaaaaattagaaaagcccttcctagttcagaagaccttgtaaagttagcaccagactttgacaagattgttgaaagccttagcttattgaaggacttttttacctcaggttctccggaagaaacggcgtttagagcaacagatcgtggatctgaaagtgacaagcattttagaaagggtctgcttggtgagctcattctcttacaacaacaaattcaagagcatgaagaggaagcgcgcagagccgctggccaatatagcacgagctatgcccaacagaagcgcaaggtgtcagacaaagagaaaattgaccaacttcaggaagaacttctgcacactcagttgaagtatcagagaatcttggaacgattagaaaaggagaacaaagaattgagaaaattagtattgcagaaagatgacaaaggcattcatcatagaaagcttaagaaatctttgattgacatgtattctgaagttcttgatgttctctctgattatgatgccagttataatacgcaagatcatctgccacgggttgttgtggttggagatcagagtgctggaaagactagtgtgttggaaatgattgcccaagctcgaatattcccaagaggatctggggagatgatgacacgttctccagttaaggtgactctgagtgaaggtcctcaccatgtggccctatttaaagatagttctcgggagtttgatcttaccaaagaagaagatcttgcagcattaagacatgaaatagaacttcgaatgaggaaaaatgtgaaagaaggctgtaccgttagccctgagaccatatccttaaatgtaaaaggccctggactacagaggatggtgcttgttgacttaccaggtgtgattaatactgtgacatcaggcatggctcctgacacaaaggaaactattttcagtatcagcaaagcttacatgcagaatcctaatgccatcatactgtgtattcaagatggatctgtggatgctgaacgcagtattgttacagacttggtcagtcaaatggaccctcatggaaggagaaccatattcgttttgaccaaagtagacctggcagagaaaaatgtagccagtccaagcaggattcagcagataattgaaggaaagctcttcccaatgaaagctttaggttattttgctgttgtaacaggaaaagggaacagctctgaaagcattgaagctataagagaatatgaagaagagttttttcagaattcaaagctcctaaagacaagcatgctaaaggcacaccaagtgactacaagaaatttaagccttgcagtatcagactgcttttggaaaatggtacgagagtctgttgaacaacaggctgatagtttcaaagcaacacgttttaaccttgaaactgaatggaagaataactatcctcgcctgcgggaacttgaccggaatgaactatttgaaaaagctaaaaatgaaatccttgatgaagttatcagtctgagccaggttacaccaaaacattgggaggaaatccttcaacaatctttgtgggaaagagtatcaactcatgtgattgaaaacatctaccttccagctgcgcagaccatgaattcaggaacttttaacaccacagtggatatcaagcttaaacagtggactgataaacaacttcctaataaagcagtagaggttgcttgggagaccctacaagaagaattttcccgctttatgacagaaccgaaagggaaagagcatgatgacatatttgataaacttaaagaggctgttaaggaagaaagtattaaacgacacaagtggaatgactttgcggaggacagcttgagggttattcaacacaatgctttggaagaccgatccatatctgataaacagcaatgggatgcagctatttattttatggaagaggctctgcaggctcgtctcaaggatactgaaaatgcaattgaaaacatggtgggtccagactggaaaaagaggtggttatactggaagaatcggacccaagaacagtgtgttcacaatgaaaccaagaatgaattggagaagatgttgaaatgtaatgaggagcacccagcttatcttgcaagtgatgaaataaccacagtccggaagaaccttgaatcccgaggagtagaagtagatccaagcttgattaaggatacttggcatcaagtttatagaagacattttttaaaaacagctctaaaccattgtaacctttgtcgaagaggtttttattactaccaaaggcattttgtagattctgagttggaatgcaatgatgtggtcttgttttggcgtatacagcgcatgcttgctatcaccgcaaatactttaaggcaacaacttacaaatactgaagttaggcgattagagaaaaatgttaaagaggtattggaagattttgctgaagatggtgagaagaagattaaattgcttactggtaaacgcgttcaactggcggaagacctcaagaaagttagagaaattcaagaaaaacttgatgctttcattgaagctcttcatcaggagaaataaattaaaatcgtactcataatcagctctgcatacatctgaagaacaaaaacatcaacgtcttttgtccagcctctttttcttctgctgttccacctttctaaacatacaataaagtcatgggataaaaataatcgatgtatgttacgggcgctttaaccatcagctgcctctcgaatggaagaacagtggtaatggattaacatcctattttgttgtactaaagtgacaaatcggaataatataattggtatggccattaggttcagtccttgaagataagaagcttgttctctgtttgttgtcttatttgtggtggcactcgtttaatggattaactgaggttgctcaatgttcagtttcttttccagaaatacaatgctaggtgttttgaaataaaacttatatagcaattgtttaaagttatcaattgtatataaaatcacagtagcctgctaaatcattgtatgtgtctgtagtattctattcccagaaactatttgaccatgataattcagtttatattcaccacatgaaagaaaaatgggtaacagaagaaccccatagccagcgaagaaatttgccttggaagccaagtcagtaccagcttacctatttgattcagttgctgttttctcactctctatatccatttgaaattgatttattttagatgttgtatacttacgttaggctttctgttaatagtggtttttctcctgttgacagagccaccggattatgacacaggatgaggaagattaaggataatcaattgactaatttcatttagaatattatcaaacatttcaactaggtatcagaaaaaggctttctttcataagactattttaaatagaaattatttcaacaattaaagtaatgttgaccatccccctctcagctgaataaagaaaaatttagttcaatttattgcaatttaattacaatactaccttcacaacattttcatgtgttttaaataaatattttttaattggctaaaggacattcaagcaaagaaatgctttctttacttaaaatgtctatctcatttgctgccttttcactaagcctttactttgttaataaaagtgtccattgtgtgatgtttttgattttacagtttgctaaatcttattttcttggagttgctttttggtaacagccccattgctactccccattttattgttttacatcaatgcatgcttcgttgtgatccctcaagatgtaacacttggtatgctcggttgaggatatgaaaaaatacttccgaaaccaggaattcagtgtatgtttgttttatactgtttgataagaaaagtaggtccagccttaagcagcacagatgcgctggtagatgcatagtcaggaactttttttatttcttttaggtctagggacaggagtgaatagaaagggaggagagctctattatgttctatacacagattaggagatgaccttactgggtacacccctctaaccagtgcttacaggttaatgcatgttaatgaatatttttgcagttgtaaagcataacaattacaactacacatctatttctaaagaataaaacaggaccatatttatttacttctgtcaactatagaaagaaagaccttcagctgtatttccacagatttctcccaaggaaaaggctaatattagtcactactgttatcacatccctttgtataagttttaaaaagagatggagggagatcttcatttctttgaggagatcagtattgtaacgtatgtgaatagatgataacaattaatattactaaaagtcccacatgagagtcctgacgccctctccatgccccacagtaatgtggcttctttcatgggtttttttttcttctttttagctgatctcatcctaagcatgctttatttttccttgaaagctaggtatttatcaactgcagatgttattgaaagaaaataaaattcagtctcaagagtaaaccctgtgtcttgtgtctgtagttcaaaagtcagaaatgattctaatttaaacaaaaagatactaaatatacagaagttaaattcgaactagccacagaatcatttgtttttatgtcagaatttgcaaagagtggagtggacaaagctctgtatggaagactgaacaactgtaaatagatgatatccaaacttaatttggctaggacttcaattttaaaaatcagtgtacctaggcagtgcacagcacgaaataagtggcccttgcagcttccccgtttaacccactgtgctatagttgcgggtggaacagtcaacctttctagtagtttatgatattgccctctttgtattcccattttccacagttttttccgcagacttctttctgcaaattattcagcctccaaatgcaaatgaatgatataaaaataagtagggaacatggcagagagtggtgcttcccagcctcacaatgtgggaatttgacataggatgagagtcagagtataggtttaaaagataaaatctttagttaataattttgtatttatttattctagatgtatgtatctgaggaaagaaatctggtatttttgctttccaataaaggggatcaaagtaatggtttttctctcagttctctaagctggtctatgttatagctctagcagtatggaaatgtgctttaaaatatgcttaccttttgaatgatcatggctatatgttgttgagatatttgaaacttaccttgttttcacttgtgcactgtgaatgaactttgtattatttttttaaaaccttcacattacgtgtagatattattgcaacttatattttgcctgagcttgatcaaaggtcatttgtgtagatgagtaattaaaaaatatttaaatcacattataattctattattggagagcatcttttaaatttttttctgttttaacgagggaaagagaaacctgtatacctagggtcattatttgaccccatagtataaccagattcatggtctaacaagctctcagtgtggcttttctctgaatgcttgaatttcacatgccttgcatttcacagttgtactccatggtcaaccggtgctttttttcacatcgtggtacttgtcaaaacattttgttattttccttggtaaaatatataaaaaaggttttctaatttca

SEQ ID NO: 354008 - DNA, 5084 bp, Homo sapiens
gtgacggactgagtacgggtgcctgtcaggctcttgcggaagtccatgcgccattgggagggcctcggccgcggctctgtgcccttgctgctgagggccacttcctgggtcattcctggaccgggagccgggctggggctcacacgggggctcccgcgtggccgtctcggcgcctgcgtgacctccccgccggcgggatgtggcgactacgtcgggccgctgtggcctgtgaggtctgccagtctttagtgaaacacagctctggaataaaaggaagtttaccactacaaaaactacatctggtttcacgaagcatttatcattcacatcatcctaccttaaagcttcaacgaccccaattaaggacatcctttcagcagttctcttctctgacaaaccttcctttacgtaaactgaaattctctccaattaaatatggctaccagcctcgcaggaatttttggccagcaagattagctacgagactcttaaaacttcgctatctcatactaggatcggctgttgggggtggctacacagccaaaaagacttttgatcagtggaaagatatgataccggaccttagtgaatataaatggattgtgcctgacattgtgtgggaaattgatgagtatatcgattttgagaaaaattagaaaagcccttcctagttcagaagaccttgtaaagttagcaccagactttgacaagattgttgaaagccttagcttattgaaggacttttttacctcaggttctccggaagaaacggcgtttagagcaacagatcgtggatctgaaagtgacaagcattttagaaagggtctgcttggtgagctcattctcttacaacaacaaattcaagagcatgaagaggaagcgcgcagagccgctggccaatatagcacgagctatgcccaacagaagcgcaaggtgtcagacaaagagaaaattgaccaacttcaggaagaacttctgcacactcagttgaagtatcagagaatcttggaacgattagaaaaggagaacaaagaattgagaaaattagtattgcagaaagatgacaaaggcattcatcatagaaagcttaagaaatctttgattgacatgtattctgaagttcttgatgttctctctgattatgatgccagttataatacgcaagatcatctgccacgggttgttgtggttggagatcagagtgctggaaagactagtgtgttggaaatgattgcccaagctcgaatattcccaagaggatctggggagatgatgacacgttctccagttaaggtgactctgagtgaaggtcctcaccatgtggccctatttaaagatagttctcgggagtttgatcttaccaaagaagaagatcttgcagcattaagacatgaaatagaacttcgaatgaggaaaaatgtgaaagaaggctgtaccgttagccctgagaccatatccttaaatgtaaaaggccctggactacagaggatggtgcttgttgacttaccaggtgtgattaatactgtgacatcaggcatggctcctgacacaaaggaaactattttcagtatcagcaaagcttacatgcagaatcctaatgccatcatactgtgtattcaagatggatctgtggatgctgaacgcagtattgttacagacttggtcagtcaaatggaccctcatggaaggagaaccatattcgttttgaccaaagtagacctggcagagaaaaatgtagccagtccaagcaggattcagcagataattgaaggaaagctcttcccaatgaaagctttaggttattttgctgttgtaacaggaaaagggaacagctctgaaagcattgaagctataagagaatatgaagaagagttttttcagaattcaaagctcctaaagacaagcatgctaaaggcacaccaagtgactacaagaaatttaagccttgcagtatcagactgcttttggaaaatggtacgagagtctgttgaacaacaggctgatagtttcaaagcaacacgttttaaccttgaaactgaatggaagaataactatcctcgcctgcgggaacttgaccggaatgaactatttgaaaaagctaaaaatgaaatccttgatgaagttatcagtctgagccaggttacaccaaaacattgggaggaaatccttcaacaatctttgtgggaaagagtatcaactcatgtgattgaaaacatctaccttccagctgcgcagaccatgaattcaggaacttttaacaccacagtggatatcaagcttaaacagtggactgataaacaacttcctaataaagcagtagaggttgcttgggagaccctacaagaagaattttcccgctttatgacagaaccgaaagggaaagagcatgatgacatatttgataaacttaaagaggctgttaaggaagaaagtattaaacgacacaagtggaatgactttgcggaggacagcttgagggttattcaacacaatgctttggaagaccgatccatatctgataaacagcaatgggatgcagctatttattttatggaagaggctctgcaggctcgtctcaaggatactgaaaatgcaattgaaaacatggtgggtccagactggaaaaagaggtggttatactggaagaatcggacccaagaacagtgtgttcacaatgaaaccaagaatgaattggagaagatgttgaaatgtaatgaggagcacccagcttatcttgcaagtgatgaaataaccacagtccggaagaaccttgaatcccgaggagtagaagtagatccaagcttgattaaggatacttggcatcaagtttatagaagacattttttaaaaacagctctaaaccattgtaacctttgtcgaagaggtttttattactaccaaaggcattttgtagattctgagttggaatgcaatgatgtggtcttgttttggcgtatacagcgcatgcttgctatcaccgcaaatactttaaggcaacaacttacaaatactgaagttaggcgattagagaaaaatgttaaagaggtattggaagattttgctgaagatggtgagaagaagattaaattgcttactggtaaacgcgttcaactggcggaagacctcaagaaagttagagaaattcaagaaaaacttgatgctttcattgaagctcttcatcaggagaaataaattaaaatcgtactcataatcagctctgcatacatctgaagaacaaaaacatcaacgtcttttgtccagcctctttttcttctgctgttccacctttctaaacatacaataaagtcatgggataaaaataatcgatgtatgttacgggcgctttaaccatcagctgcctctcgaatggaagaacagtggtaatggattaacatcctattttgttgtactaaagtgacaaatcggaataatataattggtatggccattaggttcagtccttgaagataagaagcttgttctctgtttgttgtcttatttgtggtggcactcgtttaatggattaactgaggttgctcaatgttcagtttcttttccagaaatacaatgctaggtgttttgaaataaaacttatatagcaattgtttaaagttatcaattgtatataaaatcacagtagcctgctaaatcattgtatgtgtctgtagtattctattcccagaaactatttgaccatgataattcagtttatattcaccacatgaaagaaaaatgggtaacagaagaacccctaaaacaggttaatttggattgtaacgttcagtgaaagaaatttcaacccttcatagccagcgaagaaatttgccttggaagccaagtcagtaccagcttacctatttgattcagttgctgttttctcactctctatatccatttgaaattgatttattttagatgttgtatacttacgttaggctttctgttaatagtggtttttctcctgttgacagagccaccggattatgacacaggatgaggaagattaaggataatcaattgactaatttcatttagaatattatcaaacatttcaactaggtatcagaaaaaggctttctttcataagactattttaaatagaaattatttcaacaattaaagtaatgttgaccatccccctctcagctgaataaagaaaaatttagttcaatttattgcaatttaattacaatactaccttcacaacattttcatgtgttttaaataaatattttttaattggctaaaggacattcaagcaaagaaatgctttctttacttaaaatgtctatctcatttgctgccttttcactaagcctttactttgttaataaaagtgtccattgtgtgatgtttttgattttaaaaaaaaaaaaaaaaaaaaaaaaaaaaaaaaaaaaaaaaaaaaaaaaaaaaaaaaaaaaaaaaaaaaaaaaaaaaacacaaaaaagagaaggaacaaaaaaaaaaaaaaaacagaaaaccgagcaacaaagggacacaaaaaagaagccaaaaaaaaaagaaacacacaacggcacaaaacaaaaaaccaacacacaagaagacaacaaggaaacacgacaacaccacagaaaaaaaagaaataaaaaaagacaacagaaaaacaaggacgaaaacaaacacaagcaatagaagagacaccaggagggcacacacgacacacgacagagaagagaaacaaagtgagcacacaaacaagacgaaagcaaacagaaacaagaacagcaaactgtggcacacaaaaccagcaagcaaacatacaagaaaatacgccccgcggagcagacagaacaagaagaaaaggagagagggacaggagagaggagagccagcgagcaacagagaggaagagcaagaggacggcagagggagaaaggaagcgacgaccaagagaaagagaaaaccgaaagaagcgcagtaaggagagaagagaagagcaaagagaaagagaaggaaagagacagaagagaggcagagcgagaagggaaagaagacggagggaggagaaggagaggacaagcgaagagagcggagacaagaaaacaagacagagagccgcg

SEQ ID NO: 354009 - DNA, 3950 bp, Homo sapiens
ataaataatgtaaatctacctctagtggctctggtatttttaaacttatttatagctggcaaagtacttttttgtatgtatttttatagcaccattgcacttctcatgtttgttgcaagcatctcccacagcttcctttgtcttttaattttatgacatataaataaaagtatacatttcaatatggccatattgattgtgaatgttcgattgtgatcttgtaatttatatttaaaagtcatttcccaggctaaggccacctctattttcttttagttttttaaaatggtttcattgttttatatttgcctatgatccagacattagtaactgtgggttcttaattgggcttcagagaatctgagaattccttaaaattctctacataattgtacatgtacttaatacatgcttttttccatgttaagagtccagagtttttgttagatcctcaaaggggtcagtcagtctctcctcccacttccaaaaaatgtctgagacctactactataatccatctggactttatttgggtaaaaggtggtatggtgagactcatatttttctttttcccgcaaatagttaagtataccaaccatttagtaaataattacctcctgatttgtgatacctttgaaaaataaatgtttttctttatttttatctccacagagagaaagttagagaaattcaagaaaaacttgatgctttcattgaagctcttcatcaggagaaataaattaaaatcgtactcataatcagctctgcatacatctgaagaacaaaaacatcaacgtcttttgtccagcctctttttcttctgctgttccacctttctaaacatacaataaagtcatgggataaaaataatcgatgtatgttacgggcgctttaaccatcagctgcctctcgaatggaagaacagtggtaatggattaacatcctattttgttgtactaaagtgacaaatcggaataatataattggtatggccattaggttcagtccttgaagataagaagcttgttctctgtttgttgtcttatttgtggtggcactcgtttaatggattaactgaggttgctcaatgttcagtttcttttccagaaatacaatgctaggtgttttgaaataaaacttatatagcaattgtttaaagttatcaattgtatataaaatcacagtagcctgctaaatcattgtatgtgtctgtagtattctattcccagaaactatttgaccatgataattcagtttatattcaccacatgaaagaaaaatgggtaacagaagaacccctaaaacaggttaatttggattgtaacgttcagtgaaagaaatttcaacccttcatagccagcgaagaaatttgccttggaagccaagtcagtaccagcttacctatttgattcagttgctgttttctcactctctatatccatttgaaattgatttattttagatgttgtatacttacgttaggctttctgttaatagtggtttttctcctgttgacagagccaccggattatgacacaggatgaggaagattaaggataatcaattgactaatttcatttagaatattatcaaacatttcaactaggtatcagaaaaaggctttctttcataagactattttaaatagaaattatttcaacaattaaagtaatgttgaccatccccctctcagctgaataaagaaaaatttagttcaatttattgcaatttaattacaatactaccttcacaacattttcatgtgttttaaataaatattttttaattggctaaaggacattcaagcaaagaaatgctttctttacttaaaatgtctatctcatttgctgccttttcactaagcctttactttgttaataaaagtgtccattgtgtgatgtttttgattttacagtttgctaaatcttattttcttggagttgctttttggtaacagccccattgctactccccattttattgttttacatcaatgcatgcttcgttgtgatccctcaagatgtaacacttggtatgctcggttgaggatatgaaaaaatacttccgaaaccaggaattcagtgtatgtttgttttatactgtttgataagaaaagtaggtccagccttaagcagcacagatgcgctggtagatgcatagtcaggaactttttttatttcttttaggtctagggacaggagtgaatagaaagggaggagagctctattatgttctatacacagattaggagatgaccttactgggtacacccctctaaccagtgcttacaggttaatgcatgttaatgaatatttttgcagttgtaaagcataacaattacaactacacatctatttctaaagaataaaacaggaccatatttatttacttctgtcaactatagaaagaaagaccttcagctgtatttccacagatttctcccaaggaaaaggctaatattagtcactactgttatcacatccctttgtataagttttaaaaagagatggagggagatcttcatttctttgaggagatcagtattgtaacgtatgtgaatagatgataacaattaatattactaaaagtcccacatgagagtcctgacgccctctccatgccccacagtaatgtggcttctttcatgggtttttttttcttctttttagctgatctcatcctaagcatgctttatttttccttgaaagctaggtatttatcaactgcagatgttattgaaagaaaataaaattcagtctcaagagtaaaccctgtgtcttgtgtctgtagttcaaaagtcagaaatgattctaatttaaacaaaaagatactaaatatacagaagttaaattcgaactagccacagaatcatttgtttttatgtcagaatttgcaaagagtggagtggacaaagctctgtatggaagactgaacaactgtaaatagatgatatccaaacttaatttggctaggacttcaattttaaaaatcagtgtacctaggcagtgcacagcacgaaataagtggcccttgcagcttccccgtttaacccactgtgctatagttgcgggtggaacagtcaacctttctagtagtttatgatattgccctctttgtattcccattttccacagttttttccgcagacttctttctgcaaattattcagcctccaaatgcaaatgaatgatataaaaataagtagggaacatggcagagagtggtgcttcccagcctcacaatgtgggaatttgacataggatgagagtcagagtataggtttaaaagataaaatctttagttaataattttgtatttatttattctagatgtatgtatctgaggaaagaaatctggtatttttgctttccaataaaggggatcaaagtaatggtttttctctcagttctctaagctggtctatgttatagctctagcagtatggaaatgtgctttaaaatatgcttaccttttgaatgatcatggctatatgttgttgagatatttgaaacttaccttgttttcacttgtgcactgtgaatgaactttgtattatttttttaaaaccttcacattacgtgtagatattattgcaacttatattttgcctgagcttgatcaaaggtcatttgtgtagatgagtaattaaaaaatatttaaatcacattataattctattattggagagcatcttttaaatttttttctgttttaacgagggaaagagaaacctgtatacctagggtcattatttgaccccatagtataaccagattcatggtctaacaagctctcagtgtggcttttctctgaatgcttgaatttcacatgccttgcatttcacagttgtactccatggtcaaccggtgctttttttcacatcgtggtacttgtcaaaacattttgttattttccttggtaaaatatataaaaaaggttttctaatttca

SEQ ID NO: 354010 - DNA, 3296 bp, Homo sapiens
  misc_feature (1)..(1): n is a, c, g, or t
ntggggaagccccagaagtaagaaagttagagaaattcaagaaaaacttgatgctttcattgaagctcttcatcaggagaaataaattaaaatcgtactcataatcagctctgcatacatctgaagaacaaaaacatcaacgtcttttgtccagcctctttttcttctgctgttccacctttctaaacatacaataaagtcatgggataaaaataatcgatgtatgttacgggcgctttaaccatcagctgcctctcgaatggaagaacagtggtaatggattaacatcctattttgttgtactaaagtgacaaatcggaataatataattggtatggccattaggttcagtccttgaagataagaagcttgttctctgtttgttgtcttatttgtggtggcactcgtttaatggattaactgaggttgctcaatgttcagtttcttttccagaaatacaatgctaggtgttttgaaataaaacttatatagcaattgtttaaagttatcaattgtatataaaatcacagtagcctgctaaatcattgtatgtgtctgtagtattctattcccagaaactatttgaccatgataattcagtttatattcaccacatgaaagaaaaatgggtaacagaagaacccctaaaacaggttaatttggattgtaacgttcagtgaaagaaatttcaacccttcatagccagcgaagaaatttgccttggaagccaagtcagtaccagcttacctatttgattcagttgctgttttctcactctctatatccatttgaaattgatttattttagatgttgtatacttacgttaggctttctgttaatagtggtttttctcctgttgacagagccaccggattatgacacaggatgaggaagattaaggataatcaattgactaatttcatttagaatattatcaaacatttcaactaggtatcagaaaaaggctttctttcataagactattttaaatagaaattatttcaacaattaaagtaatgttgaccatccccctctcagctgaataaagaaaaatttagttcaatttattgcaatttaattacaatactaccttcacaacattttcatgtgttttaaataaatattttttaattggctaaaggacattcaagcaaagaaatgctttctttacttaaaatgtctatctcatttgctgccttttcactaagcctttactttgttaataaaagtgtccattgtgtgatgtttttgattttacagtttgctaaatcttattttcttggagttgctttttggtaacagccccattgctactccccattttattgttttacatcaatgcatgcttcgttgtgatccctcaagatgtaacacttggtatgctcggttgaggatatgaaaaaatacttccgaaaccaggaattcagtgtatgtttgttttatactgtttgataagaaaagtaggtccagccttaagcagcacagatgcgctggtagatgcatagtcaggaactttttttatttcttttaggtctagggacaggagtgaatagaaagggaggagagctctattatgttctatacacagattaggagatgaccttactgggtacacccctctaaccagtgcttacaggttaatgcatgttaatgaatatttttgcagttgtaaagcataacaattacaactacacatctatttctaaagaataaaacaggaccatatttatttacttctgtcaactatagaaagaaagaccttcagctgtatttccacagatttctcccaaggaaaaggctaatattagtcactactgttatcacatccctttgtataagttttaaaaagagatggagggagatcttcatttctttgaggagatcagtattgtaacgtatgtgaatagatgataacaattaatattactaaaagtcccacatgagagtcctgacgccctctccatgccccacagtaatgtggcttctttcatgggtttttttttcttctttttagctgatctcatcctaagcatgctttatttttccttgaaagctaggtatttatcaactgcagatgttattgaaagaaaataaaattcagtctcaagagtaaaccctgtgtcttgtgtctgtagttcaaaagtcagaaatgattctaatttaaacaaaaagatactaaatatacagaagttaaattcgaactagccacagaatcatttgtttttatgtcagaatttgcaaagagtggagtggacaaagctctgtatggaagactgaacaactgtaaatagatgatatccaaacttaatttggctaggacttcaattttaaaaatcagtgtacctaggcagtgcacagcacgaaataagtggcccttgcagcttccccgtttaacccactgtgctatagttgcgggtggaacagtcaacctttctagtagtttatgatattgccctctttgtattcccattttccacagttttttccgcagacttctttctgcaaattattcagcctccaaatgcaaatgaatgatataaaaataagtagggaacatggcagagagtggtgcttcccagcctcacaatgtgggaatttgacataggatgagagtcagagtataggtttaaaagataaaatctttagttaataattttgtatttatttattctagatgtatgtatctgaggaaagaaatctggtatttttgctttccaataaaggggatcaaagtaatggtttttctctcagttctctaagctggtctatgttatagctctagcagtatggaaatgtgctttaaaatatgcttaccttttgaatgatcatggctatatgttgttgagatatttgaaacttaccttgttttcacttgtgcactgtgaatgaactttgtattatttttttaaaaccttcacattacgtgtagatattattgcaacttatattttgcctgagcttgatcaaaggtcatttgtgtagatgagtaattaaaaaatatttaaatcacattataattctattattggagagcatcttttaaatttttttctgttttaacgagggaaagagaaacctgtatacctagggtcattatttgaccccatagtataaccagattcatggtctaacaagctctcagtgtggcttttctctgaatgcttgaatttcacatgccttgcatttcacagttgtactccatggtcaaccggtgctttttttcacatcgtggtacttgtcaaaacattttgttattttccttggtaaaatatataaaaaaggttttctaatttca

SEQ ID NO: 354011 - DNA, 3300 bp, Homo sapiens
cccgaagattccatgatagatagcagaaagttagagaaattcaagaaaaacttgatgctttcattgaagctcttcatcaggagaaataaattaaaatcgtactcataatcagctctgcatacatctgaagaacaaaaacatcaacgtcttttgtccagcctctttttcttctgctgttccacctttctaaacatacaataaagtcatgggataaaaataatcgatgtatgttacgggcgctttaaccatcagctgcctctcgaatggaagaacagtggtaatggattaacatcctattttgttgtactaaagtgacaaatcggaataatataattggtatggccattaggttcagtccttgaagataagaagcttgttctctgtttgttgtcttatttgtggtggcactcgtttaatggattaactgaggttgctcaatgttcagtttcttttccagaaatacaatgctaggtgttttgaaataaaacttatatagcaattgtttaaagttatcaattgtatataaaatcacagtagcctgctaaatcattgtatgtgtctgtagtattctattcccagaaactatttgaccatgataattcagtttatattcaccacatgaaagaaaaatgggtaacagaagaacccctaaaacaggttaatttggattgtaacgttcagtgaaagaaatttcaacccttcatagccagcgaagaaatttgccttggaagccaagtcagtaccagcttacctatttgattcagttgctgttttctcactctctatatccatttgaaattgatttattttagatgttgtatacttacgttaggctttctgttaatagtggtttttctcctgttgacagagccaccggattatgacacaggatgaggaagattaaggataatcaattgactaatttcatttagaatattatcaaacatttcaactaggtatcagaaaaaggctttctttcataagactattttaaatagaaattatttcaacaattaaagtaatgttgaccatccccctctcagctgaataaagaaaaatttagttcaatttattgcaatttaattacaatactaccttcacaacattttcatgtgttttaaataaatattttttaattggctaaaggacattcaagcaaagaaatgctttctttacttaaaatgtctatctcatttgctgccttttcactaagcctttactttgttaataaaagtgtccattgtgtgatgtttttgattttacagtttgctaaatcttattttcttggagttgctttttggtaacagccccattgctactccccattttattgttttacatcaatgcatgcttcgttgtgatccctcaagatgtaacacttggtatgctcggttgaggatatgaaaaaatacttccgaaaccaggaattcagtgtatgtttgttttatactgtttgataagaaaagtaggtccagccttaagcagcacagatgcgctggtagatgcatagtcaggaactttttttatttcttttaggtctagggacaggagtgaatagaaagggaggagagctctattatgttctatacacagattaggagatgaccttactgggtacacccctctaaccagtgcttacaggttaatgcatgttaatgaatatttttgcagttgtaaagcataacaattacaactacacatctatttctaaagaataaaacaggaccatatttatttacttctgtcaactatagaaagaaagaccttcagctgtatttccacagatttctcccaaggaaaaggctaatattagtcactactgttatcacatccctttgtataagttttaaaaagagatggagggagatcttcatttctttgaggagatcagtattgtaacgtatgtgaatagatgataacaattaatattactaaaagtcccacatgagagtcctgacgccctctccatgccccacagtaatgtggcttctttcatgggtttttttttcttctttttagctgatctcatcctaagcatgctttatttttccttgaaagctaggtatttatcaactgcagatgttattgaaagaaaataaaattcagtctcaagagtaaaccctgtgtcttgtgtctgtagttcaaaagtcagaaatgattctaatttaaacaaaaagatactaaatatacagaagttaaattcgaactagccacagaatcatttgtttttatgtcagaatttgcaaagagtggagtggacaaagctctgtatggaagactgaacaactgtaaatagatgatatccaaacttaatttggctaggacttcaattttaaaaatcagtgtacctaggcagtgcacagcacgaaataagtggcccttgcagcttccccgtttaacccactgtgctatagttgcgggtggaacagtcaacctttctagtagtttatgatattgccctctttgtattcccattttccacagttttttccgcagacttctttctgcaaattattcagcctccaaatgcaaatgaatgatataaaaataagtagggaacatggcagagagtggtgcttcccagcctcacaatgtgggaatttgacataggatgagagtcagagtataggtttaaaagataaaatctttagttaataattttgtatttatttattctagatgtatgtatctgaggaaagaaatctggtatttttgctttccaataaaggggatcaaagtaatggtttttctctcagttctctaagctggtctatgttatagctctagcagtatggaaatgtgctttaaaatatgcttaccttttgaatgatcatggctatatgttgttgagatatttgaaacttaccttgttttcacttgtgcactgtgaatgaactttgtattatttttttaaaaccttcacattacgtgtagatattattgcaacttatattttgcctgagcttgatcaaaggtcatttgtgtagatgagtaattaaaaaatatttaaatcacattataattctattattggagagcatcttttaaatttttttctgttttaacgagggaaagagaaacctgtatacctagggtcattatttgaccccatagtataaccagattcatggtctaacaagctctcagtgtggcttttctctgaatgcttgaatttcacatgccttgcatttcacagttgtactccatggtcaaccggtgctttttttcacatcgtggtacttgtcaaaacattttgttattttccttggtaaaatatataaaaaaggttttctaatttca

SEQ ID NO: 354012 - DNA, 3316 bp, Homo sapiens
gtgacggactgagtacgggtgcctgtcaggctcttgcggaagtccatgcgccattgggagggcctcggccgcggctctgtgcccttgctgctgagggccacttcctgggtcattcctggaccgggagccgggctggggctcacacgggggctcccgcgtggccgtctcggcgcctgcgtgacctccccgccggcgggatgtggcgactacgtcgggccgctgtggcctgtgaggtctgccagtctttagtgaaacacagctctggaataaaaggaagtttaccactacaaaaactacatctggtttcacgaagcatttatcattcacatcatcctaccttaaagcttcaacgaccccaattaaggacatcctttcagcagttctcttctctgacaaaccttcctttacgtaaactgaaattctctccaattaaatatggctaccagcctcgcaggaatttttggccagcaagattagctacgagactcttaaaacttcgctatctcatactaggatcggctgttgggggtggctacacagccaaaaagacttttgatcagtggaaagatatgataccggaccttagtgaatataaatggattgtgcctgacattgtgtgggaaattgatgagtatatcgattttgagaaaaattagaaaagcccttcctagttcagaagaccttgtaaagttagcaccagactttgacaagattgttgaaagccttagcttattgaaggacttttttacctcaggttctccggaagaaacggcgtttagagcaacagatcgtggatctgaaagtgacaagcattttagaaagggtctgcttggtgagctcattctcttacaacaacaaattcaagagcatgaagaggaagcgcgcagagccgctggccaatatagcacgagctatgcccaacagaagcgcaaggtgtcagacaaagagaaaattgaccaacttcaggaagaacttctgcacactcagttgaagtatcagagaatcttggaacgattagaaaaggagaacaaagaattgagaaaattagtattgcagaaagatgacaaaggcattcatcatagaaagcttaagaaatctttgattgacatgtattctgaagttcttgatgttctctctgattatgatgccagttataatacgcaagatcatctgccacgggttgttgtggttggagatcagagtgctggaaagactagtgtgttggaaatgattgcccaagctcgaatattcccaagaggatctggggagatgatgacacgttctccagttaaggtgactctgagtgaaggtcctcaccatgtggccctatttaaagatagttctcgggagtttgatcttaccaaagaagaagatcttgcagcattaagacatgaaatagaacttcgaatgaggaaaaatgtgaaagaaggctgtaccgttagccctgagaccatatccttaaatgtaaaaggccctggactacagaggatggtgcttgttgacttaccaggtgtgattaatactgtgacatcaggcatggctcctgacacaaaggaaactattttcagtatcagcaaagcttacatgcagaatcctaatgccatcatactgtgtattcaagatggatctgtggatgctgaacgcagtattgttacagacttggtcagtcaaatggaccctcatggaaggagaaccatattcgttttgaccaaagtagacctggcagagaaaaatgtagccagtccaagcaggattcagcagataattgaaggaaagctcttcccaatgaaagctttaggttattttgctgttgtaacaggaaaagggaacagctctgaaagcattgaagctataagagaatatgaagaagagttttttcagaattcaaagctcctaaagacaagcatgctaaaggcacaccaagtgactacaagaaatttaagccttgcagtatcagactgcttttggaaaatggtacgagagtctgttgaacaacaggctgatagtttcaaagcaacacgttttaaccttgaaactgaatggaagaataactatcctcgcctgcgggaacttgaccggaatgaactatttgaaaaagctaaaaatgaaatccttgatgaagttatcagtctgagccaggttacaccaaaacattgggaggaaatccttcaacaatctttgtgggaaagagtatcaactcatgtgattgaaaacatctaccttccagctgcgcagaccatgaattcaggaacttttaacaccacagtggatatcaagcttaaacagtggactgataaacaacttcctaataaagcagtagaggttgcttgggagaccctacaagaagaattttcccgctttatgacagaaccgaaagggaaagagcatgatgacatatttgataaacttaaagaggctgttaaggaagaaagtattaaacgacacaagtggaatgactttgcggaggacagcttgagggttattcaacacaatgctttggaagaccgatccatatctgataaacagcaatgggatgcagctatttattttatggaagaggctctgcaggctcgtctcaaggatactgaaaatgcaattgaaaacatggtgggtccagactggaaaaagaggtggttatactggaagaatcggacccaagaacagtgtgttcacaatgaaaccaagaatgaattggagaagatgttgaaatgtaatgaggagcacccagcttatcttgcaagtgatgaaataaccacagtccggaagaaccttgaatcccgaggagtagaagtagatccaagcttgattaaggatacttggcatcaagtttatagaagacattttttaaaaacagctctaaaccattgtaacctttgtcgaagaggtttttattactaccaaaggcattttgtagattctgagttggaatgcaatgatgtggtcttgttttggcgtatacagcgcatgcttgctatcaccgcaaatactttaaggcaacaacttacaaatactgaagttaggcgattagagaaaaatgttaaagaggtattggaagattttgctgaagatggtgagaagaagattaaattgcttactggtaaacgcgttcaactggcggaagacctcaagaaagttagagaaattcaagaaaaacttgatgctttcattgaagctcttcatcaggagaaataaattaaaatcgtactcataatcagctctgcatacatctgaagaacaaaaacatcaacgtcttttgtccagcctctttttcttctgctgttccacctttctaaacatacaataaagtcatgggata

SEQ ID NO: 354013 - DNA, 3725 bp, Homo sapiens
gtgacggactgagtacgggtgcctgtcaggctcttgcggaagtccatgcgccattgggagggcctcggccgcggctctgtgcccttgctgctgagggccacttcctgggtcattcctggaccgggagccgggctggggctcacacgggggctcccgcgtggccgtctcggcgcctgcgtgacctccccgccggcgggatgtggcgactacgtcgggccgctgtggcctgtgaggtctgccagtctttagtgaaacacagctctggaataaaaggaagtttaccactacaaaaactacatctggtttcacgaagcatttatcattcacatcatcctaccttaaagcttcaacgaccccaattaaggacatcctttcagcagttctcttctctgacaaaccttcctttacgtaaactgaaattctctccaattaaatatggctaccagcctcgcaggaatttttggccagcaagattagctacgagactcttaaaacttcgctatctcatactaggatcggctgttgggggtggctacacagccaaaaagacttttgatcagtggaaagatatgataccggaccttagtgaatataaatggattgtgcctgacattgtgtgggaaattgatgagtatatcgattttgagaaaaattagaaaagcccttcctagttcagaagaccttgtaaagttagcaccagactttgacaagattgttgaaagccttagcttattgaaggacttttttacctcaggttctccggaagaaacggcgtttagagcaacagatcgtggatctgaaagtgacaagcattttagaaagggtctgcttggtgagctcattctcttacaacaacaaattcaagagcatgaagaggaagcgcgcagagccgctggccaatatagcacgagctatgcccaacagaagcgcaaggtgtcagacaaagagaaaattgaccaacttcaggaagaacttctgcacactcagttgaagtatcagagaatcttggaacgattagaaaaggagaacaaagaattgagaaaattagtattgcagaaagatgacaaaggcattcatcatagaaagcttaagaaatctttgattgacatgtattctgaagttcttgatgttctctctgattatgatgccagttataatacgcaagatcatctgccacgggttgttgtggttggagatcagagtgctggaaagactagtgtgttggaaatgattgcccaagctcgaatattcccaagaggatctggggagatgatgacacgttctccagttaaggtgactctgagtgaaggtcctcaccatgtggccctatttaaagatagttctcgggagtttgatcttaccaaagaagaagatcttgcagcattaagacatgaaatagaacttcgaatgaggaaaaatgtgaaagaaggctgtaccgttagccctgagaccatatccttaaatgtaaaaggccctggactacagaggatggtgcttgttgacttaccaggtgtgattaatactgtgacatcaggcatggctcctgacacaaaggaaactattttcagtatcagcaaagcttacatgcagaatcctaatgccatcatactgtgtattcaagatggatctgtggatgctgaacgcagtattgttacagacttggtcagtcaaatggaccctcatggaaggagaaccatattcgttttgaccaaagtagacctggcagagaaaaatgtagccagtccaagcaggattcagcagataattgaaggaaagctcttcccaatgaaagctttaggttattttgctgttgtaacaggaaaagggaacagctctgaaagcattgaagctataagagaatatgaagaagagttttttcagaattcaaagctcctaaagacaagcatgctaaaggcacaccaagtgactacaagaaatttaagccttgcagtatcagactgcttttggaaaatggtacgagagtctgttgaacaacaggctgatagtttcaaagcaacacgttttaaccttgaaactgaatggaagaataactatcctcgcctgcgggaacttgaccggaatgaactatttgaaaaagctaaaaatgaaatccttgatgaagttatcagtctgagccaggttacaccaaaacattgggaggaaatccttcaacaatctttgtgggaaagagtatcaactcatgtgattgaaaacatctaccttccagctgcgcagaccatgaattcaggaacttttaacaccacagtggatatcaagcttaaacagtggactgataaacaacttcctaataaagcagtagaggttgcttgggagaccctacaagaagaattttcccgctttatgacagaaccgaaagggaaagagcatgatgacatatttgataaacttaaagaggctgttaaggaagaaagtattaaacgacacaagtggaatgactttgcggaggacagcttgagggttattcaacacaatgctttggaagaccgatccatatctgataaacagcaatgggatgcagctatttattttatggaagaggctctgcaggctcgtctcaaggatactgaaaatgcaattgaaaacatggtgggtccagactggaaaaagaggtggttatactggaagaatcggacccaagaacagtgtgttcacaatgaaaccaagaatgaattggagaagatgttgaaatgtaatgaggagcacccagcttatcttgcaagtgatgaaataaccacagtccggaagaaccttgaatcccgaggagtagaagtagatccaagcttgattaaggatacttggcatcaagtttatagaagacattttttaaaaacagctctaaaccattgtaacctttgtcgaagaggtttttattactaccaaaggcattttgtagattctgagttggaatgcaatgatgtggtcttgttttggcgtatacagcgcatgcttgctatcaccgcaaatactttaaggcaacaacttacaaatactgaagttaggcgattagagaaaaatgttaaagaggtattggaagattttgctgaagatggtgagaagaagattaaattgcttactggtaaacgcgttcaactggcggaagacctcactcggactcaacactacacaccaggccaccacatggcgccgcacccagcattgacacttcttttaccttgtctgggctctgacatccgtgccaggttgctcttcgtcatggagtcccttttactgagctctgctctgacgctttgtgccaggtgcctctccatctcatccttcccacccgctagcctctgcccgaccccagacagattccttcctcacctgaagccagaccatgcctttgtggagataccctctttaccctgcctgtgcttcgccagcctgcaccaggccaccctcctgcacagatactctcctcagtactggaccaggctaccaacagccccatgtgaacccattgtaacccaggtcaggcattaacacctgcagtaggctaccatggcttccccttcccacccccctagcttggccctactaataatcactttgtcactgtttggggttgatatttggttgtttcttgtaggttcctagctttaagataggattgcatactaaaatttacttagatctttgagaactcaaggaaatcagtgaaacattattgttattaaataaaaataaaatacctgtagttggta

SEQ ID NO: 354014 - DNA, 3361 bp, Homo sapiens
  misc_feature (1931)..(1931): n is a, c, g, or t
  misc_feature (2240)..(2240): n is a, c, g, or t
gtgacggactgagtacgggtgcctgtcaggctcttgcggaagtccatgcgccattgggagggcctcggccgcggctctgtgcccttgctgctgagggccacttcctgggtcattcctggaccgggagccgggctggggctcacacgggggctcccgcgtggccgtctcggcgcctgcgtgacctccccgccggcgggatgtggcgactacgtcgggccgctgtggcctgtgaggtctgccagtctttagtgaaacacagctctggaataaaaggaagtttaccactacaaaaactacatctggtttcacgaagcatttatcattcacatcatcctaccttaaagcttcaacgaccccaattaaggacatcctttcagcagttctcttctctgacaaaccttcctttacgtaaactgaaattctctccaattaaatatggctaccagcctcgcaggaatttttggccagcaagattagctacgagactcttaaaacttcgctatctcatactaggatcggctgttgggggtggctacacagccaaaaagacttttgatcagtggaaagatatgataccggaccttagtgaatataaatggattgtgcctgacattgtgtgggaaattgatgagtatatcgattttggtttgtatcatgaacattaaaatactttttttggtcatctcgaggaaagagaaatagtttattgagatagtttcttaacttatgaacctaatatatcacggttttattttaatgatataagtaatagaatatcaatgaaaaaatctgtataaaagaaatacccagtagcccataattttaccacagctgccactaactgtttggagcattttcttttaattatacttactatatgtggttagtatctttttaacttatcgattgagacaggatcttgctctgtcactcaggctgaagtgcggtcttggaatcataactcactgcagccctgaactggctaaagtagtccttccgactctgcctcccaagtagccgggactacatgtgtgtgccaccatgcccgactgattttttaatttcttgtagagatgaagtctcactatgttgcccaggctagtctcaaattccttagctcaaacctctcacctcagcctctcaaagcactgagattacaagtgtgagccactatgcctggcttgagtttttttcttttaatttttttcttttcatgaatactaccacagaatagtattttagttccctttttaaaaattatgtaatcatggtgaatattcactttggtattttgtcttttgctacctaacatattttgtcagcatttccatgctgccaagtagcctttctattaataatatcattttctgcattatgtaatgttgcccagagcatatttattgtgacccacctagctagctccttttgattggataccttggttatctctaccttttgtagccaagttctttaaaagtctgttagtatccagggtaatttcttttcttagttggccactgccctccctttttcaataggtggatgagaaaaaagtatattggatcgctatgattgccagtaattcatggtgatctttaagaaatatattttcatcaaatttttttaaaacctttgtcagatttcttagtttaggtgtatgtggaggtggaattaatctatacttgcacttattcacagaatttataaagataaaactgttctatgttgacgaatccatttgcaaaaaaagcacactttcaaattgttcttctaatattaatgaggagagctttcaaattgatgtatttgccagtaccacagcgtagtggctgagagcctgtattctggagctggactgcctgggctggaacccgggctcctccacttccttgctgtgtaccttagtttctcatctgtaaatggtgttgatnatagtagctgttttgtagggttgtcatgaggattaaacaagttaatactttagccctttataagaatagtatctgacatattttcttagtttcatactctatatgttttgatcttttccagagaaaaattagaaaagcccttcctagttcagaagaccttgtaaagttagcaccagactttgacaagattgttgaaagccttagcttattgaaggacttttttacctcaggtaaggaagaagctgtttgatctaatttaaaaatttaagaaccatggaggaaaaatacatggattatttgtttattccnatttttttaaaattaaaatatttagtaccaatgaaaaacaggacattttttaaaaagataaacacaaagttttgttacacaatggttttaatctttgtgtagcccagtaaaatgacagttcctaagcacttaaacatacttggcttttagtgaggggaaaaaatgtatcacttgttcttgacaagtagatgagacttcctatgtatttgcttttcataagtggttggaccaatttggtggttttaaaacaaatttaagtatgatagaccataatgagtagcatttattaagtttaatcctggcatatttgcccaattattgccctatcgtaatatgaaatctgagatctcagacatctttgtttgctcatttctgttaaattttacatttctatttccccttttgctgatttttcacaggtcacaaattggttagtgaagtcataggagcttctgacctacttctcttgttaggtgtgtaaacagacatttttgctgaccttaacatgccttttaaatgcttctaataaactagttgcaaataaaattgcagaccaaatttataatgctgcttatgctgaattttaaaaccccagaactatattaggcaaactcattatcctttaggtggaaataataaaataattattttgtgataacactaaaattcttaaatatgtatgtgtattataagattaaagctattaaaagaaaatttacttagcaaaaatattttcttgaaatagatctaattgtttttgataattgaaatgaaaagtaattttagtttgtctcatctgccctgtcatggttgacatttaaatttgttttccggccgggcgcggtggctcatgcctgtaatcccagcattttgggaggccagggcaggcggatcatgaggtcaggagatcgagaccatcctggctaacacggtgaaaccccatctctactaaaaatacaaaaaatttgccgggcgtggtggcacacgcctgtagtcctagctactcgggaggctgaggcaggagaattgcttgaacccgggaggcggaggttgcagtgagccaagatcgcgccactgcactccagcctgggcgacagagggagactctgccccccaccccc

SEQ ID NO: 354015 - DNA, 862 bp, Homo sapiens
  misc_feature (1)..(1): n is a, c, g, or t
  misc_feature (6)..(6): n is a, c, g, or t
  misc_feature (9)..(9): n is a, c, g, or t
  misc_feature (15)..(15): n is a, c, g, or t
ncaccnggnggcttncggtctagaactcccggattctccgggctgcatgaattcggcacgttctttctgcaaattattcagcctccaaatgcaaatgaatgatataaaaataagtagggaacatggcagagagtggtgcttcccagcctcacaatgtgggaatttgacataggatgagagtcagagtataggtttaaaagataaaatctttagttaataattttgtatttatttattctagatgtatgtatctgaggaaagaaatctggtatttttgctttccaataaaggggatcaaagtaatggtttttctctcagttctctaagctggtctatgttatagctctagcagtatggaaatgtgctttaaaatatgcttaccttttgaatgatcatggctatatgttgttgagatatttgaaacttaccttgttttcacttgtgcactgtgaatgaactttgtattatttttttaaaaccttcacattacgtgtagatattattgcaacttatattttgcctgagcttgatcaaaggtcatttgtgtagatgagtaattaaaaaatatttaaatcacattataattctattattggagagcatcttttaaatttttttctgttttaacgagggaaagagaaacctgtatacctagggtcattatttgaccccatagtataaccagattcatggtctaacaagctctcagtgtggcttttctctgaatgcttgaatttcacatgccttgcatttcacagttgtactccatggtcaaccggtgctttttttcacatcgtggtacttgtcaaaacattttgttattttccttggtaaaatatataaaaaaggttttctaatttca

SEQ ID NO: 354016 - DNA, 3257 bp, Homo sapiens
gtgacggactgagtacgggtgcctgtcaggctcttgcggaagtccatgcgccattgggagggcctcggccgcggctctgtgcccttgctgctgagggccacttcctgggtcattcctggaccgggagccgggctggggctcacacgggggctcccgcgtggccgtctcggcgcctgcgtgacctccccgccggcgggatgtggcgactacgtcgggccgctgtggcctgtgaggtctgccagtctttagtgaaacacagctctggaataaaaggaagtttaccactacaaaaactacatctggtttcacgaagcatttatcattcacatcatcctaccttaaagcttcaacgaccccaattaaggacatcctttcagcagttctcttctctgacaaaccttcctttacgtaaactgaaattctctccaattaaatatggctaccagcctcgcaggaatttttggccagcaagattagctacgagactcttaaaacttcgctatctcatactaggatcggctgttgggggtggctacacagccaaaaagacttttgatcagtggaaagatatgataccggaccttagtgaatataaatggattgtgcctgacattgtgtgggaaattgatgagtatatcgattttgagaaaaattagaaaagcccttcctagttcagaagaccttgtaaagttagcaccagactttgacaagattgttgaaagccttagcttattgaaggacttttttacctcaggttctccggaagaaacggcgtttagagcaacagatcgtggatctgaaagtgacaagcattttagaaagggtctgcttggtgagctcattctcttacaacaacaaattcaagagcatgaagaggaagcgcgcagagccgctggccaatatagcacgagctatgcccaacagaagcgcaaggtgtcagacaaagagaaaattgaccaacttcaggaagaacttctgcacactcagttgaagtatcagagaatcttggaacgattagaaaaggagaacaaagaattgagaaaattagtattgcagaaagatgacaaaggcattcatcatagaaagcttaagaaatctttgattgacatgtattctgaagttcttgatgttctctctgattatgatgccagttataatacgcaagatcatctgccacgggttgttgtggttggagatcagagtgctggaaagactagtgtgttggaaatgattgcccaagctcgaatattcccaagaggatctggggagatgatgacacgttctccagttaaggtgactctgagtgaaggtcctcaccatgtggccctatttaaagatagttctcgggagtttgatcttaccaaagaagaagatcttgcagcattaagacatgaaatagaacttcgaatgaggaaaaatgtgaaagaaggctgtaccgttagccctgagaccatatccttaaatgtaaaaggccctggactacagaggatggtgcttgttgacttaccaggtgtgattaatactgtgacatcaggcatggctcctgacacaaaggaaactattttcagtatcagcaaagcttacatgcagaatcctaatgccatcatactgtgtattcaagatggatctgtggatgctgaacgcagtattgttacagacttggtcagtcaaatggaccctcatggaaggagaaccatattcgttttgaccaaagtagacctggcagagaaaaatgtagccagtccaagcaggattcagcagataattgaaggaaagctcttcccaatgaaagctttaggttattttgctgttgtaacaggaaaagggaacagctctgaaagcattgaagctataagagaatatgaagaagagttttttcagaattcaaagctcctaaagacaagcatgctaaaggcacaccaagtgactacaagaaatttaagccttgcagtatcagactgcttttggaaaatggtacgagagtctgttgaacaacaggctgatagtttcaaagcaacacgttttaaccttgaaactgaatggaagaataactatcctcgcctgcgggaacttgaccggaatgaactatttgaaaaagctaaaaatgaaatccttgatgaagttatcagtctgagccaggttacaccaaaacattgggaggaaatccttcaacaatctttgtgggaaagagtatcaactcatgtgattgaaaacatctaccttccagctgcgcagaccatgaattcaggaacttttaacaccacagtggatatcaagcttaaacagtggactgataaacaacttcctaataaagcagtagaggttgcttgggagaccctacaagaagaattttcccgctttatgacagaaccgaaagggaaagagcatgatgacatatttgataaacttaaagaggctgttaaggaagaaagtattaaacgacacaagtggaatgactttgcggaggacagcttgagggttattcaacacaatgctttggaagaccgatccatatctgataaacagcaatgggatgcagctatttattttatggaagaggctctgcaggctcgtctcaaggatactgaaaatgcaattgaaaacatggtgggtccagactggaaaaagaggtggttatactggaagaatcggacccaagaacagtgtgttcacaatgaaaccaagaatgaattggagaagatgttgaaatgtaatgaggagcacccagcttatcttgcaagtgatgaaataaccacagtccggaagaaccttgaatcccgaggagtagaagtagatccaagcttggtaataaatactgctgagaagcaggaatctgcttccttaatatttgtttcttgcagtaaatgttactacatgtgttagttagatatttaagtgcttaatttgacttttgtcacgtgtacatttgctgacagtaaaagcttagtcattttgattgcgtgaagagaaggaattttattctcagtattgcttttttaagagtaatgctttaatttgtaaatggagaaatttactttggcaagttcaatggtcaacagtcagttcatgcaaaatgggatgaaaccgacctagacctttgccccacgtcacgctgtttcagattgcaaaatagaatttctgtttaaaaatggcatatatatgtgtttttgtgtgtggtttacagtcaaatgtaactcaattagatgtgagtggattcagaaaaaataaaaatgttgtttttattaaattggatatga

SEQ ID NO: 354017 - DNA, 2609 bp, Homo sapiens
gtgacggactgagtacgggtgcctgtcaggctcttgcggaagtccatgcgccattgggagggcctcggccgcggctctgtgcccttgctgctgagggccacttcctgggtcattcctggaccgggagccgggctggggctcacacgggggctcccgcgtggccgtctcggcgcctgcgtgacctccccgccggcgggatgtggcgactacgtcgggccgctgtggcctgtgaggtctgccagtctttagtgaaacacagctctggaataaaaggaagtttaccactacaaaaactacatctggtttcacgaagcatttatcattcacatcatcctaccttaaagcttcaacgaccccaattaaggacatcctttcagcagttctcttctctgacaaaccttcctttacgtaaactgaaattctctccaattaaatatggctaccagcctcgcaggaatttttggccagcaagattagctacgagactcttaaaacttcgctatctcatactaggatcggctgttgggggtggctacacagccaaaaagacttttgatcagtggaaagatatgataccggaccttagtgaatataaatggattgtgcctgacattgtgtgggaaattgatgagtatatcgattttgagaaaaattagaaaagcccttcctagttcagaagaccttgtaaagttagcaccagactttgacaagattgttgaaagccttagcttattgaaggacttttttacctcaggttctccggaagaaacggcgtttagagcaacagatcgtggatctgaaagtgacaagcattttagaaagggtctgcttggtgagctcattctcttacaacaacaaattcaagagcatgaagaggaagcgcgcagagccgctggccaatatagcacgagctatgcccaacagaagcgcaaggtgtcagacaaagagaaaattgaccaacttcaggaagaacttctgcacactcagttgaagtatcagagaatcttggaacgattagaaaaggagaacaaagaattgagaaaattagtattgcagaaagatgacaaaggcattcatcatagaaagcttaagaaatctttgattgacatgtattctgaagttcttgatgttctctctgattatgatgccagttataatacgcaagatcatctgccacgggttgttgtggttggagatcagagtgctggaaagactagtgtgttggaaatgattgcccaagctcgaatattcccaagaggatctggggagatgatgacacgttctccagttaaggtgactctgagtgaaggtcctcaccatgtggccctatttaaagatagttctcgggagtttgatcttaccaaagaagaagatcttgcagcattaagacatgaaatagaacttcgaatgaggaaaaatgtgaaagaaggctgtaccgttagccctgagaccatatccttaaatgtaaaaggccctggactacagaggatggtgcttgttgacttaccaggtgtgattaatactgtgacatcaggcatggctcctgacacaaaggaaactattttcagtatcagcaaagcttacatgcagaatcctaatgccatcatactgtgtattcaagatggatctgtggatgctgaacgcagtattgttacagacttggtcagtcaaatggaccctcatggaaggagaaccatattcgttttgaccaaagtagacctggcagagaaaaatgtagccagtccaagcaggattcagcagataattgaaggaaagctcttcccaatgaaagctttaggttattttgctgttgtaacaggaaaagggaacagctctgaaagcattgaagctataagagaatatgaagaagagttttttcagaattcaaagctcctaaagacaagcatgctaaaggcacaccaagtgactacaagaaatttaagccttgcagtatcagactgcttttggaaaatggtacgagagtctgttgaacaacaggctgatagtttcaaagcaacacgttttaaccttgaaactgaatggaagaataactatcctcgcctgcgggaacttgaccggaatgaactatttgaaaaagctaaaaatgaaatccttgatgaagttatcagtctgagccaggttacaccaaaacattgggaggaaatccttcaacaatctttgtgggaaagagtatcaactcatgtgattgaaaacatctaccttccagctgcgcagaccatgaattcaggaacttttaacaccacagtggatatcaagcttaaacagtggactgataaacaacttcctaataaagcagtagaggttgcttgggagaccctacaagaagaattttcccgctttatgacagaaccgaaagggaaagagcatgatgacatatttgataaacttaaagaggctgttaaggaagaaagtattaaacgacacaagtggaatgactttgcggaggacagcttgagggttattcaacacaatgctttggaagaccgatccatatctgataaacagcaatgggatgcagctatttattttatggaagaggctctgcaggctcgtctcaaggataggatcctctataacgagcgcagcac

SEQ ID NO: 354018 - DNA, 1853 bp, Homo sapiens
gtgacggactgagtacgggtgcctgtcaggctcttgcggaagtccatgcgccattgggagggcctcggccgcggctctgtgcccttgctgctgagggccacttcctgggtcattcctggaccgggagccgggctggggctcacacgggggctcccgcgtggccgtctcggcgcctgcgtgacctccccgccggcgggatgtggcgactacgtcgggccgctgtggcctgtgaggtctgccagtctttagtgaaacacagctctggaataaaaggaagtttaccactacaaaaactacatctggtttcacgaagcatttatcattcacatcatcctaccttaaagcttcaacgaccccaattaaggacatcctttcagcagttctcttctctgacaaaccttcctttacgtaaactgaaattctctccaattaaatatggctaccagcctcgcaggaatttttggccagcaagattagctacgagactcttaaaacttcgctatctcatactaggatcggctgttgggggtggctacacagccaaaaagacttttgatcagtggaaagatatgataccggaccttagtgaatataaatggattgtgcctgacattgtgtgggaaattgatgagtatatcgattttgagaaaaattagaaaagcccttcctagttcagaagaccttgtaaagttagcaccagactttgacaagattgttgaaagccttagcttattgaaggacttttttacctcaggttctccggaagaaacggcgtttagagcaacagatcgtggatctgaaagtgacaagcattttagaaagggtctgcttggtgagctcattctcttacaacaacaaattcaagagcatgaagaggaagcgcgcagagccgctggccaatatagcacgagctatgcccaacagaagcgcaaggtgtcagacaaagagaaaattgaccaacttcaggaagaacttctgcacactcagttgaagtatcagagaatcttggaacgattagaaaaggagaacaaagaattgagaaaattagtattgcagaaagatgacaaaggcattcatcatagaaagcttaagaaatctttgattgacatgtattctgaagttcttgatgttctctctgattatgatgccagttataatacgcaagatcatctgccacgggttgttgtggttggagatcagagtgctggaaagactagtgtgttggaaatgattgcccaagctcgaatattcccaagaggatctggggagatgatgacacgttctccagttaaggtgactctgagtgaaggtcctcaccatgtggccctatttaaagatagttctcgggagtttgatcttaccaaagaagaagatcttgcagcattaagacatgaaatagaacttcgaatgaggaaaaatgtgaaagaaggctgtaccgttagccctgagaccatatccttaaatgtaaaaggccctggactacagaggatggtgcttgttgacttaccaggtgtgattaatactgtgacatcaggcatggctcctgacacaaaggaaactattttcagtatcagcaaagcttacatgcagaatcctaatgccatcatactgtgtattcaagatggatctgtggatgctgaacgcagtattgttacagacttggtcagtcaaatggaccctcatggaaggagaaccatattcgttttgaccaaagtagacctggcagagaaaaatgtagccagtccaagcaggattcagcagataattgaaggaaagctcttcccaatgaaagctttaggttattttgctgttgtaacaggaaaagacataggggtcctctagatcccccggct

SEQ ID NO: 354019 - DNA, 344 bp, Homo sapiens
ttaggcgattagagaaaaatgttaaagaggtattggaagattttgctgaagatggtgagaagaagattaaattgcttactggtaaacgcgttcaactggcggaagacctcagtgagtagttcttactgccctctaccttactacctttccacctttcccatttccatttgtttgttgatccatttaatctcaaacttacagaaaagttacaaggaactgggctgagcacggtggctcacgcttgtaatcccagcactttgggaggccaagatgggtggaaaacaaggtcagaagatcaagaccatcctggctaacacagtgaaaccccgtctctactaaaaata

SEQ ID NO: 354020 - DNA, 6349 bp, Homo sapiens
gtgacggactgagtacgggtgcctgtcaggctcttgcggaagtccatgcgccattgggagggcctcggccgcggctctgtgcccttgctgctgagggccacttcctgggtcattcctggaccgggagccgggctggggctcacacgggggctcccgcgtggccgtctcggcgcctgcgtgacctccccgccggcgggatgtggcgactacgtcgggccgctgtggcctgtgaggtctgccagtctttagtgaaacacagctctggaataaaaggaagtttaccactacaaaaactacatctggtttcacgaagcatttatcattcacatcatcctaccttaaagcttcaacgaccccaattaaggacatcctttcagcagttctcttctctgacaaaccttcctttacgtaaactgaaattctctccaattaaatatggctaccagcctcgcaggaatttttggccagcaagattagctacgagactcttaaaacttcgctatctcatactaggatcggctgttgggggtggctacacagccaaaaagacttttgatcagtggaaagatatgataccggaccttagtgaatataaatggattgtgcctgacattgtgtgggaaattgatgagtatatcgattttgagaaaaattagaaaagcccttcctagttcagaagaccttgtaaagttagcaccagactttgacaagattgttgaaagccttagcttattgaaggacttttttacctcaggttctccggaagaaacggcgtttagagcaacagatcgtggatctgaaagtgacaagcattttagaaagggtctgcttggtgagctcattctcttacaacaacaaattcaagagcatgaagaggaagcgcgcagagccgctggccaatatagcacgagctatgcccaacagaagcgcaaggtgtcagacaaagagaaaattgaccaacttcaggaagaacttctgcacactcagttgaagtatcagagaatcttggaacgattagaaaaggagaacaaagaattgagaaaattagtattgcagaaagatgacaaaggcattcatcatagaaagcttaagaaatctttgattgacatgtattctgaagttcttgatgttctctctgattatgatgccagttataatacgcaagatcatctgccacgggttgttgtggttggagatcagagtgctggaaagactagtgtgttggaaatgattgcccaagctcgaatattcccaagaggatctggggagatgatgacacgttctccagttaaggtgactctgagtgaaggtcctcaccatgtggccctatttaaagatagttctcgggagtttgatcttaccaaagaagaagatcttgcagcattaagacatgaaatagaacttcgaatgaggaaaaatgtgaaagaaggctgtaccgttagccctgagaccatatccttaaatgtaaaaggccctggactacagaggatggtgcttgttgacttaccaggtgtgattaatactgtgacatcaggcatggctcctgacacaaaggaaactattttcagtatcagcaaagcttacatgcagaatcctaatgccatcatactgtgtattcaagatggatctgtggatgctgaacgcagtattgttacagacttggtcagtcaaatggaccctcatggaaggagaaccatattcgttttgaccaaagtagacctggcagagaaaaatgtagccagtccaagcaggattcagcagataattgaaggaaagctcttcccaatgaaagctttaggttattttgctgttgtaacaggaaaagggaacagctctgaaagcattgaagctataagagaatatgaagaagagttttttcagaattcaaagctcctaaagacaagcatgctaaaggcacaccaagtgactacaagaaatttaagccttgcagtatcagactgcttttggaaaatggtacgagagtctgttgaacaacaggctgatagtttcaaagcaacacgttttaaccttgaaactgaatggaagaataactatcctcgcctgcgggaacttgaccggaatgaactatttgaaaaagctaaaaatgaaatccttgatgaagttatcagtctgagccaggttacaccaaaacattgggaggaaatccttcaacaatctttgtgggaaagagtatcaactcatgtgattgaaaacatctaccttccagctgcgcagaccatgaattcaggaacttttaacaccacagtggatatcaagcttaaacagtggactgataaacaacttcctaataaagcagtagaggttgcttgggagaccctacaagaagaattttcccgctttatgacagaaccgaaagggaaagagcatgatgacatatttgataaacttaaagaggctgttaaggaagaaagtattaaacgacacaagtggaatgactttgcggaggacagcttgagggttattcaacacaatgctttggaagaccgatccatatctgataaacagcaatgggatgcagctatttattttatggaagaggctctgcaggctcgtctcaaggatactgaaaatgcaattgaaaacatggtgggtccagactggaaaaagaggtggttatactggaagaatcggacccaagaacagtgtgttcacaatgaaaccaagaatgaattggagaagatgttgaaatgtaatgaggagcacccagcttatcttgcaagtgatgaaataaccacagtccggaagaaccttgaatcccgaggagtagaagtagatccaagcttgattaaggatacttggcatcaagtttatagaagacattttttaaaaacagctctaaaccattgtaacctttgtcgaagaggtttttattactaccaaaggcattttgtagattctgagttggaatgcaatgatgtggtcttgttttggcgtatacagcgcatgcttgctatcaccgcaaatactttaaggcaacaacttacaaatactgaagttaggcgattagagaaaaatgttaaagaggtattggaagattttgctgaagatggtgagaagaagattaaattgcttactggtaaacgcgttcaactggcggaagacctcaagaaagttagagaaattcaagaaaaacttgatgctttcattgaagctcttcatcaggagaaataaattaaaatcgtactcataatcagctctgcatacatctgaagaacaaaaacatcaacgtcttttgtccagcctctttttcttctgctgttccacctttctaaacatacaataaagtcatgggataaaaataatcgatgtatgttacgggcgctttaaccatcagctgcctctcgaatggaagaacagtggtaatggattaacatcctattttgttgtactaaagtgacaaatcggaataatataattggtatggccattaggttcagtccttgaagataagaagcttgttctctgtttgttgtcttatttgtggtggcactcgtttaatggattaactgaggttgctcaatgttcagtttcttttccagaaatacaatgctaggtgttttgaaataaaacttatatagcaattgtttaaagttatcaattgtatataaaatcacagtagcctgctaaatcattgtatgtgtctgtagtattctattcccagaaactatttgaccatgataattcagtttatattcaccacatgaaagaaaaatgggtaacagaagaacccctaaaacaggttaatttggattgtaacgttcagtgaaagaaatttcaacccttcatagccagcgaagaaatttgccttggaagccaagtcagtaccagcttacctatttgattcagttgctgttttctcactctctatatccatttgaaattgatttattttagatgttgtatacttacgttaggctttctgttaatagtggtttttctcctgttgacagagccaccggattatgacacaggatgaggaagattaaggataatcaattgactaatttcatttagaatattatcaaacatttcaactaggtatcagaaaaaggctttctttcataagactattttaaatagaaattatttcaacaattaaagtaatgttgaccatccccctctcagctgaataaagaaaaatttagttcaatttattgcaatttaattacaatactaccttcacaacattttcatgtgttttaaataaatattttttaattggctaaaggacattcaagcaaagaaatgctttctttacttaaaatgtctatctcatttgctgccttttcactaagcctttactttgttaataaaagtgtccattgtgtgatgtttttgattttacagtttgctaaatcttattttcttggagttgctttttggtaacagccccattgctactccccattttattgttttacatcaatgcatgcttcgttgtgatccctcaagatgtaacacttggtatgctcggttgaggatatgaaaaaatacttccgaaaccaggaattcagtgtatgtttgttttatactgtttgataagaaaagtaggtccagccttaagcagcacagatgcgctggtagatgcatagtcaggaactttttttatttcttttaggtctagggacaggagtgaatagaaagggaggagagctctattatgttctatacacagattaggagatgaccttactgggtacacccctctaaccagtgcttacaggttaatgcatgttaatgaatatttttgcagttgtaaagcataacaattacaactacacatctatttctaaagaataaaacaggaccatatttatttacttctgtcaactatagaaagaaagaccttcagctgtatttccacagatttctcccaaggaaaaggctaatattagtcactactgttatcacatccctttgtataagttttaaaaagagatggagggagatcttcatttctttgaggagatcagtattgtaacgtatgtgaatagatgataacaattaatattactaaaagtcccacatgagagtcctgacgccctctccatgccccacagtaatgtggcttctttcatgggtttttttttcttctttttagctgatctcatcctaagcatgctttatttttccttgaaagctaggtatttatcaactgcagatgttattgaaagaaaataaaattcagtctcaagagtaaaccctgtgtcttgtgtctgtagttcaaaagtcagaaatgattctaatttaaacaaaaagatactaaatatacagaagttaaattcgaactagccacagaatcatttgtttttatgtcagaatttgcaaagagtggagtggacaaagctctgtatggaagactgaacaactgtaaatagatgatatccaaacttaatttggctaggacttcaattttaccccgtttaacccactgtgctatagttgcgggtggaacagtcaacctttctagtagtttatgatattgccctctttgtattcccattttccacagttttttccgcagacttctttctgcaaattattcagcctccaaatgcaaatgaatgatataaaaataagtagggaacatggcagagagtggtgcttcccagcctcacaatgtgggaatttgacataggatgagagtcagagtataggtttaaaagataaaatctttagttaataattttgtatttatttattctagatgtatgtatctgaggaaagaaatctggtatttttgctttccaataaaggggatcaaagtaatggtttttctctcagttctctaagctggtctatgttatagctctagcagtatggaaatgtgctttaaaatatgcttaccttttgaatgatcatggctatatgttgttgagatatttgaaacttaccttgttttcacttgtgcactgtgaatgaactttgtattatttttttaaaaccttcacattacgtgtagatattattgcaacttatattttgcctgagcttgatcaaaggtcatttgtgtagatgagtaattaaaaaatatttaaatcacattataattctattattggagagcatcttttaaatttttttctgttttaacgagggaaagagaaacctgtatacctagggtcattatttgaccccatagtataaccagattcatggtctaacaagctctcagtgtggcttttctctgaatgcttgaatttcacatgccttgcatttcacagttgtactccatggtcaaccggtgctttttttcacatcgtggtacttgtcaaaacattttgttattttccttggtaaaatatataaaaaaggttttctaatttca

SEQ ID NO: 354021 - DNA, 4056 bp, Homo sapiens
tggggtgcctcaaacgggtagagcgatgagggaaagagcatgatgacatatttgataaacttaaagaggctgttaaggaagaaagtattaaacgacacaagtggaatgactttgcggaggacagcttgagggttattcaacacaatgctttggaagaccgatccatatctgataaacagcaatgggatgcagctatttattttatggaagaggctctgcaggctcgtctcaaggatactgaaaatgcaattgaaaacatggtgggtccagactggaaaaagaggtggttatactggaagaatcggacccaagaacagtgtgttcacaatgaaaccaagaatgaattggagaagatgttgaaatgtaatgaggagcacccagcttatcttgcaagtgatgaaataaccacagtccggaagaaccttgaatcccgaggagtagaagtagatccaagcttgattaaggatacttggcatcaagtttatagaagacattttttaaaaacagctctaaaccattgtaacctttgtcgaagaggtttttattactaccaaaggcattttgtagattctgagttggaatgcaatgatgtggtcttgttttggcgtatacagcgcatgcttgctatcaccgcaaatactttaaggcaacaacttacaaatactgaagttaggcgattagagaaaaatgttaaagaggtattggaagattttgctgaagatggtgagaagaagattaaattgcttactggtaaacgcgttcaactggcggaagacctcaagaaagttagagaaattcaagaaaaacttgatgctttcattgaagctcttcatcaggagaaataaattaaaatcgtactcataatcagctctgcatacatctgaagaacaaaaacatcaacgtcttttgtccagcctctttttcttctgctgttccacctttctaaacatacaataaagtcatgggataaaaataatcgatgtatgttacgggcgctttaaccatcagctgcctctcgaatggaagaacagtggtaatggattaacatcctattttgttgtactaaagtgacaaatcggaataatataattggtatggccattaggttcagtccttgaagataagaagcttgttctctgtttgttgtcttatttgtggtggcactcgtttaatggattaactgaggttgctcaatgttcagtttcttttccagaaatacaatgctaggtgttttgaaataaaacttatatagcaattgtttaaagttatcaattgtatataaaatcacagtagcctgctaaatcattgtatgtgtctgtagtattctattcccagaaactatttgaccatgataattcagtttatattcaccacatgaaagaaaaatgggtaacagaagaacccctaaaacaggttaatttggattgtaacgttcagtgaaagaaatttcaacccttcatagccagcgaagaaatttgccttggaagccaagtcagtaccagcttacctatttgattcagttgctgttttctcactctctatatccatttgaaattgatttattttagatgttgtatacttacgttaggctttctgttaatagtggtttttctcctgttgacagagccaccggattatgacacaggatgaggaagattaaggataatcaattgactaatttcatttagaatattatcaaacatttcaactaggtatcagaaaaaggctttctttcataagactattttaaatagaaattatttcaacaattaaagtaatgttgaccatccccctctcagctgaataaagaaaaatttagttcaatttattgcaatttaattacaatactaccttcacaacattttcatgtgttttaaataaatattttttaattggctaaaggacattcaagcaaagaaatgctttctttacttaaaatgtctatctcatttgctgccttttcactaagcctttactttgttaataaaagtgtccattgtgtgatgtttttgattttacagtttgctaaatcttattttcttggagttgctttttggtaacagccccattgctactccccattttattgttttacatcaatgcatgcttcgttgtgatccctcaagatgtaacacttggtatgctcggttgaggatatgaaaaaatacttccgaaaccaggaattcagtgtatgtttgttttatactgtttgataagaaaagtaggtccagccttaagcagcacagatgcgctggtagatgcatagtcaggaactttttttatttcttttaggtctagggacaggagtgaatagaaagggaggagagctctattatgttctatacacagattaggagatgaccttactgggtacacccctctaaccagtgcttacaggttaatgcatgttaatgaatatttttgcagttgtaaagcataacaattacaactacacatctatttctaaagaataaaacaggaccatatttatttacttctgtcaactatagaaagaaagaccttcagctgtatttccacagatttctcccaaggaaaaggctaatattagtcactactgttatcacatccctttgtataagttttaaaaagagatggagggagatcttcatttctttgaggagatcagtattgtaacgtatgtgaatagatgataacaattaatattactaaaagtcccacatgagagtcctgacgccctctccatgccccacagtaatgtggcttctttcatgggtttttttttcttctttttagctgatctcatcctaagcatgctttatttttccttgaaagctaggtatttatcaactgcagatgttattgaaagaaaataaaattcagtctcaagagtaaaccctgtgtcttgtgtctgtagttcaaaagtcagaaatgattctaatttaaacaaaaagatactaaatatacagaagttaaattcgaactagccacagaatcatttgtttttatgtcagaatttgcaaagagtggagtggacaaagctctgtatggaagactgaacaactgtaaatagatgatatccaaacttaatttggctaggacttcaattttaaaaatcagtgtacctaggcagtgcacagcacgaaataagtggcccttgcagcttccccgtttaacccactgtgctatagttgcgggtggaacagtcaacctttctagtagtttatgatattgccctctttgtattcccattttccacagttttttccgcagacttctttctgcaaattattcagcctccaaatgcaaatgaatgatataaaaataagtagggaacatggcagagagtggtgcttcccagcctcacaatgtgggaatttgacataggatgagagtcagagtataggtttaaaagataaaatctttagttaataattttgtatttatttattctagatgtatgtatctgaggaaagaaatctggtatttttgctttccaataaaggggatcaaagtaatggtttttctctcagttctctaagctggtctatgttatagctctagcagtatggaaatgtgctttaaaatatgcttaccttttgaatgatcatggctatatgttgttgagatatttgaaacttaccttgttttcacttgtgcactgtgaatgaactttgtattatttttttaaaaccttcacattacgtgtagatattattgcaacttatattttgcctgagcttgatcaaaggtcatttgtgtagatgagtaattaaaaaatatttaaatcacattataattctattattggagagcatcttttaaatttttttctgttttaacgagggaaagagaaacctgtatacctagggtcattatttgaccccatagtataaccagattcatggtctaacaagctctcagtgtggcttttctctgaatgcttgaatttcacatgccttgcatttcacagttgtactccatggtcaaccggtgctttttttcacatcgtggtacttgtcaaaacattttgttattttccttggtaaaatatataaaaaaggttttctaatttca

SEQ ID NO: 354022 - DNA, 5843 bp, Homo sapiens
gtgacggactgagtacgggtgcctgtcaggctcttgcggaagtccatgcgccattgggagggcctcggccgcggctctgtgcccttgctgctgagggccacttcctgggtcattcctggaccgggagccgggctggggctcacacgggggctcccgcgtggccgtctcggcgcctgcgtgacctccccgccggcgggatgtggcgactacgtcgggccgctgtggcctgtgaggtctgccagtctttagtgaaacacagctctggaataaaaggaagtttaccactacaaaaactacatctggtttcacgaagcatttatcattcacatcatcctaccttaaagcttcaacgaccccaattaaggacatcctttcagcagttctcttctctgacaaaccttcctttacgtaaactgaaattctctccaattaaatatggctaccagcctcgcaggaatttttggccagcaagattagctacgagactcttaaaacttcgctatctcatactaggatcggctgttgggggtggctacacagccaaaaagacttttgatcagtggaaagatatgataccggaccttagtgaatataaatggattgtgcctgacattgtgtgggaaattgatgagtatatcgattttgagaaaaattagaaaagcccttcctagttcagaagaccttgtaaagttagcaccagactttgacaagattgttgaaagccttagcttattgaaggacttttttacctcaggttctccggaagaaacggcgtttagagcaacagatcgtggatctgaaagtgacaagcattttagaaagggtctgcttggtgagctcattctcttacaacaacaaattcaagagcatgaagaggaagcgcgcagagccgctggccaatatagcacgagctatgcccaacagaagcgcaaggtgtcagacaaagagaaaattgaccaacttcaggaagaacttctgcacactcagttgaagtatcagagaatcttggaacgattagaaaaggagaacaaagaattgagaaaattagtattgcagaaagatgacaaaggcattcatcatagaaagcttaagaaatctttgattgacatgtattctgaagttcttgatgttctctctgattatgatgccagttataatacgcaagatcatctgccacgggttgttgtggttggagatcagagtgctggaaagactagtgtgttggaaatgattgcccaagctcgaatattcccaagaggatctggggagatgatgacacgttctccagttaaggtgactctgagtgaaggtcctcaccatgtggccctatttaaagatagttctcgggagtttgatcttaccaaagaagaagatcttgcagcattaagacatgaaatagaacttcgaatgaggaaaaatgtgaaagaaggctgtaccgttagccctgagaccatatccttaaatgtaaaaggccctggactacagaggatggtgcttgttgacttaccaggtgtgattaatactgtgacatcaggcatggctcctgacacaaaggaaactattttcagtatcagcaaagcttacatgcagaatcctaatgccatcatactgtgtattcaagatggatctgtggatgctgaacgcagtattgttacagacttggtcagtcaaatggaccctcatggaaggagaaccatattcgttttgaccaaagtagacctggcagagaaaaatgtagccagtccaagcaggattcagcagataattgaaggaaagctcttcccaatgaaagctttaggttattttgctgttgtaacaggaaaagggaacagctctgaaagcattgaagctataagagaatatgaagaagagttttttcagaattcaaagctcctaaagacaagcatgctaaaggcacaccaagtgactacaagaaatttaagccttgcagtatcagactgcttttggaaaatggtacgagagtctgttgaacaacaggctgatagtttcaaagcaacacgttttaaccttgaaactgaatggaagaataactatcctcgcctgcgggaacttgaccggaatgaactatttgaaaaagctaaaaatgaaatccttgatgaagttatcagtctgagccaggttacaccaaaacattgggaggaaatccttcaacaatctttgtgggaaagagtatcaactcatgtgattgaaaacatctaccttccagctgcgcagaccatgaattcaggaacttttaacaccacagtggatatcaagcttaaacagtggactgataaacaacttcctaataaagcagtagaggttgcttgggagaccctacaagaagaattttcccgctttatgacagaaccgaaagggaaagagcatgatgacatatttgataaacttaaagaggctgttaaggaagaaagtattaaacgacacaagtggaatgactttgcggaggacagcttgagggttattcaacacaatgctttggaagaccgatccatatctgataaacagcaatgggatgcagctatttattttatggaagaggctctgcaggctcgtctcaaggatactgaaaatgcaattgaaaacatggtgggtccagactggaaaaagaggtggttatactggaagaatcggacccaagaacagtgtgttcacaatgaaaccaagaatgaattggagaagatgttgaaatgtaatgaggagcacccagcttatcttgcaagtgatgaaataaccacagtccggaagaaccttgaatcccgaggagtagaagtagatccaagcttgattaaggatacttggcatcaagtttatagaagacattttttaaaaacagctctaaaccattgtaacctttgtcgaagaggtttttattactaccaaaggcattttgtagattctgagttggaatgcaatgatgtggtcttgttttggcgtatacagcgcatgcttgctatcaccgcaaatactttaaggcaacaacttacaaatactgaagttaggcgattagagaaaaatgttaaagaggtattggaagattttgctgaagatggtgagaagaagattaaattgcttactggtaaacgcgttcaactggcggaagacctcaagaaagttagagaaattcaagaaaaacttgatgctttcattgaagctcttcatcaggagaaataaattaaaatcgtactcataatcagctctgcatacatctgaagaacaaaaacatcaacgtcttttgtccagcctctttttcttctgctgttccacctttctaaacatacaataaagtcatgggataaaaataatcgatgtatgttacgggcgctttaaccatcagctgcctctcgaatggaagaacagtggtaatggattaacatcctattttgttgtactaaagtgacaaatcggaataatataattggtatggccattaggttcagtccttgaagataagaagcttgttctctgtttgttgtcttatttgtggtggcactcgtttaatggattaactgaggttgctcaatgttcagtttcttttccagaaatacaatgctaggtgttttgaaataaaacttatatagcaattgtttaaagttatcaattgtatataaaatcacagtagcctgctaaatcattgtatgtgtctgtagtattctattcccagaaactatttgaccatgataattcagtttatattcaccacatgaaagaaaaatgggtaacagaagaacccctaaaacaggttaatttggattgtaacgttcagtgaaagaaatttcaacccttcatagccagcgaagaaatttgccttggaagccaagtcagtaccagcttacctatttgattcagttgctgttttctcactctctatatccatttgaaattgatttattttagatgttgtatacttacgttaggctttctgttaatagtggtttttctcctgttgacagagccaccggattatgacacaggatgaggaagattaaggataatcaattgactaatttcatttagaatattatcaaacatttcaactaggtatcagaaaaaggctttctttcataagactattttaaatagaaattatttcaacaattaaagtaatgttgaccatccccctctcagctgaataaagaaaaatttagttcaatttattgcaatttaattacaatactaccttcacaacattttcatgtgttttaaataaatattttttaattggctaaaggacattcaagcaaagaaatgctttctttacttaaaatgtctatctcatttgctgccttttcactaagcctttactttgttaataaaagtgtccattgtgtgatgtttttgattttacagtttgctaaatcttattttcttggagttgctttttggtaacagccccattgctactccccattttattgttttacatcaatgcatgcttcgttgtgatccctcaagatgtaacacttggtatgctcggttgaggatatgaaaaaatacttccgaaaccaggaattcagtgtatgtttgttttatactgtttgataagaaaagtaggtccagccttaagcagcacagatgcgctggtagatgcatagtcaggaactttttttatttcttttaggtctagggacaggagtgaatagaaagggaggagagctctattatgttctatacacagattaggagatgaccttactgggtacacccctctaaccagtgcttacaggttaatgcatgttaatgaatatttttgcagttgtaaagcataacaattacaactacacatctatttctaaagaataaaacaggaccatatttatttacttctgtcaactatagaaagaaagaccttcagctgtatttccacagatttctcccaaggaaaaggctaatattagtcactactgttatcacatccctttgtataagttttaaaaagagatggagggagatcttcatttctttgaggagatcagtattgtaacgtatgtgaatagatgataacaattaatattactaaaagtcccacatgagagtcctgacgccctctccatgccccacagtaatgtggcttctttcatgggtttttttttcttctttttagctgatctcatcctaagcatgctttatttttccttgaaagctaggtatttatcaactgcagatgttattgaaagaaaataaaattcagtctcaagagtaaaccctgtgtcttgtgtctgtagttcaaaagtcagaaatgattctaatttaaacaaaaagatactaaatatacagaagttaaattcgaactagccacagaatcatttgtttttatgtcagaatttgcaaagagtggagtggacaaagctctgtatggaagactgaacaactgtaaatagatgatatccaaacttaatttggctaggacttcaattttaaaaatcagtgtacctaggcagtgcacagcacgaaataagtggcccttgcagcttccccgtttaacccactgtgctatagttgcgggtggaacagtcaacctttctagtagtttatgatattgccctctttgtattcccattttccacagttttttccgcagacttctttctgcaaattattcagcctccaaatgcaaatgaatgatataaaaataagtagggaacatggcagagagtggtgcttcccagcctcacaatgtgggaatttgacataggatgagagtcagagtataggtttaaaagataaaatctttagttaataattttgtatttatttattctagatgtatgtatctgaggaaagaaatctggtatttttgctttccaataaaggggatcaaagta

SEQ ID NO: 354023 - DNA, 4057 bp, Homo sapiens
ggcggcgcgtgtacacccaggaaacactatacctatgcgatcacggtccggacgatctacacccgggagacagcgatgacagtattaagggatctacacgtgggagtgacttgacggcgcgcagctcggagggttattcaacacaatgctttggaagaccgatccatatctgataaacagcaatgggatgcagctatttattttatggaagaggctctgcaggctcgtctcaaggatactgaaaatgcaattgaaaacatggtgggtccagactggaaaaagaggtggttatactggaagaatcggacccaagaacagtgtgttcacaatgaaaccaagaatgaattggagaagatgttgaaatgtaatgaggagcacccagcttatcttgcaagtgatgaaataaccacagtccggaagaaccttgaatcccgaggagtagaagtagatccaagcttgattaaggatacttggcatcaagtttatagaagacattttttaaaaacagctctaaaccattgtaacctttgtcgaagaggtttttattactaccaaaggcattttgtagattctgagttggaatgcaatgatgtggtcttgttttggcgtatacagcgcatgcttgctatcaccgcaaatactttaaggcaacaacttacaaatactgaagttaggcgattagagaaaaatgttaaagaggtattggaagattttgctgaagatggtgagaagaagattaaattgcttactggtaaacgcgttcaactggcggaagacctcaagaaagttagagaaattcaagaaaaacttgatgctttcattgaagctcttcatcaggagaaataaattaaaatcgtactcataatcagctctgcatacatctgaagaacaaaaacatcaacgtcttttgtccagcctctttttcttctgctgttccacctttctaaacatacaataaagtcatgggataaaaataatcgatgtatgttacgggcgctttaaccatcagctgcctctcgaatggaagaacagtggtaatggattaacatcctattttgttgtactaaagtgacaaatcggaataatataattggtatggccattaggttcagtccttgaagataagaagcttgttctctgtttgttgtcttatttgtggtggcactcgtttaatggattaactgaggttgctcaatgttcagtttcttttccagaaatacaatgctaggtgttttgaaataaaacttatatagcaattgtttaaagttatcaattgtatataaaatcacagtagcctgctaaatcattgtatgtgtctgtagtattctattcccagaaactatttgaccatgataattcagtttatattcaccacatgaaagaaaaatgggtaacagaagaacccctaaaacaggttaatttggattgtaacgttcagtgaaagaaatttcaacccttcatagccagcgaagaaatttgccttggaagccaagtcagtaccagcttacctatttgattcagttgctgttttctcactctctatatccatttgaaattgatttattttagatgttgtatacttacgttaggctttctgttaatagtggtttttctcctgttgacagagccaccggattatgacacaggatgaggaagattaaggataatcaattgactaatttcatttagaatattatcaaacatttcaactaggtatcagaaaaaggctttctttcataagactattttaaatagaaattatttcaacaattaaagtaatgttgaccatccccctctcagctgaataaagaaaaatttagttcaatttattgcaatttaattacaatactaccttcacaacattttcatgtgttttaaataaatattttttaattggctaaaggacattcaagcaaagaaatgctttctttacttaaaatgtctatctcatttgctgccttttcactaagcctttactttgttaataaaagtgtccattgtgtgatgtttttgattttacagtttgctaaatcttattttcttggagttgctttttggtaacagccccattgctactccccattttattgttttacatcaatgcatgcttcgttgtgatccctcaagatgtaacacttggtatgctcggttgaggatatgaaaaaatacttccgaaaccaggaattcagtgtatgtttgttttatactgtttgataagaaaagtaggtccagccttaagcagcacagatgcgctggtagatgcatagtcaggaactttttttatttcttttaggtctagggacaggagtgaatagaaagggaggagagctctattatgttctatacacagattaggagatgaccttactgggtacacccctctaaccagtgcttacaggttaatgcatgttaatgaatatttttgcagttgtaaagcataacaattacaactacacatctatttctaaagaataaaacaggaccatatttatttacttctgtcaactatagaaagaaagaccttcagctgtatttccacagatttctcccaaggaaaaggctaatattagtcactactgttatcacatccctttgtataagttttaaaaagagatggagggagatcttcatttctttgaggagatcagtattgtaacgtatgtgaatagatgataacaattaatattactaaaagtcccacatgagagtcctgacgccctctccatgccccacagtaatgtggcttctttcatgggtttttttttcttctttttagctgatctcatcctaagcatgctttatttttccttgaaagctaggtatttatcaactgcagatgttattgaaagaaaataaaattcagtctcaagagtaaaccctgtgtcttgtgtctgtagttcaaaagtcagaaatgattctaatttaaacaaaaagatactaaatatacagaagttaaattcgaactagccacagaatcatttgtttttatgtcagaatttgcaaagagtggagtggacaaagctctgtatggaagactgaacaactgtaaatagatgatatccaaacttaatttggctaggacttcaattttaaaaatcagtgtacctaggcagtgcacagcacgaaataagtggcccttgcagcttccccgtttaacccactgtgctatagttgcgggtggaacagtcaacctttctagtagtttatgatattgccctctttgtattcccattttccacagttttttccgcagacttctttctgcaaattattcagcctccaaatgcaaatgaatgatataaaaataagtagggaacatggcagagagtggtgcttcccagcctcacaatgtgggaatttgacataggatgagagtcagagtataggtttaaaagataaaatctttagttaataattttgtatttatttattctagatgtatgtatctgaggaaagaaatctggtatttttgctttccaataaaggggatcaaagtaatggtttttctctcagttctctaagctggtctatgttatagctctagcagtatggaaatgtgctttaaaatatgcttaccttttgaatgatcatggctatatgttgttgagatatttgaaacttaccttgttttcacttgtgcactgtgaatgaactttgtattatttttttaaaaccttcacattacgtgtagatattattgcaacttatattttgcctgagcttgatcaaaggtcatttgtgtagatgagtaattaaaaaatatttaaatcacattataattctattattggagagcatcttttaaatttttttctgttttaacgagggaaagagaaacctgtatacctagggtcattatttgaccccatagtataaccagattcatggtctaacaagctctcagtgtggcttttctctgaatgcttgaatttcacatgccttgcatttcacagttgtactccatggtcaaccggtgctttttttcacatcgtggtacttgtcaaaacattttgttattttccttggtaaaatatataaaaaaggttttctaatttca

SEQ ID NO: 354024 - DNA, 5220 bp, Homo sapiens
gtgacggactgagtacgggtgcctgtcaggctcttgcggaagtccatgcgccattgggagggcctcggccgcggctctgtgcccttgctgctgagggccacttcctgggtcattcctggaccgggagccgggctggggctcacacgggggctcccgcgtggccgtctcggcgcctgcgtgacctccccgccggcgggatgtggcgactacgtcgggccgctgtggcctgtgaggtctgccagtctttagtgaaacacagctctggaataaaaggaagtttaccactacaaaaactacatctggtttcacgaagcatttatcattcacatcatcctaccttaaagcttcaacgaccccaattaaggacatcctttcagcagttctcttctctgacaaaccttcctttacgtaaactgaaattctctccaattaaatatggctaccagcctcgcaggaatttttggccagcaagattagctacgagactcttaaaacttcgctatctcatactaggatcggctgttgggggtggctacacagccaaaaagacttttgatcagtggaaagatatgataccggaccttagtgaatataaatggattgtgcctgacattgtgtgggaaattgatgagtatatcgattttgagaaaaattagaaaagcccttcctagttcagaagaccttgtaaagttagcaccagactttgacaagattgttgaaagccttagcttattgaaggacttttttacctcaggttctccggaagaaacggcgtttagagcaacagatcgtggatctgaaagtgacaagcattttagaaagggtctgcttggtgagctcattctcttacaacaacaaattcaagagcatgaagaggaagcgcgcagagccgctggccaatatagcacgagctatgcccaacagaagcgcaaggtgtcagacaaagagaaaattgaccaacttcaggaagaacttctgcacactcagttgaagtatcagagaatcttggaacgattagaaaaggagaacaaagaattgagaaaattagtattgcagaaagatgacaaaggcattcatcatagaaagcttaagaaatctttgattgacatgtattctgaagttcttgatgttctctctgattatgatgccagttataatacgcaagatcatctgccacgggttgttgtggttggagatcagagtgctggaaagactagtgtgttggaaatgattgcccaagctcgaatattcccaagaggatctggggagatgatgacacgttctccagttaaggtgactctgagtgaaggtcctcaccatgtggccctatttaaagatagttctcgggagtttgatcttaccaaagaagaagatcttgcagcattaagacatgaaatagaacttcgaatgaggaaaaatgtgaaagaaggctgtaccgttagccctgagaccatatccttaaatgtaaaaggccctggactacagaggatggtgcttgttgacttaccaggtgtgattaatactgtgacatcaggcatggctcctgacacaaaggaaactattttcagtatcagcaaagcttacatgcagaatcctaatgccatcatactgtgtattcaagatggatctgtggatgctgaacgcagtattgttacagacttggtcagtcaaatggaccctcatggaaggagaaccatattcgttttgaccaaagtagacctggcagagaaaaatgtagccagtccaagcaggattcagcagataattgaaggaaagctcttcccaatgaaagctttaggttattttgctgttgtaacaggaaaagggaacagctctgaaagcattgaagctataagagaatatgaagaagagttttttcagaattcaaagctcctaaagacaagcatgctaaaggcacaccaagtgactacaagaaatttaagccttgcagtatcagactgcttttggaaaatggtacgagagtctgttgaacaacaggctgatagtttcaaagcaacacgttttaaccttgaaactgaatggaagaataactatcctcgcctgcgggaacttgaccggaatgaactatttgaaaaagctaaaaatgaaatccttgatgaagttatcagtctgagccaggttacaccaaaacattgggaggaaatccttcaacaatctttgtgggaaagagtatcaactcatgtgattgaaaacatctaccttccagctgcgcagaccatgaattcaggaacttttaacaccacagtggatatcaagcttaaacagtggactgataaacaacttcctaataaagcagtagaggttgcttgggagaccctacaagaagaattttcccgctttatgacagaaccgaaagggaaagagcatgatgacatatttgataaacttaaagaggctgttaaggaagaaagtattaaacgacacaagtggaatgactttgcggaggacagcttgagggttattcaacacaatgctttggaagaccgatccatatctgataaacagcaatgggatgcagctatttattttatggaagaggctctgcaggctcgtctcaaggatactgaaaatgcaattgaaaacatggtgggtccagactggaaaaagaggtggttatactggaagaatcggacccaagaacagtgtgttcacaatgaaaccaagaatgaattggagaagatgttgaaatgtaatgaggagcacccagcttatcttgcaagtgatgaaataaccacagtccggaagaaccttgaatcccgaggagtagaagtagatccaagcttgattaaggatacttggcatcaagtttatagaagacattttttaaaaacagctctaaaccattgtaacctttgtcgaagaggtttttattactaccaaaggcattttgtagattctgagttggaatgcaatgatgtggtcttgttttggcgtatacagcgcatgcttgctatcaccgcaaatactttaaggcaacaacttacaaatactgaagttaggcgattagagaaaaatgttaaagaggtattggaagattttgctgaagatggtgagaagaagattaaattgcttactggtaaacgcgttcaactggcggaagacctcaagaaagttagagaaattcaagaaaaacttgatgctttcattgaagctcttcatcaggagaaataaattaaaatcgtactcataatcagctctgcatacatctgaagaacaaaaacatcaacgtcttttgtccagcctctttttcttctgctgttccacctttctaaacatacaataaagtcatgggataaaaataatcgatgtatgttacgggcgctttaaccatcagctgcctctcgaatggaagaacagtggtaatggattaacatcctattttgttgtactaaagtgacaaatcggaataatataattggtatggccattaggttcagtccttgaagataagaagcttgttctctgtttgttgtcttatttgtggtggcactcgtttaatggattaactgaggttgctcaatgttcagtttcttttccagaaatacaatgctaggtgttttgaaataaaacttatatagcaattgtttaaagttatcaattgtatataaaatcacagtagcctgctaaatcattgtatgtgtctgtagtattctattcccagaaactatttgaccatgataattcagtttatattcaccacatgaaagaaaaatgggtaacagaagaacccctaaaacaggttaatttggattgtaacgttcagtgaaagaaatttcaacccttcatagccagcgaagaaatttgccttggaagccaagtcagtaccagcttacctatttgattcagttgctgttttctcactctctatatccatttgaaattgatttattttagatgttgtatacttacgttaggctttctgttaatagtggtttttctcctgttgacagagccaccggattatgacacaggatgaggaagattaaggataatcaattgactaatttcatttagaatattatcaaacatttcaactaggtatcagaaaaaggctttctttcataagactattttaaatagaaattatttcaacaattaaagtaatgttgaccatccccctctcagctgaataaagaaaaatttagttcaatttattgcaatttaattacaatactaccttcacaacattttcatgtgttttaaataaatattttttaattggctaaaggacattcaagcaaagaaatgctttctttacttaaaatgtctatctcatttgctgccttttcactaagcctttactttgttaataaaagtgtccattgtgtgatgtttttgattttacagtttgctaaatcttattttcttggagttgctttttggtaacagccccattgctactccccattttattgttttacatcaatgcatgcttcgttgtgatccctcaagatgtaacacttggtatgctcggttgaggatatgaaaaaatacttccgaaaccaggaattcagtgtatgtttgttttatactgtttgataagaaaagtaggtccagccttaagcagcacagatgcgctggtagatgcatagtcaggaactttttttatttcttttaggtctagggacaggagtgaatagaaagggaggagagctctattatgttctatacacagattaggagatgaccttactgggtacacccctctaaccagtgcttacaggttaatgcatgttaatgaatatttttgcagttgtaaagcataacaattacaactacacatctatttctaaagaataaaacaggaccatatttatttacttctgtcaactatagaaagaaagaccttcagctgtatttccacagatttctcccaaggaaaaggctaatattagtcactactgttatcacatccctttgtataagttttaaaaagagatggagggagatcttcatttctttgaggagatcagtattgtaacgtatgtgaatagatgataacaattaatattactaaaagtcccacatgagagtcctgacgccctctccatgccccacagtaatgtggcttctttcatgggtttttttttcttctttttagctgatctcatcctaagcatgctttatttttccttgaaagctaggtatttatcaactgcagatgttattgaaagaaaataaaattcagtctcaagagta

SEQ ID NO: 354025 - DNA, 846 bp, Homo sapiens
gtgacggactgagtacgggtgcctgtcaggctcttgcggaagtccatgcgccattgggagggcctcggccgcggctctgtgcccttgctgctgagggccacttcctgggtcattcctggaccgggagccgggctggggctcacacgggggctcccgcgtggccgtctcggcgcctgcgtgacctccccgccggcgggatgtggcgactacgtcgggccgctgtggcctgtgaggtctgccagtctttagtgaaacacagctctggaataaaaggaagtttaccactacaaaaactacatctggtttcacgaagcatttatcattcacatcatcctaccttaaagcttcaacgaccccaattaaggacatcctttcagcagttctcttctctgacaaaccttcctttacgtaaactgaaattctctccaattaaatatggctaccagcctcgcaggaatttttggccagcaagattagctacgagactcttaaaacttcgctatctcatactaggatcggctgttgggggtggctacacagccaaaaagacttttgatcagtggaaagatatgataccggaccttagtgaatataaatggattgtgcctgacattgtgtagcaattgtacgttctagttctacatcacggaggaggcgtgcaggcgttgtgcgtagaggatcctagaccagcatgacagctgtttcaaggacacagggaaagcgagtggttggtgaaaatccgtgagcgtcggcaatatagttgtttttctggaacttacttatggtaaccgtctattatttatttttctaatatatatgggggagtttcgtactgatacgtagcaa

SEQ ID NO: 354026 - DNA, 262 bp, Homo sapiens
caagctgaactcaaactcctaggctcaagagattctcccacttcagcctcctgaaaagctggcactacaggtgcgcaccactgggtccagcataatggctatttcttgacaaatcttgacaatgccaccagtatgtttttctttagagacagagtctcgcttcgtagcccaggctggagaacagtggtgtgatccctagctcactgcagcctcaaacacctggactcaggagatccccctgcctcagcctctcaagtacctg

SEQ ID NO: 354027 - DNA, 508 bp, Homo sapiens
ggtttgttttttgttttaacttccaaactaaaacccctgatgatttcagaacactgtaacactggacagtttctcacagcatggttgtgaggatgaagtaaaaagagaatgtaaagaataagtgttttctttgtaagtgtggtcccggtatcacttatgcatatgcatgtccctctgtataaagaagggtttaaactctcgaagtcacctataattgcagttaccctttcgtctgcccactcttgcattttctctgcctcttggccaaggcagtgacttggaggaaattcacttggtggaagagatatggaggtgagaaatcggactgagtagaaggcatcttacattacacgcagaaattaaaaagcacttacttagtatcggggaccatacgctggcatagttctgtgttagctcattcccacttatgtaagtcgccccaagcagagcgtaaaacattaagtaaccttctcctcccttttgtctttcagattcctttgtgacactg

SEQ ID NO: 354028 - DNA, 330 bp, Homo sapiens
taaaactcagacactgcaaacttgtccaggaagcctctctggaatcccccaacccagctggagtaagtacctctcctgtgctctccagtgcctcagactccccaccattgtgacaccaactctgcctgctgaatctgtctctgtaatcctaccctcaatatctagcatgggccccatgaggcatcagattttgttgaaagaataaatgaggctgggcacggtgggtcatgcctgtaatcccagcactttgggaggccaaggcaggcggatcacctgaggtcaggagtttgagaccagcctggccaacgtggtgaaaccccgtctctacta

SEQ ID NO: 354029 - DNA, 405 bp, Homo sapiens
gctgaagatgcttttaaaaccttctagttacttagagcagactatatggcgcagcttggtggttctaaaaggcaggtcctatccatcacagaaacagcaagtctctgggttatgggggaagattgagcgggggggagtgaagtaaggagaaaggggggctgttgtgtccagtttacatttgtcaccagtgactagcttttaaaaaatgtattagctgtgcatggtggtaagtaagatccagctgcaggggattatggctttgagtgggtcggggagcttggaatgcattcagttccatcaggggatttgtgtccctcgtcatcagccttaacattgctaacacagtaaagattaggaacagaccagtgtcacctgccctgaactttgaaaaaccctggaaccatt

SEQ ID NO: 354030 - DNA, 909 bp, Homo sapiens
cttctcagcccaggattatgacatcttcgcccctattttacctgtggagaagcagaggctcagggttacccaggaagtcagggcagggttggtgctggtgctgaagattagacctcagaccaactcttgtatcctgcctttgccccactccactggttctataaatagcgaccatgtacctactaaatagcgggccccgcggtgattaccctgtgatccttgtgatgcttgagtagctgacttagggcatcctcagcaccgatgggctggtggtttcccctgactcgggcctccttgcagtacctctttttaccaccaggtggggctcctgtacgaagagggtgttcgcaaggcccagagcagcgactccagcaagaggactttctccgtgtacagcagctctcggcagcagggccgctacgcccccagctatacccccagtgccccgatggacaccaacctcttgagcaatatccagaagctattctctgaacgtattgatgtgttcagccctgtggagttcaacaaggtgtcggtgctgaccggcatcatcaagatcagcctgaagacgctgctggagtgtgtgcggctgcgcacctttgggcgcttcgggctgcagcaggtgcaagtggactgccactttctgcagctctacctgtggcgttttgtggccgacgaagaactcgtgcacttgctgctggacgaagtggtggcctctgctgccctgcgctgcccagaccctgtgcccatggagcccagtgtggttgaggtcatctgcgagcgcggctaggcgcagccgctgccatgcaccggtctgtccctgcaccccatggcacccaggatctggtctcggtggtccttccccgcaggcaggtgtcaggaccggcctaataaacatgtgtggcctcc

SEQ ID NO: 354031 - DNA, 2719 bp, Homo sapiens
  misc_feature (19)..(19): n is a, c, g, or t
  misc_feature (28)..(28): n is a, c, g, or t
tcaggctggttacggtccnaggtcgtanatcggaagtgcctcctccccgtccccttcctttccagcctcacgcccgtgggctgcagttggaacgatggcggcggcagctgccgccgggcctagcccggggtctggacctggggactccccagaagggcccgagggggaggctccggagcgtcggcggaaggcgcacgggatgctgaagctttactacggcctctcggaaggggaggcggcgggacgccccgcggggcccgaccccctggacccgactgatctgaacggggcgcacttcgacccggaagtttacctagacaagctgcgtagagagtgccctctggcccagttgatggacagtgagacggacatggtgcggcagatccgggctctagacagcgacatgcagaccctggtctatgagaactacaacaagttcatctcagccacagacaccatccggaagatgaagaacgatttccggaagatggaggatgagatggaccggctggccaccaacatggcagtgatcaccgacttcagcgctcgcatcagcgccacgctgcaggaccgccacgagcgcatcaccaagctggcaggggtccacgcgctgctgcggaagctgcagttcctctttgagctgccctcgcgcctcaccaagtgcgtggaactgggcgcctatgggcaggcggtgcgctaccagggccgcgcgcaggccgtgctgcagcagtaccaacacctgccctcgttccgcgccatccaggacgactgccaggtcatcacggcccgcctggcccagcagctgcggcagcgctttagggagggcggctcaggcgccccggagcaggcagagtgcgtggagctgctgctggccctgggcgagcctgcggaggagctgtgcgaggagttcctggcgcacgcccgcggccggctggagaaggagctgagaaacctggaggccgagctggggccctcacctccggctcccgacgtgttagagttcaccgaccatggaggcagtggcttcgtgggcggcctctgccaggtggcggcggcctaccaggagctgtttgcggcccagggcccagcaggtgccgagaagctggcggccttcgcccggcagctgggcagccgctattttgcgctggtggagcggcggctggcgcaggagcagggtggtggtgacaactcactgctggtgcgggcgctggaccgcttccaccggcgcttgcgggctcccggggccctgctggccgctgccgggctcgcagacgctgccacggagatcgtggaacgagtggcccgcgagcgcctgggccaccacctgcagggtctccgggcggccttcctgggctgcctgacagacgtccgccaggcgctggcagcacctcgcgtggctgggaaggagggccctggcctggccgagttgctggccaatgtggccagctccatcctgagccacattaaggcctctctggcagcagtgcaccttttcaccgccaaagaggtgtccttctccaacaagccctacttccggggtgagttctgcagtcagggtgtccgtgagggcctcatcgtgggcttcgtccactctatgtgccagacggctcagagcttctgcgacagccctggggagaaggggggtgccacaccacctgccctgctcctgctgctctcccgcctctgcctggactacgagacggccaccatctcctacatcctcactctcactgatgaacagtttctggtgcaggatcagttcccagtgacgcccgtgagcacgctgtgtgcagaggccagggaaacggcgcggcggctgctgacccactacgtgaaggtgcagggcctggtcatatcacagatgctgcgcaagagcgtggagactcgcgactggctcagcactctggagccccggaatgtgcgggccgtcatgaagcgggtggtggaggataccaccgccatcgacgtgcaggtggggctcctgtacgaagagggtgttcgcaaggcccagagcagcgactccagcaagaggactttctccgtgtacagcagctctcggcagcagggccgctacgcccccagctatacccccagtgccccgatggacaccaacctcttgagcaatatccagaagctattctctgaacgtattgatgtgttcagccctgtggagttcaacaaggtgtcggtgctgaccggcatcatcaagatcagcctgaagacgctgctggagtgtgtgcggctgcgcacctttgggcgcttcgggctgcagcaggtgcaagtggactgccactttctgcagctctacctgtggcgttttgtggccgacgaagaactcgtgcacttgctgctggacgaagtggtggcctctgctgccctgcgctgcccagaccctgtgcccatggagcccagtgtggttgaggtcatctgcgagcgcggctaggcgcagccgctgccatgcaccggtctgtccctgcaccccatggcacccaggatctggtctcggtggtccttccccgcaggcaggtgtcaggaccggcctaataaacatgtgtggcctcctcctctcgcttgctgggcgggcctttccgggggcggggttttgaagctgaggcttctgaggcgcccgcgtcgggtccgcccccgagcgccgattggctggtgtgctgggcccagcatgggcagggggcggttccacttaaaaaccctgggacgagag

SEQ ID NO: 354032 - DNA, 2560 bp, Homo sapiens
ctcgtttcaacaacaactttatggctcccggaagtgcctcctccccgtccccttcctttccagcctcacgcccgtgggctgcagttggaacgatggcggcggcagctgccgccgggcctagcccggggtctggacctggggactccccagaagggcccgagggggaggctccggagcgtcggcggaaggcgcacgggatgctgaagctttactacggcctctcggaaggggaggcggcgggacgccccgcggggcccgaccccctggacccgactgatctgaacggggcgcacttcgacccggaagtttacctagacaagctgcgtagagagtgccctctggcccagttgatggacagtgagacggacatggtgcggcagatccgggctctagacagcgacatgcagaccctggtctatgagaactacaacaagttcatctcagccacagacaccatccggaagatgaagaacgatttccggaagatggaggatgagatggaccggctggccaccaacatggcagtgatcaccgacttcagcgctcgcatcagcgccacgctgcaggaccgccacgagcgcatcaccaagctggcaggggtccacgcgctgctgcggaagctgcagttcctctttgagctgccctcgcgcctcaccaagtgcgtggaactgggcgcctatgggcaggcggtgcgctaccagggccgcgcgcaggccgtgctgcagcagtaccaacacctgccctcgttccgcgccatccaggacgactgccaggtcatcacggcccgcctggcccagcagctgcggcagcgctttagggagggcggctcaggcgccccggagcaggcagagtgcgtggagctgctgctggccctgggcgagcctgcggaggagctgtgcgaggagttcctggcgcacgcccgcggccggctggagaaggagctgagaaacctggaggccgagctggggccctcacctccggctcccgacgtgttagagttcaccgaccatggaggcagtggcttcgtgggcggcctctgccaggtggcggcggcctaccaggagctgtttgcggcccagggcccagcaggtgccgagaagctggcggccttcgcccggcagctgggcagccgctattttgcgctggtggagcggcggctggcgcaggagcagggtggtggtgacaactcactgctggtgcgggcgctggaccgcttccaccggcgcttgcgggctcccggggccctgctggccgctgccgggctcgcagacgctgccacggagatcgtggaacgagtggcccgcgagcgcctgggccaccacctgcagggtctccgggcggccttcctgggctgcctgacagacgtccgccaggcgctggcagcacctcgcgtggctgggaaggagggccctggcctggccgagttgctggccaatgtggccagctccatcctgagccacattaaggcctctctggcagcagtgcaccttttcaccgccaaagaggtgtccttctccaacaagccctacttccggggtgagttctgcagtcagggtgtccgtgagggcctcatcgtgggcttcgtccactctatgtgccagacggctcagagcttctgcgacagccctggggagaaggggggtgccacaccacctgccctgctcctgctgctctcccgcctctgcctggactacgagacggccaccatctcctacatcctcactctcactgatgaacagtttctggtgcaggatcagttcccagtgacgcccgtgagcacgctgtgtgcagaggccagggaaacggcgcggcggctgctgacccactacgtgaaggtgcagggcctggtcatatcacagatgctgcgcaagagcgtggagactcgcgactggctcagcactctggagccccggaatgtgcgggccgtcatgaagcgggtggtggaggataccaccgccatcgacgtgcaggtggggctcctgtacgaagagggtgttcgcaaggcccagagcagcgactccagcaagaggactttctccgtgtacagcagctctcggcagcagggccgctacgcccccagctatacccccagtgccccgatggacaccaacctcttgagcaatatccagaagctattctctgaacgtattgatgtgttcagccctgtggagttcaacaaggtgtcggtgctgaccggcatcatcaagatcagcctgaagacgctgctggagtgtgtgcggctgcgcacctttgggcgcttcgggctgcagcaggtgcaagtggactgccactttctgcagctctacctgtggcgttttgtggccgacgaagaactcgtgcacttgctgctggacgaagtggtggcctctgctgccctgcgctgcccagaccctgtgcccatggagcccagtgtggttgaggtcatctgcgagcgcggctaggcgcagccgctgccatgcaccggtctgtccctgcaccccatggcacccaggatctggtctcggtggtccttccccgcaggcaggtgtcaggaccggcctaataaacatgtgtggcctcc

SEQ ID NO: 354033 - DNA, 3100 bp, Homo sapiens
  misc_feature (2618)..(2618): n is a, c, g, or t
  misc_feature (2622)..(2622): n is a, c, g, or t
ctcgtttcaacaacaactttatggctcccggaagtgcctcctccccgtccccttcctttccagcctcacgcccgtgggctgcagttggaacgatggcggcggcagctgccgccgggcctagcccggggtctggacctggggactccccagaagggcccgagggggaggctccggagcgtcggcggaaggcgcacgggatgctgaagctttactacggcctctcggaaggggaggcggcgggacgccccgcggggcccgaccccctggacccgactgatctgaacggggcgcacttcgacccggaagtttacctagacaagctgcgtagagagtgccctctggcccagttgatggacagtgagacggacatggtgcggcagatccgggctctagacagcgacatgcagaccctggtctatgagaactacaacaagttcatctcagccacagacaccatccggaagatgaagaacgatttccggaagatggaggatgagatggaccggctggccaccaacatggcagtgatcaccgacttcagcgctcgcatcagcgccacgctgcaggaccgccacgagcgcatcaccaagctggcaggggtccacgcgctgctgcggaagctgcagttcctctttgagctgccctcgcgcctcaccaagtgcgtggaactgggcgcctatgggcaggcggtgcgctaccagggccgcgcgcaggccgtgctgcagcagtaccaacacctgccctcgttccgcgccatccaggacgactgccaggtcatcacggcccgcctggcccagcagctgcggcagcgctttagggagggcggctcaggcgccccggagcaggcagagtgcgtggagctgctgctggccctgggcgagcctgcggaggagctgtgcgaggagttcctggcgcacgcccgcggccggctggagaaggagctgagaaacctggaggccgagctggggccctcacctccggctcccgacgtgttagagttcaccgaccatggaggcagtggcttcgtgggcggcctctgccaggtggcggcggcctaccaggagctgtttgcggcccagggcccagcaggtgccgagaagctggcggccttcgcccggcagctgggcagccgctattttgcgctggtggagcggcggctggcgcaggagcagggtggtggtgacaactcactgctggtgcgggcgctggaccgcttccaccggcgcttgcgggctcccggggccctgctggccgctgccgggctcgcagacgctgccacggagatcgtggaacgagtggcccgcgagcgcctgggccaccacctgcagggtctccgggcggccttcctgggctgcctgacagacgtccgccaggcgctggcagcacctcgcgtggctgggaaggagggccctggcctggccgagttgctggccaatgtggccagctccatcctgagccacattaaggcctctctggcagcagtgcaccttttcaccgccaaagaggtgtccttctccaacaagccctacttccggggtgagttctgcagtcagggtgtccgtgagggcctcatcgtgggcttcgtccactctatgtgccagacggctcagagcttctgcgacagccctggggagaaggggggtgccacaccacctgccctgctcctgctgctctcccgcctctgcctggactacgagacggccaccatctcctacatcctcactctcactgatgaacagtttctggtgcaggatcagttcccagtgacgcccgtgagcacgctgtgtgcagaggccagggaaacggcgcggcggctgctgacccactacgtgaaggtgcagggcctggtcatatcacagatgctgcgcaagagcgtggagactcgcgactggctcagcactctggagccccggaatgtgcgggccgtcatgaagcgggtggtggaggataccaccgccatcgacgtgcaggtggggctcctgtacgaagagggtgttcgcaaggcccagagcagcgactccagcaagaggactttctccgtgtacagcagctctcggcagcagggccgctacgcccccagctatacccccagtgccccgatggacaccaacctcttgagcaatatccagaagctattctctgaacgtattgatgtgttcagccctgtggagttcaacaaggtgtcggtgctgaccggcatcatcaagatcagcctgaagacgctgctggagtgtgtgcggctgcgcacctttgggcgcttcgggctgcagcaggtgcaagtggactgccactttctgcagctctacctgtggcgttttgtggccgacgaagaactcgtgcacttgctgctggacgaagtggtggcctctgctgccctgcgctgcccagaccctgtgcccatggagcccagtgtggttgaggtcatctgcgagcgcggctaggcgcagccgctgccatgcaccggtctgtccctgcaccccatggcacccaggatctggtctcggtggtccttccccgcaggcaggtgtcaggaccggcctaataaacatgtgtggcctcctcaaaaaaaaaaaaaaaaaaaaaaaaaaaaaaaaaaaaaaaaaaaaaaaaaaaaaaanaaanaaaaaaaaaaaacaaaaaaaacaaaaaacaaaacaacaacaaaaacaaagagaggggacgcagacccaaaaaaaaaaaacacaacaagaccgcgagacaggacgaccaacaccaccacccacaccgatcaacaacaatgaaagaaaagaagaccaagccgactacattaacgagacgacgctaacaaacaacagcaaagcgagacggaaccgcaaaaaagaaaaacaagcagcgacgaagcaagcaacaacaaaagacaaaccagccaaacaacgcagagaacagacaacaaactacgcaagagagacaaaacaaccacaagcgcgagacaccaaccgcaacagacaaatagaaaaacgcgacgacaggaaacaccaaacaacgaccgacgagccagacaacgacagaccaggcactgacagctagctcgcacacaaaaagcgccacaagaagtcacccacaacacacaacacagcgc

SEQ ID NO: 354034 - DNA, 2668 bp, Homo sapiens
cctggtggcgaattcggcacgaggttcctttccagttggaacgatggcggcggcagctgccgccgggcctagcccggggtctggacctggggactccccagaagggcccgagggggaggctccggagcgtcggcggaaggcgcacgggatgctgaagctttactacggcctctcggaaggggaggcggcgggacgccccgcggggcccgaccccctggacccgactgatctgaacggggcgcacttcgacccggaagtttacctagacaagctgcgtagagagtgccctctggcccagttgatggacagtgagacggacatggtgcggcagatccgggctctagacagcgacatgcagaccctggtctatgagaactacaacaagttcatctcagccacagacaccatccggaagatgaagaacgatttccggaagatggaggatgagatggaccggctggccaccaacatggcagtgatcaccgacttcagcgctcgcatcagcgccacgctgcaggaccgccacgagcgcatcaccaagctggcaggggtccacgcgctgctgcggaagctgcagttcctctttgagctgccctcgcgcctcaccaagtgcgtggaactgggcgcctatgggcaggcggtgcgctaccagggccgcgcgcaggccgtgctgcagcagtaccaacacctgccctcgttccgcgccatccaggacgactgccaggtcatcacggcccgcctggcccagcagctgcggcagcgctttagggagggcggctcaggcgccccggagcaggcagagtgcgtggagctgctgctggccctgggcgagcctgcggaggagctgtgcgaggagttcctggcgcacgcccgcggccggctggagaaggagctgagaaacctggaggccgagctggggccctcacctccggctcccgacgtgttagagttcaccgaccatggaggcagtggcttcgtgggcggcctctgccaggtggcggcggcctaccaggagctgtttgcggcccagggcccagcaggtgccgagaagctggcggccttcgcccggcagctgggcagccgctattttgcgctggtggagcggcggctggcgcaggagcagggtggtggtgacaactcactgctggtgcgggcgctggaccgcttccaccggcgcttgcgggctcccggggccctgctggccgctgccgggctcgcagacgctgccacggagatcgtggaacgagtggcccgcgagcgcctgggccaccacctgcagggtctccgggcggccttcctgggctgcctgacagacgtccgccaggcgctggcagcacctcgcgtggctgggaaggagggccctggcctggccgagttgctggccaatgtggccagctccatcctgagccacattaaggcctctctggcagcagtgcaccttttcaccgccaaagaggtgtccttctccaacaagccctacttccggggtgagttctgcagtcagggtgtccgtgagggcctcatcgtgggcttcgtccactctatgtgccagacggctcagagcttctgcgacagccctggggagaaggggggtgccacaccacctgccctgctcctgctgctctcccgcctctgcctggactacgagacggccaccatctcctacatcctcactctcactgatgaacagtttctggtgcaggatcagttcccagtgacgcccgtgagcacgctgtgtgcagaggccagggaaacggcgcggcggctgctgacccactacgtgaaggtgcagggcctggtcatatcacagatgctgcgcaagagcgtggagactcgcgactggctcagcactctggagccccggaatgtgcgggccgtcatgaagcgggtggtggaggataccaccgccatcgacgtgcaggtggggctcctgtacgaagagggtgttcgcaaggcccagagcagcgactccagcaagaggactttctccgtgtacagcagctctcggcagcagggccgctacgcccccagctatacccccagtgccccgatggacaccaacctcttgagcaatatccagaagctattctctgaacgtattgatgtgttcagccctgtggagttcaacaaggtgtcggtgctgaccggcatcatcaagatcagcctgaagacgctgctggagtgtgtgcggctgcgcacctttgggcgcttcgggctgcagcaggtgcaagtggactgccactttctgcagctctacctgtggcgttttgtggccgacgaagaactcgtgcacttgctgctggacgaagtggtggcctctgctgccctgcgctgcccagaccctgtgcccatggagcccagtgtggttgaggtcatctgcgagcgcggctaggcgcagccgctgccatgcaccggtctgtccctgcaccccatggcacccaggatctggtctcggtggtccttccccgcaggcaggtgtcaggaccggcctaataaacatgtgtggcctcctcctctcgcttgctgggcgggcctttccgggggcggggttttgaagctgaggcttctgaggcgcccgcgtcgggtccgcccccgagcgccgattggctggtgtgctgggcccagcatgggcagggggcggttccacttaaaaaccctgggacgagag

SEQ ID NO: 354035 - DNA, 3104 bp, Homo sapiens
ctcgtttcaacaacaactttatggctcccggaagtgcctcctccccgtccccttcctttccagcctcacgcccgtgggctgcagttggaacgatggcggcggcagctgccgccgggcctagcccggggtctggacctggggactccccagaagggcccgagggggaggctccggagcgtcggcggaaggcgcacgggatgctgaagctttactacggcctctcggaaggggaggcggcgggacgccccgcggggcccgaccccctggacccgactgatctgaacggggcgcacttcgacccggaagtttacctagacaagctgcgtagagagtgccctctggcccagttgatggacagtgagacggacatggtgcggcagatccgggctctagacagcgacatgcagaccctggtctatgagaactacaacaagttcatctcagccacagacaccatccggaagatgaagaacgatttccggaagatggaggatgagatggaccggctggccaccaacatggcagtgatcaccgacttcagcgctcgcatcagcgccacgctgcaggaccgccacgagcgcatcaccaagctggcaggggtccacgcgctgctgcggaagctgcagttcctctttgagctgccctcgcgcctcaccaagtgcgtggaactgggcgcctatgggcaggcggtgcgctaccagggccgcgcgcaggccgtgctgcagcagtaccaacacctgccctcgttccgcgccatccaggacgactgccaggtcatcacggcccgcctggcccagcagctgcggcagcgctttagggagggcggctcaggcgccccggagcaggcagagtgcgtggagctgctgctggccctgggcgagcctgcggaggagctgtgcgaggagttcctggcgcacgcccgcggccggctggagaaggagctgagaaacctggaggccgagctggggccctcacctccggctcccgacgtgttagagttcaccgaccatggaggcagtggcttcgtgggcggcctctgccaggtggcggcggcctaccaggagctgtttgcggcccagggcccagcaggtgccgagaagctggcggccttcgcccggcagctgggcagccgctattttgcgctggtggagcggcggctggcgcaggagcagggtggtggtgacaactcactgctggtgcgggcgctggaccgcttccaccggcgcttgcgggctcccggggccctgctggccgctgccgggctcgcagacgctgccacggagatcgtggaacgagtggcccgcgagcgcctgggccaccacctgcagggtctccgggcggccttcctgggctgcctgacagacgtccgccaggcgctggcagcacctcgcgtggctgggaaggagggccctggcctggccgagttgctggccaatgtggccagctccatcctgagccacattaaggcctctctggcagcagtgcaccttttcaccgccaaagaggtgtccttctccaacaagccctacttccggggtgagttctgcagtcagggtgtccgtgagggcctcatcgtgggcttcgtccactctatgtgccagacggctcagagcttctgcgacagccctggggagaaggggggtgccacaccacctgccctgctcctgctgctctcccgcctctgcctggactacgagacggccaccatctcctacatcctcactctcactgatgaacagtttctggtgcaggatcagttcccagtgacgcccgtgagcacgctgtgtgcagaggccagggaaacggcgcggcggctgctgacccactacgtgaaggtgcagggcctggtcatatcacagatgctgcgcaagagcgtggagactcgcgactggctcagcactctggagccccggaatgtgcgggccgtcatgaagcgggtggtggaggataccaccgccatcgacgtgcaggtggggctcctgtacgaagagggtgttcgcaaggcccagagcagcgactccagcaagaggactttctccgtgtacagcagctctcggcagcagggccgctacgcccccagctatacccccagtgccccgatggacaccaacctcttgagcaatatccagaagctattctctgaacgtattgatgtgttcagccctgtggagttcaacaaggtccgacttccaacgtgactcagacttccagggatcccggggagggttggctggagcagccccacacctgcccaaggagccccaggactctgtgaccaactgggggtgaccctgaccctccagtctctgtctctagggctgtttttaggtagtacagagtgccctgcctccaaatcccacagcccttgtcccagtcttggtgtatgcccagcctgagtctgggtgctgacctgggattactgtttgcccttgtccttatccccacagtagtcttgggtcctccccagggttttctgttcacccatggtccctgccccgcctcactccaagctcagggatgcctctgattgctgggccctacctgtcccctgccctccagatgacggcgctaatattgtatccctcccctcttatctggccccggagactttctgcctcatcccagctacttccatcgtatgtctcccgggcccctgcttggaacttgggttcccccacacacacctgcagtccccaagctgcatccctgtgtccctgcctgcaggtgtcggtgctgaccggcatcatcaagatcagcctgaagacgctgctggagtgtgtgcggctgcgcacctttgggcgcttcgggctgcagcaggtgcaagtggactgccactttctgcagctctacctgtggcgttttgtggccgacgaagaactcgtgcacttgctgctggacgaagtggtggcctctgctgccctgcgctgcccagaccctgtgcccatggagcccagtgtggttgaggtcatctgcgagcgcggctaggcgcagccgctgccatgcaccggtctgtccctgcaccccatggcacccaggatctggtctcggtggtccttccccgcaggcaggtgtcaggaccggcctaataaacatgtgtggcctcc

SEQ ID NO: 354036 - DNA, 2331 bp, Homo sapiens
ctcgtttcaacaacaactttatggctcccggaagtgcctcctccccgtccccttcctttccagcctcacgcccgtgggctgcagttggaacgatggcggcggcagctgccgccgggcctagcccggggtctggacctggggactccccagaagggcccgagggggaggctccggagcgtcggcggaaggcgcacgggatgctgaagctttactacggcctctcggaaggggaggcggcgggacgccccgcggggcccgaccccctggacccgactgatctgaacggggcgcacttcgacccggaagtttacctagacaagctgcgtagagagtgccctctggcccagttgatggacagtgagacggacatggtgcggcagatccgggctctagacagcgacatgcagaccctggtctatgagaactacaacaagttcatctcagccacagacaccatccggaagatgaagaacgatttccggaagatggaggatgagatggaccggctggccaccaacatggcagtgatcaccgacttcagcgctcgcatcagcgccacgctgcaggaccgccacgagcgcatcaccaagctggcaggggtccacgcgctgctgcggaagctgcagttcctctttgagctgccctcgcgcctcaccaagtgcgtggaactgggcgcctatgggcaggcggtgcgctaccagggccgcgcgcaggccgtgctgcagcagtaccaacacctgccctcgttccgcgccatccaggacgactgccaggtcatcacggcccgcctggcccagcagctgcggcagcgctttagggagggcggctcaggcgccccggagcaggcagagtgcgtggagctgctgctggccctgggcgagcctgcggaggagctgtgcgaggagttcctggcgcacgcccgcggccggctggagaaggagctgagaaacctggaggccgagctggggccctcacctccggctcccgacgtgttagagttcaccgaccatggaggcagtggcttcgtgggcggcctctgccaggtggcggcggcctaccaggagctgtttgcggcccagggcccagcaggtgccgagaagctggcggccttcgcccggcagctgggcagccgctattttgcgctggtggagcggcggctggcgcaggagcagggtggtggtgacaactcactgctggtgcgggcgctggaccgcttccaccggcgcttgcgggctcccggggccctgctggccgctgccgggctcgcagacgctgccacggagatcgtggaacgagtggcccgcgagcgcctgggccaccacctgcagggtctccgggcggccttcctgggctgcctgacagacgtccgccaggcgctggcagcacctcgcgtggctgggaaggagggccctggcctggccgagttgctggccaatgtggccagctccatcctgagccacattaaggcctctctggcagcagtgcaccttttcaccgccaaagaggtgtccttctccaacaagccctacttccggggtgagttctgcagtcagggtgtccgtgagggcctcatcgtgggcttcgtccactctatgtgccagacggctcagagcttctgcgacagccctggggagaaggggggtgccacaccacctgccctgctcctgctgctctcccgcctctgcctggactacgagacggccaccatctcctacatcctcactctcactgatgaacagtttctggtgcaggatcagttcccagtgacgcccgtgagcacgctgtgtgcagaggccagggaaacggcgcggcggctgctgacccactacgtgaaggtgcagggcctggtcatatcacagatgctgcgcaagagcgtggagactcgcgactggctcagcactctggagccccggaatgtgcgggccgtcatgaagcgggtggtggaggataccaccgccatcgacgtgcaggtggggctcctgtacgaagagggtgttcgcaaggcccagagcagcgactccagcaagaggactttctccgtgtacagcagctctcggcagcagggccgctacgcccccagctatacccccagtgccccgatggacaccaacctcttgagcaatatccagaagctattctctgaacgtattgatgtgttcagccctgtggagttcaacaaggtgtcggtgctgaccggcatcatcaagatcagcctgaagacgtgccatgcaccggtctgtccctgcaccccatggcacccaggatctggtctcggtggtccttccccgcaggcaggtgtcaggaccggcctaataaacatgtgtggcctcc

SEQ ID NO: 354037 - DNA, 2456 bp, Homo sapiens
cgcggggctgggcttaggccgagccccaggatttcaaatgctgacaaacaccaaacacgctgcgtagagagtgccctctggcccagttgatggacagtgagacggacatggtgcggcagatccgggctctagacagcgacatgcagaccctggtctatgagaactacaacaagttcatctcagccacagacaccatccggaagatgaagaacgatttccggaagatggaggatgagatggaccggctggccaccaacatggcagtgatcaccgacttcagcgctcgcatcagcgccacgctgcaggaccgccacgagcgcatcaccaagctggcaggggtccacgcgctgctgcggaagctgcagttcctctttgagctgccctcgcgcctcaccaagtgcgtggaactgggcgcctatgggcaggcggtgcgctaccagggccgcgcgcaggccgtgctgcagcagtaccaacacctgccctcgttccgcgccatccaggacgactgccaggtcatcacggcccgcctggcccagcagctgcggcagcgctttagggagggcggctcaggcgccccggagcaggcagagtgcgtggagctgctgctggccctgggcgagcctgcggaggagctgtgcgaggagttcctggcgcacgcccgcggccggctggagaaggagctgagaaacctggaggccgagctggggccctcacctccggctcccgacgtgttagagttcaccgaccatggaggcagtggcttcgtgggcggcctctgccaggtggcggcggcctaccaggagctgtttgcggcccagggcccagcaggtgccgagaagctggcggccttcgcccggcagctgggcagccgctattttgcgctggtggagcggcggctggcgcaggagcagggtggtggtgacaactcactgctggtgcgggcgctggaccgcttccaccggcgcttgcgggctcccggggccctgctggccgctgccgggctcgcagacgctgccacggagatcgtggaacgagtggcccgcgagcgcctgggccaccacctgcagggtctccgggcggccttcctgggctgcctgacagacgtccgccaggcgctggcagcacctcgcgtggctgggaaggagggccctggcctggccgagttgctggccaatgtggccagctccatcctgagccacattaaggcctctctggcagcagtgcaccttttcaccgccaaagaggtgtccttctccaacaagccctacttccggggtgagttctgcagtcagggtgtccgtgagggcctcatcgtgggcttcgtccactctatgtgccagacggctcagagcttctgcgacagccctggggagaaggggggtgccacaccacctgccctgctcctgctgctctcccgcctctgcctggactacgagacggccaccatctcctacatcctcactctcactgatgaacagtttctggtgcaggatcagttcccagtgacgcccgtgagcacgctgtgtgcagaggccagggaaacggcgcggcggctgctgacccactacgtgaaggtgcagggcctggtcatatcacagatgctgcgcaagagcgtggagactcgcgactggctcagcactctggagccccggaatgtgcgggccgtcatgaagcgggtggtggaggataccaccgccatcgacgtgcaggtggggctcctgtacgaagagggtgttcgcaaggcccagagcagcgactccagcaagaggactttctccgtgtacagcagctctcggcagcagggccgctacgcccccagctatacccccagtgccccgatggacaccaacctcttgagcaatatccagaagctattctctgaacgtattgatgtgttcagccctgtggagttcaacaaggtgtcggtgctgaccggcatcatcaagatcagcctgaagacgctgctggagtgtgtgcggctgcgcacctttgggcgcttcgggctgcagcaggtgcaagtggactgccactttctgcagctctacctgtggcgttttgtggccgacgaagaactcgtgcacttgctgctggacgaagtggtggcctctgctgccctgcgctgcccagaccctgtgcccatggagcccagtgtggttgaggtcatctgcgagcgcggctaggcgcagccgctgccatgcaccggtctgtccctgcaccccatggcacccaggatctggtctcggtggtccttccccgcaggcaggtgtcaggaccggcctaataaacatgtgtggcctcctcctctcgcttgctgggcgggcctttccgggggcggggttttgaagctgaggcttctgaggcgcccgcgtcgggtccgcccccgagcgccgattggctggtgtgctgggcccagcatgggcagggggcggttccacttaaaaaccctgggacgagag

SEQ ID NO: 354038 - DNA, 2905 bp, Homo sapiens
  misc_feature (19)..(19): n is a, c, g, or t
  misc_feature (28)..(28): n is a, c, g, or t
tcaggctggttacggtccnaggtcgtanatcggaagtgcctcctccccgtccccttcctttccagcctcacgcccgtgggctgcagttggaacgatggcggcggcagctgccgccgggcctagcccggggtctggacctggggactccccagaagggcccgagggggaggctccggagcgtcggcggaaggcgcacgggatgctgaagctttactacggcctctcggaaggggaggcggcgggacgccccgcggggcccgaccccctggacccgactgatctgaacggggcgcacttcgacccggaagtttacctagacaagctgcgtagagagtgccctctggcccagttgatggacagtgagacggacatggtgcggcagatccgggctctagacagcgacatgcagaccctggtctatgagaactacaacaagttcatctcagccacaggcagtgcgctggacacgcagatgcgcttgggagccagcggtccctgccttggctgcttgtggtctgatggagcagttgaggcacagtggtggcagctggctaagcacctgcggcctgcttcggatctggactaattctgagggccggctctcctgggcaccagggttagggggttacggggagtatacaccatccggaagatgaagaacgatttccggaagatggaggatgagatggaccggctggccaccaacatggcagtgatcaccgacttcagcgctcgcatcagcgccacgctgcaggaccgccacgagcgcatcaccaagctggcaggggtccacgcgctgctgcggaagctgcagttcctctttgagctgccctcgcgcctcaccaagtgcgtggaactgggcgcctatgggcaggcggtgcgctaccagggccgcgcgcaggccgtgctgcagcagtaccaacacctgccctcgttccgcgccatccaggacgactgccaggtcatcacggcccgcctggcccagcagctgcggcagcgctttagggagggcggctcaggcgccccggagcaggcagagtgcgtggagctgctgctggccctgggcgagcctgcggaggagctgtgcgaggagttcctggcgcacgcccgcggccggctggagaaggagctgagaaacctggaggccgagctggggccctcacctccggctcccgacgtgttagagttcaccgaccatggaggcagtggcttcgtgggcggcctctgccaggtggcggcggcctaccaggagctgtttgcggcccagggcccagcaggtgccgagaagctggcggccttcgcccggcagctgggcagccgctattttgcgctggtggagcggcggctggcgcaggagcagggtggtggtgacaactcactgctggtgcgggcgctggaccgcttccaccggcgcttgcgggctcccggggccctgctggccgctgccgggctcgcagacgctgccacggagatcgtggaacgagtggcccgcgagcgcctgggccaccacctgcagggtctccgggcggccttcctgggctgcctgacagacgtccgccaggcgctggcagcacctcgcgtggctgggaaggagggccctggcctggccgagttgctggccaatgtggccagctccatcctgagccacattaaggcctctctggcagcagtgcaccttttcaccgccaaagaggtgtccttctccaacaagccctacttccggggtgagttctgcagtcagggtgtccgtgagggcctcatcgtgggcttcgtccactctatgtgccagacggctcagagcttctgcgacagccctggggagaaggggggtgccacaccacctgccctgctcctgctgctctcccgcctctgcctggactacgagacggccaccatctcctacatcctcactctcactgatgaacagtttctggtgcaggatcagttcccagtgacgcccgtgagcacgctgtgtgcagaggccagggaaacggcgcggcggctgctgacccactacgtgaaggtgcagggcctggtcatatcacagatgctgcgcaagagcgtggagactcgcgactggctcagcactctggagccccggaatgtgcgggccgtcatgaagcgggtggtggaggataccaccgccatcgacgtgcaggtggggctcctgtacgaagagggtgttcgcaaggcccagagcagcgactccagcaagaggactttctccgtgtacagcagctctcggcagcagggccgctacgcccccagctatacccccagtgccccgatggacaccaacctcttgagcaatatccagaagctattctctgaacgtattgatgtgttcagccctgtggagttcaacaaggtgtcggtgctgaccggcatcatcaagatcagcctgaagacgctgctggagtgtgtgcggctgcgcacctttgggcgcttcgggctgcagcaggtgcaagtggactgccactttctgcagctctacctgtggcgttttgtggccgacgaagaactcgtgcacttgctgctggacgaagtggtggcctctgctgccctgcgctgcccagaccctgtgcccatggagcccagtgtggttgaggtcatctgcgagcgcggctaggcgcagccgctgccatgcaccggtctgtccctgcaccccatggcacccaggatctggtctcggtggtccttccccgcaggcaggtgtcaggaccggcctaataaacatgtgtggcctcctcctctcgcttgctgggcgggcctttccgggggcggggttttgaagctgaggcttctgaggcgcccgcgtcgggtccgcccccgagcgccgattggctggtgtgctgggcccagcatgggcagggggcggttccacttaaaaaccctgggacgagag

SEQ ID NO: 354039 - DNA, 3025 bp, Homo sapiens
acgcttttatgcatgtctcaagtttcccaaaacggaggcagtgtgaacacagtctacagatgaagaactggggctcagaaaagttgaggggcgtggtctagatttacagcaagtcttaggcagatgagagatgaggacccagctgcatagctggaaggcattcccagtcccagctactcaggaggctgagatgggaggattgctggaccccaggagtcccaggctgcagtgaactatgatcatgccactgtactccaagctgggtgacagagaaaaaaagaaaagaaaagaaaaagcctcacgcccgtgggctgcagttggaacgatggcggcggcagctgccgccgggcctagcccggggtctggacctggggactccccagaagggcccgagggggaggctccggagcgtcggcggaaggcgcacgggatgctgaagctttactacggcctctcggaaggggaggcggcgggacgccccgcggggcccgaccccctggacccgactgatctgaacggggcgcacttcgacccggaagtttacctagacaagctgcgtagagagtgccctctggcccagttgatggacagtgagacggacatggtgcggcagatccgggctctagacagcgacatgcagaccctggtctatgagaactacaacaagttcatctcagccacagacaccatccggaagatgaagaacgatttccggaagatggaggatgagatggaccggctggccaccaacatggcagtgatcaccgacttcagcgctcgcatcagcgccacgctgcaggaccgccacgagcgcatcaccaagctggcaggtgggcgctgccgggcagggcctgcagtgggcctttcctggggctctggggctaacgtcaccctccgtcccccaggggtccacgcgctgctgcggaagctgcagttcctctttgagctgccctcgcgcctcaccaagtgcgtggaactgggcgcctatgggcaggcggtgcgctaccagggccgcgcgcaggccgtgctgcagcagtaccaacacctgccctcgttccgcgccatccaggacgactgccaggtcatcacggcccgcctggcccagcagctgcggcagcgctttagggagggcggctcaggcgccccggagcaggcagagtgcgtggagctgctgctggccctgggcgagcctgcggaggagctgtgcgaggagttcctggcgcacgcccgcggccggctggagaaggagctgagaaacctggaggccgagctggggccctcacctccggctcccgacgtgttagagttcaccgaccatggaggcagtggcttcgtgggcggcctctgccaggtggcggcggcctaccaggagctgtttgcggcccagggcccagcaggtgccgagaagctggcggccttcgcccggcagctgggcagccgctattttgcgctggtggagcggcggctggcgcaggagcagggtggtggtgacaactcactgctggtgcgggcgctggaccgcttccaccggcgcttgcgggctcccggggccctgctggccgctgccgggctcgcagacgctgccacggagatcgtggaacgagtggcccgcgagcgcctgggccaccacctgcagggtctccgggcggccttcctgggctgcctgacagacgtccgccaggcgctggcagcacctcgcgtggctgggaaggagggccctggcctggccgagttgctggccaatgtggccagctccatcctgagccacattaaggcctctctggcagcagtgcaccttttcaccgccaaagaggtgtccttctccaacaagccctacttccggggtgagttctgcagtcagggtgtccgtgagggcctcatcgtgggcttcgtccactctatgtgccagacggctcagagcttctgcgacagccctggggagaaggggggtgccacaccacctgccctgctcctgctgctctcccgcctctgcctggactacgagacggccaccatctcctacatcctcactctcactgatgaacagtttctggtgcaggatcagttcccagtgacgcccgtgagcacgctgtgtgcagaggccagggaaacggcgcggcggctgctgacccactacgtgaaggtgcagggcctggtcatatcacagatgctgcgcaagagcgtggagactcgcgactggctcagcactctggagccccggaatgtgcgggccgtcatgaagcgggtggtggaggataccaccgccatcgacgtgcaggtggggctcctgtacgaagagggtgttcgcaaggcccagagcagcgactccagcaagaggactttctccgtgtacagcagctctcggcagcagggccgctacgcccccagctatacccccagtgccccgatggacaccaacctcttgagcaatatccagaagctattctctgaacgtattgatgtgttcagccctgtggagttcaacaaggtgtcggtgctgaccggcatcatcaagatcagcctgaagacgctgctggagtgtgtgcggctgcgcacctttgggcgcttcgggctgcagcaggtgcaagtggactgccactttctgcagctctacctgtggcgttttgtggccgacgaagaactcgtgcacttgctgctggacgaagtggtggcctctgctgccctgcgctgcccagaccctgtgcccatggagcccagtgtggttgaggtcatctgcgagcgcggctaggcgcagccgctgccatgcaccggtctgtccctgcaccccatggcacccaggatctggtctcggtggtccttccccgcaggcaggtgtcaggaccggcctaataaacatgtgtggcctcctcctctcgcttgctgggcgggcctttccgggggcggggttttgaagctgaggcttctgaggcgcccgcgtcgggtccgcccccgagcgccgattggctggtgtgctgggcccagcatgggcagggggcggttccacttaaaaaccctgggacgagag

SEQ ID NO: 354040 - DNA, 1336 bp, Homo sapiens
ccacgtcagggaagctgctccggggtacttagaatgtaggatgatgctgtcccttgcagagggggctggggcacttagagccccagcagagggtcattaacagccttacctggaagaggggacctgctgtggacctgggcaccttctcttgcagggtgagttctgcagtcagggtgtccgtgagggcctcatcgtgggcttcgtccactctatgtgccagacggctcagagcttctgcgacagccctggggagaaggggggtgccacaccacctgccctgctcctgctgctctcccgcctctgcctggactacgagacggccaccatctcctacatcctcactctcactgatgaacagtttctggtgcaggatcagttcccagtgacgcccgtgagcacgctgtgtgcagaggccagggaaacggcgcggcggctgctgacccactacgtgaaggtgcagggcctggtcatatcacagatgctgcgcaagagcgtggagactcgcgactggctcagcactctggagccccggaatgtgcgggccgtcatgaagcgggtggtggaggataccaccgccatcgacgtgcaggtggggctcctgtacgaagagggtgttcgcaaggcccagagcagcgactccagcaagaggactttctccgtgtacagcagctctcggcagcagggccgctacgcccccagctatacccccagtgccccgatggacaccaacctcttgagcaatatccagaagctattctctgaacgtattgatgtgttcagccctgtggagttcaacaaggtgtcggtgctgaccggcatcatcaagatcagcctgaagacgctgctggagtgtgtgcggctgcgcacctttgggcgcttcgggctgcagcaggtgcaagtggactgccactttctgcagctctacctgtggcgttttgtggccgacgaagaactcgtgcacttgctgctggacgaagtggtggcctctgctgccctgcgctgcccagaccctgtgcccatggagcccagtgtggttgaggtcatctgcgagcgcggctaggcgcagccgctgccatgcaccggtctgtccctgcaccccatggcacccaggatctggtctcggtggtccttccccgcaggcaggtgtcaggaccggcctaataaacatgtgtggcctcctcctctcgcttgctgggcgggcctttccgggggcggggttttgaagctgaggcttctgaggcgcccgcgtcgggtccgcccccgagcgccgattggctggtgtgctgggcccagcatgggcagggggcggttccacttaaaaaccctgggacgagag

SEQ ID NO: 354041 - DNA, 1088 bp, Homo sapiens
tattgtcctcagccctttctatctcagtcctgctcctgctgctctcccgcctctgcctggactacgagacggccaccatctcctacatcctcactctcactgatgaacagtttctggtgcaggatcagttcccagtgacgcccgtgagcacgctgtgtgcagaggccagggaaacggcgcggcggctgctgacccactacgtgaaggtgcagggcctggtcatatcacagatgctgcgcaagagcgtggagactcgcgactggctcagcactctggagccccggaatgtgcgggccgtcatgaagcgggtggtggaggataccaccgccatcgacgtgcaggtggggctcctgtacgaagagggtgttcgcaaggcccagagcagcgactccagcaagaggactttctccgtgtacagcagctctcggcagcagggccgctacgcccccagctatacccccagtgccccgatggacaccaacctcttgagcaatatccagaagctattctctgaacgtattgatgtgttcagccctgtggagttcaacaaggtgtcggtgctgaccggcatcatcaagatcagcctgaagacgctgctggagtgtgtgcggctgcgcacctttgggcgcttcgggctgcagcaggtgcaagtggactgccactttctgcagctctacctgtggcgttttgtggccgacgaagaactcgtgcacttgctgctggacgaagtggtggcctctgctgccctgcgctgcccagaccctgtgcccatggagcccagtgtggttgaggtcatctgcgagcgcggctaggcgcagccgctgccatgcaccggtctgtccctgcaccccatggcacccaggatctggtctcggtggtccttccccgcaggcaggtgtcaggaccggcctaataaacatgtgtggcctcctcctctcgcttgctgggcgggcctttccgggggcggggttttgaagctgaggcttctgaggcgcccgcgtcgggtccgcccccgagcgccgattggctggtgtgctgggcccagcatgggcagggggcggttccacttaaaaaccctgggacgagag

SEQ ID NO: 354042 - DNA, 1066 bp, Homo sapiens
cttctcagcccaggattatgacatcttcgcccctattttacctgtggagaagcagaggctcagggttacccaggaagtcagggcagggttggtgctggtgctgaagattagacctcagaccaactcttgtatcctgcctttgccccactccactggttctataaatagcgaccatgtacctactaaatagcgggccccgcggtgattaccctgtgatccttgtgatgcttgagtagctgacttagggcatcctcagcaccgatgggctggtggtttcccctgactcgggcctccttgcagtacctctttttaccaccaggtggggctcctgtacgaagagggtgttcgcaaggcccagagcagcgactccagcaagaggactttctccgtgtacagcagctctcggcagcagggccgctacgcccccagctatacccccagtgccccgatggacaccaacctcttgagcaatatccagaagctattctctgaacgtattgatgtgttcagccctgtggagttcaacaaggtgtcggtgctgaccggcatcatcaagatcagcctgaagacgctgctggagtgtgtgcggctgcgcacctttgggcgcttcgggctgcagcaggtgcaagtggactgccactttctgcagctctacctgtggcgttttgtggccgacgaagaactcgtgcacttgctgctggacgaagtggtggcctctgctgccctgcgctgcccagaccctgtgcccatggagcccagtgtggttgaggtcatctgcgagcgcggctaggcgcagccgctgccatgcaccggtctgtccctgcaccccatggcacccaggatctggtctcggtggtccttccccgcaggcaggtgtcaggaccggcctaataaacatgtgtggcctcctcctctcgcttgctgggcgggcctttccgggggcggggttttgaagctgaggcttctgaggcgcccgcgtcgggtccgcccccgagcgccgattggctggtgtgctgggcccagcatgggcagggggcggttccacttaaaaaccctgggacgagag

SEQ ID NO: 354043 - DNA, 671 bp, Homo sapiens
ttgcagctcgaccccgttgccgctagaggcccagctatacccccagtgccccgatggacaccaacctcttgagcaatatccagaagctattctctgaacgtattgatgtgttcagccctgtggagttcaacaaggtgtcggtgctgaccggcatcatcaagatcagcctgaagacgctgctggagtgtgtgcggctgcgcacctttgggcgcttcgggctgcagcaggtgcaagtggactgccactttctgcagctctacctgtggcgttttgtggccgacgaagaactcgtgcacttgctgctggacgaagtggtggcctctgctgccctgcgctgcccagaccctgtgcccatggagcccagtgtggttgaggtcatctgcgagcgcggctaggcgcagccgctgccatgcaccggtctgtccctgcaccccatggcacccaggatctggtctcggtggtccttccccgcaggcaggtgtcaggaccggcctaataaacatgtgtggcctcctcctctcgcttgctgggcgggcctttccgggggcggggttttgaagctgaggcttctgaggcgcccgcgtcgggtccgcccccgagcgccgattggctggtgtgctgggcccagcatgggcagggggcggttccacttaaaaaccctgggacgagag

SEQ ID NO: 354044 - DNA, 960 bp, Homo sapiens
  misc_feature (19)..(19): n is a, c, g, or t
  misc_feature (28)..(28): n is a, c, g, or t
tcaggctggttacggtccnaggtcgtanatcggaagtgcctcctccccgtccccttcctttccagcctcacgcccgtgggctgcagttggaacgatggcggcggcagctgccgccgggcctagcccggggtctggacctggggactccccagaagggcccgagggggaggctccggagcgtcggcggaaggcgcacgggatgctgaagctttactacggcctctcggaaggggaggcggcgggacgccccgcggggcccgaccccctggacccgactgatctgaacggggcgcacttcgacccggaagtttacctagacaagctgcgtagagagtgccctctggcccagttgatggacagtgagacggacatggtgcggcagatccgggctctagacagcgacatgcagaccctggtctatgagaactacaacaagttcatctcagccacagacaccatccggaagatgaagaacgatttccggaagatggaggatgagatggaccggctggccaccaacatggcagtgatcaccgacttcagcgctcgcatcagcgccacgctgcaggaccgccacgagcgcatcaccaagctggcaggggtccacgcgctgctgcggaagctgcagttcctctttgagctgccctcgcgccgtcgcctacgcagtgcgtaggcgacggcgccaggggacccaggaagaacttcgtctccttcactcacctggtccccttcttgttgggcactgtgtatgggcggagaaaatccagcttgttcttgctgatgacgcagaggtcaatgttgcttccggagcccaggtcgttgaagatgccagctgcgatggcttcgctcaccagattcttggcttcctcctcctgagaaacagaacggcggcaataatgtccccggccaaactaggcctgctccgtgacatccagcaatgtacgtccactaacagtgcgt

SEQ ID NO: 354045 - DNA, 633 bp, Homo sapiens
  misc_feature (19)..(19): n is a, c, g, or t
  misc_feature (28)..(28): n is a, c, g, or t
tcaggctggttacggtccnaggtcgtanatcggaagtgcctcctccccgtccccttcctttccagcctcacgcccgtgggctgcagttggaacgatggcggcggcagctgccgccgggcctagcccggggtctggacctggggactccccagaagggcccgagggggaggctccggagcgtcggcggaaggcgcacgggatgctgaagctttactacggcctctcggaaggggaggcggcgggacgccccgcggggcccgaccccctggacccgactgatctgaacggggcgcacttcgacccggaagtttacctagacaagctgcgtagagagtgccctctggcccagttgatggacagtgagacggacatggtgcggcagatccgggctctagacagcgacatgcagaccctggtctatgagaactacaacaagttcatctcagccacagacaccaatccgggacacgaatcgcaaacggaaaaccggaattttttcccccgcggaacaaggcaatgggcgcagggggcaactttgcaagcaacttggggaacccggggggccttgggggccctaatcccaaaatccatttgcggacaaaggttgcaattccaaccccggaacgtttctca

SEQ ID NO: 354046 - DNA, 481 bp, Homo sapiens
agggttgtggcttgatggcatggtcttcctagaagccggggttttgaagagaggagatctaggcatgatttagaagcatgaagggaccaggctcccaggcacctggtgtgtgaaaggaaaaacagcctccctaggcaggattctatcaggaccaaagggaaagggcccttcagagaagacagcccatgttccggaaagcatgtgaaaggctttgggaggtctggaaaggagatgagggtcaacaagaatgtattgcctcatccaggcagtgcgctggacacgcagatgcgcttgggagccagcggtccctgccttggctgcttgtggtctgatggagcagttgaggcacagtggtggcagctggctaagcacctgcggcctgcttcggatctggactaattctgagggccggctctcctgggcaccagggttagggggttacggggagtatgtgagtaacgcctgctttgggaacataaac

SEQ ID NO: 354047 - DNA, 848 bp, Homo sapiens
ccacgcgtcgcggacgcgtgggtccagtttctggtgcaggatcagttcccagtgacgcccgtgagcacgctgtgtgcagaggccagggaaacggcgcggcggctgctgacccactacgtgaaggtgcagggcctggtcatatcacagatgctgcgcaagagcgtggagactcgcgactggctcagcactctggagccccggaatgtgcgggccgtcatgaagcgggtggtggaggataccaccgccatcgacgtgcaggtggggctcctgtacgaagagggtgttcgcaaggcccagagcagcgactccagcaagaggactttctccgtgtacagcagctctcggcagcagggccgctacgcccccagctatacccccagtgccccgatggacaccaacctcttgagcaatatccagaagctattctctgaacgtattgatgtgttcagccctgtggagttcaacaaggtgtcggtgctgaccggcatcatcaagatcagcctgaagacgctgctggagtgtgtgcggctgcgcacctttgggcgcttcgggctgcagcaggtgcaagtggactgccactttctgcagctctacctgtggcgttttgtggccgacgaagaactcgtgcacttgctgctggacgaagtggtggcctctgctgccctgcgctgcccagaccctgtgcccatggagcccagtgtggttgaggtcatctgcgagcgcggctaggcgcagccgctgccatgcaccggtctgtccctgcaccccatggcacccaggatctggtctcggtggtccttccccgcaggcaggtgtcaggaccggcctaataaacatgtgtggcctcc

SEQ ID NO: 354048 - DNA, 2717 bp, Homo sapiens
ctcgtttcaacaacaactttatggctcccggaagtgcctcctccccgtccccttcctttccagcctcacgcccgtgggctgcagttggaacgatggcggcggcagctgccgccgggcctagcccggggtctggacctggggactccccagaagggcccgagggggaggctccggagcgtcggcggaaggcgcacgggatgctgaagctttactacggcctctcggaaggggaggcggcgggacgccccgcggggcccgaccccctggacccgactgatctgaacggggcgcacttcgacccggaagtttacctagacaagctgcgtagagagtgccctctggcccagttgatggacagtgagacggacatggtgcggcagatccgggctctagacagcgacatgcagaccctggtctatgagaactacaacaagttcatctcagccacagacaccatccggaagatgaagaacgatttccggaagatggaggatgagatggaccggctggccaccaacatggcagtgatcaccgacttcagcgctcgcatcagcgccacgctgcaggaccgccacgagcgcatcaccaagctggcaggggtccacgcgctgctgcggaagctgcagttcctctttgagctgccctcgcgcctcaccaagtgcgtggaactgggcgcctatgggcaggcggtgcgctaccagggccgcgcgcaggccgtgctgcagcagtaccaacacctgccctcgttccgcgccatccaggacgactgccaggtcatcacggcccgcctggcccagcagctgcggcagcgctttagggagggcggctcaggcgccccggagcaggcagagtgcgtggagctgctgctggccctgggcgagcctgcggaggagctgtgcgaggagttcctggcgcacgcccgcggccggctggagaaggagctgagaaacctggaggccgagctggggccctcacctccggctcccgacgtgttagagttcaccgaccatggaggcagtggcttcgtgggcggcctctgccaggtggcggcggcctaccaggagctgtttgcggcccagggcccagcaggtgccgagaagctggcggccttcgcccggcagctgggcagccgctattttgcgctggtggagcggcggctggcgcaggagcagggtggtggtgacaactcactgctggtgcgggcgctggaccgcttccaccggcgcttgcgggctcccggggccctgctggccgctgccgggctcgcagacgctgccacggagatcgtggaacgagtggcccgcgagcgcctgggccaccacctgcagggtctccgggcggccttcctgggctgcctgacagacgtccgccaggcgctggcagcacctcgcgtggctgggaaggagggccctggcctggccgagttgctggccaatgtggccagctccatcctgagccacattaaggcctctctggcagcagtgcaccttttcaccgccaaagaggtgtccttctccaacaagccctacttccggggtgagttctgcagtcagggtgtccgtgagggcctcatcgtgggcttcgtccactctatgtgccagacggctcagagcttctgcgacagccctggggagaaggggggtgccacaccacctgccctgctcctgctgctctcccgcctctgcctggactacgagacggccaccatctcctacatcctcactctcactgatgaacagtttctggtgcaggatcagttcccagtgacgcccgtgagcacgctgtgtgcagaggccagggaaacggcgcggcggctgctgacccactacgtgaaggtgcagggcctggtcatatcacagatgctgcgcaagagcgtggagactcgcgactggctcagcactctggagccccggaatgtgcgggccgtcatgaagcgggtggtggaggataccaccgccatcgacgtgcaggtggggctcctgtacgaagagggtgttcgcaaggcccagagcagcgactccagcaagaggactttctccgtgtacagcagctctcggcagcagggccgctacgcccccagctatacccccagtgccccgatggacaccaacctcttgagcaatatccagaagctattctctgaacgtattgatgtgttcagccctgtggagttcaacaaggtgtcggtgctgaccggcatcatcaagatcagcctgaagacgctgctggagtgtgtgcggctgcgcacctttgggcgcttcgggctgcagcaggtgcaagtggactgccactttctgcagctctacctgtggcgttttgtggccgacgaagaactcgtgcacttgctgctggacgaagtggtggcctctgctgccctgcgctgcccagaccctgtgcccatggagcccagtgtggttgaggtcatctgcgagcgcggctaggcgcagccgctgccatgcaccggtctgtccctgcaccccatggcacccaggatctggtctcggtggtccttccccgcaggcaggtgtcaggaccggcctaataaacatgtgtggcctcctcctctcgcttgctgggcgggcctttccgggggcggggttttgaagctgaggcttctgaggcgcccgcgtcgggtccgcccccgagcgccgattggctggtgtgctgggcccagcatgggcagggggcggttccacttaaaaaccctgggacgagag

SEQ ID NO: 354049 - DNA, 2689 bp, Homo sapiens
cctggtggcgaattcggcacgaggttcctttccagcctcacgcccgtgggctgcagttggaacgatggcggcggcagctgccgccgggcctagcccggggtctggacctggggactccccagaagggcccgagggggaggctccggagcgtcggcggaaggcgcacgggatgctgaagctttactacggcctctcggaaggggaggcggcgggacgccccgcggggcccgaccccctggacccgactgatctgaacggggcgcacttcgacccggaagtttacctagacaagctgcgtagagagtgccctctggcccagttgatggacagtgagacggacatggtgcggcagatccgggctctagacagcgacatgcagaccctggtctatgagaactacaacaagttcatctcagccacagacaccatccggaagatgaagaacgatttccggaagatggaggatgagatggaccggctggccaccaacatggcagtgatcaccgacttcagcgctcgcatcagcgccacgctgcaggaccgccacgagcgcatcaccaagctggcaggggtccacgcgctgctgcggaagctgcagttcctctttgagctgccctcgcgcctcaccaagtgcgtggaactgggcgcctatgggcaggcggtgcgctaccagggccgcgcgcaggccgtgctgcagcagtaccaacacctgccctcgttccgcgccatccaggacgactgccaggtcatcacggcccgcctggcccagcagctgcggcagcgctttagggagggcggctcaggcgccccggagcaggcagagtgcgtggagctgctgctggccctgggcgagcctgcggaggagctgtgcgaggagttcctggcgcacgcccgcggccggctggagaaggagctgagaaacctggaggccgagctggggccctcacctccggctcccgacgtgttagagttcaccgaccatggaggcagtggcttcgtgggcggcctctgccaggtggcggcggcctaccaggagctgtttgcggcccagggcccagcaggtgccgagaagctggcggccttcgcccggcagctgggcagccgctattttgcgctggtggagcggcggctggcgcaggagcagggtggtggtgacaactcactgctggtgcgggcgctggaccgcttccaccggcgcttgcgggctcccggggccctgctggccgctgccgggctcgcagacgctgccacggagatcgtggaacgagtggcccgcgagcgcctgggccaccacctgcagggtctccgggcggccttcctgggctgcctgacagacgtccgccaggcgctggcagcacctcgcgtggctgggaaggagggccctggcctggccgagttgctggccaatgtggccagctccatcctgagccacattaaggcctctctggcagcagtgcaccttttcaccgccaaagaggtgtccttctccaacaagccctacttccggggtgagttctgcagtcagggtgtccgtgagggcctcatcgtgggcttcgtccactctatgtgccagacggctcagagcttctgcgacagccctggggagaaggggggtgccacaccacctgccctgctcctgctgctctcccgcctctgcctggactacgagacggccaccatctcctacatcctcactctcactgatgaacagtttctggtgcaggatcagttcccagtgacgcccgtgagcacgctgtgtgcagaggccagggaaacggcgcggcggctgctgacccactacgtgaaggtgcagggcctggtcatatcacagatgctgcgcaagagcgtggagactcgcgactggctcagcactctggagccccggaatgtgcgggccgtcatgaagcgggtggtggaggataccaccgccatcgacgtgcaggtggggctcctgtacgaagagggtgttcgcaaggcccagagcagcgactccagcaagaggactttctccgtgtacagcagctctcggcagcagggccgctacgcccccagctatacccccagtgccccgatggacaccaacctcttgagcaatatccagaagctattctctgaacgtattgatgtgttcagccctgtggagttcaacaaggtgtcggtgctgaccggcatcatcaagatcagcctgaagacgctgctggagtgtgtgcggctgcgcacctttgggcgcttcgggctgcagcaggtgcaagtggactgccactttctgcagctctacctgtggcgttttgtggccgacgaagaactcgtgcacttgctgctggacgaagtggtggcctctgctgccctgcgctgcccagaccctgtgcccatggagcccagtgtggttgaggtcatctgcgagcgcggctaggcgcagccgctgccatgcaccggtctgtccctgcaccccatggcacccaggatctggtctcggtggtccttccccgcaggcaggtgtcaggaccggcctaataaacatgtgtggcctcctcctctcgcttgctgggcgggcctttccgggggcggggttttgaagctgaggcttctgaggcgcccgcgtcgggtccgcccccgagcgccgattggctggtgtgctgggcccagcatgggcagggggcggttccacttaaaaaccctgggacgagag

SEQ ID NO: 354050 - DNA, 2950 bp, Homo sapiens
acgcttttatgcatgtctcaagtttcccaaaacggaggcagtgtgaacacagtctacagatgaagaactggggctcagaaaagttgaggggcgtggtctagatttacagcaagtcttaggcagatgagagatgaggacccagctgcatagctggaaggcattcccagtcccagctactcaggaggctgagatgggaggattgctggaccccaggagtcccaggctgcagtgaactatgatcatgccactgtactccaagctgggtgacagagaaaaaaagaaaagaaaagaaaaagcctcacgcccgtgggctgcagttggaacgatggcggcggcagctgccgccgggcctagcccggggtctggacctggggactccccagaagggcccgagggggaggctccggagcgtcggcggaaggcgcacgggatgctgaagctttactacggcctctcggaaggggaggcggcgggacgccccgcggggcccgaccccctggacccgactgatctgaacggggcgcacttcgacccggaagtttacctagacaagctgcgtagagagtgccctctggcccagttgatggacagtgagacggacatggtgcggcagatccgggctctagacagcgacatgcagaccctggtctatgagaactacaacaagttcatctcagccacagacaccatccggaagatgaagaacgatttccggaagatggaggatgagatggaccggctggccaccaacatggcagtgatcaccgacttcagcgctcgcatcagcgccacgctgcaggaccgccacgagcgcatcaccaagctggcaggggtccacgcgctgctgcggaagctgcagttcctctttgagctgccctcgcgcctcaccaagtgcgtggaactgggcgcctatgggcaggcggtgcgctaccagggccgcgcgcaggccgtgctgcagcagtaccaacacctgccctcgttccgcgccatccaggacgactgccaggtcatcacggcccgcctggcccagcagctgcggcagcgctttagggagggcggctcaggcgccccggagcaggcagagtgcgtggagctgctgctggccctgggcgagcctgcggaggagctgtgcgaggagttcctggcgcacgcccgcggccggctggagaaggagctgagaaacctggaggccgagctggggccctcacctccggctcccgacgtgttagagttcaccgaccatggaggcagtggcttcgtgggcggcctctgccaggtggcggcggcctaccaggagctgtttgcggcccagggcccagcaggtgccgagaagctggcggccttcgcccggcagctgggcagccgctattttgcgctggtggagcggcggctggcgcaggagcagggtggtggtgacaactcactgctggtgcgggcgctggaccgcttccaccggcgcttgcgggctcccggggccctgctggccgctgccgggctcgcagacgctgccacggagatcgtggaacgagtggcccgcgagcgcctgggccaccacctgcagggtctccgggcggccttcctgggctgcctgacagacgtccgccaggcgctggcagcacctcgcgtggctgggaaggagggccctggcctggccgagttgctggccaatgtggccagctccatcctgagccacattaaggcctctctggcagcagtgcaccttttcaccgccaaagaggtgtccttctccaacaagccctacttccggggtgagttctgcagtcagggtgtccgtgagggcctcatcgtgggcttcgtccactctatgtgccagacggctcagagcttctgcgacagccctggggagaaggggggtgccacaccacctgccctgctcctgctgctctcccgcctctgcctggactacgagacggccaccatctcctacatcctcactctcactgatgaacagtttctggtgcaggatcagttcccagtgacgcccgtgagcacgctgtgtgcagaggccagggaaacggcgcggcggctgctgacccactacgtgaaggtgcagggcctggtcatatcacagatgctgcgcaagagcgtggagactcgcgactggctcagcactctggagccccggaatgtgcgggccgtcatgaagcgggtggtggaggataccaccgccatcgacgtgcaggtggggctcctgtacgaagagggtgttcgcaaggcccagagcagcgactccagcaagaggactttctccgtgtacagcagctctcggcagcagggccgctacgcccccagctatacccccagtgccccgatggacaccaacctcttgagcaatatccagaagctattctctgaacgtattgatgtgttcagccctgtggagttcaacaaggtgtcggtgctgaccggcatcatcaagatcagcctgaagacgctgctggagtgtgtgcggctgcgcacctttgggcgcttcgggctgcagcaggtgcaagtggactgccactttctgcagctctacctgtggcgttttgtggccgacgaagaactcgtgcacttgctgctggacgaagtggtggcctctgctgccctgcgctgcccagaccctgtgcccatggagcccagtgtggttgaggtcatctgcgagcgcggctaggcgcagccgctgccatgcaccggtctgtccctgcaccccatggcacccaggatctggtctcggtggtccttccccgcaggcaggtgtcaggaccggcctaataaacatgtgtggcctcctcctctcgcttgctgggcgggcctttccgggggcggggttttgaagctgaggcttctgaggcgcccgcgtcgggtccgcccccgagcgccgattggctggtgtgctgggcccagcatgggcagggggcggttccacttaaaaaccctgggacgagag

SEQ ID NO: 354051 - DNA, 3261 bp, Homo sapiens
ctcgtttcaacaacaactttatggctcccggaagtgcctcctccccgtccccttcctttccagcctcacgcccgtgggctgcagttggaacgatggcggcggcagctgccgccgggcctagcccggggtctggacctggggactccccagaagggcccgagggggaggctccggagcgtcggcggaaggcgcacgggatgctgaagctttactacggcctctcggaaggggaggcggcgggacgccccgcggggcccgaccccctggacccgactgatctgaacggggcgcacttcgacccggaagtttacctagacaagctgcgtagagagtgccctctggcccagttgatggacagtgagacggacatggtgcggcagatccgggctctagacagcgacatgcagaccctggtctatgagaactacaacaagttcatctcagccacagacaccatccggaagatgaagaacgatttccggaagatggaggatgagatggaccggctggccaccaacatggcagtgatcaccgacttcagcgctcgcatcagcgccacgctgcaggaccgccacgagcgcatcaccaagctggcaggggtccacgcgctgctgcggaagctgcagttcctctttgagctgccctcgcgcctcaccaagtgcgtggaactgggcgcctatgggcaggcggtgcgctaccagggccgcgcgcaggccgtgctgcagcagtaccaacacctgccctcgttccgcgccatccaggacgactgccaggtcatcacggcccgcctggcccagcagctgcggcagcgctttagggagggcggctcaggcgccccggagcaggcagagtgcgtggagctgctgctggccctgggcgagcctgcggaggagctgtgcgaggagttcctggcgcacgcccgcggccggctggagaaggagctgagaaacctggaggccgagctggggccctcacctccggctcccgacgtgttagagttcaccgaccatggaggcagtggcttcgtgggcggcctctgccaggtggcggcggcctaccaggagctgtttgcggcccagggcccagcaggtgccgagaagctggcggccttcgcccggcagctgggcagccgctattttgcgctggtggagcggcggctggcgcaggagcagggtggtggtgacaactcactgctggtgcgggcgctggaccgcttccaccggcgcttgcgggctcccggggccctgctggccgctgccgggctcgcagacgctgccacggagatcgtggaacgagtggcccgcgagcgcctgggccaccacctgcagggtctccgggcggccttcctgggctgcctgacagacgtccgccaggcgctggcagcacctcgcgtggctgggaaggagggccctggcctggccgagttgctggccaatgtggccagctccatcctgagccacattaaggcctctctggcagcagtgcaccttttcaccgccaaagaggtgtccttctccaacaagccctacttccggggtgagttctgcagtcagggtgtccgtgagggcctcatcgtgggcttcgtccactctatgtgccagacggctcagagcttctgcgacagccctggggagaaggggggtgccacaccacctgccctgctcctgctgctctcccgcctctgcctggactacgagacggccaccatctcctacatcctcactctcactgatgaacagtttctggtgcaggatcagttcccagtgacgcccgtgagcacgctgtgtgcagaggccagggaaacggcgcggcggctgctgacccactacgtgaaggtgcagggcctggtcatatcacagatgctgcgcaagagcgtggagactcgcgactggctcagcactctggagccccggaatgtgcgggccgtcatgaagcgggtggtggaggataccaccgccatcgacgtgcaggtggggctcctgtacgaagagggtgttcgcaaggcccagagcagcgactccagcaagaggactttctccgtgtacagcagctctcggcagcagggccgctacgcccccagctatacccccagtgccccgatggacaccaacctcttgagcaatatccagaagctattctctgaacgtattgatgtgttcagccctgtggagttcaacaaggtccgacttccaacgtgactcagacttccagggatcccggggagggttggctggagcagccccacacctgcccaaggagccccaggactctgtgaccaactgggggtgaccctgaccctccagtctctgtctctagggctgtttttaggtagtacagagtgccctgcctccaaatcccacagcccttgtcccagtcttggtgtatgcccagcctgagtctgggtgctgacctgggattactgtttgcccttgtccttatccccacagtagtcttgggtcctccccagggttttctgttcacccatggtccctgccccgcctcactccaagctcagggatgcctctgattgctgggccctacctgtcccctgccctccagatgacggcgctaatattgtatccctcccctcttatctggccccggagactttctgcctcatcccagctacttccatcgtatgtctcccgggcccctgcttggaacttgggttcccccacacacacctgcagtccccaagctgcatccctgtgtccctgcctgcaggtgtcggtgctgaccggcatcatcaagatcagcctgaagacgctgctggagtgtgtgcggctgcgcacctttgggcgcttcgggctgcagcaggtgcaagtggactgccactttctgcagctctacctgtggcgttttgtggccgacgaagaactcgtgcacttgctgctggacgaagtggtggcctctgctgccctgcgctgcccagaccctgtgcccatggagcccagtgtggttgaggtcatctgcgagcgcggctaggcgcagccgctgccatgcaccggtctgtccctgcaccccatggcacccaggatctggtctcggtggtccttccccgcaggcaggtgtcaggaccggcctaataaacatgtgtggcctcctcctctcgcttgctgggcgggcctttccgggggcggggttttgaagctgaggcttctgaggcgcccgcgtcgggtccgcccccgagcgccgattggctggtgtgctgggcccagcatgggcagggggcggttccacttaaaaaccctgggacgagag

SEQ ID NO: 354052 - DNA, 2863 bp, Homo sapiens
cctggtggcgaattcggcacgaggttcctttccagcctcacgcccgtgggctgcagttggaacgatggcggcggcagctgccgccgggcctagcccggggtctggacctggggactccccagaagggcccgagggggaggctccggagcgtcggcggaaggcgcacgggatgctgaagctttactacggcctctcggaaggggaggcggcgggacgccccgcggggcccgaccccctggacccgactgatctgaacggggcgcacttcgacccggaagtttacctagacaaggtgtgtgcgcacggggagtgggggggtgcggggaggggggaagggaaccaggcccctgctatattgctcccccagatcatgcctccgactttttgtgaggttcaggagagcaggtgttcataagaggacgaacctcggccagggagtacgagcagctgaggcgtctgaggggatctgcgtagagagtgccctctggcccagttgatggacagtgagacggacatggtgcggcagatccgggctctagacagcgacatgcagaccctggtctatgagaactacaacaagttcatctcagccacagacaccatccggaagatgaagaacgatttccggaagatggaggatgagatggaccggctggccaccaacatggcagtgatcaccgacttcagcgctcgcatcagcgccacgctgcaggaccgccacgagcgcatcaccaagctggcaggggtccacgcgctgctgcggaagctgcagttcctctttgagctgccctcgcgcctcaccaagtgcgtggaactgggcgcctatgggcaggcggtgcgctaccagggccgcgcgcaggccgtgctgcagcagtaccaacacctgccctcgttccgcgccatccaggacgactgccaggtcatcacggcccgcctggcccagcagctgcggcagcgctttagggagggcggctcaggcgccccggagcaggcagagtgcgtggagctgctgctggccctgggcgagcctgcggaggagctgtgcgaggagttcctggcgcacgcccgcggccggctggagaaggagctgagaaacctggaggccgagctggggccctcacctccggctcccgacgtgttagagttcaccgaccatggaggcagtggcttcgtgggcggcctctgccaggtggcggcggcctaccaggagctgtttgcggcccagggcccagcaggtgccgagaagctggcggccttcgcccggcagctgggcagccgctattttgcgctggtggagcggcggctggcgcaggagcagggtggtggtgacaactcactgctggtgcgggcgctggaccgcttccaccggcgcttgcgggctcccggggccctgctggccgctgccgggctcgcagacgctgccacggagatcgtggaacgagtggcccgcgagcgcctgggccaccacctgcagggtctccgggcggccttcctgggctgcctgacagacgtccgccaggcgctggcagcacctcgcgtggctgggaaggagggccctggcctggccgagttgctggccaatgtggccagctccatcctgagccacattaaggcctctctggcagcagtgcaccttttcaccgccaaagaggtgtccttctccaacaagccctacttccggggtgagttctgcagtcagggtgtccgtgagggcctcatcgtgggcttcgtccactctatgtgccagacggctcagagcttctgcgacagccctggggagaaggggggtgccacaccacctgccctgctcctgctgctctcccgcctctgcctggactacgagacggccaccatctcctacatcctcactctcactgatgaacagtttctggtgcaggatcagttcccagtgacgcccgtgagcacgctgtgtgcagaggccagggaaacggcgcggcggctgctgacccactacgtgaaggtgcagggcctggtcatatcacagatgctgcgcaagagcgtggagactcgcgactggctcagcactctggagccccggaatgtgcgggccgtcatgaagcgggtggtggaggataccaccgccatcgacgtgcaggtggggctcctgtacgaagagggtgttcgcaaggcccagagcagcgactccagcaagaggactttctccgtgtacagcagctctcggcagcagggccgctacgcccccagctatacccccagtgccccgatggacaccaacctcttgagcaatatccagaagctattctctgaacgtattgatgtgttcagccctgtggagttcaacaaggtgtcggtgctgaccggcatcatcaagatcagcctgaagacgctgctggagtgtgtgcggctgcgcacctttgggcgcttcgggctgcagcaggtgcaagtggactgccactttctgcagctctacctgtggcgttttgtggccgacgaagaactcgtgcacttgctgctggacgaagtggtggcctctgctgccctgcgctgcccagaccctgtgcccatggagcccagtgtggttgaggtcatctgcgagcgcggctaggcgcagccgctgccatgcaccggtctgtccctgcaccccatggcacccaggatctggtctcggtggtccttccccgcaggcaggtgtcaggaccggcctaataaacatgtgtggcctcctcctctcgcttgctgggcgggcctttccgggggcggggttttgaagctgaggcttctgaggcgcccgcgtcgggtccgcccccgagcgccgattggctggtgtgctgggcccagcatgggcagggggcggttccacttaaaaaccctgggacgagag

SEQ ID NO: 354053 - DNA, 2349 bp, Homo sapiens
cccccccccccaaccctacggctagtacgagcctggtttaatcggccgagggagaactacaacaagttcatctcagccacagacaccatccggaagatgaagaacgatttccggaagatggaggatgagatggaccggctggccaccaacatggcagtgatcaccgacttcagcgctcgcatcagcgccacgctgcaggaccgccacgagcgcatcaccaagctggcaggggtccacgcgctgctgcggaagctgcagttcctctttgagctgccctcgcgcctcaccaagtgcgtggaactgggcgcctatgggcaggcggtgcgctaccagggccgcgcgcaggccgtgctgcagcagtaccaacacctgccctcgttccgcgccatccaggacgactgccaggtcatcacggcccgcctggcccagcagctgcggcagcgctttagggagggcggctcaggcgccccggagcaggcagagtgcgtggagctgctgctggccctgggcgagcctgcggaggagctgtgcgaggagttcctggcgcacgcccgcggccggctggagaaggagctgagaaacctggaggccgagctggggccctcacctccggctcccgacgtgttagagttcaccgaccatggaggcagtggcttcgtgggcggcctctgccaggtggcggcggcctaccaggagctgtttgcggcccagggcccagcaggtgccgagaagctggcggccttcgcccggcagctgggcagccgctattttgcgctggtggagcggcggctggcgcaggagcagggtggtggtgacaactcactgctggtgcgggcgctggaccgcttccaccggcgcttgcgggctcccggggccctgctggccgctgccgggctcgcagacgctgccacggagatcgtggaacgagtggcccgcgagcgcctgggccaccacctgcagggtctccgggcggccttcctgggctgcctgacagacgtccgccaggcgctggcagcacctcgcgtggctgggaaggagggccctggcctggccgagttgctggccaatgtggccagctccatcctgagccacattaaggcctctctggcagcagtgcaccttttcaccgccaaagaggtgtccttctccaacaagccctacttccggggtgagttctgcagtcagggtgtccgtgagggcctcatcgtgggcttcgtccactctatgtgccagacggctcagagcttctgcgacagccctggggagaaggggggtgccacaccacctgccctgctcctgctgctctcccgcctctgcctggactacgagacggccaccatctcctacatcctcactctcactgatgaacagtttctggtgcaggatcagttcccagtgacgcccgtgagcacgctgtgtgcagaggccagggaaacggcgcggcggctgctgacccactacgtgaaggtgcagggcctggtcatatcacagatgctgcgcaagagcgtggagactcgcgactggctcagcactctggagccccggaatgtgcgggccgtcatgaagcgggtggtggaggataccaccgccatcgacgtgcaggtggggctcctgtacgaagagggtgttcgcaaggcccagagcagcgactccagcaagaggactttctccgtgtacagcagctctcggcagcagggccgctacgcccccagctatacccccagtgccccgatggacaccaacctcttgagcaatatccagaagctattctctgaacgtattgatgtgttcagccctgtggagttcaacaaggtgtcggtgctgaccggcatcatcaagatcagcctgaagacgctgctggagtgtgtgcggctgcgcacctttgggcgcttcgggctgcagcaggtgcaagtggactgccactttctgcagctctacctgtggcgttttgtggccgacgaagaactcgtgcacttgctgctggacgaagtggtggcctctgctgccctgcgctgcccagaccctgtgcccatggagcccagtgtggttgaggtcatctgcgagcgcggctaggcgcagccgctgccatgcaccggtctgtccctgcaccccatggcacccaggatctggtctcggtggtccttccccgcaggcaggtgtcaggaccggcctaataaacatgtgtggcctcctcctctcgcttgctgggcgggcctttccgggggcggggttttgaagctgaggcttctgaggcgcccgcgtcgggtccgcccccgagcgccgattggctggtgtgctgggcccagcatgggcagggggcggttccacttaaaaaccctgggacgagag

SEQ ID NO: 354054 - DNA, 1971 bp, Homo sapiens
ctcgtttcaacaacaactttatggctcccggaagtgcctcctccccgtccccttcctttccagcctcacgcccgtgggctgcagttggaacgatggcggcggcagctgccgccgggcctagcccggggtctggacctggggactccccagaagggcccgagggggaggctccggagcgtcggcggaaggcgcacgggatgctgaagctttactacggcctctcggaaggggaggcggcgggacgccccgcggggcccgaccccctggacccgactgatctgaacggggcgcacttcgacccggaagtttacctagacaagctgcgtagagagtgccctctggcccagttgatggacagtgagacggacatggtgcggcagatccgggctctagacagcgacatgcagaccctggtctatgagaactacaacaagttcatctcagccacagacaccatccggaagatgaagaacgatttccggaagatggaggatgagatggaccggctggccaccaacatggcagtgatcaccgacttcagcgctcgcatcagcgccacgctgcaggaccgccacgagcgcatcaccaagctggcaggggtccacgcgctgctgcggaagctgcagttcctctttgagctgccctcgcgcctcaccaagtgcgtggaactgggcgcctatgggcaggcggtgcgctaccagggccgcgcgcaggccgtgctgcagcagtaccaacacctgccctcgttccgcgccatccaggacgactgccaggtcatcacggcccgcctggcccagcagctgcggcagcgctttagggagggcggctcaggcgccccggagcaggcagagtgcgtggagctgctgctggccctgggcgagcctgcggaggagctgtgcgaggagttcctggcgcacgcccgcggccggctggagaaggagctgagaaacctggaggccgagctggggccctcacctccggctcccgacgtgttagagttcaccgaccatggaggcagtggcttcgtgggcggcctctgccaggtggcggcggcctaccaggagctgtttgcggcccagggcccagcaggtgccgagaagctggcggccttcgcccggcagctgggcagccgctattttgcgctggtggagcggcggctggcgcaggagcagggtggtggtgacaactcactgctggtgcgggcgctggaccgcttccaccggcgcttgcgggctcccggggccctgctggccgctgccgggctcgcagacgctgccacggagatcgtggaacgagtggcccgcgagcgcctgggccaccacctgcagggtctccgggcggccttcctgggctgcctgacagacgtccgccaggcgctggcagcacctccggctcccgacgtgtcagagtacaccgaccatggacgcagtgcgctacgctgggcggcctctgccaggtggcggcggcctaccaggagctgcccgcggcccaccggcccagcacgctgccgagaagctgcgcgagacatacgcccggcaacctgacaaagaccgcatacactagcagctgcctgcaacaagacaaacaagaaaccaacgtacaggaaacctggccacatcgagaccaaacaaccacagcagacacagcgaaaactaggaaaagcccaaactaggagcaaagagccgcgaagacaggcgaaacccaacaggaaacccagaagacaccccaagggacacgccaaccaacagacaaacgcacacagaaaaccccgcaaggagccaaaatgcccaaacacaaaggcacaataccacagccacggcccccaaaatccgcaaacgcgaaaacggaaaccccacgcccccacaaagaggaccacaaataccaagacacaaggacacaccccagagaaccccacccgaccacaccaccccacaaaggaccaaaaaacggccgacggagcacacagcacgc

SEQ ID NO: 354055 - DNA, 1143 bp, Homo sapiens
  misc_feature (867)..(867): n is a, c, g, or t
  misc_feature (870)..(870): n is a, c, g, or t
  misc_feature (873)..(873): n is a, c, g, or t
ctcgtttcaacaacaactttatggctcccggaagtgcctcctccccgtccccttcctttccagcctcacgcccgtgggctgcagttggaacgatggcggcggcagctgccgccgggcctagcccggggtctggacctggggactccccagaagggcccgagggggaggctccggagcgtcggcggaaggcgcacgggatgctgaagctttactacggcctctcggaaggggaggcggcgggacgccccgcggggcccgaccccctggacccgactgatctgaacggggcgcacttcgacccggaagtttacctagacaagctgcgtagagagtgccctctggcccagttgatggacagtgagacggacatggtgcggcagatccgggctctagacagcgacatgcagaccctggtctatgagaactacaacaagttcatctcagccacagacaccatccggaagatgaagaacgatttccggaagatggaggatgagatggaccggctggccaccaacatggcagtgatcaccgacttcagcgctcgcatcagcgccacgctgcaggaccgccacgagcgcatcaccaagctggcaggggtccacgcgctgctgcggaagctgcagttcctctttgagctgccctcgcgcctcaccaagtgcgtggaactgggcgcctatgggcaggcggtgcgctaccagggccgcgcgcaggccgtgctgcagcagtaccaacacctgccctcgttccgcgccatccaggacgactgccaggtcatcacggcccgcctggcccagcagctgcggcagcgctttagggagggggtcaggcgcccggagcaggcaatgcgtgagcgtgtggcctggnganccnggagagcggccagaagcctagacacgccggcagtggaacagccagaaacccggggcacatggggccaaacaggcacaaaggtgaggctccggcctgagagcagcggcaaggagacaactaacgagcgggacacagacgcagtgacggcgcaaagagcaaagagggcacagagaagacaacacagaagagagcaacggagaacctagcaggagaccacgacaagaatgaagaagcaacaagagacgacgcagcacagcgagcgcgagagaa

SEQ ID NO: 354056 - DNA, 367 bp, Homo sapiens
atacagcatctgttcagggaaaggaggctgttctgttggatcaaagaacatcttacgtgtcagaaaaaagcaggagatggatatgggatcagaagaactggattctagccccagtcagccctagcttgttgggtgagctagagccagcccttccctccctgtgcctcagagcccttctgtgtacactggggatggtggaacatgccatcccgagagctctgtggtctgtccactcaagacagcagactggggctgttgttactgctattattactgtcattgctcttgttcttactgctgaccatgatgtcaagtctctgtcaactcagctcagaaattcttactgtgacctccaatgtggtgttga

SEQ ID NO: 354057 - DNA, 1100 bp, Homo sapiens
aaatagcctgataaataactagacagtctttgcactcgagagattccacaacatgtaatgcaataatggaaaggtttaccttctttagcttcaaagttggagggatttatcaggctatttctactgatgaactgcttcaggtgggggagggaaacttatttttatttgcctgatttaagtgtctgagaaacaaatctttgttctcttaggctgcaatggaacaactttaccagggttttggcatttcctttcctttcctttataaaacatgctcagcaaactgcaccagttaactacagtttggtaaattgttatgttaacaattatgacatctgcaatgttttataaagcaactaatttaataaaatcactgttgtgaggacttaaattttgtgttacctcccaagagatactttttgagagtatagaacacagctcttgggagtacagttctctacgttctctactaaatcttaataaatgcttgacatagttacagctttaaaacatgagtgatttgccaggtccttatgttgtcaccatagagcaacaaaggtatagggctgccttcctcttatttatttggggacattattttgttatttagataccaaggcctaattaattaagtacctataagaactatttatttggagtaactgagcctgtaactcaggtttatggctgttaagtatagattggggaatctttattatgtcttctcctaagcagtttaaccaaatgtgtggttagtgtttttttattcccctaagacagaaagaacaaaaaatgttttaaatttctcttatataggaaataataggaacgtcaaagctctgtatacctactaagtggaaaacaagaccatcatctaagtgatttgagaaattaacaaaagtagtgactacacagcaataattacagtaaattaaataaagattcctttaaggcagacaagggctaagatttccttagcagtaataatgacatacactgaattgaaaatctattttattacagaaagatcagtttctaacaaatgaaaatgtatcacctgttccttaactgtgtaaataataattaaatttctttgaaactgg

SEQ ID NO: 354058 - DNA, 2575 bp, Homo sapiens
gggggcgtggcctcggctcggcgcacagtcagccacggtcccatcctgctccgcgccggtcaacgagagcaaacccagtgactcacctccgccgtgctaactcctcgctagctctccctctcacacacgctcacacccggctcgagatggcggcggcggcggcggcggcgggggactcggactcctgggacgccgacgctttctccgtggaagacccagtgcggaaggtggggggcggcggcactgccggcggggaccgctgggaaggcgaggacgaggacgaggacgtcaaggataactgggatgacgatgatgatgaaaaaaaagaggaagcagaagtaaaaccagaggtaaaaatttcagaaaagaaaaaaatagcagagaagataaaagagaaagaacggcaacagaagaaaaggcaagaagaaattaaaaagaggttagaagaacccgaagaacctaaagtgctaacaccagaagaacaattagcagataaactgcggctaaagaaattacaggaagagtcagacctcgaattagcaaaggaaacttttggtgttaataatgcagtttatggaatagatgctatgaacccatcttcaagagatgactttacagagtttggaaagttactaaaagataaaattacacaatatgaaaagtcactatattatgccagttttttggaagtcttagttcgagatgtgtgtatttcattggaaattgatgacttgaaaaaaattaccaattcactgactgtgctttgcagtgaaaaacagaagcaagaaaagcaaagcaaagccaaaaagaagaagaaaggtgtggttcctggagggggattaaaagccaccatgaaagatgatctggcagattatggtggttatgatggaggatatgtacaagactatgaagacttcatgtgacattttatcttttcttggtgtcatctttatgttgcccacaatcccttgaacatgtagcacaacttcctttcctttcagttctgccaaatgctacaatcagaagtgcagtatcttttgtgctggttatttaaccccttgacacttaggtgctaatgtgcaaatgagggaacttggatcttgctgccaaggggttaaaattgggaacctaagttgctactaaatcatagttcaaaacctaataatgttgtcgttgttgctatctgatttcatagcagcagtcactaaattggaaacaaaaggttgcaacgtgacaaaaaaaattgtgtagtatttaccagcaccattcagtaatacagccttaaccatacctccttgaactacttcataacttgtcaagaaaagcagtttgcagcaagggcatgtggtgtgcacctagtattaaaattgctttgtcttaaaattgaacatgaggatattaaaaatacattgtgaagaagactgcttatctcagagtgaagatactgcggctgaaaagcactagtttgatataaaattaaaatgaccaaaaccctccaactttgaagctaaagaaggtaaacctttccattattgcattacatgttgtggaatctctcgagtgcaaagactgtctagttatttatcaggctatttctactgatgaactgcttcaggtgggggagggaaacttatttttatttgcctgatttaagtgtctgagaaacaaatctttgttctcttaggctgcaatggaacaactttaccagggttttggcatttcctttcctttcctttataaaacatgctcagcaaactgcaccagttaactacagtttggtaaattgttatgttaacaattatgacatctgcaatgttttataaagcaactaatttaataaaatcactgttgtgaggacttaaattttgtgttacctcccaagagatactttttgagagtatagaacacagctcttgggagtacagttctctacgttctctactaaatcttaataaatgcttgacatagttacagctttaaaacatgagtgatttgccaggtccttatgttgtcaccatagagcaacaaaggtatagggctgccttcctcttatttatttggggacattattttgttatttagataccaaggcctaattaattaagtacctataagaactatttatttggagtaactgagcctgtaactcaggtttatggctgttaagtatagattggggaatctttattatgtcttctcctaagcagtttaaccaaatgtgtggttagtgtttttttattcccctaagacagaaagaacaaaaaatgttttaaatttctcttatataggaaataataggaacgtcaaagctctgtatacctactaagtggaaaacaagaccatcatctaagtgatttgagaaattaacaaaagtagtgactacacagcaataattacagtaaattaaataaagattcctttaaggcagacaagggctaagatttccttagcagtaataatgacatacactgaattgaaaatctattttattacagaaagatcagtttctaacaaatgaaaatgtatcacctgttccttaactgtgtaaataataattaaatttctttgaaactgg

SEQ ID NO: 354059 - DNA, 2424 bp, Homo sapiens
attccccctacattaatttataaatttaatgcagtacaaaaaaataccaacaaacatttctctggagttagtcaagttgataataaagttcacatagaaaagcaaacatgcaagaattattaatggaagtccttttctttaggataactgggatgacgatgatgatgaaaaaaaagaggaagcagaagtaaaaccagaggtaaaaatttcagaaaagaaaaaaatagcagagaagataaaagagaaagaacggcaacagaagaaaaggcaagaagaaattaaaaagaggttagaagaacccgaagaacctaaagtgctaacaccagaagaacaattagcagataaactgcggctaaagaaattacaggaagagtcagacctcgaattagcaaaggaaacttttggtgttaataatgcagtttatggaatagatgctatgaacccatcttcaagagatgactttacagagtttggaaagttactaaaagataaaattacacaatatgaaaagtcactatattatgccagttttttggaagtcttagttcgagatgtgtgtatttcattggaaattgatgacttgaaaaaaattaccaattcactgactgtgctttgcagtgaaaaacagaagcaagaaaagcaaagcaaagccaaaaagaagaagaaaggtgtggttcctggagggggattaaaagccaccatgaaagatgatctggcagattatggtggttatgatggaggatatgtacaagactatgaagacttcatgtgacattttatcttttcttggtgtcatctttatgttgcccacaatcccttgaacatgtagcacaacttcctttcctttcagttctgccaaatgctacaatcagaagtgcagtatcttttgtgctggttatttaaccccttgacacttaggtgctaatgtgcaaatgagggaacttggatcttgctgccaaggggttaaaattgggaacctaagttgctactaaatcatagttcaaaacctaataatgttgtcgttgttgctatctgatttcatagcagcagtcactaaattggaaacaaaaggttgcaacgtgacaaaaaaaattgtgtagtatttaccagcaccattcagtaatacagccttaaccatacctccttgaactacttcataacttgtcaagaaaagcagtttgcagcaagggcatgtggtgtgcacctagtattaaaattgctttgtcttaaaattgaacatgaggatattaaaaatacattgtgaagaagactgcttatctcagagtgaagatactgcggctgaaaagcactagtttgatataaaattaaaatgaccaaaaccctccaactttgaagctaaagaaggtaaacctttccattattgcattacatgttgtggaatctctcgagtgcaaagactgtctagttatttatcaggctatttctactgatgaactgcttcaggtgggggagggaaacttatttttatttgcctgatttaagtgtctgagaaacaaatctttgttctcttaggctgcaatggaacaactttaccagggttttggcatttcctttcctttcctttataaaacatgctcagcaaactgcaccagttaactacagtttggtaaattgttatgttaacaattatgacatctgcaatgttttataaagcaactaatttaataaaatcactgttgtgaggacttaaattttgtgttacctcccaagagatactttttgagagtatagaacacagctcttgggagtacagttctctacgttctctactaaatcttaataaatgcttgacatagttacagctttaaaacatgagtgatttgccaggtccttatgttgtcaccatagagcaacaaaggtatagggctgccttcctcttatttatttggggacattattttgttatttagataccaaggcctaattaattaagtacctataagaactatttatttggagtaactgagcctgtaactcaggtttatggctgttaagtatagattggggaatctttattatgtcttctcctaagcagtttaaccaaatgtgtggttagtgtttttttattcccctaagacagaaagaacaaaaaatgttttaaatttctcttatataggaaataataggaacgtcaaagctctgtatacctactaagtggaaaacaagaccatcatctaagtgatttgagaaattaacaaaagtagtgactacacagcaataattacagtaaattaaataaagattcctttaaggcagacaagggctaagatttccttagcagtaataatgacatacactgaattgaaaatctattttattacagaaagatcagtttctaacaaatgaaaatgtatcacctgttccttaactgtgtaaataataattaaatttctttgaaactgg

SEQ ID NO: 354060 - DNA, 2403 bp, Homo sapiens
  misc_feature (30)..(30): n is a, c, g, or t
  misc_feature (32)..(32): n is a, c, g, or t
  misc_feature (47)..(47): n is a, c, g, or t
  misc_feature (51)..(51): n is a, c, g, or t
ggtggaagagagagagagggagattaggcnangtacgaggctggtgntgantcggccgaggctccgccgtgctaactcctcgctagctctccctctcacacacgctcacacccggctcgagatggcggcggcggcggcggcggcgggggactcggactcctgggacgccgacgctttctccgtggaagacccagtgcggaaggtggggggcggcggcactgccggcggggaccgctgggaaggcgaggacgaggacgaggacgtcaagttagaagaacccgaagaacctaaagtgctaacaccagaagaacaattagcagataaactgcggctaaagaaattacaggaagagtcagacctcgaattagcaaaggaaacttttggtgttaataatgcagtttatggaatagatgctatgaacccatcttcaagagatgactttacagagtttggaaagttactaaaagataaaattacacaatatgaaaagtcactatattatgccagttttttggaagtcttagttcgagatgtgtgtatttcattggaaattgatgacttgaaaaaaattaccaattcactgactgtgctttgcagtgaaaaacagaagcaagaaaagcaaagcaaagccaaaaagaagaagaaaggtgtggttcctggagggggattaaaagccaccatgaaagatgatctggcagattatggtggttatgatggaggatatgtacaagactatgaagacttcatgtgacattttatcttttcttggtgtcatctttatgttgcccacaatcccttgaacatgtagcacaacttcctttcctttcagttctgccaaatgctacaatcagaagtgcagtatcttttgtgctggttatttaaccccttgacacttaggtgctaatgtgcaaatgagggaacttggatcttgctgccaaggggttaaaattgggaacctaagttgctactaaatcatagttcaaaacctaataatgttgtcgttgttgctatctgatttcatagcagcagtcactaaattggaaacaaaaggttgcaacgtgacaaaaaaaattgtgtagtatttaccagcaccattcagtaatacagccttaaccatacctccttgaactacttcataacttgtcaagaaaagcagtttgcagcaagggcatgtggtgtgcacctagtattaaaattgctttgtcttaaaattgaacatgaggatattaaaaatacattgtgaagaagactgcttatctcagagtgaagatactgcggctgaaaagcactagtttgatataaaattaaaatgaccaaaaccctccaactttgaagctaaagaaggtaaacctttccattattgcattacatgttgtggaatctctcgagtgcaaagactgtctagttatttatcaggctatttctactgatgaactgcttcaggtgggggagggaaacttatttttatttgcctgatttaagtgtctgagaaacaaatctttgttctcttaggctgcaatggaacaactttaccagggttttggcatttcctttcctttcctttataaaacatgctcagcaaactgcaccagttaactacagtttggtaaattgttatgttaacaattatgacatctgcaatgttttataaagcaactaatttaataaaatcactgttgtgaggacttaaattttgtgttacctcccaagagatactttttgagagtatagaacacagctcttgggagtacagttctctacgttctctactaaatcttaataaatgcttgacatagttacagctttaaaacatgagtgatttgccaggtccttatgttgtcaccatagagcaacaaaggtatagggctgccttcctcttatttatttggggacattattttgttatttagataccaaggcctaattaattaagtacctataagaactatttatttggagtaactgagcctgtaactcaggtttatggctgttaagtatagattggggaatctttattatgtcttctcctaagcagtttaaccaaatgtgtggttagtgtttttttattcccctaagacagaaagaacaaaaaatgttttaaatttctcttatataggaaataataggaacgtcaaagctctgtatacctactaagtggaaaacaagaccatcatctaagtgatttgagaaattaacaaaagtagtgactacacagcaataattacagtaaattaaataaagattcctttaaggcagacaagggctaagatttccttagcagtaataatgacatacactgaattgaaaatctattttattacagaaagatcagtttctaacaaatgaaaatgtatcacctgttccttaactgtgtaaataataattaaatttctttgaaactgg

SEQ ID NO: 354061 - DNA, 2481 bp, Homo sapiens
gcatcaaaaagctttatttccatttggtccaaggcttgttaggatagttaagaaagctgcctattggctggagggagaggcttaggcagaagccctattactttgcaaggggcccttcagaagtcgctgggctcagaaggctcttagtcgtgcttgagagtgagcctttcgaagagatactcgcccagcccagcctccgggccacccagcctgtggaggttggtcaggtggtcacccatcttcttgataagcttcacttcctcatctaggaagtgagtctccaggaagtcacagagatgggggtccgtgcgggcagaacccagggcaagaagaaattaaaaagaggttagaagaacccgaagaacctaaagtgctaacaccagaagaacaattagcagataaactgcggctaaagaaattacaggaagagtcagacctcgaattagcaaaggaaacttttggtgttaataatgcagtttatggaatagatgctatgaacccatcttcaagagatgactttacagagtttggaaagttactaaaagataaaattacacaatatgaaaagtcactatattatgccagttttttggaagtcttagttcgagatgtgtgtatttcattggaaattgatgacttgaaaaaaattaccaattcactgactgtgctttgcagtgaaaaacagaagcaagaaaagcaaagcaaagccaaaaagaagaagaaaggtgtggttcctggagggggattaaaagccaccatgaaagatgatctggcagattatggtggttatgatggaggatatgtacaagactatgaagacttcatgtgacattttatcttttcttggtgtcatctttatgttgcccacaatcccttgaacatgtagcacaacttcctttcctttcagttctgccaaatgctacaatcagaagtgcagtatcttttgtgctggttatttaaccccttgacacttaggtgctaatgtgcaaatgagggaacttggatcttgctgccaaggggttaaaattgggaacctaagttgctactaaatcatagttcaaaacctaataatgttgtcgttgttgctatctgatttcatagcagcagtcactaaattggaaacaaaaggttgcaacgtgacaaaaaaaattgtgtagtatttaccagcaccattcagtaatacagccttaaccatacctccttgaactacttcataacttgtcaagaaaagcagtttgcagcaagggcatgtggtgtgcacctagtattaaaattgctttgtcttaaaattgaacatgaggatattaaaaatacattgtgaagaagactgcttatctcagagtgaagatactgcggctgaaaagcactagtttgatataaaattaaaatgaccaaaaccctccaactttgaagctaaagaaggtaaacctttccattattgcattacatgttgtggaatctctcgagtgcaaagactgtctagttatttatcaggctatttctactgatgaactgcttcaggtgggggagggaaacttatttttatttgcctgatttaagtgtctgagaaacaaatctttgttctcttaggctgcaatggaacaactttaccagggttttggcatttcctttcctttcctttataaaacatgctcagcaaactgcaccagttaactacagtttggtaaattgttatgttaacaattatgacatctgcaatgttttataaagcaactaatttaataaaatcactgttgtgaggacttaaattttgtgttacctcccaagagatactttttgagagtatagaacacagctcttgggagtacagttctctacgttctctactaaatcttaataaatgcttgacatagttacagctttaaaacatgagtgatttgccaggtccttatgttgtcaccatagagcaacaaaggtatagggctgccttcctcttatttatttggggacattattttgttatttagataccaaggcctaattaattaagtacctataagaactatttatttggagtaactgagcctgtaactcaggtttatggctgttaagtatagattggggaatctttattatgtcttctcctaagcagtttaaccaaatgtgtggttagtgtttttttattcccctaagacagaaagaacaaaaaatgttttaaatttctcttatataggaaataataggaacgtcaaagctctgtatacctactaagtggaaaacaagaccatcatctaagtgatttgagaaattaacaaaagtagtgactacacagcaataattacagtaaattaaataaagattcctttaaggcagacaagggctaagatttccttagcagtaataatgacatacactgaattgaaaatctattttattacagaaagatcagtttctaacaaatgaaaatgtatcacctgttccttaactgtgtaaataataattaaatttctttgaaactgg

SEQ ID NO: 354062 - DNA, 2554 bp, Homo sapiens
gggggcgtggcctcggctcggcgcacagtcagccacggtcccatcctgctccgcgccggtcaacgagagcaaacccagtgactcacctccgccgtgctaactcctcgctagctctccctctcacacacgctcacacccggctcgagatggcggcggcggcggcggcggcgggggactcggactcctgggacgccgacgctttctccgtggaagacccagtgcggaaggtggggggcggcggcactgccggcggggaccgctgggaaggcgaggacgaggacgaggacgtcaaggataactgggatgacgatgatgatgaaaaaaaagaggaagcagaagtaaaaccagaggtaaaaatttcagaaaagaaaaaaatagcagagaagataaaagagaaagaacggcaacagaagaaaaggcaagaagaaattaaaaagaggttagaagaacccgaagaacctaaagtgctaacaccagaagaacaattagcagataaactgcggctaaagaaattacaggaagagtcagacctcgaattagcaaaggaaacttttggtgttaataatgcagtttatggaatagatgctatgaacccatcttcaagagatgactttacagagtttggaaagttactaaaagataaaattacacaatatgaaaagtcactatattatgccagttttttggaagtcttagttcgagatgtgtgtatttcattggaaattgatgacttgaaaaaaattaccaattcactgactgtgctttgcagtgaaaaacagaagcaagaaaagcaaagcaaagccaaaaagaagaagaaaggtgtggttcctggagggggattaaaagccaccatgaaagatgatctggcagattatggtggttatgatggaggatatgtacaagactatgaagacttcatgtgacattttatcttttcttggtgtcatctttatgttgcccacaatcccttgaacatgtagcacaacttcctttcctttcagttctgccaaatgctacaatcagaagtgcagtatcttttgtgctggttatttaaccccttgacacttaggtgctaatgtgcaaatgagggaacttggatcttgctgccaaggggttaaaattgggaacctaagttgctactaaatcatagttcaaaacctaataatgttgtcgttgttgctatctgatttcatagcagcagtcactaaattggaaacaaaaggttgcaacgtgacaaaaaaaattgtgtagtatttaccagcaccattcagtaatacagccttaaccatacctccttgaactacttcataacttgtcaagaaaagcagtttgcagcaagggcatgtggtgtgcacctagtattaaaattgctttgtcttaaaattgaacatgaggatattaaaaatacattgtgaagaagactgtgcggctgaaaagcactagtttgatataaaattaaaatgaccaaaaccctccaactttgaagctaaagaaggtaaacctttccattattgcattacatgttgtggaatctctcgagtgcaaagactgtctagttatttatcaggctatttctactgatgaactgcttcaggtgggggagggaaacttatttttatttgcctgatttaagtgtctgagaaacaaatctttgttctcttaggctgcaatggaacaactttaccagggttttggcatttcctttcctttcctttataaaacatgctcagcaaactgcaccagttaactacagtttggtaaattgttatgttaacaattatgacatctgcaatgttttataaagcaactaatttaataaaatcactgttgtgaggacttaaattttgtgttacctcccaagagatactttttgagagtatagaacacagctcttgggagtacagttctctacgttctctactaaatcttaataaatgcttgacatagttacagctttaaaacatgagtgatttgccaggtccttatgttgtcaccatagagcaacaaaggtatagggctgccttcctcttatttatttggggacattattttgttatttagataccaaggcctaattaattaagtacctataagaactatttatttggagtaactgagcctgtaactcaggtttatggctgttaagtatagattggggaatctttattatgtcttctcctaagcagtttaaccaaatgtgtggttagtgtttttttattcccctaagacagaaagaacaaaaaatgttttaaatttctcttatataggaaataataggaacgtcaaagctctgtatacctactaagtggaaaacaagaccatcatctaagtgatttgagaaattaacaaaagtagtgactacacagcaataattacagtaaattaaataaagattcctttaaggcagacaagggctaagatttccttagcagtaataatgacatacactgaattgaaaatctattttattacagaaagatcagtttctaacaaatgaaaatgtatcacctgttccttaactgtgtaaataataattaaatttctttgaaactgg

SEQ ID NO: 354063 - DNA, 2521 bp, Homo sapiens
gggggcgtggcctcggctcggcgcacagtcagccacggtcccatcctgctccgcgccggtcaacgagagcaaacccagtgactcacctccgccgtgctaactcctcgctagctctccctctcacacacgctcacacccggctcgagatggcggcggcggcggcggcggcgggggactcggactcctgggacgccgacgctttctccgtggaagacccagtgcggaaggtggggggcggcggcactgccggcggggaccgctgggaaggcgaggacgaggacgaggacgtcaaggataactgggatgacgatgatgatgaaaaaaaagaggaagcagaagtaaaaccagaggtaaaaatttcagaaaagaaaaaaatagcagagaagataaaagagaaagaacggcaacagaagaaaaggcaagaagaaattaaaaagaggttagaagaacccgaagaacctaaagtgctaacaccagaagaacaattagcagataaactgcggctaaagaaattacaggaagagtcagacctcgaattagcaaaggaaacttttggtgttaataatgcagtttatggaatagatgctatgaacccatcttcaagagatgactttacagagtttggaaagttactaaaagataaaattacacaatatgaaaagtcactatattatgccagttttttggaagtcttagttcgagatgtgtgtatttcattggaaattgatgacttgaaaaaaattaccaattcactgactgtgctttgcagtgaaaaacagaagcaagaaaagcaaagcaaagccaaaaagaagaagaaaggtgtggttcctggagggggattaaaagccaccatgaaagatgatctggcagattatggtggttatgatggaggatatgtacaagactatgaagacttcatgtgacattttatcttttcttggtgtcatctttatgttgcccacaatcccttgaacatgtagcacaacttcctttcctttcagttctgccaaatgctacaatcagaagtgcagtatcttttgtgctggttatttaaccccttgacacttaggtgctaatgtgcaaatgagggaacttggatcttgctgccaaggggttaaaattgggaacctaagttgctactaaatcatagttcaaaacctaataatgttgtcgttgttgctatctgatttcatagcagcagtcactaaattggaaacaaaaggttgcaacgtgacaaaaaaaattgtgtagtatttaccagcaccattcagtaatacagccttaaccatacctccttgaactacttcataacttgtcaagaaaagcagtttgcagcaagggcatgtggtgtgcacctagtattaaaattgctttgtcttaaaattgaacatgaggatattaaaaatacattgtgaagaagactgcttatctcagagtgaagatactgcggctgaaaagcactagtttgatataaaattaaaatgaccatgttgtggaatctctcgagtgcaaagactgtctagttatttatcaggctatttctactgatgaactgcttcaggtgggggagggaaacttatttttatttgcctgatttaagtgtctgagaaacaaatctttgttctcttaggctgcaatggaacaactttaccagggttttggcatttcctttcctttcctttataaaacatgctcagcaaactgcaccagttaactacagtttggtaaattgttatgttaacaattatgacatctgcaatgttttataaagcaactaatttaataaaatcactgttgtgaggacttaaattttgtgttacctcccaagagatactttttgagagtatagaacacagctcttgggagtacagttctctacgttctctactaaatcttaataaatgcttgacatagttacagctttaaaacatgagtgatttgccaggtccttatgttgtcaccatagagcaacaaaggtatagggctgccttcctcttatttatttggggacattattttgttatttagataccaaggcctaattaattaagtacctataagaactatttatttggagtaactgagcctgtaactcaggtttatggctgttaagtatagattggggaatctttattatgtcttctcctaagcagtttaaccaaatgtgtggttagtgtttttttattcccctaagacagaaagaacaaaaaatgttttaaatttctcttatataggaaataataggaacgtcaaagctctgtatacctactaagtggaaaacaagaccatcatctaagtgatttgagaaattaacaaaagtagtgactacacagcaataattacagtaaattaaataaagattcctttaaggcagacaagggctaagatttccttagcagtaataatgacatacactgaattgaaaatctattttattacagaaagatcagtttctaacaaatgaaaatgtatcacctgttccttaactgtgtaaataataattaaatttctttgaaactgg

SEQ ID NO: 354064 - DNA, 1597 bp, Homo sapiens
gggggcgtggcctcggctcggcgcacagtcagccacggtcccatcctgctccgcgccggtcaacgagagcaaacccagtgactcacctccgccgtgctaactcctcgctagctctccctctcacacacgctcacacccggctcgagatggcggcggcggcggcggcggcgggggactcggactcctgggacgccgacgctttctccgtggaagacccagtgcggaaggtggggggcggcggcactgccggcggggaccgctgggaaggcgaggacgaggacgaggacgtcaaggataactgggatgacgatgatgatgaaaaaaaagaggaagcagaagtaaaaccagaggtaaaaatttcagaaaagaaaaaaatagcagagaagataaaagagaaagaacggcaacagaagaaaaggcaagaagaaattaaaaagaggttagaagaacccgaagaacctaaagtgctaacaccagaagaacaattagcagataaactgcggctaaagaaattacaggaagagtcagacctcgaattagcaaaggaaacttttggtgttaataatgcagtttatggaatagatgctatgaacccatcttcaagagatgactttacagagtttggaaagttactaaaagataaaattacacaatatgaaaagtcactatattatgccagttttttggaagtcttagttcgagatgtgtgtatttcattggaaattgatgacttgaaaaaaattaccaattcactgactgtgctttgcagtgaaaaacagaagcaagaaaagcaaagcaaagccaaaaagaagaagaaaggtgtggttcctggagggggattaaaagccaccatgaaagatgatctggcagattatggtggttatgatggaggatatgtacaagactatgaagacttcatgtgacattttatcttttcttggtgtcatctttatgttgcccacaatcccttgaacatgtagcacaacttcctttcctttcagttctgccaaatgctacaatcagaagtgcagtatcttttgtgctggttatttaaccccttgacacttaggtgctaatgtgcaaatgagggaacttggatcttgctgccaaggggttaaaattgggaacctaagttgctactaaatcatagttcaaaacctaataatgttgtcgttgttgctatctgatttcatagcagcagtcactaaattggaaacaaaaggttgcaacgtgacaaaaaaaattgtgtagtatttaccagcaccattcagtaatacagccttaaccatacctccttgaactacttcataacttgtcaagaaaagcagtttgcagcaagggcatgtggtgtgcacctagtattaaaattgctttgtcttaaaattgaacatgaggatattaaaaatacattgtgaagaagactgcttatctcagagtgaagatactgcggctgaaaagcactagtttgatataaaattaaaatgaccaaaaccctccaactttgaagctaaagaaggaatttcctcctgaaaagtttcttacttgctacctactacctacaaaggaatgatatggtacagtaccggaagtatgtagt

SEQ ID NO: 354065 - DNA, 1829 bp, Homo sapiens
  misc_feature (1388)..(1388): n is a, c, g, or t
gggggcgtggcctcggctcggcgcacagtcagccacggtcccatcctgctccgcgccggtcaacgagagcaaacccagtgactcacctccgccgtgctaactcctcgctagctctccctctcacacacgctcacacccggctcgagatggcggcggcggcggcggcggcgggggactcggactcctgggacgccgacgctttctccgtggaagacccagtgcggaaggtggggggcggcggcactgccggcggggaccgctgggaaggcgaggacgaggacgaggacgtcaaggataactgggatgacgatgatgatgaaaaaaaagaggaagcagaagtaaaaccagaggtaaaaatttcagaaaagaaaaaaatagcagagaagataaaagagaaagaacggcaacagaagaaaaggcaagaagaaattaaaaagaggttagaagaacccgaagaacctaaagtgctaacaccagaagaacaattagcagataaactgcggctaaagaaattacaggaagagtcagacctcgaattagcaaaggaaacttttggtgttaataatgcagtttatggaatagatgctatgaacccatcttcaagagatgactttacagagtttggaaagttactaaaagataaaattacacaatatgaaaagtcactatattatgccagttttttggaagtcttagttcgagatgtgtgtatttcattggaaattgatgacttgaaaaaaattaccaattcactgactgtgctttgcagtgaaaaacagaagcaagaaaagcaaagcaaagccaaaaagaagaagaaaggtgtggttcctggagggggattaaaagccaccatgaaagatgatctggcagattatggtggttatgatggaggatatgtacaagactatgaagacttcatgtgacattttatcttttcttggtgtcatctttatgttgcccacaatcccttgaacatgtagcacaacttcctttcctttcagttctgccaaatgctacaatcagaagtgcagtatcttttgtgctggttatttaaccccttgacacttaggtgctaatgtgcaaatgagggaacttggatcttgctgccaaggggttaaaattgggaacctaagttgctactaaatcatagttcaaaacctaaaaaaaaacaaaacgggcggccagctcgcgatctagaccagataccaatgatggcgcgatgtaacacgagaaagcacataccaggggcaccaaacaacaccgtggtccaaaaagggcttcgaaacgggataatcctatttattaccctcagaagcttcttaccttcgcgaggaatatacctgagccttttaccaactcagactaggccctaacccacaattaggagngcacactgggccccaaaaggaataacccgcataatccgctagaaattccaattctaaaaaatccgaataactcgattcagaggtatcatcaactgagttcaccaagacacatagaacacaactcggaaaccaaataataacaagcatgggtatttaaagagtaacgggggtataatatgtagaccagtaaaaagactgaaagatagttgagaggtcacattcaaaagtttacgaagaggtataagaggcaacaattatagtgtgccaaggcttcaaaggacatagattatgggcgaaataaaaaataggtatcgaccgaagagattatttttataacataagtggttaaacgcggaatgaatagaaaaagaggaaagatgtgccaatgagtgcgaaaaaaggggacgcaaaaaaaaaagcaaaaagaggaccaagtaaaga

SEQ ID NO: 354066 - DNA, 856 bp, Homo sapiens
gggggcgtggcctcggctcggcgcacagtcagccacggtcccatcctgctccgcgccggtcaacgagagcaaacccagtgactcacctccgccgtgctaactcctcgctagctctccctctcacacacgctcacacccggctcgagatggcggcggcggcggcggcggcgggggactcggactcctgggacgccgacgctttctccgtggaagacccagtgcggaaggtggggggcggcggcactgccggcggggaccgctgggaaggcgaggacgaggacgaggacgtcaaggataactgggatgacgatgatgatgaaaaaaaagaggaagcagaagtaaaaccagaggtaaaaatttcagaaaagaaaaaaatagcagagaagataaaagagaaagaacggcaacagaagaaaaggcaagaagaaattaaaaagaggttagaagaacccgaagaacctaaagtgctaacaccagaagaacaattagcagataaactgcggctaaagaaattacaggaagagtcagacctcgaattagcaaaggaaacttttggtgttaataatgcagtttatggaatagatgctatgaacccatcttcaagagatgactttacagagtttggaaagttactaaaagataaaattacacaatatgaaaagtcactatattatgccagttttttttgggaaggtctttagttccgaagatggtgtggtcattttccatttgggaaaaatttggaatgaaacttttgaaaaaaaaaaaatttaacccaaattttcaacttggaccttggtggccttttggccacagtgggaaaataaaccagtaaggtcccaatgtaaaaaaaggc

SEQ ID NO: 354067 - DNA, 270 bp, Homo sapiens
tgactccagtggctccaggttcagagcccctgctttagaatgaaacgacagggttattcagatagctattggctttgtaaggtttcatttttaaaaatcctaacctcctgatacttttcagtgcttcttttctcctacaggtgttaataatgcagtttatggaatagatgctatgaacccatcttcaagagatgactttacagagtttggaaagttactaaaagataaaattacacaatatgaaaagtcactatattatgccagtttttt

SEQ ID NO: 354068 - DNA, 517 bp, Homo sapiens
cagtttgcagcaagggcatgtggtgtgcacctagtattaaaattgctttgtcttaaaattgaacatgaggatattaaaaatacattgtgaagaagactgcttatctcagagtgaagatactgcggctgaaaagcactagtttgatataaaattaaaatgaccaaaaccctccaactttgaagctaaagaaggtaaacctttccattattgcattacatgttgtggaatctctcgagtgcaaagactgtctagttatttatcaggctatttctactgatgaactgcttcaggtgggggagggaaacttatttttatttgcctgatttaagtgtctgagaaacaaatctttgttctcttaggctgcaatggaacaactttaccagggttttggcatttcctttcctttcctttataaaacatgctcagcaaactgcaccagttaactacagtttggtaaattgttatgttaacaattatgacatctgcaatgttttataaagcaactaatttaataaaa

SEQ ID NO: 354069 - DNA, 2550 bp, Homo sapiens
  misc_feature (30)..(30): n is a, c, g, or t
  misc_feature (32)..(32): n is a, c, g, or t
  misc_feature (47)..(47): n is a, c, g, or t
  misc_feature (51)..(51): n is a, c, g, or t
ggtggaagagagagagagggagattaggcnangtacgaggctggtgntgantcggccgaggctccgccgtgctaactcctcgctagctctccctctcacacacgctcacacccggctcgagatggcggcggcggcggcggcggcgggggactcggactcctgggacgccgacgctttctccgtggaagacccagtgcggaaggtggggggcggcggcactgccggcggggaccgctgggaaggcgaggacgaggacgaggacgtcaaggataactgggatgacgatgatgatgaaaaaaaagaggaagcagaagtaaaaccagaggtaaaaatttcagaaaagaaaaaaatagcagagaagataaaagagaaagaacggcaacagaagaaaaggcaagaagaaattaaaaagaggttagaagaacccgaagaacctaaagtgctaacaccagaagaacaattagcagataaactgcggctaaagaaattacaggaagagtcagacctcgaattagcaaaggaaacttttggtgttaataatgcagtttatggaatagatgctatgaacccatcttcaagagatgactttacagagtttggaaagttactaaaagataaaattacacaatatgaaaagtcactatattatgccagttttttggaagtcttagttcgagatgtgtgtatttcattggaaattgatgacttgaaaaaaattaccaattcactgactgtgctttgcagtgaaaaacagaagcaagaaaagcaaagcaaagccaaaaagaagaagaaaggtgtggttcctggagggggattaaaagccaccatgaaagatgatctggcagattatggtggttatgatggaggatatgtacaagactatgaagacttcatgtgacattttatcttttcttggtgtcatctttatgttgcccacaatcccttgaacatgtagcacaacttcctttcctttcagttctgccaaatgctacaatcagaagtgcagtatcttttgtgctggttatttaaccccttgacacttaggtgctaatgtgcaaatgagggaacttggatcttgctgccaaggggttaaaattgggaacctaagttgctactaaatcatagttcaaaacctaataatgttgtcgttgttgctatctgatttcatagcagcagtcactaaattggaaacaaaaggttgcaacgtgacaaaaaaaattgtgtagtatttaccagcaccattcagtaatacagccttaaccatacctccttgaactacttcataacttgtcaagaaaagcagtttgcagcaagggcatgtggtgtgcacctagtattaaaattgctttgtcttaaaattgaacatgaggatattaaaaatacattgtgaagaagactgcttatctcagagtgaagatactgcggctgaaaagcactagtttgatataaaattaaaatgaccaaaaccctccaactttgaagctaaagaaggtaaacctttccattattgcattacatgttgtggaatctctcgagtgcaaagactgtctagttatttatcaggctatttctactgatgaactgcttcaggtgggggagggaaacttatttttatttgcctgatttaagtgtctgagaaacaaatctttgttctcttaggctgcaatggaacaactttaccagggttttggcatttcctttcctttcctttataaaacatgctcagcaaactgcaccagttaactacagtttggtaaattgttatgttaacaattatgacatctgcaatgttttataaagcaactaatttaataaaatcactgttgtgaggacttaaattttgtgttacctcccaagagatactttttgagagtatagaacacagctcttgggagtacagttctctacgttctctactaaatcttaataaatgcttgacatagttacagctttaaaacatgagtgatttgccaggtccttatgttgtcaccatagagcaacaaaggtatagggctgccttcctcttatttatttggggacattattttgttatttagataccaaggcctaattaattaagtacctataagaactatttatttggagtaactgagcctgtaactcaggtttatggctgttaagtatagattggggaatctttattatgtcttctcctaagcagtttaaccaaatgtgtggttagtgtttttttattcccctaagacagaaagaacaaaaaatgttttaaatttctcttatataggaaataataggaacgtcaaagctctgtatacctactaagtggaaaacaagaccatcatctaagtgatttgagaaattaacaaaagtagtgactacacagcaataattacagtaaattaaataaagattcctttaaggcagacaagggctaagatttccttagcagtaataatgacatacactgaattgaaaatctattttattacagaaagatcagtttctaacaaatgaaaatgtatcacctgttccttaactgtgtaaataataattaaatttctttgaaactgg

SEQ ID NO: 354070 - DNA, 1912 bp, Homo sapiens
gggggcgtggcctcggctcggcgcacagtcagccacggtcccatcctgctccgcgccggtcaacgagagcaaacccagtgactcacctccgccgtgctaactcctcgctagctctccctctcacacacgctcacacccggctcgagatggcggcggcggcggcggcggcgggggactcggactcctgggacgccgacgctttctccgtggaagacccagtgcggaaggtggggggcggcggcactgccggcggggaccgctgggaaggcgaggacgaggacgaggacgtcaaggataactgggatgacgatgatgatgaaaaaaaagaggaagcagaagtaaaaccagaggtaaaaatttcagaaaagaaaaaaatagcagagaagataaaagagaaagaacggcaacagaagaaaaggcaagaagaaattaaaaagaggttagaagaacccgaagaacctaaagtgctaacaccagaagaacaattagcagataaactgcggctaaagaaattacaggaagagtcagacctcgaattagcaaaggaaacttttggtgttaataatgcagtttatggaatagatgctatgaacccatcttcaagagatgactttacagagtttggaaagttactaaaagataaaattacacaatatgaaaagtcactatattatgccagttttttggaagtcttagttcgagatgtgtgtatttcattggaaattgatgacttgaaaaaaattaccaattcactgactgtgctttgcagtgaaaaacagaagcaagaaaagcaaagcaaagccaaaaagaagaagaaaggtgtggttcctggagggggattaaaagccaccatgaaagatgatctggcagattatggtggttatgatggaggatatgtacaagactatgaagacttcatgtgacattttatcttttcttggtgtcatctttatgttgcccacaatcccttgaacatgtagcacaacttcctttcctttcagttctgccaaatgctacaatcagaagtgcagtatcttttgtgctggttatttaaccccttgacacttaggtgctaatgtgcaaatgagggaacttggatcttgctgccaaggggttaaaattgggaacctaagttgctactaaatcatagttcaaaacctaataatgttgtcgttgttgctatctgatttcatagcagcagtcactaaattggaaacaaaaggttgcaacgtgacaaaaaaaattgtgtagtatttaccagcaccattcagtaatacagccttaaccatacctccttgaactacttcataacttgtcaagaaaagcagtttgcagcaagggcatgtggtgtgcacctagtattaaaattgctttgtcttaaaattgaacatgaggatattaaaaatacattgtgaagaagactgcttatctcagagtgaagatactgcggctgaaaagcactagtttgatataaaattaaaatgaccaaaaccctccaactttgaagctaaagaaggtaaacctttccattattgcattacatgttgtggaatctctcgagtgcaaagactgtctagttatttatcaggctatttctactgatgaactgcttcaggtgggggagggaaacttatttttatttgcctgatttaagtgtctgagaaacaaatctttgttctcttaggctgcaatggaacaactttaccagggttttggcatttcctttcctttcctttataaaacatgctcagcaaactgcaccagttaactacagtttggtaaattgttatgttaacaattatgacatctgcaatgttttataaagcaactaatttaataaaatcactgttgtgaggaaaaaaaatacccttgtaaatttaactgttagtccaaagaggaacagataaaacta

SEQ ID NO: 354071 - DNA, 1877 bp, Homo sapiens
  misc_feature (30)..(30): n is a, c, g, or t
  misc_feature (32)..(32): n is a, c, g, or t
  misc_feature (47)..(47): n is a, c, g, or t
  misc_feature (51)..(51): n is a, c, g, or t
ggtggaagagagagagagggagattaggcnangtacgaggctggtgntgantcggccgagggtgctttgcagtgataaacagaagcagaaaagcaaagcaaagccaaaaagaagaagaaaggtgtggttcctggagggggattaaaagccaccatgaaagatgatctggcagattatggtggttatgatggaggatatgtacaagactatgaagacttcatgtgacattttatcttttcttggtgtcatctttatgttgcccacaatcccttgaacatgtagcacaacttcctttcctttcagttctgccaaatgctacaatcagaagtgcagtatcttttgtgctggttatttaaccccttgacacttaggtgctaatgtgcaaatgagggaacttggatcttgctgccaaggggttaaaattgggaacctaagttgctactaaatcatagttcaaaacctaataatgttgtcgttgttgctatctgatttcatagcagcagtcactaaattggaaacaaaaggttgcaacgtgacaaaaaaaattgtgtagtatttaccagcaccattcagtaatacagccttaaccatacctccttgaactacttcataacttgtcaagaaaagcagtttgcagcaagggcatgtggtgtgcacctagtattaaaattgctttgtcttaaaattgaacatgaggatattaaaaatacattgtgaagaagactgcttatctcagagtgaagatactgcggctgaaaagcactagtttgatataaaattaaaatgaccaaaaccctccaactttgaagctaaagaaggtaaacctttccattattgcattacatgttgtggaatctctcgagtgcaaagactgtctagttatttatcaggctatttctactgatgaactgcttcaggtgggggagggaaacttatttttatttgcctgatttaagtgtctgagaaacaaatctttgttctcttaggctgcaatggaacaactttaccagggttttggcatttcctttcctttcctttataaaacatgctcagcaaactgcaccagttaactacagtttggtaaattgttatgttaacaattatgacatctgcaatgttttataaagcaactaatttaataaaatcactgttgtgaggacttaaattttgtgttacctcccaagagatactttttgagagtatagaacacagctcttgggagtacagttctctacgttctctactaaatcttaataaatgcttgacatagttacagctttaaaacatgagtgatttgccaggtccttatgttgtcaccatagagcaacaaaggtatagggctgccttcctcttatttatttggggacattattttgttatttagataccaaggcctaattaattaagtacctataagaactatttatttggagtaactgagcctgtaactcaggtttatggctgttaagtatagattggggaatctttattatgtcttctcctaagcagtttaaccaaatgtgtggttagtgtttttttattcccctaagacagaaagaacaaaaaatgttttaaatttctcttatataggaaataataggaacgtcaaagctctgtatacctactaagtggaaaacaagaccatcatctaagtgatttgagaaattaacaaaagtagtgactacacagcaataattacagtaaattaaataaagattcctttaaggcagacaagggctaagatttccttagcagtaataatgacatacactgaattgaaaatctattttattacagaaagatcagtttctaacaaatgaaaatgtatcacctgttccttaactgtgtaaataataattaaatttctttgaaactgg

SEQ ID NO: 354072 - DNA, 1452 bp, Homo sapiens
gggggcgtggcctcggctcggcgcacagtcagccacggtcccatcctgctccgcgccggtcaacgagagcaaacccagtgactcacctccgccgtgctaactcctcgctagctctccctctcacacacgctcacacccggctcgagatggcggcggcggcggcggcggcgggggactcggactcctgggacgccgacgctttctccgtggaagacccagtgcggaaggtggggggcggcggcactgccggcggggaccgctgggaaggcgaggacgaggacgaggacgtcaaggataactgggatgacgatgatgatgaaaaaaaagaggaagcagaagtaaaaccagaggtaaaaatttcagaaaagaaaaaaatagcagagaagataaaagagaaagaacggcaacagaagaaaaggcaagaagaaattaaaaagaggttagaagaacccgaagaacctaaagtgctaacaccagaagaacaattagcagataaactgcggctaaagaaattacaggaagagtcagacctcgaattagcaaaggaaacttttggtgttaataatgcagtttatggaatagatgctatgaacccatcttcaagagatgactttacagagtttggaaagttactaaaagataaaattacacaatatgaaaagtcactatattatgccagttttttggaagtcttagttcgagatgtgtgtatttcattggaaattgatgacttgaaaaaaattaccaattcactgactgtgctttgcagtgaaaaacagaagcaagaaaagcaaagcaaagccaaaaagaagaagaaaggtgtggttcctggagggggattaaaagccaccatgaaagatgatctggcagattatggtggttatgatggaggatatgtacaagactatgaagacttcatgtgacattttatcttttcttggtgtcatctttatgttgcccacaatcccttgaacatgtagcacaacttcctttcctttcagttctgccaaatgctacaatcagaagtgcagtatcttttgtgctggttatttaaccccttgacacttaggtgctaatgtgcaaatgagggaacttggatcttgctgccaaggggttaaaattgggaacctaagttgctactaaatcatagttcaaaacctaataatgttgtcgttgttgctatctgatttcatagcagcagtcactaaattggaaacaaaaggttgcaacgtgacaaaaaaaattgtgtagtatttaccagcaccattcagtaatacagccttaaccatacctccttgaactacttcataacttgtcaagaaaagcagtttgcagcaagggcatgtggtgtgcacctagtattaaaattgctttgtcttaaaattgaacatgaggaacaccgtaatagctagaggaacaccgtaatagctagaggaacaccgtaatagctag

SEQ ID NO: 354073 - DNA, 818 bp, Homo sapiens
gggggcgtggcctcggctcggcgcacagtcagccacggtcccatcctgctccgcgccggtcaacgagagcaaacccagtgactcacctccgccgtgctaactcctcgctagctctccctctcacacacgctcacacccggctcgagatggcggcggcggcggcggcggcgggggactcggactcctgggacgccgacgctttctccgtggaagacccagtgcggaaggtggggggcggcggcactgccggcggggaccgctgggaaggcgaggacgaggacgaggacgtcaaggataactgggatgacgatgatgatgaaaaaaaagaggaagcagaagtaaaaccagaggtaaaaatttcagaaaagaaaaaaatagcagagaagataaaagagaaagaacggcaacagaagaaaaggcaagaagaaattaaaaagaggttagaagaacccgaagaacctaaagtgctaacaccagaagaacaattagcagataaactgcggctaaagaaattacaggaagagtcagacctcgaattagcaaaggaaacttttggtgttaataatgcagtttatggaatagatgctatgaacccatcttcaagagatgactttacagagtttggaaagttactaaaagataaaattacacaatatgaaaagtcactatattatgccagttttttggaagtcttagttcgagatgtgtgtatttcatgtaagtaattctaatttctagcccctctgggtagatttttagtaggatgttctcttcaggaggttgaaggttattttttattttcaaggatactataatac

SEQ ID NO: 354074 - DNA, 808 bp, Homo sapiens
gggggcgtggcctcggctcggcgcacagtcagccacggtcccatcctgctccgcgccggtcaacgagagcaaacccagtgactcacctccgccgtgctaactcctcgctagctctccctctcacacacgctcacacccggctcgagatggcggcggcggcggcggcggcgggggactcggactcctgggacgccgacgctttctccgtggaagacccagtgcggaaggtggggggcggcggcactgccggcggggaccgctgggaaggcgaggacgaggacgaggacgtcaaggataactgggatgacgatgatgatgaaaaaaaagaggaagcagaagtaaaaccagaggtaaaaatttcagaaaagaaaaaaatagcagagaagataaaagagaaagaacggcaacagaagaaaaggcaagaagaaattaaaaagaggttagaagaacccgaagaacctaaagtgctaacaccagaagaacaattagcagataaactgcggctaaagaaattacaggaagagtcagacctcgaattagcaaaggaaacttttggtgttaataatgcagtttatggaatagtttatgctgtacagcataaactattcaatgtttgtccttctctgcctgttgcacatcttgtaaaattggacaatggctctttagagagttatctgagtgtaagtaaattaatgttctcatttagatttatctcccagtgatttctactcagcgtttccagaaatcaggtctgcaaatgactagtcagaaccttgcttaacatgagattttaacacaacaatgaaat

SEQ ID NO: 354075 - DNA, 302 bp, Homo sapiens
tagattttgtagatcaggaatgtgggtgcaattggcacctatgattcagggtctctcacaaggctgcagtcatctcaaagcgctacttggggaggctgtttccaagctcactcatgcggcaattggcaggcctgaggtccttgttggctgcttgctggagagatatggtgtaagatacttcttcaagattggacagctggggaccttcttctgattaaccttaaaccaacttgtagccatagagacacctcacaaggcgtgtaactgacatcacgagatctggaacctcctaatattgcagt

SEQ ID NO: 354076 - DNA, 7148 bp, Homo sapiens
agatgtggggatcctggggcgggaggtgggggagtggggactggggctctgggcacttggggagcggagggggggaggcttaggactagtgaagccgcggacgaggtagtggggagacggagaaattggggagccatgaggttggggtgcggtcagggtggatctttgggttagggtagtttgaagtttgagtatcctcacgacatggcagctggattcctgagagagagtgatctgagagagtgacgaagacagaagccccagtgtcttttaagaatatggtgtaagatacttcttcaagattggacagctggggaccttcttctgattaaccttaaaccaacttgtagccatagagacacctcacaaggttcccatttttgttgttgttgttgttgattttctgctcacacctttcctgaccttgcaaccatgtatggaagtgcccgctctgttgggaaggtggagccgagcagccagagccctgggcgttcacccaggcttccacgttcccctcgcttgggtcaccgtcgaaccaacagtacgggagggagttcgggaagcagtgttggaggtggcagtgggaaaaccctttcaatggaaaatatacaatctttaaatgctgcctatgccacctctggccctatgtatctaagtgaccatgaaaatgtgggttcagaaacacctaaaagcaccatgacacttggccgttctgggggacgtctgccttacggtgttcggatgactgctatgggtagtagccccaatatagctagcagtggggttgctagtgacaccatagcatttggagagcatcacctccctcctgtgagtatggcatccactgtacctcactcccttcgtcaggcgagagataacacaatcatggatctgcagacacagctgaaggaagtattaagagaaaatgatctcttgcggaaggatgtggaagtaaaggagagcaaattgagttcttcaatgaatagcatcaagaccttctggagcccagagctgaagaaggaacgagccctgagaaaagatgaagcttccaaaatcaccatttggaaggaacagtacagagttgtacaggaggaaaaccagcacatgcagatgacaatccaggctctccaggatgaattgcggatccagagggacctgaatcagctgtttcagcaggatagtagcagcaggactggcgaaccttgtgtagcagagctgacagaggagaactttcagaggcttcatgctgagcatgagcggcaggccaaagagctgtttcttcttcgaaagacattggaggaaatggagctgcgtattgagactcaaaagcagaccctaaatgctcgggatgaatccattaagaagcttctggaaatgttgcagagcaaaggactttctgccaaggctaccgaggaagaccatgagagaacaagacgactggcagaggcagagatgcacgttcatcacctagaaagccttttggagcagaaggaaaaagagaacagtatgttgagagaggagatgcatcgaaggtttgagaatgctcctgattctgccaaaacaaaagctctgcaaactgttattgagatgaaggattcaaaaatttcctctatggagcgtgggcttcgagacctggaagaggaaattcagatgctgaaatcgaatggtgctttgagtactgaggaaagggaagaagaaatgaagcaaatggaagtgtatcggagccattctaaatttatgaaaaataaggtagaacaactgaaggaggaactaagttcgaaagaggctcaatgggaggagctgaaaaagaaagcggctggtcttcaggctgagattggccaggtgaaacaggagctgtccagaaaggacacagaactactcgccctgcagacaaagctagaaacactcacaaaccagttctcagatagtaaacagcacattgaagtgttgaaggagtccttgactgctaaggagcagagggctgccatcctgcagactgaggtggatgctctccgattgcgtttggaagagaaggaaaccatgttgaataaaaagacaaaacaaattcaggatatggctgaagagaaggggacacaagctggagagatacatgacctcaaggacatgttggatgtgaaggagcggaaggttaatgttcttcagaagaagattgaaaatcttcaagagcagcttagagacaaggaaaagcagatgagcagcttgaaagaacgggtcaaatccttgcaggctgacaccaccaacactgacactgccttgacaactttggaggaggcccttgcagagaaagagcggacaattgaacgcttaaaggagcagagggacagagatgagcgagagaagcaagaggaaattgataactacaaaaaagatcttaaagacttgaaggaaaaagtcagcctgttgcaaggcgacctttcagagaaagaggcttcacttttggatctgaaagagcatgcttcttctctggcatcctcaggactgaaaaaggactcacggcttaagacactagagattgctttggagcagaagaaggaggagtgtctgaaaatggaatcacaattgaaaaaggcacatgaggcagcattggaagccagagccagtccagagatgagtgaccgaatacagcacttggagagagagatcaccaggtacaaagatgaatctagcaaggcccaggcagaagttgatcgactcttagaaatcttgaaggaggtggaaaatgagaagaatgacaaagataagaagatagctgagttggaaagtctcacctcaaggcaagtgaaagaccagaataagaaggtagcaaatctgaagcacaaggaacaggtggaaaaaaagaagagtgcacaaatgttagaggaggcgcgacgacgggaggacaatctcaacgacagctctcagcagctacaggacagtctccgtaagaaggatgacaggattgaagagctggaagaagcactaagagaaagtgtacagataactgcagagcgggaaatggtgctagcacaagaggaatcagccaggaccaatgctgaaaaacaggtggaggagttactgatggccatggagaaggtaaagcaggaactagaatccatgaaagcaaagctgtcctccacccagcagtctctggcagaaaaggaaactcacttgactaatcttcgggcagagagaaggaaacacttagaggaagttctggagatgaagcaagaagctcttctggctgccattagtgaaaaagacgccaatatagctctcttggagctttcgtcctctaagaagaagacccaagaggaagtggctgccctgaagcgggagaaggatcgtctggtacagcagcttaagcagcagacgcaaaatcgaatgaagctaatggccgacaactacgaggatgaccacttcaaatcctcccattccaatcaaacaaatcacaagccctccccagaccaggatgaggaggagggtatatgggcatagccaatcagaggcttagttcagccattttgttcagaacgatcatccagcccctcttagaacttgaccaaaatagaagtaaattaaagttgtacattggacacctgacaaccctctgccatgaccgagaccccctgatcctccgtggactcactccaccagcttcctataacttggacgatgaccaggcggcttgggagaatgagctgcagaagatgacccgggggcagcttcaggatgagttagagaaaggtgaacgggacaatgcagaactgcaggagtttgccaacgccattcttcagcagatagcagaccattgtcccgacatcctagagcaagtggtcaacgccctggaagagtcctcttgaccctgctttatggggaagcctgaggtagtcaacccaggagccaagaaaagagaactacgaggaacaggtgcccggaaccttcttggcaccaaacactacaaacttcatcccaacttgctcacttgaagaagtgtgattccagcaccgtttctacatctgccatcttactctgcctttctgctttggatgtggtctctacactaaccttcttgatgtccagggtagataaagggtcgaatctctctgaagaactgccacctggtcatcagcagtggagaactgtgggagctggtggctctgccctgacagagagccatggagcagaggagcctctcacctcctgtcctctgacatgagaatgaaaccaggaatggacttggagttcaacaggctgagaggatgcctccaatggaccagagagctgagtgttctaatatcacaataggtgctttctcctaaaagggcaaaaaacaatctcaaaaagattagaaaaagagaaggggggaagggaagagaaaatcgactcttctttttactgtctcttctgcttactttccacatgagatgctttgtaccggggagctgtgagcaggcctcacgatggcttgggagcactcgttctcccaaggtctgagtcttcatccagccctgcctgtctgtcgcagccttcctcactctgttcctcggccagttaacaagaagatggtgtgaggtgttctccaccagtctctcctgtttgagactgttgacgttatcatactgaggtgttagatcaaatatctctaattgaagaacatgtgaggttgaaagagcaccagccagggcaacatagcgtgaccctgtctctacaaaaaattaaaaagagaacatacaaagttgacatatgagaccctgttgtccccgcctgcagctttgccccagtaacagatgcccgttgctcttgggctggtttcccctgaacacctccaagaggctgcctgccttgccagcacccgtgtcctgagctcctgcagcccagtggctgctgaagttgtgatccctcactcaccctgctagctttgcccttgactcgtcttctctgaacctcagcctcgtgcattgcctggaaccttcttctagcataaatgaaggtttttcctcctacacacattccttcctcggttatttcattcagagaatatttatgaaatgcctactgtgtgcaagtcatccatccttgaaaaggccacttctcagtgagggagagatgtagtggattctgtgagacatacctgctggagttgaagcagtaaatagcatgtccttcccctccccgatcttaaggtgtgttttctagaaaagttccctaatggaattcatgagtttgggggtctcagtcacccgcttgcctgtaggattccatttgatgattctggatttttgctgtttgttattgcccttagaggggctctgagtatctacttgtgggtggccatttcctgacatctgcatgtacctcgtggaattcagccagcttcatgttgcaaatcagaaagctgaccccaagactgcaaatcaatgaaggtattggcattgttaaggacgtagcgtagacaacagcagtcataaataattaggcaggaacttaacccaaatctagttctttgaccacctctaccaccagaacccagcagacactcacatctcctgataagagttgctggactcgatgtttttgttttgcattttctcctctccttccccacttactcagagaatttaaagtctgtagagtcagcacagccccatcagtccaggaacttcccaccaccagcccttgactgtcccattaactgacatggtcagatttccagctccccctactccctgctgtgaaacaatccctctccctgtgagaggaaactgtggagcgtttcttatcgaaggttaaatggactctgctcataaacctcttactgagatgcttcctgatagccaggctggccagagaggggtgcaggggttagatagtaagtggtggtcgtttgtggtcagttacctcaattctgttcattgcagtgcccgtaaaccatgtagaaagctcccagcactgaaaggcaggagtgttagcatctcgctttatccaccataacgtaaagaactgcggtgtgataacagccttcacggggccacggtggaaccaagacagcaggcgaggccatgcctaaacaagtggtctggcacgggcactggccagctgctctctccaagcaggtggcccagatcccacccacgtggactttctcatcaggtgcagcgcctgccactctcagccactgggtgtgtgactctcctcttcatctcagcattctccatcacttcccctccagaaaaacggatggaaggaagccctctgtgacactgcttctgagaagaagcatttccgggaccgatatcatctgtctggtctctgtgaacagcaaggaatcttcttgaccgttcttgggcactggaggctggctaggagttcagtaataaacgtggccttcgtgctgtagggcagagtggatgcagtttgtagctttcagagtgtctcattgagtctagatcattgaaccaacacttaaccaaatgtcccactcccatcacactaggacttgtcattccatgcccctctcctagtggtcatggtttcatatgggcatacaactgctactgaagttatatagccttgaaaactcagtgcaggttgcccttaattttccccaaacccctccatcggcaagtctagttgccctttagcacctaaagatctgcaccccaaaccaatgtcaccataaagagggcacgaagaagagtgggtgtgatcccaacggggttttgtaactgaagaagcccagtgtgagcttctcatcttttcatatacctctaacccccggtactcattgaatcattgatgaggtatctcaattgagatttgcaaggactttgataccatttgaaatggaaaaattttgaacgggctttaacatgtttaagaaatatggatggggccggccacagtggctcacgcctgtaatcccagaactctggaaggctgaggcaggcggatcacctgagatcaggagttcgaggccagcctggccaagatggcaaaaaccccgactctactaaaaatacaaaattagccaggcgtggtggcgtacgcctgtaatcccagctactcgggaggcaggagaatcgcttgagcctgggaggcagaggctgcggtgagccaagatcgtgtcactgcactccagcctgggtgac

SEQ ID NO: 354077 - DNA, 6227 bp, Homo sapiens
gctgtctagaggatcctgaaagaggggacagtaaaggagagcaaattgagttcttcaatgaatagcatcaagaccttctggagcccagagctgaagaaggaacgagccctgagaaaagatgaagcttccaaaatcaccatttggaaggaacagtacagagttgtacaggaggaaaaccagcacatgcagatgacaatccaggctctccaggatgaattgcggatccagagggacctgaatcagctgtttcagcaggatagtagcagcaggactggcgaaccttgtgtagcagagctgacagaggagaactttcagaggcttcatgctgagcatgagcggcaggccaaagagctgtttcttcttcgaaagacattggaggaaatggagctgcgtattgagactcaaaagcagaccctaaatgctcgggatgaatccattaagaagcttctggaaatgttgcagagcaaaggactttctgccaaggctaccgaggaagaccatgagagaacaagacgactggcagaggcagagatgcacgttcatcacctagaaagccttttggagcagaaggaaaaagagaacagtatgttgagagaggagatgcatcgaaggtttgagaatgctcctgattctgccaaaacaaaagctctgcaaactgttattgagatgaaggattcaaaaatttcctctatggagcgtgggcttcgagacctggaagaggaaattcagatgctgaaatcgaatggtgctttgagtactgaggaaagggaagaagaaatgaagcaaatggaagtgtatcggagccattctaaatttatgaaaaataaggtagaacaactgaaggaggaactaagttcgaaagaggctcaatgggaggagctgaaaaagaaagcggctggtcttcaggctgagattggccaggtgaaacaggagctgtccagaaaggacacagaactactcgccctgcagacaaagctagaaacactcacaaaccagttctcagatagtaaacagcacattgaagtgttgaaggagtccttgactgctaaggagcagagggctgccatcctgcagactgaggtggatgctctccgattgcgtttggaagagaaggaaaccatgttgaataaaaagacaaaacaaattcaggatatggctgaagagaaggggacacaagctggagagatacatgacctcaaggacatgttggatgtgaaggagcggaaggttaatgttcttcagaagaagattgaaaatcttcaagagcagcttagagacaaggaaaagcagatgagcagcttgaaagaacgggtcaaatccttgcaggctgacaccaccaacactgacactgccttgacaactttggaggaggcccttgcagagaaagagcggacaattgaacgcttaaaggagcagagggacagagatgagcgagagaagcaagaggaaattgataactacaaaaaagatcttaaagacttgaaggaaaaagtcagcctgttgcaaggcgacctttcagagaaagaggcttcacttttggatctgaaagagcatgcttcttctctggcatcctcaggactgaaaaaggactcacggcttaagacactagagattgctttggagcagaagaaggaggagtgtctgaaaatggaatcacaattgaaaaaggcacatgaggcagcattggaagccagagccagtccagagatgagtgaccgaatacagcacttggagagagagatcaccaggtacaaagatgaatctagcaaggcccaggcagaagttgatcgactcttagaaatcttgaaggaggtggaaaatgagaagaatgacaaagataagaagatagctgagttggaaagtctcacctcaaggcaagtgaaagaccagaataagaaggtagcaaatctgaagcacaaggaacaggtggaaaaaaagaagagtgcacaaatgttagaggaggcgcgacgacgggaggacaatctcaacgacagctctcagcagctacaggacagtctccgtaagaaggatgacaggattgaagagctggaagaagcactaagagaaagtgtacagataactgcagagcgggaaatggtgctagcacaagaggaatcagccaggaccaatgctgaaaaacaggtggaggagttactgatggccatggagaaggtaaagcaggaactagaatccatgaaagcaaagctgtcctccacccagcagtctctggcagaaaaggaaactcacttgactaatcttcgggcagagagaaggaaacacttagaggaagttctggagatgaagcaagaagctcttctggctgccattagtgaaaaagacgccaatatagctctcttggagctttcgtcctctaagaagaagacccaagaggaagtggctgccctgaagcgggagaaggatcgtctggtacagcagcttaagcagcagacgcaaaatcgaatgaagctaatggccgacaactacgaggatgaccacttcaaatcctcccattccaatcaaacaaatcacaagccctccccagaccaggatgaggaggagggtatatgggcatagccaatcagaggcttagttcagccattttgttcagaacgatcatccagcccctcttagaacttgaccaaaatagaagtaaattaaagttgtacattggacacctgacaaccctctgccatgaccgagaccccctgatcctccgtggactcactccaccagcttcctataacttggacgatgaccaggcggcttgggagaatgagctgcagaagatgacccgggggcagcttcaggatgagttagagaaaggtgaacgggacaatgcagaactgcaggagtttgccaacgccattcttcagcagatagcagaccattgtcccgacatcctagagcaagtggtcaacgccctggaagagtcctcttgaccctgctttatggggaagcctgaggtagtcaacccaggagccaagaaaagagaactacgaggaacaggtgcccggaaccttcttggcaccaaacactacaaacttcatcccaacttgctcacttgaagaagtgtgattccagcaccgtttctacatctgccatcttactctgcctttctgctttggatgtggtctctacactaaccttcttgatgtccagggtagataaagggtcgaatctctctgaagaactgccacctggtcatcagcagtggagaactgtgggagctggtggctctgccctgacagagagccatggagcagaggagcctctcacctcctgtcctctgacatgagaatgaaaccaggaatggacttggagttcaacaggctgagaggatgcctccaatggaccagagagctgagtgttctaatatcacaataggtgctttctcctaaaagggcaaaaaacaatctcaaaaagattagaaaaagagaaggggggaagggaagagaaaatcgactcttctttttactgtctcttctgcttactttccacatgagatgctttgtaccggggagctgtgagcaggcctcacgatggcttgggagcactcgttctcccaaggtctgagtcttcatccagccctgcctgtctgtcgcagccttcctcactctgttcctcggccagttaacaagaagatggtgtgaggtgttctccaccagtctctcctgtttgagactgttgacgttatcatactgaggtgttagatcaaatatctctaattgaagaacatgtgaggttgaaagagcaccagccagggcaacatagcgtgaccctgtctctacaaaaaattaaaaagagaacatacaaagttgacatatgagaccctgttgtccccgcctgcagctttgccccagtaacagatgcccgttgctcttgggctggtttcccctgaacacctccaagaggctgcctgccttgccagcacccgtgtcctgagctcctgcagcccagtggctgctgaagttgtgatccctcactcaccctgctagctttgcccttgactcgtcttctctgaacctcagcctcgtgcattgcctggaaccttcttctagcataaatgaaggtttttcctcctacacacattccttcctcggttatttcattcagagaatatttatgaaatgcctactgtgtgcaagtcatccatccttgaaaaggccacttctcagtgagggagagatgtagtggattctgtgagacatacctgctggagttgaagcagtaaatagcatgtccttcccctccccgatcttaaggtgtgttttctagaaaagttccctaatggaattcatgagtttgggggtctcagtcacccgcttgcctgtaggattccatttgatgattctggatttttgctgtttgttattgcccttagaggggctctgagtatctacttgtgggtggccatttcctgacatctgcatgtacctcgtggaattcagccagcttcatgttgcaaatcagaaagctgaccccaagactgcaaatcaatgaaggtattggcattgttaaggacgtagcgtagacaacagcagtcataaataattaggcaggaacttaacccaaatctagttctttgaccacctctaccaccagaacccagcagacactcacatctcctgataagagttgctggactcgatgtttttgttttgcattttctcctctccttccccacttactcagagaatttaaagtctgtagagtcagcacagccccatcagtccaggaacttcccaccaccagcccttgactgtcccattaactgacatggtcagatttccagctccccctactccctgctgtgaaacaatccctctccctgtgagaggaaactgtggagcgtttcttatcgaaggttaaatggactctgctcataaacctcttactgagatgcttcctgatagccaggctggccagagaggggtgcaggggttagatagtaagtggtggtcgtttgtggtcagttacctcaattctgttcattgcagtgcccgtaaaccatgtagaaagctcccagcactgaaaggcaggagtgttagcatctcgctttatccaccataacgtaaagaactgcggtgtgataacagccttcacggggccacggtggaaccaagacagcaggcgaggccatgcctaaacaagtggtctggcacgggcactggccagctgctctctccaagcaggtggcccagatcccacccacgtggactttctcatcaggtgcagcgcctgccactctcagccactgggtgtgtgactctcctcttcatctcagcattctccatcacttcccctccagaaaaacggatggaaggaagccctctgtgacactgcttctgagaagaagcatttccgggaccgatatcatctgtctggtctctgtgaacagcaaggaatcttcttgaccgttcttgggcactggaggctggctaggagttcagtaataaacgtggccttcgtgctgtagggcagagtggatgcagtttgtagctttcagagtgtctcattgagtctagatcattgaaccaacacttaaccaaatgtcccactcccatcacactaggacttgtcattccatgcccctctcctagtggtcatggtttcatatgggcatacaactgctactgaagttatatagccttgaaaactcagtgcaggttgcccttaattttccccaaacccctccatcggcaagtctagttgccctttagcacctaaagatctgcaccccaaaccaatgtcaccataaagagggcacgaagaagagtgggtgtgatcccaacggggttttgtaactgaagaagcccagtgtgagcttctcatcttttcatatacctctaacccccggtactcattgaatcattgatgaggtatctcaattgagatttgcaaggactttgataccatttgaaatggaaaaattttgaacgggctttaacatgtttaagaaatatggatggggccggccacagtggctcacgcctgtaatcccagaactctggaaggctgaggcaggcggatcacctgagatcaggagttcgaggccagcctggccaagatggcaaaaaccccgactctactaaaaatacaaaattagccaggcgtggtggcgtacgcctgtaatcccagctactcgggaggcaggagaatcgcttgagcctgggaggcagaggctgcggtgagccaagatcgtgtcactgcactccagcctgggtgac

SEQ ID NO: 354078 - DNA, 5579 bp, Homo sapiens
tcgagctcggcaccctgattgcatttagaagacacaataaatgaaaactggacatttccctattggttgaataagtttagtggttttttttggctcagggttggggagatccaaggttatgtcatgcaaaaagatgaatatgacctatcacacagttcgtgctgcatttagtttcatattttgtgactcagatctgtgaaagatacagataagaggtgtttgttttatttcttttttccttaaagtgttttacttcttttctagattggccaggtgaaacaggagctgtccagaaaggacacagaactactcgccctgcagacaaagctagaaacactcacaaaccagttctcagatagtaaacagcacattgaagtgttgaaggagtccttgactgctaaggagcagagggctgccatcctgcagactgaggtggatgctctccgattgcgtttggaagagaaggaaaccatgttgaataaaaagacaaaacaaattcaggatatggctgaagagaaggggacacaagctggagagatacatgacctcaaggacatgttggatgtgaaggagcggaaggttaatgttcttcagaagaagattgaaaatcttcaagagcagcttagagacaaggaaaagcagatgagcagcttgaaagaacgggtcaaatccttgcaggctgacaccaccaacactgacactgccttgacaactttggaggaggcccttgcagagaaagagcggacaattgaacgcttaaaggagcagagggacagagatgagcgagagaagcaagaggaaattgataactacaaaaaagatcttaaagacttgaaggaaaaagtcagcctgttgcaaggcgacctttcagagaaagaggcttcacttttggatctgaaagagcatgcttcttctctggcatcctcaggactgaaaaaggactcacggcttaagacactagagattgctttggagcagaagaaggaggagtgtctgaaaatggaatcacaattgaaaaaggcacatgaggcagcattggaagccagagccagtccagagatgagtgaccgaatacagcacttggagagagagatcaccaggtacaaagatgaatctagcaaggcccaggcagaagttgatcgactcttagaaatcttgaaggaggtggaaaatgagaagaatgacaaagataagaagatagctgagttggaaagtctcacctcaaggcaagtgaaagaccagaataagaaggtagcaaatctgaagcacaaggaacaggtggaaaaaaagaagagtgcacaaatgttagaggaggcgcgacgacgggaggacaatctcaacgacagctctcagcagctacaggacagtctccgtaagaaggatgacaggattgaagagctggaagaagcactaagagaaagtgtacagataactgcagagcgggaaatggtgctagcacaagaggaatcagccaggaccaatgctgaaaaacaggtggaggagttactgatggccatggagaaggtaaagcaggaactagaatccatgaaagcaaagctgtcctccacccagcagtctctggcagaaaaggaaactcacttgactaatcttcgggcagagagaaggaaacacttagaggaagttctggagatgaagcaagaagctcttctggctgccattagtgaaaaagacgccaatatagctctcttggagctttcgtcctctaagaagaagacccaagaggaagtggctgccctgaagcgggagaaggatcgtctggtacagcagcttaagcagcagacgcaaaatcgaatgaagctaatggccgacaactacgaggatgaccacttcaaatcctcccattccaatcaaacaaatcacaagccctccccagaccaggatgaggaggagggtatatgggcatagccaatcagaggcttagttcagccattttgttcagaacgatcatccagcccctcttagaacttgaccaaaatagaagtaaattaaagttgtacattggacacctgacaaccctctgccatgaccgagaccccctgatcctccgtggactcactccaccagcttcctataacttggacgatgaccaggcggcttgggagaatgagctgcagaagatgacccgggggcagcttcaggatgagttagagaaaggtgaacgggacaatgcagaactgcaggagtttgccaacgccattcttcagcagatagcagaccattgtcccgacatcctagagcaagtggtcaacgccctggaagagtcctcttgaccctgctttatggggaagcctgaggtagtcaacccaggagccaagaaaagagaactacgaggaacaggtgcccggaaccttcttggcaccaaacactacaaacttcatcccaacttgctcacttgaagaagtgtgattccagcaccgtttctacatctgccatcttactctgcctttctgctttggatgtggtctctacactaaccttcttgatgtccagggtagataaagggtcgaatctctctgaagaactgccacctggtcatcagcagtggagaactgtgggagctggtggctctgccctgacagagagccatggagcagaggagcctctcacctcctgtcctctgacatgagaatgaaaccaggaatggacttggagttcaacaggctgagaggatgcctccaatggaccagagagctgagtgttctaatatcacaataggtgctttctcctaaaagggcaaaaaacaatctcaaaaagattagaaaaagagaaggggggaagggaagagaaaatcgactcttctttttactgtctcttctgcttactttccacatgagatgctttgtaccggggagctgtgagcaggcctcacgatggcttgggagcactcgttctcccaaggtctgagtcttcatccagccctgcctgtctgtcgcagccttcctcactctgttcctcggccagttaacaagaagatggtgtgaggtgttctccaccagtctctcctgtttgagactgttgacgttatcatactgaggtgttagatcaaatatctctaattgaagaacatgtgaggttgaaagagcaccagccagggcaacatagcgtgaccctgtctctacaaaaaattaaaaagagaacatacaaagttgacatatgagaccctgttgtccccgcctgcagctttgccccagtaacagatgcccgttgctcttgggctggtttcccctgaacacctccaagaggctgcctgccttgccagcacccgtgtcctgagctcctgcagcccagtggctgctgaagttgtgatccctcactcaccctgctagctttgcccttgactcgtcttctctgaacctcagcctcgtgcattgcctggaaccttcttctagcataaatgaaggtttttcctcctacacacattccttcctcggttatttcattcagagaatatttatgaaatgcctactgtgtgcaagtcatccatccttgaaaaggccacttctcagtgagggagagatgtagtggattctgtgagacatacctgctggagttgaagcagtaaatagcatgtccttcccctccccgatcttaaggtgtgttttctagaaaagttccctaatggaattcatgagtttgggggtctcagtcacccgcttgcctgtaggattccatttgatgattctggatttttgctgtttgttattgcccttagaggggctctgagtatctacttgtgggtggccatttcctgacatctgcatgtacctcgtggaattcagccagcttcatgttgcaaatcagaaagctgaccccaagactgcaaatcaatgaaggtattggcattgttaaggacgtagcgtagacaacagcagtcataaataattaggcaggaacttaacccaaatctagttctttgaccacctctaccaccagaacccagcagacactcacatctcctgataagagttgctggactcgatgtttttgttttgcattttctcctctccttccccacttactcagagaatttaaagtctgtagagtcagcacagccccatcagtccaggaacttcccaccaccagcccttgactgtcccattaactgacatggtcagatttccagctccccctactccctgctgtgaaacaatccctctccctgtgagaggaaactgtggagcgtttcttatcgaaggttaaatggactctgctcataaacctcttactgagatgcttcctgatagccaggctggccagagaggggtgcaggggttagatagtaagtggtggtcgtttgtggtcagttacctcaattctgttcattgcagtgcccgtaaaccatgtagaaagctcccagcactgaaaggcaggagtgttagcatctcgctttatccaccataacgtaaagaactgcggtgtgataacagccttcacggggccacggtggaaccaagacagcaggcgaggccatgcctaaacaagtggtctggcacgggcactggccagctgctctctccaagcaggtggcccagatcccacccacgtggactttctcatcaggtgcagcgcctgccactctcagccactgggtgtgtgactctcctcttcatctcagcattctccatcacttcccctccagaaaaacggatggaaggaagccctctgtgacactgcttctgagaagaagcatttccgggaccgatatcatctgtctggtctctgtgaacagcaaggaatcttcttgaccgttcttgggcactggaggctggctaggagttcagtaataaacgtggccttcgtgctgtagggcagagtggatgcagtttgtagctttcagagtgtctcattgagtctagatcattgaaccaacacttaaccaaatgtcccactcccatcacactaggacttgtcattccatgcccctctcctagtggtcatggtttcatatgggcatacaactgctactgaagttatatagccttgaaaactcagtgcaggttgcccttaattttccccaaacccctccatcggcaagtctagttgccctttagcacctaaagatctgcaccccaaaccaatgtcaccataaagagggcacgaagaagagtgggtgtgatcccaacggggttttgtaactgaagaagcccagtgtgagcttctcatcttttcatatacctctaacccccggtactcattgaatcattgatgaggtatctcaattgagatttgcaaggactttgataccatttgaaatggaaaaattttgaacgggctttaacatgtttaagaaatatggatggggccggccacagtggctcacgcctgtaatcccagaactctggaaggctgaggcaggcggatcacctgagatcaggagttcgaggccagcctggccaagatggcaaaaaccccgactctactaaaaatacaaaattagccaggcgtggtggcgtacgcctgtaatcccagctactcgggaggcaggagaatcgcttgagcctgggaggcagaggctgcggtgagccaagatcgtgtcactgcactccagcctgggtgac

SEQ ID NO: 354079 - DNA, 5669 bp, Homo sapiens
caggagagcactgaatctctttctgcctcttttctacaggagatgcatcgaaggtttgagaatgctcctgattctgccaaaacaaaagctctgcaaactgttattgagatgaaggattcaaaaatttcctctatggagcgtgggcttcgagacctggaagaggaaattcagatgctgaaatcgaatggtgctttgagtactgaggaaagggaagaagaaatgaagcaaatggaagtgtatcggagccattctaaatttatgaaaaataaggtagaacaactgaaggaggaactaagttcgaaagaggctcaatgggaggagctgaaaaagaaagcggctggtcttcaggctgagattggccaggtgaaacaggagctgtccagaaaggacacagaactactcgccctgcagacaaagctagaaacactcacaaaccagttctcagatagtaaacagcacattgaagtgttgaaggagtccttgactgctaaggagcagagggctgccatcctgcagactgaggtggatgctctccgattgcgtttggaagagaaggaaaccatgttgaataaaaagacaaaacaaattcaggatatggctgaagagaaggggacacaagctggagagatacatgacctcaaggacatgttggatgtgaaggagcggaaggttaatgttcttcagaagaagattgaaaatcttcaagagcagcttagagacaaggaaaagcagatgagcagcttgaaagaacgggtcaaatccttgcaggctgacaccaccaacactgacactgccttgacaactttggaggaggcccttgcagagaaagagcggacaattgaacgcttaaaggagcagagggacagagatgagcgagagaagcaagaggaaattgataactacaaaaaagatcttaaagacttgaaggaaaaagtcagcctgttgcaaggcgacctttcagagaaagaggcttcacttttggatctgaaagagcatgcttcttctctggcatcctcaggactgaaaaaggactcacggcttaagacactagagattgctttggagcagaagaaggaggagtgtctgaaaatggaatcacaattgaaaaaggcacatgaggcagcattggaagccagagccagtccagagatgagtgaccgaatacagcacttggagagagagatcaccaggtacaaagatgaatctagcaaggcccaggcagaagttgatcgactcttagaaatcttgaaggaggtggaaaatgagaagaatgacaaagataagaagatagctgagttggaaagtctcacctcaaggcaagtgaaagaccagaataagaaggtagcaaatctgaagcacaaggaacaggtggaaaaaaagaagagtgcacaaatgttagaggaggcgcgacgacgggaggacaatctcaacgacagctctcagcagctacaggacagtctccgtaagaaggatgacaggattgaagagctggaagaagcactaagagaaagtgtacagataactgcagagcgggaaatggtgctagcacaagaggaatcagccaggaccaatgctgaaaaacaggtggaggagttactgatggccatggagaaggtaaagcaggaactagaatccatgaaagcaaagctgtcctccacccagcagtctctggcagaaaaggaaactcacttgactaatcttcgggcagagagaaggaaacacttagaggaagttctggagatgaagcaagaagctcttctggctgccattagtgaaaaagacgccaatatagctctcttggagctttcgtcctctaagaagaagacccaagaggaagtggctgccctgaagcgggagaaggatcgtctggtacagcagcttaagcagcagacgcaaaatcgaatgaagctaatggccgacaactacgaggatgaccacttcaaatcctcccattccaatcaaacaaatcacaagccctccccagaccaggatgaggaggagggtatatgggcatagccaatcagaggcttagttcagccattttgttcagaacgatcatccagcccctcttagaacttgaccaaaatagaagtaaattaaagttgtacattggacacctgacaaccctctgccatgaccgagaccccctgatcctccgtggactcactccaccagcttcctataacttggacgatgaccaggcggcttgggagaatgagctgcagaagatgacccgggggcagcttcaggatgagttagagaaaggtgaacgggacaatgcagaactgcaggagtttgccaacgccattcttcagcagatagcagaccattgtcccgacatcctagagcaagtggtcaacgccctggaagagtcctcttgaccctgctttatggggaagcctgaggtagtcaacccaggagccaagaaaagagaactacgaggaacaggtgcccggaaccttcttggcaccaaacactacaaacttcatcccaacttgctcacttgaagaagtgtgattccagcaccgtttctacatctgccatcttactctgcctttctgctttggatgtggtctctacactaaccttcttgatgtccagggtagataaagggtcgaatctctctgaagaactgccacctggtcatcagcagtggagaactgtgggagctggtggctctgccctgacagagagccatggagcagaggagcctctcacctcctgtcctctgacatgagaatgaaaccaggaatggacttggagttcaacaggctgagaggatgcctccaatggaccagagagctgagtgttctaatatcacaataggtgctttctcctaaaagggcaaaaaacaatctcaaaaagattagaaaaagagaaggggggaagggaagagaaaatcgactcttctttttactgtctcttctgcttactttccacatgagatgctttgtaccggggagctgtgagcaggcctcacgatggcttgggagcactcgttctcccaaggtctgagtcttcatccagccctgcctgtctgtcgcagccttcctcactctgttcctcggccagttaacaagaagatggtgtgaggtgttctccaccagtctctcctgtttgagactgttgacgttatcatactgaggtgttagatcaaatatctctaattgaagaacatgtgaggttgaaagagcaccagccagggcaacatagcgtgaccctgtctctacaaaaaattaaaaagagaacatacaaagttgacatatgagaccctgttgtccccgcctgcagctttgccccagtaacagatgcccgttgctcttgggctggtttcccctgaacacctccaagaggctgcctgccttgccagcacccgtgtcctgagctcctgcagcccagtggctgctgaagttgtgatccctcactcaccctgctagctttgcccttgactcgtcttctctgaacctcagcctcgtgcattgcctggaaccttcttctagcataaatgaaggtttttcctcctacacacattccttcctcggttatttcattcagagaatatttatgaaatgcctactgtgtgcaagtcatccatccttgaaaaggccacttctcagtgagggagagatgtagtggattctgtgagacatacctgctggagttgaagcagtaaatagcatgtccttcccctccccgatcttaaggtgtgttttctagaaaagttccctaatggaattcatgagtttgggggtctcagtcacccgcttgcctgtaggattccatttgatgattctggatttttgctgtttgttattgcccttagaggggctctgagtatctacttgtgggtggccatttcctgacatctgcatgtacctcgtggaattcagccagcttcatgttgcaaatcagaaagctgaccccaagactgcaaatcaatgaaggtattggcattgttaaggacgtagcgtagacaacagcagtcataaataattaggcaggaacttaacccaaatctagttctttgaccacctctaccaccagaacccagcagacactcacatctcctgataagagttgctggactcgatgtttttgttttgcattttctcctctccttccccacttactcagagaatttaaagtctgtagagtcagcacagccccatcagtccaggaacttcccaccaccagcccttgactgtcccattaactgacatggtcagatttccagctccccctactccctgctgtgaaacaatccctctccctgtgagaggaaactgtggagcgtttcttatcgaaggttaaatggactctgctcataaacctcttactgagatgcttcctgatagccaggctggccagagaggggtgcaggggttagatagtaagtggtggtcgtttgtggtcagttacctcaattctgttcattgcagtgcccgtaaaccatgtagaaagctcccagcactgaaaggcaggagtgttagcatctcgctttatccaccataacgtaaagaactgcggtgtgataacagccttcacggggccacggtggaaccaagacagcaggcgaggccatgcctaaacaagtggtctggcacgggcactggccagctgctctctccaagcaggtggcccagatcccacccacgtggactttctcatcaggtgcagcgcctgccactctcagccactgggtgtgtgactctcctcttcatctcagcattctccatcacttcccctccagaaaaacggatggaaggaagccctctgtgacactgcttctgagaagaagcatttccgggaccgatatcatctgtctggtctctgtgaacagcaaggaatcttcttgaccgttcttgggcactggaggctggctaggagttcagtaataaacgtggccttcgtgctgtagggcagagtggatgcagtttgtagctttcagagtgtctcattgagtctagatcattgaaccaacacttaaccaaatgtcccactcccatcacactaggacttgtcattccatgcccctctcctagtggtcatggtttcatatgggcatacaactgctactgaagttatatagccttgaaaactcagtgcaggttgcccttaattttccccaaacccctccatcggcaagtctagttgccctttagcacctaaagatctgcaccccaaaccaatgtcaccataaagagggcacgaagaagagtgggtgtgatcccaacggggttttgtaactgaagaagcccagtgtgagcttctcatcttttcatatacctctaacccccggtactcattgaatcattgatgaggtatctcaattgagatttgcaaggactttgataccatttgaaatggaaaaattttgaacgggctttaacatgtttaagaaatatggatggggccggccacagtggctcacgcctgtaatcccagaactctggaaggctgaggcaggcggatcacctgagatcaggagttcgaggccagcctggccaagatggcaaaaaccccgactctactaaaaatacaaaattagccaggcgtggtggcgtacgcctgtaatcccagctactcgggaggcaggagaatcgcttgagcctgggaggcagaggctgcggtgagccaagatcgtgtcactgcactccagcctgggtgac

SEQ ID NO: 354080 - DNA, 3965 bp, Homo sapiens
agatgtggggatcctggggcgggaggtgggggagtggggactggggctctgggcacttggggagcggagggggggaggcttaggactagtgaagccgcggacgaggtagtggggagacggagaaattggggagccatgaggttggggtgcggtcagggtggatctttgggttagggtagtttgaagtttgagtatcctcacgacatggcagctggattcctgagagagagtgatctgagagagtgacgaagacagaagccccagtgtcttttaagaatatggtgtaagatacttcttcaagattggacagctggggaccttcttctgattaaccttaaaccaacttgtagccatagagacacctcacaaggttcccatttttgttgttgttgttgttgattttctgctcacacctttcctgaccttgcaaccatgtatggaagtgcccgctctgttgggaaggtggagccgagcagccagagccctgggcgttcacccaggcttccacgttcccctcgcttgggtcaccgtcgaaccaacagtacgggagggagttcgggaagcagtgttggaggtggcagtgggaaaaccctttcaatggaaaatatacaatctttaaatgctgcctatgccacctctggccctatgtatctaagtgaccatgaaaatgtgggttcagaaacacctaaaagcaccatgacacttggccgttctgggggacgtctgccttacggtgttcggatgactgctatgggtagtagccccaatatagctagcagtggggttgctagtgacaccatagcatttggagagcatcacctccctcctgtgagtatggcatccactgtacctcactcccttcgtcaggcgagagataacacaatcatggatctgcagacacagctgaaggaagtattaagagaaaatgatctcttgcggaaggatgtggaagtaaaggagagcaaattgagttcttcaatgaatagcatcaagaccttctggagcccagagctgaagaaggaacgagccctgagaaaagatgaagcttccaaaatcaccatttggaaggaacagtacagagttgtacaggaggaaaaccagcacatgcagatgacaatccaggctctccaggatgaattgcggatccagagggacctgaatcagctgtttcagcaggatagtagcagcaggactggcgaaccttgtgtagcagagctgacagaggagaactttcagaggcttcatgctgagcatgagcggcaggccaaagagctgtttcttcttcgaaagacattggaggaaatggagctgcgtattgagactcaaaagcagaccctaaatgctcgggatgaatccattaagaagcttctggaaatgttgcagagcaaaggactttctgccaaggctaccgaggaagaccatgagagaacaagacgactggcagaggcagagatgcacgttcatcacctagaaagccttttggagcagaaggaaaaagagaacagtatgttgagagaggagatgcatcgaaggtttgagaatgctcctgattctgccaaaacaaaagctctgcaaactgttattgagatgaaggattcaaaaatttcctctatggagcgtgggcttcgagacctggaagaggaaattcagatgctgaaatcgaatggtgctttgagtactgaggaaagggaagaagaaatgaagcaaatggaagtgtatcggagccattctaaatttatgaaaaataaggtagaacaactgaaggaggaactaagttcgaaagaggctcaatgggaggagctgaaaaagaaagcggctggtcttcaggctgagattggccaggtgaaacaggagctgtccagaaaggacacagaactactcgccctgcagacaaagctagaaacactcacaaaccagttctcagatagtaaacagcacattgaagtgttgaaggagtccttgactgctaaggagcagagggctgccatcctgcagactgaggtggatgctctccgattgcgtttggaagagaaggaaaccatgttgaataaaaagacaaaacaaattcaggatatggctgaagagaaggggacacaagctggagagatacatgacctcaaggacatgttggatgtgaaggagcggaaggttaatgttcttcagaagaagattgaaaatcttcaagagcagcttagagacaaggaaaagcagatgagcagcttgaaagaacgggtcaaatccttgcaggctgacaccaccaacactgacactgccttgacaactttggaggaggcccttgcagagaaagagcggacaattgaacgcttaaaggagcagagggacagagatgagcgagagaagcaagaggaaattgataactacaaaaaagatcttaaagacttgaaggaaaaagtcagcctgttgcaaggcgacctttcagagaaagaggcttcacttttggatctgaaagagcatgcttcttctctggcatcctcaggactgaaaaaggactcacggcttaagacactagagattgctttggagcagaagaaggaggagtgtctgaaaatggaatcacaattgaaaaaggcacatgaggcagcattggaagccagagccagtccagagatgagtgaccgaatacagcacttggagagagagatcaccaggtacaaagatgaatctagcaaggcccaggcagaagttgatcgactcttagaaatcttgaaggaggtggaaaatgagaagaatgacaaagataagaagatagctgagttggaaagtctcacctcaaggcaagtgaaagaccagaataagaaggtagcaaatctgaagcacaaggaacaggtggaaaaaaagaagagtgcacaaatgttagaggaggcgcgacgacgggaggacaatctcaacgacagctctcagcagctacaggacagtctccgtaagaaggatgacaggattgaagagctggaagaagcactaagagaaagtgtacagataactgcagagcgggaaatggtgctagcacaagaggaatcagccaggaccaatgctgaaaaacaggtggaggagttactgatggccatggagaaggtaaagcaggaactagaatccatgaaagcaaagctgtcctccacccagcagtctctggcagaaaaggaaactcacttgactaatcttcgggcagagagaaggaaacacttagaggaagttctggagatgaagcaagaagctcttctggctgccattagtgaaaaagacgccaatatagctctcttggagctttcgtcctctaagaagaagacccaagaggaagtggctgccctgaagcgggagaaggatcgtctggtacagcagcttaagcagcagacgcaaaatcgaatgaagctaatggccgacaactacgaggatgaccacttcaaatcctcccattccaatcaaacaaatcacaagccctccccagaccagatcatccagcccctcttagaacttgaccaaaatagaagtaaattaaagttgtacattggacacctgacaaccctctgccatgaccgagaccccctgatcctccgtggactcactccaccagcttcctataacttggacgatgaccaggcggcttgggagaatgagctgcagaagatgacccgggggcaggtgagcctctcactcaaactttgaaaagagcctgtgaaaatccagttgctgtgtaggttgatgcagtgggggctaccttggggaatccagttgccgtgtagttgatgcagtgggggctaccttggggaatcccgttgctgtgtaggttcatgcagtgggagctaccttggggaattccatgtttagattcaagatttggggggtggggaggggtttccagatataatttttaaactgatttttaattgattttttactgttttatttttttaattcaccaattaaaaatgtatgtttctcatgtacaa

SEQ ID NO: 354081 - DNA, 3430 bp, Homo sapiens
agatgtggggatcctggggcgggaggtgggggagtggggactggggctctgggcacttggggagcggagggggggaggcttaggactagtgaagccgcggacgaggtagtggggagacggagaaattggggagccatgaggttggggtgcggtcagggtggatctttgggttagggtagtttgaagtttgagtatcctcacgacatggcagctggattcctgagagagagtgatctgagagagtgacgaagacagaagccccagtgtcttttaagaatatggtgtaagatacttcttcaagattggacagctggggaccttcttctgattaaccttaaaccaacttgtagccatagagacacctcacaaggttcccatttttgttgttgttgttgttgattttctgctcacacctttcctgaccttgcaaccatgtatggaagtgcccgctctgttgggaaggtggagccgagcagccagagccctgggcgttcacccaggcttccacgttcccctcgcttgggtcaccgtcgaaccaacagtacgggagggagttcgggaagcagtgttggaggtggcagtgggaaaaccctttcaatggaaaatatacaatctttaaatgctgcctatgccacctctggccctatgtatctaagtgaccatgaaaatgtgggttcagaaacacctaaaagcaccatgacacttggccgttctgggggacgtctgccttacggtgttcggatgactgctatgggtagtagccccaatatagctagcagtggggttgctagtgacaccatagcatttggagagcatcacctccctcctgtgagtatggcatccactgtacctcactcccttcgtcaggcgagagataacacaatcatggatctgcagacacagctgaaggaagtattaagagaaaatgatctcttgcggaaggatgtggaagtaaaggagagcaaattgagttcttcaatgaatagcatcaagaccttctggagcccagagctgaagaaggaacgagccctgagaaaagatgaagcttccaaaatcaccatttggaaggaacagtacagagttgtacaggaggaaaaccagcacatgcagatgacaatccaggctctccaggatgaattgcggatccagagggacctgaatcagctgtttcagcaggatagtagcagcaggactggcgaaccttgtgtagcagagctgacagaggagaactttcagaggcttcatgctgagcatgagcggcaggccaaagagctgtttcttcttcgaaagacattggaggaaatggagctgcgtattgagactcaaaagcagaccctaaatgctcgggatgaatccattaagaagcttctggaaatgttgcagagcaaaggactttctgccaaggctaccgaggaagaccatgagagaacaagacgactggcagaggcagagatgcacgttcatcacctagaaagccttttggagcagaaggaaaaagagaacagtatgttgagagaggagatgcatcgaaggtttgagaatgctcctgattctgccaaaacaaaagctctgcaaactgttattgagatgaaggattcaaaaatttcctctatggagcgtgggcttcgagacctggaagaggaaattcagatgctgaaatcgaatggtgctttgagtactgaggaaagggaagaagaaatgaagcaaatggaagtgtatcggagccattctaaatttatgaaaaataaggtagaacaactgaaggaggaactaagttcgaaagaggctcaatgggaggagctgaaaaagaaagcggctggtcttcaggctgagattggccaggtgaaacaggagctgtccagaaaggacacagaactactcgccctgcagacaaagctagaaacactcacaaaccagttctcagatagtaaacagcacattgaagtgttgaaggagtccttgatgtcccattaactgacatggtcagatttccagctccccctactccctgctgtgaaacaatccctctccctgtgagaggaaactgtggagcgtttcttatcgaaggttaaatggactctgctcataaacctcttactgagatgcttcctgatagccaggctggccagagaggggtgcaggggttagatagtaagtggtggtcgtttgtggtcagttacctcaattctgttcattgcagtgcccgtaaaccatgtagaaagctcccagcactgaaaggcaggagtgttagcatctcgctttatccaccataacgtaaagaactgcggtgtgataacagccttcacggggccacggtggaaccaagacagcaggcgaggccatgcctaaacaagtggtctggcacgggcactggccagctgctctctccaagcaggtggcccagatcccacccacgtggactttctcatcaggtgcagcgcctgccactctcagccactgggtgtgtgactctcctcttcatctcagcattctccatcacttcccctccagaaaaacggatggaaggaagccctctgtgacactgcttctgagaagaagcatttccgggaccgatatcatctgtctggtctctgtgaacagcaaggaatcttcttgaccgttcttgggcactggaggctggctaggagttcagtaataaacgtggccttcgtgctgtagggcagagtggatgcagtttgtagctttcagagtgtctcattgagtctagatcattgaaccaacacttaaccaaatgtcccactcccatcacactaggacttgtcattccatgcccctctcctagtggtcatggtttcatatgggcatacaactgctactgaagttatatagccttgaaaactcagtgcaggttgcccttaattttccccaaacccctccatcggcaagtctagttgccctttagcacctaaagatctgcaccccaaaccaatgtcaccataaagagggcacgaagaagagtgggtgtgatcccaacggggttttgtaactgaagaagcccagtgtgagcttctcatcttttcatatacctctaacccccggtactcattgaatcattgatgaggtatctcaattgagatttgcaaggactttgataccatttgaaatggaaaaattttgaacgggctttaacatgtttaagaaatatggatggggccggccacagtggctcacgcctgtaatcccagaactctggaaggctgaggcaggcggatcacctgagatcaggagttcgaggccagcctggccaagatggcaaaaaccccgactctactaaaaatacaaaattagccaggcgtggtggcgtacgcctgtaatcccagctactcgggaggcaggagaatcgcttgagcctgggaggcagaggctgcggtgagccaagatcgtgtcactgcactccagcctgggtgac

SEQ ID NO: 354082 - DNA, 2169 bp, Homo sapiens
agatgtggggatcctggggcgggaggtgggggagtggggactggggctctgggcacttggggagcggagggggggaggcttaggactagtgaagccgcggacgaggtagtggggagacggagaaattggggagccatgaggttggggtgcggtcagggtggatctttgggttagggtagtttgaagtttgagtatcctcacgacatggcagctggattcctgagagagagtgatctgagagagtgacgaagacagaagccccagtgtcttttaagaatatggtgtaagatacttcttcaagattggacagctggggaccttcttctgattaaccttaaaccaacttgtagccatagagacacctcacaaggttcccatttttgttgttgttgttgttgattttctgctcacacctttcctgaccttgcaaccatgtatggaagtgcccgctctgttgggaaggtggagccgagcagccagagccctgggcgttcacccaggcttccacgttcccctcgcttgggtcaccgtcgaaccaacagtacgggagggagttcgggaagcagtgttggaggtggcagtgggaaaaccctttcaatggaaaatatacaatctttaaatgctgcctatgccacctctggccctatgtatctaagtgaccatgaaaatgtgggttcagaaacacctaaaagcaccatgacacttggccgttctgggggacgtctgccttacggtgttcggatgactgctatgggtagtagccccaatatagctagcagtggggttgctagtgacaccatagcatttggagagcatcacctccctcctgtgagtatggcatccactgtacctcactcccttcgtcaggcgagagataacacaatcatggatctgcagacacagctgaaggaagtattaagagaaaatgatctcttgcggaaggatgtggaagtaaaggagagcaaattgagttcttcaatgaatagcatcaagaccttctggagcccagagctgaagaaggaacgagccctgagaaaagatgaagcttccaaaatcaccatttggaaggaacagtacagagttgtacaggaggaaaaccagcacatgcagatgacaatccaggctctccaggatgaattgcggatccagagggacctgaatcagctgtttcagcaggatagtagcagcaggactggcgaaccttgtgtagcagagctgacagaggagaactttcagaggcttcatgctgagcatgagcggcaggccaaagagctgtttcttcttcgaaagacattggaggaaatggagctgcgtattgagactcaaaagcagaccctaaatgctcgggatgaatccattaagaagcttctggaaatgttgcagagcaaaggactttctgccaaggctaccgaggaagaccatgagagaacaagacgactggcagaggcagagatgcacgttcatcacctagaaagccttttggagcagaaggaaaaagagaacagtatgttgagagaggagatgcatcgaaggtttgagaatgctcctgattctgccaaaacaaaagctctgcaaactgttattgagatgaaggattcaaaaatttcctctatggagcgtgggcttcgagacctggaagaggaaattcagatgctgaaatcgaatggtgctttgagtactgaggaaagggaagaagaaatgaagcaaatggaagtgtatcggagccattctaaatttatgaaaaataaggtagaacaactgaaggaggaactaagttcgaaagaggctcaatgggaggagctgaaaaagaaagcggctggtcttcaggctgagattggccaggtgaaacaggagctgtccagaaaggacacagaactactcgccctgcagacaaagctagaaacactcacaaaccagttctcagatagtaaacagcacattgaagtgttgaaggagtccttgactgctaaggagcagagggctgccatcctgcagactgaggtagaaacaattctgggatttgtggggagttggtttcttggcaccttttcataagcgttacctgtgctgtttttgttatgtttagaattgggaaatatgagtaatgttatgattaattcttcagcagcgtgatcagtcactgtgctaaaatgtaaccatcttatttca

SEQ ID NO: 354083 - DNA, 400 bp, Homo sapiens
acaaagataagaagatagctgagttggaaaggtaagaaagtgaagctgattggggcttatgaggttaaagtatggttttaaaagtatgcttttggggacatactttttcagtgtatctaactctgaatttaggttctcgaattcttgctattactgtattagctgccttttttctaggtcagttgtacgttctttgttgaggtgtctgaaaggcaacatagaatgggaataaattgggaagctatgggctgtaacataattgattggcaaaaaagagagtattcattaatttaaaattaaagttttttttactggcaaatcaagagaggacaaatgtctactttttaatttctctatataatgatcaaatgatcctcaagcaaaggagttaatcttttat

SEQ ID NO: 354084 - DNA, 156 bp, Homo sapiens
aaaattatttattctagatgtgtgttccttcttttaggcttcacttttggatctgaaagagcatgcttcttctctggcatcctcaggactgaaaaaggactcacggcttaagacactagagattgctttggagcagaagaaggaggagtgtctgaa

SEQ ID NO: 354085 - DNA, 6894 bp, Homo sapiens
cggcggcggcggtagtggcggcggcggcggtgcccgggcggcagcggcagcagtagcggcagccctgaggacggtgagacggccgcggcggcggcgacagcgcggaagtcgcgcgggacccagagcttcccccctgtcgctagtgctgaggctttcgcctttcctacccagcttcttgctcacggcccgggctgggctgggcagggcaacgcgcccccgggcaggggcggagctgtagatatggtgtaagatacttcttcaagattggacagctggggaccttcttctgattaaccttaaaccaacttgtagccatagagacacctcacaaggttcccatttttgttgttgttgttgttgattttctgctcacacctttcctgaccttgcaaccatgtatggaagtgcccgctctgttgggaaggtggagccgagcagccagagccctgggcgttcacccaggcttccacgttcccctcgcttgggtcaccgtcgaaccaacagtacgggagggagttcgggaagcagtgttggaggtggcagtgggaaaaccctttcaatggaaaatatacaatctttaaatgctgcctatgccacctctggccctatgtatctaagtgaccatgaaaatgtgggttcagaaacacctaaaagcaccatgacacttggccgttctgggggacgtctgccttacggtgttcggatgactgctatgggtagtagccccaatatagctagcagtggggttgctagtgacaccatagcatttggagagcatcacctccctcctgtgagtatggcatccactgtacctcactcccttcgtcaggcgagagataacacaatcatggatctgcagacacagctgaaggaagtattaagagaaaatgatctcttgcggaaggatgtggaagtaaaggagagcaaattgagttcttcaatgaatagcatcaagaccttctggagcccagagctgaagaaggaacgagccctgagaaaagatgaagcttccaaaatcaccatttggaaggaacagtacagagttgtacaggaggaaaaccagcacatgcagatgacaatccaggctctccaggatgaattgcggatccagagggacctgaatcagctgtttcagcaggatagtagcagcaggactggcgaaccttgtgtagcagagctgacagaggagaactttcagaggcttcatgctgagcatgagcggcaggccaaagagctgtttcttcttcgaaagacattggaggaaatggagctgcgtattgagactcaaaagcagaccctaaatgctcgggatgaatccattaagaagcttctggaaatgttgcagagcaaaggactttctgccaaggctaccgaggaagaccatgagagaacaagacgactggcagaggcagagatgcacgttcatcacctagaaagccttttggagcagaaggaaaaagagaacagtatgttgagagaggagatgcatcgaaggtttgagaatgctcctgattctgccaaaacaaaagctctgcaaactgttattgagatgaaggattcaaaaatttcctctatggagcgtgggcttcgagacctggaagaggaaattcagatgctgaaatcgaatggtgctttgagtactgaggaaagggaagaagaaatgaagcaaatggaagtgtatcggagccattctaaatttatgaaaaataagattggccaggtgaaacaggagctgtccagaaaggacacagaactactcgccctgcagacaaagctagaaacactcacaaaccagttctcagatagtaaacagcacattgaagtgttgaaggagtccttgactgctaaggagcagagggctgccatcctgcagactgaggtggatgctctccgattgcgtttggaagagaaggaaaccatgttgaataaaaagacaaaacaaattcaggatatggctgaagagaaggggacacaagctggagagatacatgacctcaaggacatgttggatgtgaaggagcggaaggttaatgttcttcagaagaagattgaaaatcttcaagagcagcttagagacaaggaaaagcagatgagcagcttgaaagaacgggtcaaatccttgcaggctgacaccaccaacactgacactgccttgacaactttggaggaggcccttgcagagaaagagcggacaattgaacgcttaaaggagcagagggacagagatgagcgagagaagcaagaggaaattgataactacaaaaaagatcttaaagacttgaaggaaaaagtcagcctgttgcaaggcgacctttcagagaaagaggcttcacttttggatctgaaagagcatgcttcttctctggcatcctcaggactgaaaaaggactcacggcttaagacactagagattgctttggagcagaagaaggaggagtgtctgaaaatggaatcacaattgaaaaaggcacatgaggcagcattggaagccagagccagtccagagatgagtgaccgaatacagcacttggagagagagatcaccaggtacaaagatgaatctagcaaggcccaggcagaagttgatcgactcttagaaatcttgaaggaggtggaaaatgagaagaatgacaaagataagaagatagctgagttggaaagtctcacctcaaggcaagtgaaagaccagaataagaaggtagcaaatctgaagcacaaggaacaggtggaaaaaaagaagagtgcacaaatgttagaggaggcgcgacgacgggaggacaatctcaacgacagctctcagcagctacaggtggaggagttactgatggccatggagaaggtaaagcaggaactagaatccatgaaagcaaagctgtcctccacccagcagtctctggcagaaaaggaaactcacttgactaatcttcgggcagagagaaggaaacacttagaggaagttctggagatgaagcaagaagctcttctggctgccattagtgaaaaagacgccaatatagctctcttggagctttcgtcctctaagaagaagacccaagaggaagtggctgccctgaagcgggagaaggatcgtctggtacagcagcttaagcagcagacgcaaaatcgaatgaagctaatggccgacaactacgaggatgaccacttcaaatcctcccattccaatcaaacaaatcacaagccctccccagaccaggatgaggaggagggtatatgggcatagccaatcagaggcttagttcagccattttgttcagaacgatcatccagcccctcttagaacttgaccaaaatagaagtaaattaaagttgtacattggacacctgacaaccctctgccatgaccgagaccccctgatcctccgtggactcactccaccagcttcctataacttggacgatgaccaggcggcttgggagaatgagctgcagaagatgacccgggggcagcttcaggatgagttagagaaaggtgaacgggacaatgcagaactgcaggagtttgccaacgccattcttcagcagatagcagaccattgtcccgacatcctagagcaagtggtcaacgccctggaagagtcctcttgaccctgctttatggggaagcctgaggtagtcaacccaggagccaagaaaagagaactacgaggaacaggtgcccggaaccttcttggcaccaaacactacaaacttcatcccaacttgctcacttgaagaagtgtgattccagcaccgtttctacatctgccatcttactctgcctttctgctttggatgtggtctctacactaaccttcttgatgtccagggtagataaagggtcgaatctctctgaagaactgccacctggtcatcagcagtggagaactgtgggagctggtggctctgccctgacagagagccatggagcagaggagcctctcacctcctgtcctctgacatgagaatgaaaccaggaatggacttggagttcaacaggctgagaggatgcctccaatggaccagagagctgagtgttctaatatcacaataggtgctttctcctaaaagggcaaaaaacaatctcaaaaagattagaaaaagagaaggggggaagggaagagaaaatcgactcttctttttactgtctcttctgcttactttccacatgagatgctttgtaccggggagctgtgagcaggcctcacgatggcttgggagcactcgttctcccaaggtctgagtcttcatccagccctgcctgtctgtcgcagccttcctcactctgttcctcggccagttaacaagaagatggtgtgaggtgttctccaccagtctctcctgtttgagactgttgacgttatcatactgaggtgttagatcaaatatctctaattgaagaacatgtgaggttgaaagagcaccagccagggcaacatagcgtgaccctgtctctacaaaaaattaaaaagagaacatacaaagttgacatatgagaccctgttgtccccgcctgcagctttgccccagtaacagatgcccgttgctcttgggctggtttcccctgaacacctccaagaggctgcctgccttgccagcacccgtgtcctgagctcctgcagcccagtggctgctgaagttgtgatccctcactcaccctgctagctttgcccttgactcgtcttctctgaacctcagcctcgtgcattgcctggaaccttcttctagcataaatgaaggtttttcctcctacacacattccttcctcggttatttcattcagagaatatttatgaaatgcctactgtgtgcaagtcatccatccttgaaaaggccacttctcagtgagggagagatgtagtggattctgtgagacatacctgctggagttgaagcagtaaatagcatgtccttcccctccccgatcttaaggtgtgttttctagaaaagttccctaatggaattcatgagtttgggggtctcagtcacccgcttgcctgtaggattccatttgatgattctggatttttgctgtttgttattgcccttagaggggctctgagtatctacttgtgggtggccatttcctgacatctgcatgtacctcgtggaattcagccagcttcatgttgcaaatcagaaagctgaccccaagactgcaaatcaatgaaggtattggcattgttaaggacgtagcgtagacaacagcagtcataaataattaggcaggaacttaacccaaatctagttctttgaccacctctaccaccagaacccagcagacactcacatctcctgataagagttgctggactcgatgtttttgttttgcattttctcctctccttccccacttactcagagaatttaaagtctgtagagtcagcacagccccatcagtccaggaacttcccaccaccagcccttgactgtcccattaactgacatggtcagatttccagctccccctactccctgctgtgaaacaatccctctccctgtgagaggaaactgtggagcgtttcttatcgaaggttaaatggactctgctcataaacctcttactgagatgcttcctgatagccaggctggccagagaggggtgcaggggttagatagtaagtggtggtcgtttgtggtcagttacctcaattctgttcattgcagtgcccgtaaaccatgtagaaagctcccagcactgaaaggcaggagtgttagcatctcgctttatccaccataacgtaaagaactgcggtgtgataacagccttcacggggccacggtggaaccaagacagcaggcgaggccatgcctaaacaagtggtctggcacgggcactggccagctgctctctccaagcaggtggcccagatcccacccacgtggactttctcatcaggtgcagcgcctgccactctcagccactgggtgtgtgactctcctcttcatctcagcattctccatcacttcccctccagaaaaacggatggaaggaagccctctgtgacactgcttctgagaagaagcatttccgggaccgatatcatctgtctggtctctgtgaacagcaaggaatcttcttgaccgttcttgggcactggaggctggctaggagttcagtaataaacgtggccttcgtgctgtagggcagagtggatgcagtttgtagctttcagagtgtctcattgagtctagatcattgaaccaacacttaaccaaatgtcccactcccatcacactaggacttgtcattccatgcccctctcctagtggtcatggtttcatatgggcatacaactgctactgaagttatatagccttgaaaactcagtgcaggttgcccttaattttccccaaacccctccatcggcaagtctagttgccctttagcacctaaagatctgcaccccaaaccaatgtcaccataaagagggcacgaagaagagtgggtgtgatcccaacggggttttgtaactgaagaagcccagtgtgagcttctcatcttttcatatacctctaacccccggtactcattgaatcattgatgaggtatctcaattgagatttgcaaggactttgataccatttgaaatggaaaaattttgaacgggctttaacatgtttaagaaatatggatggggccggccacagtggctcacgcctgtaatcccagaactctggaaggctgaggcaggcggatcacctgagatcaggagttcgaggccagcctggccaagatggcaaaaaccccgactctactaaaaatacaaaattagccaggcgtggtggcgtacgcctgtaatcccagctactcgggaggcaggagaatcgcttgagcctgggaggcagaggctgcggtgagccaagatcgtgtcactgcactccagcctgggtgac

SEQ ID NO: 354086 - DNA, 6766 bp, Homo sapiens
ctttatgccagtcaagacgtgtgtaaaaccggcggccaagtgatattgtaatcggactccttaagacagagtttcactcttgttgcccaggctggagtgcaatgagtgcagtcttggctcactgcaattcccacctctcaagttcaagcgattctcctgtctcagcctcccgagtagctcagattacaggcacacgccaccacgcccggctaacttttgtattttagtagagacagggtttcatcatattggtcagactggtcttgaactcctgacctcagctgatttgcccaccttggcctcccaaagtgctggaattacacaggtgtgagccaccacgcccggctgttttgatgaaattttttgaaagaatgtattcatattcctgtagatttcccatttcccacattccctcaaatttagtttccgtgttaatatcttctattaattttgaacagtgtctttattgtagtttatgcaaagtgaggagtgagtgccatacttattttgcttcctgttgagaataaactgaagttaaattactgacattttgcatattatctcaatcattttttaaggacctgtaaaacagaataaggtgaatcctaatttgctagatgcagatttcttgtagctatttttgattcctgcaggctgctctgatttgctacttgaggaggaaagctgatttgggggttttctttttgtcttggttctagcacatgcagatgacaatccaggctctccaggatgaattgcggatccagagggacctgaatcagctgtttcagcaggatagtagcagcaggactggcgaaccttgtgtagcagagctgacagaggagaactttcagaggcttcatgctgagcatgagcggcaggccaaagagctgtttcttcttcgaaagacattggaggaaatggagctgcgtattgagactcaaaagcagaccctaaatgctcgggatgaatccattaagaagcttctggaaatgttgcagagcaaaggactttctgccaaggctaccgaggaagaccatgagagaacaagacgactggcagaggcagagatgcacgttcatcacctagaaagccttttggagcagaaggaaaaagagaacagtatgttgagagaggagatgcatcgaaggtttgagaatgctcctgattctgccaaaacaaaagctctgcaaactgttattgagatgaaggattcaaaaatttcctctatggagcgtgggcttcgagacctggaagaggaaattcagatgctgaaatcgaatggtgctttgagtactgaggaaagggaagaagaaatgaagcaaatggaagtgtatcggagccattctaaatttatgaaaaataaggtagaacaactgaaggaggaactaagttcgaaagaggctcaatgggaggagctgaaaaagaaagcggctggtcttcaggctgagattggccaggtgaaacaggagctgtccagaaaggacacagaactactcgccctgcagacaaagctagaaacactcacaaaccagttctcagatagtaaacagcacattgaagtgttgaaggagtccttgactgctaaggagcagagggctgccatcctgcagactgaggtggatgctctccgattgcgtttggaagagaaggaaaccatgttgaataaaaagacaaaacaaattcaggatatggctgaagagaaggggacacaagctggagagatacatgacctcaaggacatgttggatgtgaaggagcggaaggttaatgttcttcagaagaagattgaaaatcttcaagagcagcttagagacaaggaaaagcagatgagcagcttgaaagaacgggtcaaatccttgcaggctgacaccaccaacactgacactgccttgacaactttggaggaggcccttgcagagaaagagcggacaattgaacgcttaaaggagcagagggacagagatgagcgagagaagcaagaggaaattgataactacaaaaaagatcttaaagacttgaaggaaaaagtcagcctgttgcaaggcgacctttcagagaaagaggcttcacttttggatctgaaagagcatgcttcttctctggcatcctcaggactgaaaaaggactcacggcttaagacactagagattgctttggagcagaagaaggaggagtgtctgaaaatggaatcacaattgaaaaaggcacatgaggcagcattggaagccagagccagtccagagatgagtgaccgaatacagcacttggagagagagatcaccaggtacaaagatgaatctagcaaggcccaggcagaagttgatcgactcttagaaatcttgaaggaggtggaaaatgagaagaatgacaaagataagaagatagctgagttggaaagtctcacctcaaggcaagtgaaagaccagaataagaaggtagcaaatctgaagcacaaggaacaggtggaaaaaaagaagagtgcacaaatgttagaggaggcgcgacgacgggaggacaatctcaacgacagctctcagcagctacaggacagtctccgtaagaaggatgacaggattgaagagctggaagaagcactaagagaaagtgtacagataactgcagagcgggaaatggtgctagcacaagaggaatcagccaggaccaatgctgaaaaacaggtggaggagttactgatggccatggagaaggtaaagcaggaactagaatccatgaaagcaaagctgtcctccacccagcagtctctggcagaaaaggaaactcacttgactaatcttcgggcagagagaaggaaacacttagaggaagttctggagatgaagcaagaagctcttctggctgccattagtgaaaaagacgccaatatagctctcttggagctttcgtcctctaagaagaagacccaagaggaagtggctgccctgaagcgggagaaggatcgtctggtacagcagcttaagcagcagacgcaaaatcgaatgaagctaatggccgacaactacgaggatgaccacttcaaatcctcccattccaatcaaacaaatcacaagccctccccagaccaggatgaggaggagggtatatgggcatagccaatcagaggcttagttcagccattttgttcagaacgatcatccagcccctcttagaacttgaccaaaatagaagtaaattaaagttgtacattggacacctgacaaccctctgccatgaccgagaccccctgatcctccgtggactcactccaccagcttcctataacttggacgatgaccaggcggcttgggagaatgagctgcagaagatgacccgggggcagcttcaggatgagttagagaaaggtgaacgggacaatgcagaactgcaggagtttgccaacgccattcttcagcagatagcagaccattgtcccgacatcctagagcaagtggtcaacgccctggaagagtcctcttgaccctgctttatggggaagcctgaggtagtcaacccaggagccaagaaaagagaactacgaggaacaggtgcccggaaccttcttggcaccaaacactacaaacttcatcccaacttgctcacttgaagaagtgtgattccagcaccgtttctacatctgccatcttactctgcctttctgctttggatgtggtctctacactaaccttcttgatgtccagggtagataaagggtcgaatctctctgaagaactgccacctggtcatcagcagtggagaactgtgggagctggtggctctgccctgacagagagccatggagcagaggagcctctcacctcctgtcctctgacatgagaatgaaaccaggaatggacttggagttcaacaggctgagaggatgcctccaatggaccagagagctgagtgttctaatatcacaataggtgctttctcctaaaagggcaaaaaacaatctcaaaaagattagaaaaagagaaggggggaagggaagagaaaatcgactcttctttttactgtctcttctgcttactttccacatgagatgctttgtaccggggagctgtgagcaggcctcacgatggcttgggagcactcgttctcccaaggtctgagtcttcatccagccctgcctgtctgtcgcagccttcctcactctgttcctcggccagttaacaagaagatggtgtgaggtgttctccaccagtctctcctgtttgagactgttgacgttatcatactgaggtgttagatcaaatatctctaattgaagaacatgtgaggttgaaagagcaccagccagggcaacatagcgtgaccctgtctctacaaaaaattaaaaagagaacatacaaagttgacatatgagaccctgttgtccccgcctgcagctttgccccagtaacagatgcccgttgctcttgggctggtttcccctgaacacctccaagaggctgcctgccttgccagcacccgtgtcctgagctcctgcagcccagtggctgctgaagttgtgatccctcactcaccctgctagctttgcccttgactcgtcttctctgaacctcagcctcgtgcattgcctggaaccttcttctagcataaatgaaggtttttcctcctacacacattccttcctcggttatttcattcagagaatatttatgaaatgcctactgtgtgcaagtcatccatccttgaaaaggccacttctcagtgagggagagatgtagtggattctgtgagacatacctgctggagttgaagcagtaaatagcatgtccttcccctccccgatcttaaggtgtgttttctagaaaagttccctaatggaattcatgagtttgggggtctcagtcacccgcttgcctgtaggattccatttgatgattctggatttttgctgtttgttattgcccttagaggggctctgagtatctacttgtgggtggccatttcctgacatctgcatgtacctcgtggaattcagccagcttcatgttgcaaatcagaaagctgaccccaagactgcaaatcaatgaaggtattggcattgttaaggacgtagcgtagacaacagcagtcataaataattaggcaggaacttaacccaaatctagttctttgaccacctctaccaccagaacccagcagacactcacatctcctgataagagttgctggactcgatgtttttgttttgcattttctcctctccttccccacttactcagagaatttaaagtctgtagagtcagcacagccccatcagtccaggaacttcccaccaccagcccttgactgtcccattaactgacatggtcagatttccagctccccctactccctgctgtgaaacaatccctctccctgtgagaggaaactgtggagcgtttcttatcgaaggttaaatggactctgctcataaacctcttactgagatgcttcctgatagccaggctggccagagaggggtgcaggggttagatagtaagtggtggtcgtttgtggtcagttacctcaattctgttcattgcagtgcccgtaaaccatgtagaaagctcccagcactgaaaggcaggagtgttagcatctcgctttatccaccataacgtaaagaactgcggtgtgataacagccttcacggggccacggtggaaccaagacagcaggcgaggccatgcctaaacaagtggtctggcacgggcactggccagctgctctctccaagcaggtggcccagatcccacccacgtggactttctcatcaggtgcagcgcctgccactctcagccactgggtgtgtgactctcctcttcatctcagcattctccatcacttcccctccagaaaaacggatggaaggaagccctctgtgacactgcttctgagaagaagcatttccgggaccgatatcatctgtctggtctctgtgaacagcaaggaatcttcttgaccgttcttgggcactggaggctggctaggagttcagtaataaacgtggccttcgtgctgtagggcagagtggatgcagtttgtagctttcagagtgtctcattgagtctagatcattgaaccaacacttaaccaaatgtcccactcccatcacactaggacttgtcattccatgcccctctcctagtggtcatggtttcatatgggcatacaactgctactgaagttatatagccttgaaaactcagtgcaggttgcccttaattttccccaaacccctccatcggcaagtctagttgccctttagcacctaaagatctgcaccccaaaccaatgtcaccataaagagggcacgaagaagagtgggtgtgatcccaacggggttttgtaactgaagaagcccagtgtgagcttctcatcttttcatatacctctaacccccggtactcattgaatcattgatgaggtatctcaattgagatttgcaaggactttgataccatttgaaatggaaaaattttgaacgggctttaacatgtttaagaaatatggatggggccggccacagtggctcacgcctgtaatcccagaactctggaaggctgaggcaggcggatcacctgagatcaggagttcgaggccagcctggccaagatggcaaaaaccccgactctactaaaaatacaaaattagccaggcgtggtggcgtacgcctgtaatcccagctactcgggaggcaggagaatcgcttgagcctgggaggcagaggctgcggtgagccaagatcgtgtcactgcactccagcctgggtgac

SEQ ID NO: 354087 - DNA, 7083 bp, Homo sapiens
agatgtggggatcctggggcgggaggtgggggagtggggactggggctctgggcacttggggagcggagggggggaggcttaggactagtgaagccgcggacgaggtagtggggagacggagaaattggggagccatgaggttggggtgcggtcagggtggatctttgggttagggtagtttgaagtttgagtatcctcacgacatggcagctggattcctgagagagagtgatctgagagagtgacgaagacagaagccccagtgtcttttaagaatatggtgtaagatacttcttcaagattggacagctggggaccttcttctgattaaccttaaaccaacttgtagccatagagacacctcacaaggttcccatttttgttgttgttgttgttgattttctgctcacacctttcctgaccttgcaaccatgtatggaagtgcccgctctgttgggaaggtggagccgagcagccagagccctgggcgttcacccaggcttccacgttcccctcgcttgggtcaccgtcgaaccaacagtacgggagggagttcgggaagcagtgttggaggtggcagtgggaaaaccctttcaatggaaaatatacaatctttaaatgctgcctatgccacctctggccctatgtatctaagtgaccatgaaaatgtgggttcagaaacacctaaaagcaccatgacacttggccgttctgggggacgtctgccttacggtgttcggatgactgctatgggtagtagccccaatatagctagcagtggggttgctagtgacaccatagcatttggagagcatcacctccctcctgtgagtatggcatccactgtacctcactcccttcgtcaggcgagagataacacaatcatggatctgcagacacagctgaaggaagtattaagagaaaatgatctcttgcggaaggatgtggaagtaaaggagagcaaattgagttcttcaatgaatagcatcaagaccttctggagcccagagctgaagaaggaacgagccctgagaaaagatgaagcttccaaaatcaccatttggaaggaacagtacagagttgtacaggaggaaaaccagcacatgcagatgacaatccaggctctccaggatgaattgcggatccagagggacctgaatcagctgtttcagcaggatagtagcagcaggactggcgaaccttgtgtagcagagctgacagaggagaactttcagaggcttcatgctgagcatgagcggcaggccaaagagctgtttcttcttcgaaagacattggaggaaatggagctgcgtattgagactcaaaagcagaccctaaatgctcgggatgaatccattaagaagcttctggaaatgttgcagagcaaaggactttctgccaaggctaccgaggaagaccatgagagaacaagacgactggcagaggcagagatgcacgttcatcacctagaaagccttttggagcagaaggaaaaagagaacagtatgttgagagaggagatgcatcgaaggtttgagaatgctcctgattctgccaaaacaaaagctctgcaaactgttattgagatgaaggattcaaaaatttcctctatggagcgtgggcttcgagacctggaagaggaaattcagatgctgaaatcgaatggtgctttgagtactgaggaaagggaagaagaaatgaagcaaatggaagtgtatcggagccattctaaatttatgaaaaataaggtagaacaactgaaggaggaactaagttcgaaagaggctcaatgggaggagctgaaaaagaaagcggctggtcttcaggctgagattggccaggtgaaacaggagctgtccagaaaggacacagaactactcgccctgcagacaaagctagaaacactcacaaaccagttctcagatagtaaacagcacattgaagtgttgaaggagtccttgactgctaaggagcagagggctgccatcctgcagactgaggtggatgctctccgattgcgtttggaagagaaggaaaccatgttgaataaaaagacaaaacaaattcaggatatggctgaagagaaggggacacaagctggagagatacatgacctcaaggacatgttggatgtgaaggagcggaaggttaatgttcttcagaagaagattgaaaatcttcaagagcagcttagagacaaggaaaagcagatgagcagcttgaaagaacgggtcaaatccttgcaggctgacaccaccaacactgacactgccttgacaactttggaggaggcccttgcagagaaagagcggacaattgaacgcttaaaggagcagagggacagagatgagcgagagaagcaagaggaaattgataactacaaaaaagatcttaaagacttgaaggaaaaagtcagcctgttgcaaggcgacctttcagagaaagaggcttcacttttggatctgaaagagcatgcttcttctctggcatcctcaggactgaaaaaggactcacggcttaagacactagagattgctttggagcagaagaaggaggagtgtctgaaaatggaatcacaattgaaaaaggcacatgaggcagcattggaagccagagccagtccagagatgagtgaccgaatacagcacttggagagagagatcaccaggtacaaagatgaatctagcaaggcccaggcagaagttgatcgactcttagaaatcttgaaggaggtggaaaatgagaagaatgacaaagataagaagatagctgagttggaaagtctcacctcaaggcaagtgaaagaccagaataagaaggtagcaaatctgaagcacaaggaacaggtggaaaaaaagaagagtgcacaaatgttagaggaggcgcgacgacgggaggacaatctcaacgacagctctcagcagctacaggacagtctccgtaagaaggatgacaggattgaagagctggaagaagcactaagagaaagtgtacagataactgcagagcgggaaatggtgctagcacaagaggaatcagccaggaccaatgctgaaaaacaggtggaggagttactgatggccatggagaaggtaaagcaggaactagaatccatgaaagcaaagctgtcctccacccagcagtctctggcagaaaaggaaactcacttgactaatcttcgggcagagagaaggaaacacttagaggaagttctggagatgaagcaagaagctcttctggctgccattagtgaaaaagacgccaatatagctctcttggagctttcgtcctctaagaagaagacccaagaggaagtggctgccctgaagcgggagaaggatcgtctggtacagcagcttaagcagcagacgcaaaatcgaatgaagctaatggccgacaactacgaggatgaccacttcaaatcctcccattccaatcaaacaaatcacaagccctccccagaccagatcatccagcccctcttagaacttgaccaaaatagaagtaaattaaagttgtacattggacacctgacaaccctctgccatgaccgagaccccctgatcctccgtggactcactccaccagcttcctataacttggacgatgaccaggcggcttgggagaatgagctgcagaagatgacccgggggcagcttcaggatgagttagagaaaggtgaacgggacaatgcagaactgcaggagtttgccaacgccattcttcagcagatagcagaccattgtcccgacatcctagagcaagtggtcaacgccctggaagagtcctcttgaccctgctttatggggaagcctgaggtagtcaacccaggagccaagaaaagagaactacgaggaacaggtgcccggaaccttcttggcaccaaacactacaaacttcatcccaacttgctcacttgaagaagtgtgattccagcaccgtttctacatctgccatcttactctgcctttctgctttggatgtggtctctacactaaccttcttgatgtccagggtagataaagggtcgaatctctctgaagaactgccacctggtcatcagcagtggagaactgtgggagctggtggctctgccctgacagagagccatggagcagaggagcctctcacctcctgtcctctgacatgagaatgaaaccaggaatggacttggagttcaacaggctgagaggatgcctccaatggaccagagagctgagtgttctaatatcacaataggtgctttctcctaaaagggcaaaaaacaatctcaaaaagattagaaaaagagaaggggggaagggaagagaaaatcgactcttctttttactgtctcttctgcttactttccacatgagatgctttgtaccggggagctgtgagcaggcctcacgatggcttgggagcactcgttctcccaaggtctgagtcttcatccagccctgcctgtctgtcgcagccttcctcactctgttcctcggccagttaacaagaagatggtgtgaggtgttctccaccagtctctcctgtttgagactgttgacgttatcatactgaggtgttagatcaaatatctctaattgaagaacatgtgaggttgaaagagcaccagccagggcaacatagcgtgaccctgtctctacaaaaaattaaaaagagaacatacaaagttgacatatgagaccctgttgtccccgcctgcagctttgccccagtaacagatgcccgttgctcttgggctggtttcccctgaacacctccaagaggctgcctgccttgccagcacccgtgtcctgagctcctgcagcccagtggctgctgaagttgtgatccctcactcaccctgctagctttgcccttgactcgtcttctctgaacctcagcctcgtgcattgcctggaaccttcttctagcataaatgaaggtttttcctcctacacacattccttcctcggttatttcattcagagaatatttatgaaatgcctactgtgtgcaagtcatccatccttgaaaaggccacttctcagtgagggagagatgtagtggattctgtgagacatacctgctggagttgaagcagtaaatagcatgtccttcccctccccgatcttaaggtgtgttttctagaaaagttccctaatggaattcatgagtttgggggtctcagtcacccgcttgcctgtaggattccatttgatgattctggatttttgctgtttgttattgcccttagaggggctctgagtatctacttgtgggtggccatttcctgacatctgcatgtacctcgtggaattcagccagcttcatgttgcaaatcagaaagctgaccccaagactgcaaatcaatgaaggtattggcattgttaaggacgtagcgtagacaacagcagtcataaataattaggcaggaacttaacccaaatctagttctttgaccacctctaccaccagaacccagcagacactcacatctcctgataagagttgctggactcgatgtttttgttttgcattttctcctctccttccccacttactcagagaatttaaagtctgtagagtcagcacagccccatcagtccaggaacttcccaccaccagcccttgactgtcccattaactgacatggtcagatttccagctccccctactccctgctgtgaaacaatccctctccctgtgagaggaaactgtggagcgtttcttatcgaaggttaaatggactctgctcataaacctcttactgagatgcttcctgatagccaggctggccagagaggggtgcaggggttagatagtaagtggtggtcgtttgtggtcagttacctcaattctgttcattgcagtgcccgtaaaccatgtagaaagctcccagcactgaaaggcaggagtgttagcatctcgctttatccaccataacgtaaagaactgcggtgtgataacagccttcacggggccacggtggaaccaagacagcaggcgaggccatgcctaaacaagtggtctggcacgggcactggccagctgctctctccaagcaggtggcccagatcccacccacgtggactttctcatcaggtgcagcgcctgccactctcagccactgggtgtgtgactctcctcttcatctcagcattctccatcacttcccctccagaaaaacggatggaaggaagccctctgtgacactgcttctgagaagaagcatttccgggaccgatatcatctgtctggtctctgtgaacagcaaggaatcttcttgaccgttcttgggcactggaggctggctaggagttcagtaataaacgtggccttcgtgctgtagggcagagtggatgcagtttgtagctttcagagtgtctcattgagtctagatcattgaaccaacacttaaccaaatgtcccactcccatcacactaggacttgtcattccatgcccctctcctagtggtcatggtttcatatgggcatacaactgctactgaagttatatagccttgaaaactcagtgcaggttgcccttaattttccccaaacccctccatcggcaagtctagttgccctttagcacctaaagatctgcaccccaaaccaatgtcaccataaagagggcacgaagaagagtgggtgtgatcccaacggggttttgtaactgaagaagcccagtgtgagcttctcatcttttcatatacctctaacccccggtactcattgaatcattgatgaggtatctcaattgagatttgcaaggactttgataccatttgaaatggaaaaattttgaacgggctttaacatgtttaagaaatatggatggggccggccacagtggctcacgcctgtaatcccagaactctggaaggctgaggcaggcggatcacctgagatcaggagttcgaggccagcctggccaagatggcaaaaaccccgactctactaaaaatacaaaattagccaggcgtggtggcgtacgcctgtaatcccagctactcgggaggcaggagaatcgcttgagcctgggaggcagaggctgcggtgagccaagatcgtgtcactgcactccagcctgggtgac

SEQ ID NO: 354088 - DNA, 4830 bp, Homo sapiens
gagcacggtatggtggtacaagcgatgtcgggaatactgaggaaagaaggactgcatgtgaggttagagatgaccaggaagaacgtggacagagatgagcgagagaagcaagaggaaattgataactacaaaaaagatcttaaagacttgaaggaaaaagtcagcctgttgcaaggcgacctttcagagaaagaggcttcacttttggatctgaaagagcatgcttcttctctggcatcctcaggactgaaaaaggactcacggcttaagacactagagattgctttggagcagaagaaggaggagtgtctgaaaatggaatcacaattgaaaaaggcacatgaggcagcattggaagccagagccagtccagagatgagtgaccgaatacagcacttggagagagagatcaccaggtacaaagatgaatctagcaaggcccaggcagaagttgatcgactcttagaaatcttgaaggaggtggaaaatgagaagaatgacaaagataagaagatagctgagttggaaagtctcacctcaaggcaagtgaaagaccagaataagaaggtagcaaatctgaagcacaaggaacaggtggaaaaaaagaagagtgcacaaatgttagaggaggcgcgacgacgggaggacaatctcaacgacagctctcagcagctacaggacagtctccgtaagaaggatgacaggattgaagagctggaagaagcactaagagaaagtgtacagataactgcagagcgggaaatggtgctagcacaagaggaatcagccaggaccaatgctgaaaaacaggtggaggagttactgatggccatggagaaggtaaagcaggaactagaatccatgaaagcaaagctgtcctccacccagcagtctctggcagaaaaggaaactcacttgactaatcttcgggcagagagaaggaaacacttagaggaagttctggagatgaagcaagaagctcttctggctgccattagtgaaaaagacgccaatatagctctcttggagctttcgtcctctaagaagaagacccaagaggaagtggctgccctgaagcgggagaaggatcgtctggtacagcagcttaagcagcagacgcaaaatcgaatgaagctaatggccgacaactacgaggatgaccacttcaaatcctcccattccaatcaaacaaatcacaagccctccccagaccagatcatccagcccctcttagaacttgaccaaaatagaagtaaattaaagttgtacattggacacctgacaaccctctgccatgaccgagaccccctgatcctccgtggactcactccaccagcttcctataacttggacgatgaccaggcggcttgggagaatgagctgcagaagatgacccgggggcagcttcaggatgagttagagaaaggtgaacgggacaatgcagaactgcaggagtttgccaacgccattcttcagcagatagcagaccattgtcccgacatcctagagcaagtggtcaacgccctggaagagtcctcttgaccctgctttatggggaagcctgaggtagtcaacccaggagccaagaaaagagaactacgaggaacaggtgcccggaaccttcttggcaccaaacactacaaacttcatcccaacttgctcacttgaagaagtgtgattccagcaccgtttctacatctgccatcttactctgcctttctgctttggatgtggtctctacactaaccttcttgatgtccagggtagataaagggtcgaatctctctgaagaactgccacctggtcatcagcagtggagaactgtgggagctggtggctctgccctgacagagagccatggagcagaggagcctctcacctcctgtcctctgacatgagaatgaaaccaggaatggacttggagttcaacaggctgagaggatgcctccaatggaccagagagctgagtgttctaatatcacaataggtgctttctcctaaaagggcaaaaaacaatctcaaaaagattagaaaaagagaaggggggaagggaagagaaaatcgactcttctttttactgtctcttctgcttactttccacatgagatgctttgtaccggggagctgtgagcaggcctcacgatggcttgggagcactcgttctcccaaggtctgagtcttcatccagccctgcctgtctgtcgcagccttcctcactctgttcctcggccagttaacaagaagatggtgtgaggtgttctccaccagtctctcctgtttgagactgttgacgttatcatactgaggtgttagatcaaatatctctaattgaagaacatgtgaggttgaaagagcaccagccagggcaacatagcgtgaccctgtctctacaaaaaattaaaaagagaacatacaaagttgacatatgagaccctgttgtccccgcctgcagctttgccccagtaacagatgcccgttgctcttgggctggtttcccctgaacacctccaagaggctgcctgccttgccagcacccgtgtcctgagctcctgcagcccagtggctgctgaagttgtgatccctcactcaccctgctagctttgcccttgactcgtcttctctgaacctcagcctcgtgcattgcctggaaccttcttctagcataaatgaaggtttttcctcctacacacattccttcctcggttatttcattcagagaatatttatgaaatgcctactgtgtgcaagtcatccatccttgaaaaggccacttctcagtgagggagagatgtagtggattctgtgagacatacctgctggagttgaagcagtaaatagcatgtccttcccctccccgatcttaaggtgtgttttctagaaaagttccctaatggaattcatgagtttgggggtctcagtcacccgcttgcctgtaggattccatttgatgattctggatttttgctgtttgttattgcccttagaggggctctgagtatctacttgtgggtggccatttcctgacatctgcatgtacctcgtggaattcagccagcttcatgttgcaaatcagaaagctgaccccaagactgcaaatcaatgaaggtattggcattgttaaggacgtagcgtagacaacagcagtcataaataattaggcaggaacttaacccaaatctagttctttgaccacctctaccaccagaacccagcagacactcacatctcctgataagagttgctggactcgatgtttttgttttgcattttctcctctccttccccacttactcagagaatttaaagtctgtagagtcagcacagccccatcagtccaggaacttcccaccaccagcccttgactgtcccattaactgacatggtcagatttccagctccccctactccctgctgtgaaacaatccctctccctgtgagaggaaactgtggagcgtttcttatcgaaggttaaatggactctgctcataaacctcttactgagatgcttcctgatagccaggctggccagagaggggtgcaggggttagatagtaagtggtggtcgtttgtggtcagttacctcaattctgttcattgcagtgcccgtaaaccatgtagaaagctcccagcactgaaaggcaggagtgttagcatctcgctttatccaccataacgtaaagaactgcggtgtgataacagccttcacggggccacggtggaaccaagacagcaggcgaggccatgcctaaacaagtggtctggcacgggcactggccagctgctctctccaagcaggtggcccagatcccacccacgtggactttctcatcaggtgcagcgcctgccactctcagccactgggtgtgtgactctcctcttcatctcagcattctccatcacttcccctccagaaaaacggatggaaggaagccctctgtgacactgcttctgagaagaagcatttccgggaccgatatcatctgtctggtctctgtgaacagcaaggaatcttcttgaccgttcttgggcactggaggctggctaggagttcagtaataaacgtggccttcgtgctgtagggcagagtggatgcagtttgtagctttcagagtgtctcattgagtctagatcattgaaccaacacttaaccaaatgtcccactcccatcacactaggacttgtcattccatgcccctctcctagtggtcatggtttcatatgggcatacaactgctactgaagttatatagccttgaaaactcagtgcaggttgcccttaattttccccaaacccctccatcggcaagtctagttgccctttagcacctaaagatctgcaccccaaaccaatgtcaccataaagagggcacgaagaagagtgggtgtgatcccaacggggttttgtaactgaagaagcccagtgtgagcttctcatcttttcatatacctctaacccccggtactcattgaatcattgatgaggtatctcaattgagatttgcaaggactttgataccatttgaaatggaaaaattttgaacgggctttaacatgtttaagaaatatggatggggccggccacagtggctcacgcctgtaatcccagaactctggaaggctgaggcaggcggatcacctgagatcaggagttcgaggccagcctggccaagatggcaaaaaccccgactctactaaaaatacaaaattagccaggcgtggtggcgtacgcctgtaatcccagctactcgggaggcaggagaatcgcttgagcctgggaggcagaggctgcggtgagccaagatcgtgtcactgcactccagcctgggtgac

SEQ ID NO: 354089 - DNA, 3504 bp, Homo sapiens
agatgtggggatcctggggcgggaggtgggggagtggggactggggctctgggcacttggggagcggagggggggaggcttaggactagtgaagccgcggacgaggtagtggggagacggagaaattggggagccatgaggttggggtgcggtcagggtggatctttgggttagggtagtttgaagtttgagtatcctcacgacatggcagctggattcctgagagagagtgatctgagagagtgacgaagacagaagccccagtgtcttttaagaatatggtgtaagatacttcttcaagattggacagctggggaccttcttctgattaaccttaaaccaacttgtagccatagagacacctcacaaggttcccatttttgttgttgttgttgttgattttctgctcacacctttcctgaccttgcaaccatgtatggaagtgcccgctctgttgggaaggtggagccgagcagccagagccctgggcgttcacccaggcttccacgttcccctcgcttgggtcaccgtcgaaccaacagtacgggagggagttcgggaagcagtgttggaggtggcagtgggaaaaccctttcaatggaaaatatacaatctttaaatgctgcctatgccacctctggccctatgtatctaagtgaccatgaaaatgtgggttcagaaacacctaaaagcaccatgacacttggccgttctgggggacgtctgccttacggtgttcggatgactgctatgggtagtagccccaatatagctagcagtggggttgctagtgacaccatagcatttggagagcatcacctccctcctgtgagtatggcatccactgtacctcactcccttcgtcaggcgagagataacacaatcatggatctgcagacacagctgaaggaagtattaagagaaaatgatctcttgcggaaggatgtggaagtaaaggagagcaaattgagttcttcaatgaatagcatcaagaccttctggagcccagagctgaagaaggaacgagccctgagaaaagatgaagcttccaaaatcaccatttggaaggaacagtacagagttgtacaggaggaaaaccagcacatgcagatgacaatccaggctctccaggatgaattgcggatccagagggacctgaatcagctgtttcagcaggatagtagcagcaggactggcgaaccttgtgtagcagagctgacagaggagaactttcagaggcttcatgctgagcatgagcggcaggccaaagagctgtttcttcttcgaaagacattggaggaaatggagctgcgtattgagactcaaaagcagaccctaaatgctcgggatgaatccattaagaagcttctggaaatgttgcagagcaaaggactttctgccaaggctaccgaggaagaccatgagagaacaagacgactggcagaggcagagatgcacgttcatcacctagaaagccttttggagcagaaggaaaaagagaacagtatgttgagagaggagatgcatcgaaggtttgagaatgctcctgattctgccaaaacaaaagctctgcaaactgttattgagatgaaggattcaaaaatttcctctatggagcgtgggcttcgagacctggaagaggaaattcagatgctgaaatcgaatggtgctttgagtactgaggaaagggaagaagaaatgaagcaaatggaagtgtatcggagccattctaaatttatgaaaaataaggtagaacaactgaaggaggaactaagttcgaaagaggctcaatgggaggagctgaaaaagaaagcggctggtcttcaggctgagattggccaggtgaaacaggagctgtccagaaaggacacagaactactcgccctgcagacaaagctagaaacactcacaaaccagttctcagatagtaaacagcacattgaagtgttgaaggagtccttgactgctaaggagcagagggctgccatcctgcagactgaggtggatgctctccgattgcgtttggaagagaaggaaaccatgttgaataaaaagacaaaacaaattcaggatatggctgaagagaaggggacacaagctggagagatacatgacctcaaggacatgttggatgtgaaggagcggaaggttaatgttcttcagaagaagattgaaaatcttcaagagcagcttagagacaaggaaaagcagatgagcagcttgaaagaacgggtcaaatccttgcaggctgacaccaccaacactgacactgccttgacaactttggaggaggcccttgcagagaaagagcggacaattgaacgcttaaaggagcagagggacagagatgagcgagagaagcaagaggaaattgataactacaaaaaagatcttaaagacttgaaggaaaaagtcagcctgttgcaaggcgacctttcagagaaagaggcttcacttttggatctgaaagagcatgcttcttctctggcatcctcaggactgaaaaaggactcacggcttaagacactagagattgctttggagcagaagaaggaggagtgtctgaaaatggaatcacaattgaaaaaggcacatgaggcagcattggaagccagagccagtccagagatgagtgaccgaatacagcacttggagagagagatcaccaggtacaaagatgaatctagcaaggcccaggcagaagttgatcgactcttagaaatcttgaaggaggtggaaaatgagaagaatgacaaagataagaagatagctgagttggaaagtctcacctcaaggcaagtgaaagaccagaataagaaggtagcaaatctgaagcacaaggaacaggtggaaaaaaagaagagtgcacaaatgttagaggaggcgcgacgacgggaggacaatctcaacgacagctctcagcagctacaggacagtctccgtaagaaggatgacaggattgaagagctggaagaagcactaagagaaagtgtacagataactgcagagcgggaaatggtgctagcacaagaggaatcagccaggaccaatgctgaaaaacaggtggaggagttactgatggccatggagaaggtaaagcaggaactagaatccatgaaagcaaagctgtcctccacccagcagtctctggcagaaaaggaaactcacttgactaatcttcgggcagagagaaggaaacacttagaggaagttctggagatgaagcaagaagctcttctggctgccattagtgaaaaagacgccaatatagctctcttggagctttcgtcctctaagaagaagacccaagaggaagtggctgccctgaagcgggagaaggatcgtctggtacagcagcttaagcagcagtgatactttcttcatttttcatcccttcatctcaagtcagcgtcagttttattgctttaaaagtcaacagtgatactatccagttctgctaagagtgaaactttaagaataaaatttgattttaattcatccctt

SEQ ID NO: 354090 - DNA, 1748 bp, Homo sapiens
agatgtggggatcctggggcgggaggtgggggagtggggactggggctctgggcacttggggagcggagggggggaggcttaggactagtgaagccgcggacgaggtagtggggagacggagaaattggggagccatgaggttggggtgcggtcagggtggatctttgggttagggtagtttgaagtttgagtatcctcacgacatggcagctggattcctgagagagagtgatctgagagagtgacgaagacagaagccccagtgtcttttaagaatatggtgtaagatacttcttcaagattggacagctggggaccttcttctgattaaccttaaaccaacttgtagccatagagacacctcacaaggttcccatttttgttgttgttgttgttgattttctgctcacacctttcctgaccttgcaaccatgtatggaagtgcccgctctgttgggaaggtggagccgagcagccagagccctgggcgttcacccaggcttccacgttcccctcgcttgggtcaccgtcgaaccaacagtacgggagggagttcgggaagcagtgttggaggtggcagtgggaaaaccctttcaatggaaaatatacaatctttaaatgctgcctatgccacctctggccctatgtatctaagtgaccatgaaaatgtgggttcagaaacacctaaaagcaccatgacacttggccgttctgggggacgtctgccttacggtgttcggatgactgctatgggtagtagccccaatatagctagcagtggggttgctagtgacaccatagcatttggagagcatcacctccctcctgtgagtatggcatccactgtacctcactcccttcgtcaggcgagagataacacaatcatggatctgcagacacagctgaaggaagtattaagagaaaatgatctcttgcggaaggatgtggaagtaaaggagagcaaattgagttcttcaatgaatagcatcaagaccttctggagcccagagctgaagaaggaacgagccctgagaaaagatgaagcttccaaaatcaccatttggaaggaacagtacagagttgtacaggaggaaaaccagcacatgcagatgacaatccaggctctccaggatgaattgcggatccagagggacctgaatcagctgtttcagcaggatagtagcagcaggactggcgaaccttgtgtagcagagctgacagaggagaactttcagaggcttcatgctgagcatgagcggcaggccaaagagctgtttcttcttcgaaagacattggaggaaatggagctgcgtattgagactcaaaagcagaccctaaatgctcgggatgaatccattaagaagcttctggaaatgttgcagagcaaaggactttctgccaaggctaccgaggaagaccatgagagaacaagacgactggcagaggcagagatgcacgttcatcacctagaaagccttttggagcagaaggaaaaagagaacagtatgttgagagaggagatgcatcgaaggtttgagaatgctcctgattctgccaaaacaaaagctctgcaaactgttattgagatgaaggattcaaaaatttcctctatggagcgtgggcttcgagacctggaagaggaaattcagatgctgaaatcgaatggtgctttgagtactgaggaaagggaagaagaaatgaagcaaatggaagtgtatcggaagggcacatcggggatcctctggcg

SEQ ID NO: 354091 - DNA, 611 bp, Homo sapiens
agtttatctagtgcctagaacaatagctggcttaaagaggtcaaatggtattatcattatgaccctggaaatgaaggcttggattgtatttaagttggatccattccagtgatgacagctgtgctaacgtcacctctggtggctttgtccccaagattcgagattacggtgagccctttcaggaagcaatgtggttggacctggttaaggaaaggctgattacggaaatgtacacggtggcatggtttgtgcgagacatgcgcctgatgtttcgcaaccataaaacattttacaaggcttctgactttggccaggtaggacttgacttagaggcagaatttgaaaaagatctcaaagacgtgctcggttttcatgaagccaatgacggcggtttctggactcttccttgaccctgttctgtaaagactgaagcatccccacctcaggattcagctgatgggaccctggcttggactgttgattgccagtgagtctgggatgtaattggctgccctcaggacccaaacccagacacttcataggattatcacaccctccatctttattctttctttttacctttaaaagtctatatctacactaaaaaaaaa

SEQ ID NO: 354092 - DNA, 615 bp, Homo sapiens
acccaacacaaggcctctctcagcaacactcaagaaattatcactaggatgaaatcctaaagattttaatctagagagggagaaatggaaggagaaaggaatggatgggaaaggttaagaaagaagaactagggtcgtgggtttgagtgacaggggaaaaagtgattttatcactaagtgaggtccagaagaaaaactgactgggggagggagctaatttttctttttgacttcttgggtttgagatccagtgtgatgtctgggtacagacattcactaggaagtgggaaggccagtatctacaaaagaaaaacctccagaataacctcattcattgactccttctgtctttcagagtggacttttgctctgtcctccaagaataaatctcaagagagagttaaatagcaagtgaatttctactaccctctcagtcaccatgttgcagactttccctgtctggaggctcaccttagagcttctgagtttccaagctctgagtcacctccacatttgggcatggcatcttcaaaacaattaatttgcatagttaatttgggatggggaagcaaatgactctaaaataaaaattaaatgaaaaagcaaaaaaaaaaa

SEQ ID NO: 354093 - DNA, 446 bp, Homo sapiens
ccactgcaccacagcctgggtgacggggaaagaccctgactcaaaaacaaaaacacaaaaaaaagtatgagtgatttgatggctgtaatccttcatccttcaatgtgtttgtttgcttttttctctttcaggcttctgactttggccaggtaggacttgacttagaggcagaatttgaaaaagatctcaaagacgtgctcggttttcatgaagccaatgacggcggtttctggactcttccttgaccctgttctgtaaagactgaagcatccccacctcaggattcagctgatgggaccctggcttggactgttgattgccagtgagtctgggatgtaattggctgccctcaggacccaaacccagacacttcataggattatcacaccctccatctttattctttctttttacctttaaaagtctatatctacactaaaaaaaaa

SEQ ID NO: 354094 - DNA, 2498 bp, Homo sapiens
gaggtggagagaggctgcaggcaccgacctgccttcagcttccggcttggcaaactccgaaaactttcacttttcttttctcggaagcccggccccttactgcgtttgtcaaagcacagacttcctgttttgcctgctagcatctccctgtaactctcccaatcttgaggagtgatccctgtcccagcccctggaaaggggcaggaacgacaaactcaaagtccaggatgttcaccatgacaagagccatggaagaggctctttttcagcacttcatgcaccagaagctggggatcgcctatgccatacacaagccatttcccttctttgaaggcctcctagacaactccatcatcactaagagaatgtacatggaatctctggaagcctgtagaaatttgatccctgtatccagagtggtgcacaacattctcacccaactggagaggacttttaacctgtctcttctggtgacattgttcagtcaaattaacctgcgtgaatatcccaatctggtgacgatttacagaagcttcaaacgtgttggtgcttcctatgaacggcagagcagagacacaccaatcctacttgaagccccaactggcctagcagaaggaagctccctccataccccactggcgctgcccccaccacaaccccctcaaccaagctgttcaccctgtgcgccaagagtcagtgagcctggaacatcctcccagcaaagcgatgagatcctgagtgagtcgcccagcccatctgaccctgtcctgcctctccctgcactcatccaggaaggaagaagcacttcagtgaccaatgacaagttaacatccaaaatgaatgcggaagaagactcagaagagatgcccagcctcctcactagcactgtgcaagtggccagtgacaacctgatcccccaaataagagataaagaagaccctcaagagatgccccactctcccttgggctctatgccagagataagagataattctccagaaccaaatgacccagaagagccccaggaggtgtccagcacaccttcagacaagaaaggaaagaaaagaaaaagatgtatctggtcaactccaaaaaggagacataagaaaaaaagcctcccaagagggacagcctcatctagacacggaatccaaaagaagctcaaaagggtggatcaggttcctcaaaagaaagatgactcaacttgtaactccacggtagagacaagggcccaaaaggcgagaactgaatgtgcccgaaagtcgagatcagaggagatcattgatggcacttcagaaatgaatgaaggaaagaggtcccagaagacgcctagtacaccacgaagggtcacacaaggggcagcctcacctgggcatggcatccaagagaagctccaagtggtggataaggtgactcaaaggaaagacgactcaacctggaactcagaggtcatgatgagggtccaaaaggcaagaactaaatgtgcccgaaagtccagatcgaaagaaaagaaaaaggagaaagatatctgttcaagctcaaaaaggagatttcagaaaaatattcaccgaagaggaaaacccaaaagtgacactgtggattttcactgttctaagctccccgtgacctgtggtgaggcgaaagggattttatataagaagaaaatgaaacacggatcctcagtgaagtgcattcggaatgaggatggaacttggttaacaccaaatgaatttgaagtcgaaggaaaaggaaggaacgcaaagaactggaaacggaatatacgttgtgaaggaatgaccctaggagagctgctgaagcggaaaaactcggatgaatgcgaggtgtgctgtcaagggggacaacttctctgctgcggtacttgtccacgagtcttccatgaggactgtcacatcccccctgtggaagccaagaggatgctgtggagttgcaccttctgcaggatgaagaggtcttcaggaagccaacagtgccatcatgtatctaagaccctggagaggcagatgcagcctcaggaccagctgattcgagattacggtgagccctttcaggaagcaatgtggttggacctggttaaggaaaggctgattacggaaatgtacacggtggcatggtttgtgcgagacatgcgcctgatgtttcgcaaccataaaacattttacaaggcttctgactttggccaggtaggacttgacttagaggcagaatttgaaaaagatctcaaagacgtgctcggttttcatgaagccaatgacggcggtttctggactcttccttgaccctgttctgtaaagactgaagcatccccacctcaggattcagctgatgggaccctggcttggactgttgattgccagtgagtctgggatgtaattggctgccctcaggacccaaacccagacacttcataggattatcacaccctccatctttattctttctttttacctttaaaagtctatatctacactaaaaaaaaa

SEQ ID NO: 354095 - DNA, 2043 bp, Homo sapiens
gaggtggagagaggctgcaggcaccgacctgccttcagcttccggcttggcaaactccgaaaactttcacttttcttttctcggaagcccggccccttactgcgtttgtcaaagcacagacttcctgttttgcctgctagcatctccctgtaactctcccaatcttgaggagtgatccctgtcccagcccctggaaaggggcaggaacgacaaactcaaagtccaggatgttcaccatgacaagagccatggaagaggctctttttcagcacttcatgcaccagaagctggggatcgcctatgccatacacaagccatttcccttctttgaaggcctcctagacaactccatcatcactaagagaatgtacatggaatctctggaagcctgtagaaatttgatccctgtatccagagtggtgcacaacattctcacccaactggagaggacttttaacctgtctcttctggtgacattgttcagtcaaattaacctgcgtgaatatcccaatctggtgacgatttacagaagcttcaaacgtgttggtgcttcctatgaacggcagagcagagacacaccaatcctacttgaagccccaactggcctagcagaaggaagctccctccataccccactggcgctgcccccaccacaaccccctcaaccaagctgttcaccctgtgcgccaagagtcagtgagcctggaacatcctcccagcaaagcgatgagatcctgagtgagtcgcccagcccatctgaccctgtcctgcctctccctgcactcatccaggaaggaagaagcacttcagtgaccaatgacaagttaacatccaaaatgaatgcggaagaagactcagaagagatgcccagcctcctcactagcactgtgcaagtggccagtgacaacctgatcccccaaataagagataaagaagaccctcaagagatgccccactctcccttgggctctatgccagagataagagataattctccagaaccaaatgacccagaagagccccaggaggtgtccagcacaccttcagacaagaaaggaaagaaaagaaaaagatgtatctggtcaactccaaaaaggagacataagaaaaaaagcctcccaagagggacagcctcatctagacacggaatccaaaagaagctcaaaagggtggatcaggttcctcaaaagaaagatgactcaacttgtaactccacggtagagacaagggcccaaaaggcgagaactgaatgtgcccgaaagtcgagatcagaggagatcattgatggcacttcagaaatgaatgaaggaaagaggtcccagaagacgcctagtacaccacgaagggtcacacaaggggcagcctcacctgggcatggcatccaagagaagctccaagtggtggataaggtgactcaaaggaaagacgactcaacctggaactcagaggtcatgatgagggtccaaaaggcaagaactaaatgtgcccgaaagtccagatcgaaagaaaagaaaaaggagaaagatatctgttcaagctcaaaaaggagatttcagaaaaatattcaccgaagaggaaaacccaaaagtgacactgtggattttcactgttctaagctccccgtgacctgtggtgaggcgaaagggattttatataagaagaaaatgaaacacggatcctcagtgaagtgcattcggaatgaggatggaacttggttaacaccaaatgaatttgaagtcgaaggaaaaggaaggaacgcaaagaactggaaacggaatatacgttgtgaaggaatgaccctaggagagctgctgaaggtattataatgacgggacagataggtgacaggtttaaatccttgaaggagaagtggagctttaagagcagaaatgtgaagagctcccgttaggattcaacagcatgatttataaggagttaaatgttcatagaaaaaaaactgtgggtgacaaagttaggagcacatattgttcctgatggtggagaactttaaatgcaagtaaaggagtacaggaactttaaatg

SEQ ID NO: 354096 - DNA, 1904 bp, Homo sapiens
aattccggcatcgctttgctgggaggatgttccaggctcactgactcttggcgcacagggtgaacagcttggttgagtcgcccagcccatctgaccctgtcctgcctctccctgcactcatccaggaaggaagaagcacttcagtgaccaatgacaagttaacatccaaaatgaatgcggaagaagactcagaagagatgcccagcctcctcactagcactgtgcaagtggccagtgacaacctgatcccccaaataagagataaagaagaccctcaagagatgccccactctcccttgggctctatgccagagataagagataattctccagaaccaaatgacccagaagagccccaggaggtgtccagcacaccttcagacaagaaaggaaagaaaagaaaaagatgtatctggtcaactccaaaaaggagacataagaaaaaaagcctcccaagagggacagcctcatctagacacggaatccaaaagaagctcaaaagggtggatcaggttcctcaaaagaaagatgactcaacttgtaactccacggtagagacaagggcccaaaaggcgagaactgaatgtgcccgaaagtcgagatcagaggagatcattgatggcacttcagaaatgaatgaaggaaagaggtcccagaagacgcctagtacaccacgaagggtcacacaaggggcagcctcacctgggcatggcatccaagagaagctccaagtggtggataaggtgactcaaaggaaagacgactcaacctggaactcagaggtcatgatgagggtccaaaaggcaagaactaaatgtgcccgaaagtccagatcgaaagaaaagaaaaaggagaaagatatctgttcaagctcaaaaaggagatttcagaaaaatattcaccgaagaggaaaacccaaaagtgacactgtggattttcactgttctaagctccccgtgacctgtggtgaggcgaaagggattttatataagaagaaaatgaaacacggatcctcagtgaagtgcattcggaatgaggatggaacttggttaacaccaaatgaatttgaagtcgaaggaaaaggaaggaacgcaaagaactggaaacggaatatacgttgtgaaggaatgaccctaggagagctgctgaagcggaaaaactcggatgaatgcgaggtgtgctgtcaagggggacaacttctctgctgcggtacttgtccacgagtcttccatgaggactgtcacatcccccctgtggaagccaagaggatgctgtggagttgcaccttctgcaggatgaagaggtcttcaggaagccaacagtgccatcatgtatctaagaccctggagaggcagatgcagcctcaggaccagctgaaatgtgagttcctcctcttgaaggcctactgtcatccacaaagctccttttttacgggcatcccatttaatattcgagattacggtgagccctttcaggaagcaatgtggttggacctggttaaggaaaggctgattacggaaatgtacacggtggcatggtttgtgcgagacatgcgcctgatgtttcgcaaccataaaacattttacaaggcttctgactttggccaggtaggacttgacttagaggcagaatttgaaaaagatctcaaagacgtgctcggttttcatgaagccaatgacggcggtttctggactcttccttgaccctgttctgtaaagactgaagcatccccacctcaggattcagctgatgggaccctggcttggactgttgattgccagtgagtctgggatgtaattggctgccctcaggacccaaacccagacacttcataggattatcacaccctccatctttattctttctttttacctttaaaagtctatatctacactaaaaaaaaa

SEQ ID NO: 354097 - DNA, 701 bp, Homo sapiens
cacgttatctgcccttgcagcggaaaaactcggatgaatgcgaggtgtgctgtcaagggggacaacttctctgctgcggtacttgtccacgagtcttccatgaggactgtcacatcccccctgtggaagccaagaggatgctgtggagttgcaccttctgcaggatgaagaggtcttcaggaagccaacagtgccatcatgtatctaagaccctggagaggcagatgcagcctcaggaccagctgattcgagattacggtgagccctttcaggaagcaatgtggttggacctggttaaggaaaggctgattacggaaatgtacacggtggcatggtttgtgcgagacatgcgcctgatgtttcgcaaccataaaacattttacaaggcttctgactttggccaggtaggacttgacttagaggcagaatttgaaaaagatctcaaagacgtgctcggttttcatgaagccaatgacggcggtttctggactcttccttgaccctgttctgtaaagactgaagcatccccacctcaggattcagctgatgggaccctggcttggactgttgattgccagtgagtctgggatgtaattggctgccctcaggacccaaacccagacacttcataggattatcacaccctccatctttattctttctttttacctttaaaagtctatatctacactaaaaaaaaa

SEQ ID NO: 354098 - DNA, 2077 bp, Homo sapiens
gaggtggagagaggctgcaggcaccgacctgccttcagcttccggcttggcaaactccgaaaactttcacttttcttttctcggaagcccggccccttactgcgtttgtcaaagcacagacttcctgttttgcctgctagcatctccctgtaactctcccaatcttgaggagtgatccctgtcccagcccctggaaaggggcaggaacgacaaactcaaagtccaggatgttcaccatgacaagagccatggaagaggctctttttcagcacttcatgcaccagaagctggggatcgcctatgccatacacaagccatttcccttctttgaaggcctcctagacaactccatcatcactaagagaatgtacatggaatctctggaagcctgtagaaatttgatccctgtatccagagtggtgcacaacattctcacccaactggagaggacttttaacctgtctcttctggtgacattgttcagtcaaattaacctgcgtgaatatcccaatctggtgacgatttacagaagcttcaaacgtgttggtgcttcctatgaacggcagagcagagacacaccaatcctacttgaagccccaactggcctagcagaaggaagctccctccataccccactggcgctgcccccaccacaaccccctcaaccaagctgttcaccctgtgcgccaagagtcagtgagcctggaacatcctcccagcaaagcgatgagatcctgagtgagtcgcccagcccatctgaccctgtcctgcctctccctgcactcatccaggaaggaagaagcacttcagtgaccaatgacaagttaacatccaaaatgaatgcggaagaagactcagaagagatgcccagcctcctcactagcactgtgcaagtggccagtgacaacctgatcccccaaataagagataaagaagaccctcaagagatgccccactctcccttgggctctatgccagagataagagataattctccagaaccaaatgacccagaagagccccaggaggtgtccagcacaccttcagacaagaaaggaaagaaaagaaaaagatgtatctggtcaactccaaaaaggagacataagaaaaaaagcctcccaagagggacagcctcatctagacacggaatccaaaagaagctcaaaagggtggatcaggttcctcaaaagaaagatgactcaacttgtaactccacggtagagacaagggcccaaaaggcgagaactgaatgtgcccgaaagtcgagatcagaggagatcattgatggcacttcagaaatgaatgaaggaaagaggtcccagaagacgcctagtacaccacgaagggtcacacaaggggcagcctcacctgggcatggcatccaagagaagctccaagtggtggataaggtgactcaaaggaaagacgactcaacctggaactcagaggtcatgatgagggtccaaaaggcaagaactaaatgtgcccgaaagtccagatcgaaagaaaagaaaaaggagaaagatatctgttcaagctcaaaaaggagatttcagaaaaatattcaccgaagaggaaaacccaaaagtgacactgtggattttcactgttctaagctccccgtgacctgtggtgaggcgaaagggattttatataagaagaaaatgaaacacggatcctcagtgaagtgcattcggaatgaggatggaacttggttaacaccaaatgaatttgaagtcgaaggaaaaggaaggaacgcaaagaactggaaacggaatatacgttgtgaaggaatgaccctaggagagctgctgaagagtggacttttgctctgtcctccaagaataaatctcaagagagagttaaatagcaagtgaatttctactaccctctcagtcaccatgttgcagactttccctgtctggaggctcaccttagagcttctgagtttccaagctctgagtcacctccacatttgggcatggcatcttcaaaacaattaatttgcatagttaatttgggatggggaagcaaatgactctaaaataaaaattaaatgaaaaagcaaaaaaaaaaa

SEQ ID NO: 354099 - DNA, 2570 bp, Homo sapiens
gaggtggagagaggctgcaggcaccgacctgccttcagcttccggcttggcaaactccgaaaactttcacttttcttttctcggaagcccggccccttactgcgtttgtcaaagcacagacttcctgttttgcctgctagcatctccctgtaactctcccaatcttgaggagtgatccctgtcccagcccctggaaaggggcaggaacgacaaactcaaagtccaggatgttcaccatgacaagagccatggaagaggctctttttcagcacttcatgcaccagaagctggggatcgcctatgccatacacaagccatttcccttctttgaaggcctcctagacaactccatcatcactaagagaatgtacatggaatctctggaagcctgtagaaatttgatccctgtatccagagtggtgcacaacattctcacccaactggagaggacttttaacctgtctcttctggtgacattgttcagtcaaattaacctgcgtgaatatcccaatctggtgacgatttacagaagcttcaaacgtgttggtgcttcctatgaacggcagagcagagacacaccaatcctacttgaagccccaactggcctagcagaaggaagctccctccataccccactggcgctgcccccaccacaaccccctcaaccaagctgttcaccctgtgcgccaagagtcagtgagcctggaacatcctcccagcaaagcgatgagatcctgagtgagtcgcccagcccatctgaccctgtcctgcctctccctgcactcatccaggaaggaagaagcacttcagtgaccaatgacaagttaacatccaaaatgaatgcggaagaagactcagaagagatgcccagcctcctcactagcactgtgcaagtggccagtgacaacctgatcccccaaataagagataaagaagaccctcaagagatgccccactctcccttgggctctatgccagagataagagataattctccagaaccaaatgacccagaagagccccaggaggtgtccagcacaccttcagacaagaaaggaaagaaaagaaaaagatgtatctggtcaactccaaaaaggagacataagaaaaaaagcctcccaagagggacagcctcatctagacacggaatccaaaagaagctcaaaagggtggatcaggttcctcaaaagaaagatgactcaacttgtaactccacggtagagacaagggcccaaaaggcgagaactgaatgtgcccgaaagtcgagatcagaggagatcattgatggcacttcagaaatgaatgaaggaaagaggtcccagaagacgcctagtacaccacgaagggtcacacaaggggcagcctcacctgggcatggcatccaagagaagctccaagtggtggataaggtgactcaaaggaaagacgactcaacctggaactcagaggtcatgatgagggtccaaaaggcaagaactaaatgtgcccgaaagtccagatcgaaagaaaagaaaaaggagaaagatatctgttcaagctcaaaaaggagatttcagaaaaatattcaccgaagaggaaaacccaaaagtgacactgtggattttcactgttctaagctccccgtgacctgtggtgaggcgaaagggattttatataagaagaaaatgaaacacggatcctcagtgaagtgcattcggaatgaggatggaacttggttaacaccaaatgaatttgaagtcgaaggaaaaggaaggaacgcaaagaactggaaacggaatatacgttgtgaaggaatgaccctaggagagctgctgaagcggaaaaactcggatgaatgcgaggtgtgctgtcaagggggacaacttctctgctgcggtacttgtccacgagtcttccatgaggactgtcacatcccccctgtggaagccaagaggatgctgtggagttgcaccttctgcaggatgaagaggtcttcaggaagccaacagtgccatcatgtatctaagaccctggagaggcagatgcagcctcaggaccagctgaaatgtgagttcctcctcttgaaggcctactgtcatccacaaagctccttttttacgggcatcccatttaatattcgagattacggtgagccctttcaggaagcaatgtggttggacctggttaaggaaaggctgattacggaaatgtacacggtggcatggtttgtgcgagacatgcgcctgatgtttcgcaaccataaaacattttacaaggcttctgactttggccaggtaggacttgacttagaggcagaatttgaaaaagatctcaaagacgtgctcggttttcatgaagccaatgacggcggtttctggactcttccttgaccctgttctgtaaagactgaagcatccccacctcaggattcagctgatgggaccctggcttggactgttgattgccagtgagtctgggatgtaattggctgccctcaggacccaaacccagacacttcataggattatcacaccctccatctttattctttctttttacctttaaaagtctatatctacactaaaaaaaaa

SEQ ID NO: 354100 - DNA, 1927 bp, Homo sapiens
gaggtggagagaggctgcaggcaccgacctgccttcagcttccggcttggcaaactccgaaaactttcacttttcttttctcggaagcccggccccttactgcgtttgtcaaagcacagacttcctgttttgcctgctagcatctccctgtaactctcccaatcttgaggagtgatccctgtcccagcccctggaaaggggcaggaacgacaaactcaaagtccaggatgttcaccatgacaagagccatggaagaggctctttttcagcacttcatgcaccagaagctggggatcgcctatgccatacacaagccatttcccttctttgaaggcctcctagacaactccatcatcactaagagaatgtacatggaatctctggaagcctgtagaaatttgatccctgtatccagagtggtgcacaacattctcacccaactggagaggacttttaacctgtctcttctggtgacattgttcagtcaaattaacctgcgtgaatatcccaatctggtgacgatttacagaagcttcaaacgtgttggtgcttcctatgaacggcagagcagagacacaccaatcctacttgaagccccaactggcctagcagaaggaagctccctccataccccactggcgctgcccccaccacaaccccctcaaccaagctgttcaccctgtgcgccaagagtcagtgagcctggaacatcctcccagcaaagcgatgagatcctgagtgagtcgcccagcccatctgaccctgtcctgcctctccctgcactcatccaggaaggaagaagcacttcagtgaccaatgacaagttaacatccaaaatgaatgcggaagaagactcagaagagatgcccagcctcctcactagcactgtgcaagtggccagtgacaacctgatcccccaaataagagataaagaagaccctcaagagatgccccactctcccttgggctctatgccagagataagagataattctccagaaccaaatgacccagaagagccccaggaggtgtccagcacaccttcagacaagaaaggaaagaaaagaaaaagatgtatctggtcaactccaaaaaggagacataagaaaaaaagcctcccaagagagatcattgatggcacttcagaaatgaatgaaggaaagaggtcccagaagacgcctagtacaccacgaagggtcacacaaggggcagcctcacctgggcatggcatccaagagaagctccaagtggtggataaggtgactcaaaggaaagacgactcaacctggaactcagaggtcatgatgagggtccaaaaggcaagaactaaatgtgcccgaaagtccagatcgaaagaaaagaaaaaggagaaagatatctgttcaagctcaaaaaggagatttcagaaaaatattcaccgaagaggaaaacccaaaagtgacactgtggattttcactgttctaagctccccgtgacctgtggtgaggcgaaagggattttatataagaagaaaatgaaacacggatcctcagtgaagtgcattcggaatgaggatggaacttggttaacaccaaatgaatttgaagtcgaaggaaaaggaaggaacgcaaagaactggaaacggaatatacgttgtgaaggaatgaccctaggagagctgctgaagagtggacttttgctctgtcctccaagaataaatctcaagagagagttaaatagcaagtgaatttctactaccctctcagtcaccatgttgcagactttccctgtctggaggctcaccttagagcttctgagtttccaagctctgagtcacctccacatttgggcatggcatcttcaaaacaattaatttgcatagttaatttgggatggggaagcaaatgactctaaaataaaaattaaatgaaaaagcaaaaaaaaaaa

SEQ ID NO: 354101 - DNA, 1443 bp, Homo sapiens
gaggtggagagaggctgcaggcaccgacctgccttcagcttccggcttggcaaactccgaaaactttcacttttcttttctcggaagcccggccccttactgcgtttgtcaaagcacagacttcctgttttgcctgctagcatctccctgtaactctcccaatcttgaggagtgatccctgtcccagcccctggaaaggggcaggaacgacaaactcaaagtccaggatgttcaccatgacaagagccatggaagaggctctttttcagcacttcatgcaccagaagctggggatcgcctatgccatacacaagccatttcccttctttgaaggcctcctagacaactccatcatcactaagagaatgtacatggaatctctggaagcctgtagaaatttgatccctgtatccagagtggtgcacaacattctcacccaactggagaggacttttaacctgtctcttctggtgacattgttcagtcaaattaacctgcgtgaatatcccaatctggtgacgatttacagaagcttcaaacgtgttggtgcttcctatgaacggcagagcagagacacaccaatcctacttgaagccccaactggcctagcagaaggaagctccctccataccccactggcgctgcccccaccacaaccccctcaaccaagctgttcaccctgtgcgccaagagtcagtgagcctggaacatcctcccagcaaagcgatgagatcctgagtgagtcgcccagcccatctgaccctgtcctgcctctccctgcactcatccaggaaggaagaagcacttcagtgaccaatgacaagttaacatccaaaatgaatgcggaagaagactcagaagagatgcccagcctcctcactagcactgtgcaagtggccagtgacaacctgatcccccaaataagagataaagaagaccctcaagagatgccccactctcccttgggctctatgccagagataagagataattctccagaaccaaatgacccagaagagccccaggaggtgtccagcacaccttcagacaagaaaggaaagaaaagaaaaagatgtatctggtcaactccaaaaaggagacataagaaaaaaagcctcccaagagggacagcctcatctagacacggaatccaaaagaagctcaaaagggtggatcaggttcctcaaaagaaagatgactcaacttgtaactccacggtagagacaagggcccaaaaggcgagaactgaatgtgcccgaaagtcgagatcagaggagatcattgatggcacttcagaaatgaatgaaggaaagaggtcccagaagacgcctagtacaccacgaagggtcacacaaggtaaaacttggagattgctggtctcagagtacagtcaccaggaatctaaattcagagctgtcttacactgaggcaatatttcttaac

SEQ ID NO: 354102 - DNA, 2195 bp, Homo sapiens
gaggtggagagaggctgcaggcaccgacctgccttcagcttccggcttggcaaactccgaaaactttcacttttcttttctcggaagcccggccccttactgcgtttgtcaaagcacagacttcctgttttgcctgctagcatctccctgtaactctcccaatcttgaggagtgatccctgtcccagcccctggaaaggggcaggaacgacaaactcaaagtccagagtccagcctgttattgtgaatggagccgagatttgccctctaccctcacctaagctctgatccttcagtgcccgcaataggcggctcatctgttatccattgtgtaaatgactagaggatgttcaccatgacaagagccatggaagaggctctttttcagcacttcatgcaccagaagctggggatcgcctatgccatacacaagccatttcccttctttgaaggcctcctagacaactccatcatcactaagagaatgtacatggaatctctggaagcctgtagaaatttgatccctgtatccagagtggtgcacaacattctcacccaactggagaggacttttaacctgtctcttctggtgacattgttcagtcaaattaacctgcgtgaatatcccaatctggtgacgatttacagaagcttcaaacgtgttggtgcttcctatgaacggcagagcagagacacaccaatcctacttgaagccccaactggcctagcagaaggaagctccctccataccccactggcgctgcccccaccacaaccccctcaaccaagctgttcaccctgtgcgccaagagtcagtgagcctggaacatcctcccagcaaagcgatgagatcctgagtgagtcgcccagcccatctgaccctgtcctgcctctccctgcactcatccaggaaggaagaagcacttcagtgaccaatgacaagttaacatccaaaatgaatgcggaagaagactcagaagagatgcccagcctcctcactagcactgtgcaagtggccagtgacaacctgatcccccaaataagagataaagaagaccctcaagagatgccccactctcccttgggctctatgccagagataagagataattctccagaaccaaatgacccagaagagccccaggaggtgtccagcacaccttcagacaagaaaggaaagaaaagaaaaagatgtatctggtcaactccaaaaaggagacataagaaaaaaagcctcccaagagggacagcctcatctagacacggaatccaaaagaagctcaaaagggtggatcaggttcctcaaaagaaagatgactcaacttgtaactccacggtagagacaagggcccaaaaggcgagaactgaatgtgcccgaaagtcgagatcagaggagatcattgatggcacttcagaaatgaatgaaggaaagaggtcccagaagacgcctagtacaccacgaagggtcacacaaggggcagcctcacctgggcatggcatccaagagaagctccaagtggtggataaggtgactcaaaggaaagacgactcaacctggaactcagaggtcatgatgagggtccaaaaggcaagaactaaatgtgcccgaaagtccagatcgaaagaaaagaaaaaggagaaagatatctgttcaagctcaaaaaggagatttcagaaaaatattcaccgaagaggaaaacccaaaagtgacactgtggattttcactgttctaagctccccgtgacctgtggtgaggcgaaagggattttatataagaagaaaatgaaacacggatcctcagtgaagtgcattcggaatgaggatggaacttggttaacaccaaatgaatttgaagtcgaaggaaaaggaaggaacgcaaagaactggaaacggaatatacgttgtgaaggaatgaccctaggagagctgctgaagagtggacttttgctctgtcctccaagaataaatctcaagagagagttaaatagcaagtgaatttctactaccctctcagtcaccatgttgcagactttccctgtctggaggctcaccttagagcttctgagtttccaagctctgagtcacctccacatttgggcatggcatcttcaaaacaattaatttgcatagttaatttgggatggggaagcaaatgactctaaaataaaaattaaatgaaaaagcaaaaaaaaaaa

SEQ ID NO: 354103 - DNA, 1929 bp, Homo sapiens
gaggtggagagaggctgcaggcaccgacctgccttcagcttccggcttggcaaactccgaaaactttcacttttcttttctcggaagcccggccccttactgcgtttgtcaaagcacagacttcctgttttgcctgctagcatctccctgtaactctcccaatcttgaggagtgatccctgtcccagcccctggaaaggggcaggaacgacaaactcaaagtccaggaatctctggaagcctgtagaaatttgatccctgtatccagagtggtgcacaacattctcacccaactggagaggacttttaacctgtctcttctggtgacattgttcagtcaaattaacctgcgtgaatatcccaatctggtgacgatttacagaagcttcaaacgtgttggtgcttcctatgaacggcagagcagagacacaccaatcctacttgaagccccaactggcctagcagaaggaagctccctccataccccactggcgctgcccccaccacaaccccctcaaccaagctgttcaccctgtgcgccaagagtcagtgagcctggaacatcctcccagcaaagcgatgagatcctgagtgagtcgcccagcccatctgaccctgtcctgcctctccctgcactcatccaggaaggaagaagcacttcagtgaccaatgacaagttaacatccaaaatgaatgcggaagaagactcagaagagatgcccagcctcctcactagcactgtgcaagtggccagtgacaacctgatcccccaaataagagataaagaagaccctcaagagatgccccactctcccttgggctctatgccagagataagagataattctccagaaccaaatgacccagaagagccccaggaggtgtccagcacaccttcagacaagaaaggaaagaaaagaaaaagatgtatctggtcaactccaaaaaggagacataagaaaaaaagcctcccaagagggacagcctcatctagacacggaatccaaaagaagctcaaaagggtggatcaggttcctcaaaagaaagatgactcaacttgtaactccacggtagagacaagggcccaaaaggcgagaactgaatgtgcccgaaagtcgagatcagaggagatcattgatggcacttcagaaatgaatgaaggaaagaggtcccagaagacgcctagtacaccacgaagggtcacacaaggggcagcctcacctgggcatggcatccaagagaagctccaagtggtggataaggtgactcaaaggaaagacgactcaacctggaactcagaggtcatgatgagggtccaaaaggcaagaactaaatgtgcccgaaagtccagatcgaaagaaaagaaaaaggagaaagatatctgttcaagctcaaaaaggagatttcagaaaaatattcaccgaagaggaaaacccaaaagtgacactgtggattttcactgttctaagctccccgtgacctgtggtgaggcgaaagggattttatataagaagaaaatgaaacacggatcctcagtgaagtgcattcggaatgaggatggaacttggttaacaccaaatgaatttgaagtcgaaggaaaaggaaggaacgcaaagaactggaaacggaatatacgttgtgaaggaatgaccctaggagagctgctgaagagtggacttttgctctgtcctccaagaataaatctcaagagagagttaaatagcaagtgaatttctactaccctctcagtcaccatgttgcagactttccctgtctggaggctcaccttagagcttctgagtttccaagctctgagtcacctccacatttgggcatggcatcttcaaaacaattaatttgcatagttaatttgggatggggaagcaaatgactctaaaataaaaattaaatgaaaaagcaaaaaaaaaaa

SEQ ID NO: 354104 - DNA, 947 bp, Homo sapiens
atggcgagcagcggagtcaagaacacaccacgatggcggagaaaagcccctcatgggagggaaaggaaagagaaaggaaagaaaagaaaaagatgtatctggtcaactccaaaaaggagacataagaaaaaaagcctcccaagagagatcattgatggcacttcagaaatgaatgaaggaaagaggtcccagaagacgcctagtacaccacgaagggtcacacaaggggcagcctcacctgggcatggcatccaagagaagctccaagtggtggataaggtgactcaaaggaaagacgactcaacctggaactcagaggtcatgatgagggtccaaaaggcaagaactaaatgtgcccgaaagtccagatcgaaagaaaagaaaaaggagaaagatatctgttcaagctcaaaaaggagatttcagaaaaatattcaccgaagaggaaaacccaaaagtgacactgtggattttcactgttctaagctccccgtgacctgtggtgaggcgaaagggattttatataagaagaaaatgaaacacggatcctcagtgaagtgcattcggaatgaggatggaacttggttaacaccaaatgaatttgaagtcgaaggaaaaggaaggaacgcaaagaactggaaacggaatatacgttgtgaaggaatgaccctaggagagctgctgaagagtggacttttgctctgtcctccaagaataaatctcaagagagagttaaatagcaagtgaatttctactaccctctcagtcaccatgttgcagactttccctgtctggaggctcaccttagagcttctgagtttccaagctctgagtcacctccacatttgggcatggcatcttcaaaacaattaatttgcatagttaatttgggatggggaagcaaatgactctaaaataaaaattaaatgaaaaagcaaaaaaaaaaa

SEQ ID NO: 354105 - DNA, 605 bp, Homo sapiens
ggacagcctcatctagacacggaatccaaaagaagctcaaaagggtggatcaggttcctcaaaagaaagatgactcaacttgtaactccacggtagagacaagggcccaaaaggcgagaactgaatgtgcccgaaagtcgagatcagagggtaaggctgatgatggaatctgccatttgaatggctcagtgtgggagggtctctcctgaagcaggtacagagttaagtagatatgtaaagtcaatagtaaaaggaaaaagtacagagaatgaggatggggtataacaagaggaacaaagagagcaagcatctgttgcatctgaaaagttttgtggaagaaacagacgtgttcacagggacagctgtggcctggggcagcagctctcaaattttttggtctcaggactcctttatgctctcaaaaattattgaggaccctaaggagcttctgtttatgttgtttatgtctatctacatgtacctgattagaaattaaaactaataattttaaaatattaattcatgtaaaagtaacaataataaaccaattgcctgttaacataaatagcattattttatgaaaagtaaatatattttctaaaaca

SEQ ID NO: 354106 - DNA, 2677 bp, Homo sapiens
ggtcgattccatttggcccggggatggtcacacgcgcgggggccggaactgccgtcgccggcgcggtcgttgtcgcattgctctcggccgcactcgcgctgtacgggccgccactggacgcagttttagaaagagcgttttcgctacgtaaagcacattcgataaaggatatggaaaatactttgcagctggtgagaaatatcatacctcctctgtcttccacaaagcacaaagggcaagatggaagaataggcgtagttggaggctgtcaggagtacactggagccccatattttgcagcaatctcagctctcaaagtgggcgcagacttgtcccacgtgttctgtgccagtgcggccgcacctgtgattaaggcctacagcccggagctgatcgtccacccagttcttgacagccccaatgctgttcatgaggtggagaagtggctgccccggctgcatgctcttgtcgtaggacctggcttgggtagagatgatgcgcttctcagaaatgtccagggcattttggaagtgtcaaaggccagggacatccctgttgtcatcgacgcggatggcctgtggctggtcgctcagcagccggccctcatccatggctaccggaaggctgtgctcactcccaaccacgtggagttcagcagactgtatgacgctgtgctcagaggccctatggacagcgatgacagccatggatctgtgctaagactcagccaagccctgggcaacgtgacggtggtccagaaaggagagcgcgacatcctctccaacggccagcaggtgcttgtgtgcagccaggaaggcagcagccgcaggtgtggagggcaaggggacctcctgtcgggctccctgggcgtcctggtacactgggcgctccttgctggaccacagaaaacaaatgggggcatatcagacttgaaattgacaatttggggtcctgagattgaaacaggagtcaaaaccagagcccagggtagctgcggcccccggaccacgacgcccacttccccacacctcctgctgtccccctctccgcaggtccagccctctcctggtggccgcgtttggcgcctgctctctcaccaggcagtgcaaccaccaagccttccagaagcacggtcgctccaccaccacctccgacatgatcgccgaggtgggggccgccttcagcaagctctttgaaacctgagcccgcgcagaccagaagtaaacaggcaccttggacgggggagagcgtgtgtgtgatgggaaaatccggacccacgcgtgtgctgaaggcgtacggtgcttgccagattttcaacttgagcataaattggttgccattgagaatttaagaatctggaatattgcagcttttggttaaacttaatgcatggttggagatgttatggcgacactaaacaaagtattcctgaactttccttagctccttggtagtaactgggaagacagaaatgaagaaaatcacatgagaatgaagaattctttagcagctcaacagagtttctcggcctgctcccagatcggcgaagtttctacttgttactctctctgccggcgcccttcgttcctcctctgcttcccttccctagtctttcctccggcagggagctgggcaggggtccccgggtgtctccctgagtcccgactgcactgactgggtccatcagagggctgcttcgttctccagctcatcttcttttaaagtggtgactagcttggtggtatctggctgctggtgtttggcttattgacatactccagggtaatcaatgatgactttgtttggaaacccttttggaggcaccatgggaacagaaggaaacatgagtgacgctgacccttgagtgtgtgggtggggagctctgagacgcctcctgtcccacgctctccggtgtccgtgtctacacaggggtccccatgatacccaccggccccagcagggcagaccggaccggggacgggcacggtgaagggctgcagcctggggtctgacgtggcccctagtgctgtctcaggagaaggctctggaggacttgaggcatgctgggcctggtgcagtgatggcgctaaggagacccggggaaagacagtatcgtggtcacgtatgcttaggaagcagcacagccgtgtccttagggatgttcgcgtccagtaaagacactggtaactgcggtttcagccaacactcttcatggcagtgtcgacctcgggttagcttctgttgtctttgtggatggttttcctggagcggcctgacgttgacgtgttctctggtcccatgtcttagcggggcatggtacggtttcgtgcctgacgcgtgcattagggtgttctcttatactttcagtagcatctttccacagcaagggccaaaccctcctggttcccttcagagtctttttggcctgatgatgactcttgagtgataccctgtgatgcagacatgccccagatggattctactttctttaaaactagggactttcaagattaaaaaaaagattgtcactactaatttgacgcctaacttcagaagcttcactgtctacatgtgaacttttccagaaaaactgtgccatggacatttttcctctggggaattaacatctaaattctggtaactattaaaagacagatctggttaatttaaaaaaaaa

SEQ ID NO: 354107 - DNA, 1759 bp, Homo sapiens
ggtattttattgcatttcattctcttttatcaaaatgactggaaagtgcagaaagccccgaagctgatgctggtagtggaatctcaggcactgagtgtggcgagtctcaactggccactcccacggagcctggggaggcttcagcaagagccaagtgagagcagggcagaggccgggcccagcgccagcgaggcatctggggagccgtgcccttgttagcgctgaaaatggaagcccctccattcaggcctggacagatgatgggcagcgaatgtgctcacctgctgagctgtggggctggactaggtaccaaaatcagggtagaacactgaggcgtctgtgggcgggtgtgtgcacatccacacttgtacactcacattcacatgcacatatgtgcacacgcatgcaattcatacacatgcacagttgtgctcacagcctcgcacgcccttgcacactcgcacttatacacatgcatggtcatgctcacagcctcgcacacgccctcgcacactcatccacacacagctgtgcacaaggaacacagagcagatgttctcagagggactctgacacctttgagatgagggttttttaatcactggaaggctctcttgggtctaacaggttcagagaatgtaacacctggttttcaaaacatttttcaaagaaatagagaattcccatacacaggcatacgtgacgttatgaggccggtggaggcctcgctcggtgttgccctgtatggttgagctgtggtttaaggtgaactctggagtgtgggctgcaggtgagggctccgtccctgggagctggtgggaggagctggaggctggcgccgccctgctcagagctgcctgcttgggctcgtctgaggcggttccgagctgcaggtgtctccaccaacctgctgtgctacacagcggggtctggggcagcctcaccactgcgtgtcttggtttcctcttctgtaaaacagaggctgcctccaacccttggaacaaacagggaagagccgtagcaggcaggatgtgagtggagcctcaggctgctcctggagggtgtggctctgcctgccgtgcggccttccacacccgtggctactgtcacattcacacacatggccatgctgacacctgctctcacttctgccctgtgcagtgcttgtgtgcagccaggaaggcagcagccgcaggtgtggagggcaaggggacctcctgtcgggctccctgggcgtcctggtacactgggcgctccttgctggaccacagaaaacaaatgggggtaaggccacgtcttcatttattctactttgaaaccgtctgatttttctaagctgtttcagtagctcatgcgttgaataagtagccctggaaacactgacaatgaactctaggcttcactggagagatctcggcacagacgaaccctcttggcagaagcttccaccccacacttgggcctgggcctgtccatcattcactgtggatggggcctggggcaggggtggtcttcagagctctccagagagttccgaggtgcaaccaaggcccagcagcacgctgttctgggaagttgagtggtttattctgtgtaacacagaatactaagatagaaaacagacagggtcaaggcttacttagacacttgttcttaaagatgtgaattttctttaagagacagcagaattctaggaccagggcccttggcccagttctgtagtcagagaactttatgaatgcaagcagttcccatacct

SEQ ID NO: 354108 - DNA, 2299 bp, Homo sapiens
ataaacttgcgcccgcacctgtgattaaggcctacagcccggagctgatcgtccacccagttcttgacagccccaatgctgttcatgaggtggagaagtggctgccccggctgcatgctcttgtcgtaggacctggcttgggtagagatgatcgtccacccagttcttgacagccccaatgctgttcatgaggtggagaagtggctgccccggctgcatgctcttgtcgtaggacctggcttgggtagagatgatgcgcttctcagaaatgtccagggcattttggaagtgtcaaaggccagggacatccctgttgtcatcgacgcggatggcctgtggctggtcgctcagcagccggccctcatccatggctaccggaaggctgtgctcactcccaaccacgtggagttcagcagactgtatgacgctgtgctcagaggccctatggacagcgatgacagccatggatctgtgctaagactcagccaagccctgggcaacgtgacggtggtccagaaaggagagcgcgacatcctctccaacggccagcaggtgcttgtgtgcagccaggaaggcagcagccgcaggtgtggagggcaaggggacctcctgtcgggctccctgggcgtcctggtacactgggcgctccttgctggaccacagaaaacaaatgggtccagccctctcctggtggccgcgtttggcgcctgctctctcaccaggcagtgcaaccaccaagccttccagaagcacggtcgctccaccaccacctccgacatgatcgccgaggtgggggccgccttcagcaagctctttgaaacctgagcccgcgcagaccagaagtaaacaggcaccttggacgggggagagcgtgtgtgtgatgggaaaatccggacccacgcgtgtgctgaaggcgtacggtgcttgccagattttcaacttgagcataaattggttgccattgagaatttaagaatctggaatattgcagcttttggttaaacttaatgcatggttggagatgttatggcgacactaaacaaagtattcctgaactttccttagctccttggtagtaactgggaagacagaaatgaagaaaatcacatgagaatgaagaattctttagcagctcaacagagtttctcggcctgctcccagatcggcgaagtttctacttgttactctctctgccggcgcccttcgttcctcctctgcttcccttccctagtctttcctccggcagggagctgggcaggggtccccgggtgtctccctgagtcccgactgcactgactgggtccatcagagggctgcttcgttctccagctcatcttcttttaaagtggtgactagcttggtggtatctggctgctggtgtttggcttattgacatactccagggtaatcaatgatgactttgtttggaaacccttttggaggcaccatgggaacagaaggaaacatgagtgacgctgacccttgagtgtgtgggtggggagctctgagacgcctcctgtcccacgctctccggtgtccgtgtctacacaggggtccccatgatacccaccggccccagcagggcagaccggaccggggacgggcacggtgaagggctgcagcctggggtctgacgtggcccctagtgctgtctcaggagaaggctctggaggacttgaggcatgctgggcctggtgcagtgatggcgctaaggagacccggggaaagacagtatcgtggtcacgtatgcttaggaagcagcacagccgtgtccttagggatgttcgcgtccagtaaagacactggtaactgcggtttcagccaacactcttcatggcagtgtcgacctcgggttagcttctgttgtctttgtggatggttttcctggagcggcctgacgttgacgtgttctctggtcccatgtcttagcggggcatggtacggtttcgtgcctgacgcgtgcattagggtgttctcttatactttcagtagcatctttccacagcaagggccaaaccctcctggttcccttcagagtctttttggcctgatgatgactcttgagtgataccctgtgatgcagacatgccccagatggattctactttctttaaaactagggactttcaagattaaaaaaaagattgtcactactaatttgacgcctaacttcagaagcttcactgtctacatgtgaacttttccagaaaaactgtgccatggacatttttcctctggggaattaacatctaaattctggtaactattaaaagacagatctggttaatttaaaaaaaaa

SEQ ID NO: 354109 - DNA, 2471 bp, Homo sapiens
cttccaatggctggtttccggcgacggcgcgggggcagctgggaatccggaatgctgcccgatggccctgggtcctcgctgtggggcaatccgggcttgcagacgagttttagaaagagcgttttcgctacgtaaagcacattcgataaaggatatggaaaatactttgcagctggtgagaaatatcatacctcctctgtcttccacaaagcacaaagggcaagatggaagaataggcgtagttggaggctgtcaggagtacactggagccccatattttgcagcaatctcagctctcaaagtgggcgcagacttgtcccacgtgttctgtgccagtgcggccgcacctgtgattaaggcctacagcccggagctgatcgtccacccagttcttgacagccccaatgctgttcatgaggtggagaagtggctgccccggctgcatgctcttgtcgtaggacctggcttgggtagagatgatgcgcttctcagaaatgtccagggcattttggaagtgtcaaaggccagggacatccctgttgtcatcgacgcggatggcctgtggctggtcgctcagcagccggccctcatccatggctaccggaaggctgtgctcactcccaaccacgtggagttcagcagactgtatgacgctgtgctcagaggccctatggacagcgatgacagccatggatctgtgctaagactcagccaagccctgggcaacgtgacggtggtccagaaaggagagcgcgacatcctctccaacggccagcaggtgcttgtgtgcagccaggaaggcagcagccgcaggtgtggagggcaaggggacctcctgtcgggctccctgggcgtcctggtacactgggcgctccttgctggaccacagaaaacaaatgggtccagccctctcctggtggccgcgtttggcgcctgctctctcaccaggcagtgcaaccaccaagccttccagaagcacggtcgctccaccaccacctccgacatgatcgccgaggtgggggccgccttcagcaagctctttgaaacctgagcccgcgcagaccagaagtaaacaggcaccttggacgggggagagcgtgtgtgtgatgggattgagcataaattggttgccattgagaatttaagaatctggaatattgcagcttttggttaaacttaatgcatggttggagatgttatggcgacactaaacaaagtattcctgaactttccttagctccttggtagtaactgggaagacagaaatgaagaaaatcacatgagaatgaagaattctttagcagctcaacagagtttctcggcctgctcccagatcggcgaagtttctacttgttactctctctgccggcgcccttcgttcctcctctgcttcccttccctagtctttcctccggcagggagctgggcaggggtccccgggtgtctccctgagtcccgactgcactgactgggtccatcagagggctgcttcgttctccagctcatcttcttttaaagtggtgactagcttggtggtatctggctgctggtgtttggcttattgacatactccagggtaatcaatgatgactttgtttggaaacccttttggaggcaccatgggaacagaaggaaacatgagtgacgctgacccttgagtgtgtgggtggggagctctgagacgcctcctgtcccacgctctccggtgtccgtgtctacacaggggtccccatgatacccaccggccccagcagggcagaccggaccggggacgggcacggtgaagggctgcagcctggggtctgacgtggcccctagtgctgtctcaggagaaggctctggaggacttgaggcatgctgggcctggtgcagtgatggcgctaaggagacccggggaaagacagtatcgtggtcacgtatgcttaggaagcagcacagccgtgtccttagggatgttcgcgtccagtaaagacactggtaactgcggtttcagccaacactcttcatggcagtgtcgacctcgggttagcttctgttgtctttgtggatggttttcctggagcggcctgacgttgacgtgttctctggtcccatgtcttagcggggcatggtacggtttcgtgcctgacgcgtgcattagggtgttctcttatactttcagtagcatctttccacagcaagggccaaaccctcctggttcccttcagagtctttttggcctgatgatgactcttgagtgataccctgtgatgcagacatgccccagatggattctactttctttaaaactagggactttcaagattaaaaaaaagattgtcactactaatttgacgcctaacttcagaagcttcactgtctacatgtgaacttttccagaaaaactgtgccatggacatttttcctctggggaattaacatctaaattctggtaactattaaaagacagatctggttaatttaaaaaaaaa

SEQ ID NO: 354110 - DNA, 2375 bp, Homo sapiens
cttccaatggctggtttccggcgacggcgcgggggcagctgggaatccggaatgctgcccgatggccctgggtcctcgctgtggggcaatccgggcttgcagacgagtgacagccccaatgctgttcatgaggtggagaagtggctgccccggctgcatgctcttgtcgtaggacctggcttgggtagagatgatgcgcttctcagaaatgtccagggcattttggaagtgtcaaaggccagggacatccctgttgtcatcgacgcggatggcctgtggctggtcgctcagcagccggccctcatccatggctaccggaaggctgtgctcactcccaaccacgtggagttcagcagactgtatgacgctgtgctcagaggccctatggacagcgatgacagccatggatctgtgctaagactcagccaagccctgggcaacgtgacggtggtccagaaaggagagcgcgacatcctctccaacggccagcaggtgcttgtgtgcagccaggaaggcagcagccgcaggtgtggagggcaaggggacctcctgtcgggctccctgggcgtcctggtacactgggcgctccttgctggaccacagaaaacaaatgggggcatatcagacttgaaattgacaatttggggtcctgagattgaaacaggagtcaaaaccagagcccagggtagctgcggcccccggaccacgacgcccacttccccacacctcctgctgtccccctctccgcaggtccagccctctcctggtggccgcgtttggcgcctgctctctcaccaggcagtgcaaccaccaagccttccagaagcacggtcgctccaccaccacctccgacatgatcgccgaggtgggggccgccttcagcaagctctttgaaacctgagcccgcgcagaccagaagtaaacaggcaccttggacgggggagagcgtgtgtgtgatgggaaaatccggacccacgcgtgtgctgaaggcgtacggtgcttgccagattttcaacttgagcataaattggttgccattgagaatttaagaatctggaatattgcagcttttggttaaacttaatgcatggttggagatgttatggcgacactaaacaaagtattcctgaactttccttagctccttggtagtaactgggaagacagaaatgaagaaaatcacatgagaatgaagaattctttagcagctcaacagagtttctcggcctgctcccagatcggcgaagtttctacttgttactctctctgccggcgcccttcgttcctcctctgcttcccttccctagtctttcctccggcagggagctgggcaggggtccccgggtgtctccctgagtcccgactgcactgactgggtccatcagagggctgcttcgttctccagctcatcttcttttaaagtggtgactagcttggtggtatctggctgctggtgtttggcttattgacatactccagggtaatcaatgatgactttgtttggaaacccttttggaggcaccatgggaacagaaggaaacatgagtgacgctgacccttgagtgtgtgggtggggagctctgagacgcctcctgtcccacgctctccggtgtccgtgtctacacaggggtccccatgatacccaccggccccagcagggcagaccggaccggggacgggcacggtgaagggctgcagcctggggtctgacgtggcccctagtgctgtctcaggagaaggctctggaggacttgaggcatgctgggcctggtgcagtgatggcgctaaggagacccggggaaagacagtatcgtggtcacgtatgcttaggaagcagcacagccgtgtccttagggatgttcgcgtccagtaaagacactggtaactgcggtttcagccaacactcttcatggcagtgtcgacctcgggttagcttctgttgtctttgtggatggttttcctggagcggcctgacgttgacgtgttctctggtcccatgtcttagcggggcatggtacggtttcgtgcctgacgcgtgcattagggtgttctcttatactttcagtagcatctttccacagcaagggccaaaccctcctggttcccttcagagtctttttggcctgatgatgactcttgagtgataccctgtgatgcagacatgccccagatggattctactttctttaaaactagggactttcaagattaaaaaaaagattgtcactactaatttgacgcctaacttcagaagcttcactgtctacatgtgaacttttccagaaaaactgtgccatggacatttttcctctggggaattaacatctaaattctggtaactattaaaagacagatctggttaatttaaaaaaaaa

SEQ ID NO: 354111 - DNA, 2512 bp, Homo sapiens
cttccaatggctggtttccggcgacggcgcgggggcagctgggaatccggaatgctgcccgatggccctgggtcctcgctgtggggcaatccgggcttgcagacgagttttagaaagagcgttttcgctacgtaaagcacattcgataaaggatatggaaaatactttgcagctggtgagaaatatcatacctcctctgtcttccacaaagcacaaagggcaagatggaagaataggcgtagttggaggctgtcaggagtacactggagccccatattttgcagcaatctcagctctcaaagtgtgacagccccaatgctgttcatgaggtggagaagtggctgccccggctgcatgctcttgtcgtaggacctggcttgggtagagatgatgcgcttctcagaaatgtccagggcattttggaagtgtcaaaggccagggacatccctgttgtcatcgacgcggtgagttgacttctctcctcctggctcggactcccggaaggcctgtgcagtgagcacggctccttgttctgtgcaggatggcctgtggctggtcgctcagcagccggccctcatccatggctaccggaaggctgtgctcactcccaaccacgtggagttcagcagactgtatgacgctgtgctcagaggccctatggacagcgatgacagccatggatctgtgctaagactcagccaagccctgggcaacgtgacggtggtccagaaaggagagcgcgacatcctctccaacggccagcaggtgcttgtgtgcagccaggaaggcagcagccgcaggtgtggagggcaaggggacctcctgtcgggctccctgggcgtcctggtacactgggcgctccttgctggaccacagaaaacaaatgggtccagccctctcctggtggccgcgtttggcgcctgctctctcaccaggcagtgcaaccaccaagccttccagaagcacggtcgctccaccaccacctccgacatgatcgccgaggtgggggccgccttcagcaagctctttgaaacctgagcccgcgcagaccagaagtaaacaggcaccttggacgggggagagcgtgtgtgtgatgggaaaatccggacccacgcgtgtgctgaaggcgtacggtgcttgccagattttcaacttgagcataaattggttgccattgagaatttaagaatctggaatattgcagcttttggttaaacttaatgcatggttggagatgttatggcgacactaaacaaagtattcctgaactttccttagctccttggtagtaactgggaagacagaaatgaagaaaatcacatgagaatgaagaattctttagcagctcaacagagtttctcggcctgctcccagatcggcgaagtttctacttgttactctctctgccggcgcccttcgttcctcctctgcttcccttccctagtctttcctccggcagggagctgggcaggggtccccgggtgtctccctgagtcccgactgcactgactgggtccatcagagggctgcttcgttctccagctcatcttcttttaaagtggtgactagcttggtggtatctggctgctggtgtttggcttattgacatactccagggtaatcaatgatgactttgtttggaaacccttttggaggcaccatgggaacagaaggaaacatgagtgacgctgacccttgagtgtgtgggtggggagctctgagacgcctcctgtcccacgctctccggtgtccgtgtctacacaggggtccccatgatacccaccggccccagcagggcagaccggaccggggacgggcacggtgaagggctgcagcctggggtctgacgtggcccctagtgctgtctcaggagaaggctctggaggacttgaggcatgctgggcctggtgcagtgatggcgctaaggagacccggggaaagacagtatcgtggtcacgtatgcttaggaagcagcacagccgtgtccttagggatgttcgcgtccagtaaagacactggtaactgcggtttcagccaacactcttcatggcagtgtcgacctcgggttagcttctgttgtctttgtggatggttttcctggagcggcctgacgttgacgtgttctctggtcccatgtcttagcggggcatggtacggtttcgtgcctgacgcgtgcattagggtgttctcttatactttcagtagcatctttccacagcaagggccaaaccctcctggttcccttcagagtctttttggcctgatgatgactcttgagtgataccctgtgatgcagacatgccccagatggattctactttctttaaaactagggactttcaagattaaaaaaaagattgtcactactaatttgacgcctaacttcagaagcttcactgtctacatgtgaacttttccagaaaaactgtgccatggacatttttcctctggggaattaacatctaaattctggtaactattaaaagacagatctggttaatttaaaaaaaaa

SEQ ID NO: 354112 - DNA, 2327 bp, Homo sapiens
cttccaatggctggtttccggcgacggcgcgggggcagctgggaatccggaatgctgcccgatggccctgggtcctcgctgtggggcaatccgggcttgcagacgagttttagaaagagcgttttcgctacgtaaagcacattcgataaaggatatggaaaatactttgcagctggtgagaaatatcatacctcctctgtcttccacaaagcacaaagggcaagatggaagaataggcgtagttggaggctgtcaggagtacactggagccccatattttgcagcaatctcagctctcaaagtgggcattttggaagtgtcaaaggccagggacatccctgttgtcatcgacgcggatggcctgtggctggtcgctcagcagccggccctcatccatggctaccggaaggctgtgctcactcccaaccacgtggagttcagcagactgtatgacgctgtgctcagaggccctatggacagcgatgacagccatggatctgtgctaagactcagccaagccctgggcaacgtgacggtggtccagaaaggagagcgcgacatcctctccaacggccagcaggtgcttgtgtgcagccaggaaggcagcagccgcaggtgtggagggcaaggggacctcctgtcgggctccctgggcgtcctggtacactgggcgctccttgctggaccacagaaaacaaatgggtccagccctctcctggtggccgcgtttggcgcctgctctctcaccaggcagtgcaaccaccaagccttccagaagcacggtcgctccaccaccacctccgacatgatcgccgaggtgggggccgccttcagcaagctctttgaaacctgagcccgcgcagaccagaagtaaacaggcaccttggacgggggagagcgtgtgtgtgatgggaaaatccggacccacgcgtgtgctgaaggcgtacggtgcttgccagattttcaacttgagcataaattggttgccattgagaatttaagaatctggaatattgcagcttttggttaaacttaatgcatggttggagatgttatggcgacactaaacaaagtattcctgaactttccttagctccttggtagtaactgggaagacagaaatgaagaaaatcacatgagaatgaagaattctttagcagctcaacagagtttctcggcctgctcccagatcggcgaagtttctacttgttactctctctgccggcgcccttcgttcctcctctgcttcccttccctagtctttcctccggcagggagctgggcaggggtccccgggtgtctccctgagtcccgactgcactgactgggtccatcagagggctgcttcgttctccagctcatcttcttttaaagtggtgactagcttggtggtatctggctgctggtgtttggcttattgacatactccagggtaatcaatgatgactttgtttggaaacccttttggaggcaccatgggaacagaaggaaacatgagtgacgctgacccttgagtgtgtgggtggggagctctgagacgcctcctgtcccacgctctccggtgtccgtgtctacacaggggtccccatgatacccaccggccccagcagggcagaccggaccggggacgggcacggtgaagggctgcagcctggggtctgacgtggcccctagtgctgtctcaggagaaggctctggaggacttgaggcatgctgggcctggtgcagtgatggcgctaaggagacccggggaaagacagtatcgtggtcacgtatgcttaggaagcagcacagccgtgtccttagggatgttcgcgtccagtaaagacactggtaactgcggtttcagccaacactcttcatggcagtgtcgacctcgggttagcttctgttgtctttgtggatggttttcctggagcggcctgacgttgacgtgttctctggtcccatgtcttagcggggcatggtacggtttcgtgcctgacgcgtgcattagggtgttctcttatactttcagtagcatctttccacagcaagggccaaaccctcctggttcccttcagagtctttttggcctgatgatgactcttgagtgataccctgtgatgcagacatgccccagatggattctactttctttaaaactagggactttcaagattaaaaaaaagattgtcactactaatttgacgcctaacttcagaagcttcactgtctacatgtgaacttttccagaaaaactgtgccatggacatttttcctctggggaattaacatctaaattctggtaactattaaaagacagatctggttaatttaaaaaaaaa

SEQ ID NO: 354113 - DNA, 2471 bp, Homo sapiens
cttccaatggctggtttccggcgacggcgcgggggcagctgggaatccggaatgctgcccgatggccctgggtcctcgctgtggggcaatccgggcttgcagacgagttttagaaagagcgttttcgctacgtaaagcacattcgataaaggatatggaaaatactttgcagctggtgagaaatatcatacctcctctgtcttccacaaagcacaaagggcaagatggaagaataggcgtagttggaggctgtcaggagtacactggagccccatattttgcagcaatctcagctctcaaagtgggcgcagacttgtcccacgtgttctgtgccagtgcggccgcacctgtgattaaggcctacagcccggagctgatcgtccacccagttcttgacagccccaatgctgttcatgaggtggagaagtggctgccccggctgcatgctcttgtcgtaggacctggcttgggtagagatgatgcgcttctcagaaatgtccagggcattttggaagtgtcaaaggccagggacatccctgttgtcatcgacgcggatggcctgtggctggtcgctcagcagccggccctcatccatggctaccggaaggctgtgctcactcccaaccacgtggagttcagcagactgtatgacgctgtgctcagaggccctatggacagcgatgacagccatggatctgtgctaagactcagccaagccctgggcaacgtgacggtggtccagaaaggagagcgcgacatcctctccaacggccagcaggtgcttgtgtgcagccaggaaggcagcagccgcaggtgtggagggcaaggggacctcctgtcgggctccctgggcgtcctggtacactgggcgctccttgctggaccacagaaaacaaatgggtccagccctctcctggtggccgcgtttggcgcctgctctctcaccaggcagtgcaaccaccaagccttccagaagcacggtcgctccaccaccacctccgacatgatcgccgaggtgggggccgccttcagcaagctctttgaaacctgagcccgcgcagaccagaagtaaacaggcaccttggacgggggagagcgtgtgtgtgatgggaaaatccggacccacgcgtgtgctgaaggcgtacggtgcttgccagattttcaacttgagcataaattggttgccattgagaatttaagaatctggaatattgcagcttttggttaaacttaatgcatggttggagatgttatggcgacactaaacaaagtattcctgaactttccttagctccttggtagtaactgggaagacagaaatgaaggctcccagatcggcgaagtttctacttgttactctctctgccggcgcccttcgttcctcctctgcttcccttccctagtctttcctccggcagggagctgggcaggggtccccgggtgtctccctgagtcccgactgcactgactgggtccatcagagggctgcttcgttctccagctcatcttcttttaaagtggtgactagcttggtggtatctggctgctggtgtttggcttattgacatactccagggtaatcaatgatgactttgtttggaaacccttttggaggcaccatgggaacagaaggaaacatgagtgacgctgacccttgagtgtgtgggtggggagctctgagacgcctcctgtcccacgctctccggtgtccgtgtctacacaggggtccccatgatacccaccggccccagcagggcagaccggaccggggacgggcacggtgaagggctgcagcctggggtctgacgtggcccctagtgctgtctcaggagaaggctctggaggacttgaggcatgctgggcctggtgcagtgatggcgctaaggagacccggggaaagacagtatcgtggtcacgtatgcttaggaagcagcacagccgtgtccttagggatgttcgcgtccagtaaagacactggtaactgcggtttcagccaacactcttcatggcagtgtcgacctcgggttagcttctgttgtctttgtggatggttttcctggagcggcctgacgttgacgtgttctctggtcccatgtcttagcggggcatggtacggtttcgtgcctgacgcgtgcattagggtgttctcttatactttcagtagcatctttccacagcaagggccaaaccctcctggttcccttcagagtctttttggcctgatgatgactcttgagtgataccctgtgatgcagacatgccccagatggattctactttctttaaaactagggactttcaagattaaaaaaaagattgtcactactaatttgacgcctaacttcagaagcttcactgtctacatgtgaacttttccagaaaaactgtgccatggacatttttcctctggggaattaacatctaaattctggtaactattaaaagacagatctggttaatttaaaaaaaaa

SEQ ID NO: 354114 - DNA, 2907 bp, Homo sapiens
ggtattttattgcatttcattctcttttatcaaaatgactggaaagtgcagaaagccccgaagctgatgctggtagtggaatctcaggcactgagtgtggcgagtctcaactggccactcccacggagcctggggaggcttcagcaagagccaagtgagagcagggcagaggccgggcccagcgccagcgaggcatctggggagccgtgcccttgttagcgctgaaaatggaagcccctccattcaggcctggacagatgatgggcagcgaatgtgctcacctgctgagctgtggggctggactaggtaccaaaatcagggtagaacactgaggcgtctgtgggcgggtgtgtgcacatccacacttgtacactcacattcacatgcacatatgtgcacacgcatgcaattcatacacatgcacagttgtgctcacagcctcgcacgcccttgcacactcgcacttatacacatgcatggtcatgctcacagcctcgcacacgccctcgcacactcatccacacacagctgtgcacaaggaacacagagcagatgttctcagagggactctgacacctttgagatgagggttttttaatcactggaaggctctcttgggtctaacaggttcagagaatgtaacacctggttttcaaaacatttttcaaagaaatagagaattcccatacacaggcatacgtgacgttatgaggccggtggaggcctcgctcggtgttgccctgtatggttgagctgtggtttaaggtgaactctggagtgtgggctgcaggtgagggctccgtccctgggagctggtgggaggagctggaggctggcgccgccctgctcagagctgcctgcttgggctcgtctgaggcggttccgagctgcaggtgtctccaccaacctgctgtgctacacagcggggtctggggcagcctcaccactgcgtgtcttggtttcctcttctgtaaaacagaggctgcctccaacccttggaacaaacagggaagagccgtagcaggcaggatgtgagtggagcctcaggctgctcctggagggtgtggctctgcctgccgtgcggccttccacacccgtggctactgtcacattcacacacatggccatgctgacacctgctctcacttctgccctgtgcagtgcttgtgtgcagccaggaaggcagcagccgcaggtgtggagggcaaggggacctcctgtcgggctccctgggcgtcctggtacactgggcgctccttgctggaccacagaaaacaaatgggtccagccctctcctggtggccgcgtttggcgcctgctctctcaccaggcagtgcaaccaccaagccttccagaagcacggtcgctccaccaccacctccgacatgatcgccgaggtgggggccgccttcagcaagctctttgaaacctgagcccgcgcagaccagaagtaaacaggcaccttggacgggggagagcgtgtgtgtgatgggaaaatccggacccacgcgtgtgctgaaggcgtacggtgcttgccagattttcaacttgagcataaattggttgccattgagaatttaagaatctggaatattgcagcttttggttaaacttaatgcatggttggagatgttatggcgacactaaacaaagtattcctgaactttccttagctccttggtagtaactgggaagacagaaatgaagaaaatcacatgagaatgaagaattctttagcagctcaacagagtttctcggcctgctcccagatcggcgaagtttctacttgttactctctctgccggcgcccttcgttcctcctctgcttcccttccctagtctttcctccggcagggagctgggcaggggtccccgggtgtctccctgagtcccgactgcactgactgggtccatcagagggctgcttcgttctccagctcatcttcttttaaagtggtgactagcttggtggtatctggctgctggtgtttggcttattgacatactccagggtaatcaatgatgactttgtttggaaacccttttggaggcaccatgggaacagaaggaaacatgagtgacgctgacccttgagtgtgtgggtggggagctctgagacgcctcctgtcccacgctctccggtgtccgtgtctacacaggggtccccatgatacccaccggccccagcagggcagaccggaccggggacgggcacggtgaagggctgcagcctggggtctgacgtggcccctagtgctgtctcaggagaaggctctggaggacttgaggcatgctgggcctggtgcagtgatggcgctaaggagacccggggaaagacagtatcgtggtcacgtatgcttaggaagcagcacagccgtgtccttagggatgttcgcgtccagtaaagacactggtaactgcggtttcagccaacactcttcatggcagtgtcgacctcgggttagcttctgttgtctttgtggatggttttcctggagcggcctgacgttgacgtgttctctggtcccatgtcttagcggggcatggtacggtttcgtgcctgacgcgtgcattagggtgttctcttatactttcagtagcatctttccacagcaagggccaaaccctcctggttcccttcagagtctttttggcctgatgatgactcttgagtgataccctgtgatgcagacatgccccagatggattctactttctttaaaactagggactttcaagattaaaaaaaagattgtcactactaatttgacgcctaacttcagaagcttcactgtctacatgtgaacttttccagaaaaactgtgccatggacatttttcctctggggaattaacatctaaattctggtaactattaaaagacagatctggttaatttaaaaaaaaa

SEQ ID NO: 354115 - DNA, 1786 bp, Homo sapiens
tgtgataaacctgctttctcctcaggggcatatcagacttgaaattgacaatttggggtcctgagattgaaacaggagtcaaaaccagagcccagggtagctgcggcccccggaccacgacgcccacttccccacacctcctgctgtccccctctccgcaggtccagccctctcctggtggccgcgtttggcgcctgctctctcaccaggcagtgcaaccaccaagccttccagaagcacggtcgctccaccaccacctccgacatgatcgccgaggtgggggccgccttcagcaagctctttgaaacctgagcccgcgcagaccagaagtaaacaggcaccttggacgggggagagcgtgtgtgtgatgggaaaatccggacccacgcgtgtgctgaaggcgtacggtgcttgccagattttcaacttgagcataaattggttgccattgagaatttaagaatctggaatattgcagcttttggttaaacttaatgcatggttggagatgttatggcgacactaaacaaagtattcctgaactttccttagctccttggtagtaactgggaagacagaaatgaagaaaatcacatgagaatgaagaattctttagcagctcaacagagtttctcggcctgctcccagatcggcgaagtttctacttgttactctctctgccggcgcccttcgttcctcctctgcttcccttccctagtctttcctccggcagggagctgggcaggggtccccgggtgtctccctgagtcccgactgcactgactgggtccatcagagggctgcttcgttctccagctcatcttcttttaaagtggtgactagcttggtggtatctggctgctggtgtttggcttattgacatactccagggtaatcaatgatgactttgtttggaaacccttttggaggcaccatgggaacagaaggaaacatgagtgacgctgacccttgagtgtgtgggtggggagctctgagacgcctcctgtcccacgctctccggtgtccgtgtctacacaggggtccccatgatacccaccggccccagcagggcagaccggaccggggacgggcacggtgaagggctgcagcctggggtctgacgtggcccctagtgctgtctcaggagaaggctctggaggacttgaggcatgctgggcctggtgcagtgatggcgctaaggagacccggggaaagacagtatcgtggtcacgtatgcttaggaagcagcacagccgtgtccttagggatgttcgcgtccagtaaagacactggtaactgcggtttcagccaacactcttcatggcagtgtcgacctcgggttagcttctgttgtctttgtggatggttttcctggagcggcctgacgttgacgtgttctctggtcccatgtcttagcggggcatggtacggtttcgtgcctgacgcgtgcattagggtgttctcttatactttcagtagcatctttccacagcaagggccaaaccctcctggttcccttcagagtctttttggcctgatgatgactcttgagtgataccctgtgatgcagacatgccccagatggattctactttctttaaaactagggactttcaagattaaaaaaaagattgtcactactaatttgacgcctaacttcagaagcttcactgtctacatgtgaacttttccagaaaaactgtgccatggacatttttcctctggggaattaacatctaaattctggtaactattaaaagacagatctggttaatttaaaaaaaaa

SEQ ID NO: 354116 - DNA, 1495 bp, Homo sapiens
ttaggcacgcgtgcctaataggcccgcgcagaccagaagtaaacaggcaccttggacgggggagagcgtgtgtgtgatgggaaaatccggacccacgcgtgtgctgaaggcgtacggtgcttgccagattttcaacttgagcataaattggttgccattgagaatttaagaatctggaatattgcagcttttggttaaacttaatgcatggttggagatgttatggcgacactaaacaaagtattcctgaactttccttagctccttggtagtaactgggaagacagaaatgaagaaaatcacatgagaatgaagaattctttagcagctcaacagagtttctcggcctgctcccagatcggcgaagtttctacttgttactctctctgccggcgcccttcgttcctcctctgcttcccttccctagtctttcctccggcagggagctgggcaggggtccccgggtgtctccctgagtcccgactgcactgactgggtccatcagagggctgcttcgttctccagctcatcttcttttaaagtggtgactagcttggtggtatctggctgctggtgtttggcttattgacatactccagggtaatcaatgatgactttgtttggaaacccttttggaggcaccatgggaacagaaggaaacatgagtgacgctgacccttgagtgtgtgggtggggagctctgagacgcctcctgtcccacgctctccggtgtccgtgtctacacaggggtccccatgatacccaccggccccagcagggcagaccggaccggggacgggcacggtgaagggctgcagcctggggtctgacgtggcccctagtgctgtctcaggagaaggctctggaggacttgaggcatgctgggcctggtgcagtgatggcgctaaggagacccggggaaagacagtatcgtggtcacgtatgcttaggaagcagcacagccgtgtccttagggatgttcgcgtccagtaaagacactggtaactgcggtttcagccaacactcttcatggcagtgtcgacctcgggttagcttctgttgtctttgtggatggttttcctggagcggcctgacgttgacgtgttctctggtcccatgtcttagcggggcatggtacggtttcgtgcctgacgcgtgcattagggtgttctcttatactttcagtagcatctttccacagcaagggccaaaccctcctggttcccttcagagtctttttggcctgatgatgactcttgagtgataccctgtgatgcagacatgccccagatggattctactttctttaaaactagggactttcaagattaaaaaaaagattgtcactactaatttgacgcctaacttcagaagcttcactgtctacatgtgaacttttccagaaaaactgtgccatggacatttttcctctggggaattaacatctaaattctggtaactattaaaagacagatctggttaatttaaaaaaaaa

SEQ ID NO: 354117 - DNA, 799 bp, Homo sapiens
  misc_feature (10)..(10): n is a, c, g, or t
  misc_feature (13)..(13): n is a, c, g, or t
  misc_feature (23)..(23): n is a, c, g, or t
tttgtttccnttncactctagangatccccgagtgggtaagtgtcttacaggggtccccatgatacccaccggccccagcagggcagaccggaccggggacgggcacggtgaagggctgcagcctggggtctgacgtggcccctagtgctgtctcaggagaaggctctggaggacttgaggcatgctgggcctggtgcagtgatggcgctaaggagacccggggaaagacagtatcgtggtcacgtatgcttaggaagcagcacagccgtgtccttagggatgttcgcgtccagtaaagacactggtaactgcggtttcagccaacactcttcatggcagtgtcgacctcgggttagcttctgttgtctttgtggatggttttcctggagcggcctgacgttgacgtgttctctggtcccatgtcttagcggggcatggtacggtttcgtgcctgacgcgtgcattagggtgttctcttatactttcagtagcatctttccacagcaagggccaaaccctcctggttcccttcagagtctttttggcctgatgatgactcttgagtgataccctgtgatgcagacatgccccagatggattctactttctttaaaactagggactttcaagattaaaaaaaagattgtcactactaatttgacgcctaacttcagaagcttcactgtctacatgtgaacttttccagaaaaactgtgccatggacatttttcctctggggaattaacatctaaattctggtaactattaaaagacagatctggttaatttaaaaaaaaa

SEQ ID NO: 354118 - DNA, 1377 bp, Homo sapiens
cttccaatggctggtttccggcgacggcgcgggggcagctgggaatccggaatgctgcccgatggccctgggtcctcgctgtggggcaatccgggcttgcagacgagttttagaaagagcgttttcgctacgtaaagcacattcgataaaggatatggaaaatactttgcagctggtgagaaatatcatacctcctctgtcttccacaaagcacaaagggcaagatggaagaataggcgtagttggaggctgtcaggagtacactggagccccatattttgcagcaatctcagctctcaaagtgggcgcagacttgtcccacgtgttctgtgccagtgcggccgcacctgtgattaaggcctacagcccggagctgatcgtccacccagttcttgacagccccaatgctgttcatgaggtggagaagtggctgccccggctgcatgctcttgtcgtaggacctggcttgggtagagatgatgcgcttctcagaaatgtccagggcattttggaagtgtcaaaggccagggacatccctgttgtcatcgacgcggatggcctgtggctggtcgctcagcagccggccctcatccatggctaccggaaggctgtgctcactcccaaccacgtggagttcagcagactgtatgacgctgtgctcagaggccctatggacagcgatgacagccatggatctgtgctaagactcagccaagccctgggcaacgtgacggtggtccagaaaggagagcgcgacatcctctccaacggccagcaggtgcttgtgtgcagccaggaaggcagcagccgcaggtgtggagggcaaggggacctcctgtcgggctccctgggcgtcctggtacactgggcgctccttgctggaccacagaaaacaaatgggggtaaggccacgtcttcatttattctactttgaaaccgtctgatttttctaagctgtttcagtagctcatgcgttgaataagtagccctggaaacactgacaatgaactctaggcttcactggagagatctcggcacagacgaaccctcttggcagaagcttccaccccacacttgggcctgggcctgtccatcattcactgtggatggggcctggggcaggggtggtcttcagagctctccagagagttccgaggtgcaaccaaggcccagcagcacgctgttctgggaagttgagtggtttattctgtgtaacacagaatactaagatagaaaacagacagggtcaaggcttacttagacacttgttcttaaagatgtgaattttctttaagagacagcagaattctaggaccagggcccttggcccagttctgtagtcagagaactttatgaatgcaagcagttcccatacct

SEQ ID NO: 354119 - DNA, 536 bp, Homo sapiens
cttccaatggctggtttccggcgacggcgcgggggcagctgggaatccggaatgctgcccgatggccctgggtcctcgctgtggggcaatccgggcttgcagacgagttttagaaagagcgttttcgctacgtaaagcacattcgataaaggatatggaaaatactttgcagctggtgagaaatatcatacctcctctgtcttccacaaagcacaaagggcaagatggaagaataggcgtagttggaggctgtcaggagtacactggagccccatattttgcagcaatctcagctctcaaagtgtgacagccccaatgctgttcatgaggtggagaagtggctgccccggctgcatgctcttgtcgtaggacctggcttgggtagagatgatgcgcttctcagaaatgtccaggtaatgtgtatactcactcacttccctcatgacaggcttagccttaggcgtgaagttggaacagaggcatttctcttgcattttgtgtagtgttccgtgtgcctctttgtggcatgattgaga

SEQ ID NO: 354120 - DNA, 2436 bp, Homo sapiens
cttccaatggctggtttccggcgacggcgcgggggcagctgggaatccggaatgctgcccgatggccctgggtcctcgctgtggggcaatccgggcttgcagacgagttttagaaagagcgttttcgctacgtaaagcacattcgataaaggatatggaaaatactttgcagctggtgagaaatatcatacctcctctgtcttccacaaagcacaaagggcaagatggaagaataggcgtagttggaggctgtcaggagtacactggagccccatattttgcagcaatctcagctctcaaagtgtgacagccccaatgctgttcatgaggtggagaagtggctgccccggctgcatgctcttgtcgtaggacctggcttgggtagagatgatgcgcttctcagaaatgtccagggcattttggaagtgtcaaaggccagggacatccctgttgtcatcgacgcggatggcctgtggctggtcgctcagcagccggccctcatccatggctaccggaaggctgtgctcactcccaaccacgtggagttcagcagactgtatgacgctgtgctcagaggccctatggacagcgatgacagccatggatctgtgctaagactcagccaagccctgggcaacgtgacggtggtccagaaaggagagcgcgacatcctctccaacggccagcaggtgcttgtgtgcagccaggaaggcagcagccgcaggtgtggagggcaaggggacctcctgtcgggctccctgggcgtcctggtacactgggcgctccttgctggaccacagaaaacaaatgggtccagccctctcctggtggccgcgtttggcgcctgctctctcaccaggcagtgcaaccaccaagccttccagaagcacggtcgctccaccaccacctccgacatgatcgccgaggtgggggccgccttcagcaagctctttgaaacctgagcccgcgcagaccagaagtaaacaggcaccttggacgggggagagcgtgtgtgtgatgggaaaatccggacccacgcgtgtgctgaaggcgtacggtgcttgccagattttcaacttgagcataaattggttgccattgagaatttaagaatctggaatattgcagcttttggttaaacttaatgcatggttggagatgttatggcgacactaaacaaagtattcctgaactttccttagctccttggtagtaactgggaagacagaaatgaagaaaatcacatgagaatgaagaattctttagcagctcaacagagtttctcggcctgctcccagatcggcgaagtttctacttgttactctctctgccggcgcccttcgttcctcctctgcttcccttccctagtctttcctccggcagggagctgggcaggggtccccgggtgtctccctgagtcccgactgcactgactgggtccatcagagggctgcttcgttctccagctcatcttcttttaaagtggtgactagcttggtggtatctggctgctggtgtttggcttattgacatactccagggtaatcaatgatgactttgtttggaaacccttttggaggcaccatgggaacagaaggaaacatgagtgacgctgacccttgagtgtgtgggtggggagctctgagacgcctcctgtcccacgctctccggtgtccgtgtctacacaggggtccccatgatacccaccggccccagcagggcagaccggaccggggacgggcacggtgaagggctgcagcctggggtctgacgtggcccctagtgctgtctcaggagaaggctctggaggacttgaggcatgctgggcctggtgcagtgatggcgctaaggagacccggggaaagacagtatcgtggtcacgtatgcttaggaagcagcacagccgtgtccttagggatgttcgcgtccagtaaagacactggtaactgcggtttcagccaacactcttcatggcagtgtcgacctcgggttagcttctgttgtctttgtggatggttttcctggagcggcctgacgttgacgtgttctctggtcccatgtcttagcggggcatggtacggtttcgtgcctgacgcgtgcattagggtgttctcttatactttcagtagcatctttccacagcaagggccaaaccctcctggttcccttcagagtctttttggcctgatgatgactcttgagtgataccctgtgatgcagacatgccccagatggattctactttctttaaaactagggactttcaagattaaaaaaaagattgtcactactaatttgacgcctaacttcagaagcttcactgtctacatgtgaacttttccagaaaaactgtgccatggacatttttcctctggggaattaacatctaaattctggtaactattaaaagacagatctggttaatttaaaaaaaaa

SEQ ID NO: 354121 - DNA, 2525 bp, Homo sapiens
cttccaatggctggtttccggcgacggcgcgggggcagctgggaatccggaatgctgcccgatggccctgggtcctcgctgtggggcaatccgggcttgcagacgagttttagaaagagcgttttcgctacgtaaagcacattcgataaaggatatggaaaatactttgcagctggtgagaaatatcatacctcctctgtcttccacaaagcacaaagggcaagatggaagaataggcgtagttggaggctgtcaggagtacactggagccccatattttgcagcaatctcagctctcaaagtgggcgcagacttgtcccacgtgttctgtgccagtgcggccgcacctgtgattaaggcctacagcccggagctgatcgtccacccagttcttgacagccccaatgctgttcatgaggtggagaagtggctgccccggctgcatgctcttgtcgtaggacctggcttgggtagagatgatgcgcttctcagaaatgtccagggcattttggaagtgtcaaaggccagggacatccctgttgtcatcgacgcggatggcctgtggctggtcgctcagcagccggccctcatccatggctaccggaaggctgtgctcactcccaaccacgtggagttcagcagactgtatgacgctgtgctcagaggccctatggacagcgatgacagccatggatctgtgctaagactcagccaagccctgggcaacgtgacggtggtccagaaaggagagcgcgacatcctctccaacggccagcaggtgcttgtgtgcagccaggaaggcagcagccgcaggtgtggagggcaaggggacctcctgtcgggctccctgggcgtcctggtacactgggcgctccttgctggaccacagaaaacaaatgggtccagccctctcctggtggccgcgtttggcgcctgctctctcaccaggcagtgcaaccaccaagccttccagaagcacggtcgctccaccaccacctccgacatgatcgccgaggtgggggccgccttcagcaagctctttgaaacctgagcccgcgcagaccagaagtaaacaggcaccttggacgggggagagcgtgtgtgtgatgggaaaatccggacccacgcgtgtgctgaaggcgtacggtgcttgccagattttcaacttgagcataaattggttgccattgagaatttaagaatctggaatattgcagcttttggttaaacttaatgcatggttggagatgttatggcgacactaaacaaagtattcctgaactttccttagctccttggtagtaactgggaagacagaaatgaagaaaatcacatgagaatgaagaattctttagcagctcaacagagtttctcggcctgctcccagatcggcgaagtttctacttgttactctctctgccggcgcccttcgttcctcctctgcttcccttccctagtctttcctccggcagggagctgggcaggggtccccgggtgtctccctgagtcccgactgcactgactgggtccatcagagggctgcttcgttctccagctcatcttcttttaaagtggtgactagcttggtggtatctggctgctggtgtttggcttattgacatactccagggtaatcaatgatgactttgtttggaaacccttttggaggcaccatgggaacagaaggaaacatgagtgacgctgacccttgagtgtgtgggtggggagctctgagacgcctcctgtcccacgctctccggtgtccgtgtctacacaggggtccccatgatacccaccggccccagcagggcagaccggaccggggacgggcacggtgaagggctgcagcctggggtctgacgtggcccctagtgctgtctcaggagaaggctctggaggacttgaggcatgctgggcctggtgcagtgatggcgctaaggagacccggggaaagacagtatcgtggtcacgtatgcttaggaagcagcacagccgtgtccttagggatgttcgcgtccagtaaagacactggtaactgcggtttcagccaacactcttcatggcagtgtcgacctcgggttagcttctgttgtctttgtggatggttttcctggagcggcctgacgttgacgtgttctctggtcccatgtcttagcggggcatggtacggtttcgtgcctgacgcgtgcattagggtgttctcttatactttcagtagcatctttccacagcaagggccaaaccctcctggttcccttcagagtctttttggcctgatgatgactcttgagtgataccctgtgatgcagacatgccccagatggattctactttctttaaaactagggactttcaagattaaaaaaaagattgtcactactaatttgacgcctaacttcagaagcttcactgtctacatgtgaacttttccagaaaaactgtgccatggacatttttcctctggggaattaacatctaaattctggtaactattaaaagacagatctggttaatttaaaaaaaaa

SEQ ID NO: 354122 - DNA, 2249 bp, Homo sapiens
cttccaatggctggtttccggcgacggcgcgggggcagctgggaatccggaatgctgcccgatggccctgggtcctcgctgtggggcaatccgggcttgcagacgagttttagaaagagcgttttcgctacgtaaagcacattcgataaaggatatggaaaatactttgcagctggtgagaaatatcatacctcctctgtcttccacaaagcacaaagggcaagatggaagaataggcgtagttggaggctgtcaggagtacactggagccccatattttgcagcaatctcagctctcaaagtgggcgcagacttgtcccacgtgttctgtgccagtgcggccgcacctgtgattaaggcctacagcccggagctgatcgtccacccagttcttgacagccccaatgctgttcatgaggtggagaagtggctgccccggctgcatgctcttgtcgtaggacctggcttgggtagagatgatgcgcttctcagaaatgtccagggcattttggaagtgtcaaaggccagggacatccctgttgtcatcgacgcggatggcctgtggctggtcgctcagcagccggccctcatccatggctaccggaaggctgtgctcactcccaaccacgtggagttcagcagactgtatgacgctgtgctcagaggccctatggacagcgatgacagccatggatctgtgctaagactcagccaagccctgggcaacgtgacggtggtccagaaaggagagcgcgacatcctctccaacggccagcaggtgcttgtgtgcagccaggaaggcagcagccgcaggtgtggagggcaaggggacctcctgtcgggctccctgggcgtcctggtacactgggcgctccttgctggaccacagaaaacaaatgggtccagccctctcctggtggccgcgtttggcgcctgctctctcaccaggcagtgcaaccaccaagccttccagaagcacggtcgctccaccaccacctccgacatgatcgccgagctccttggtagtaactgggaagacagaaatgaagaaaatcacatgagaatgaagaattctttagcagctcaacagagtttctcggcctgctcccagatcggcgaagtttctacttgttactctctctgccggcgcccttcgttcctcctctgcttcccttccctagtctttcctccggcagggagctgggcaggggtccccgggtgtctccctgagtcccgactgcactgactgggtccatcagagggctgcttcgttctccagctcatcttcttttaaagtggtgactagcttggtggtatctggctgctggtgtttggcttattgacatactccagggtaatcaatgatgactttgtttggaaacccttttggaggcaccatgggaacagaaggaaacatgagtgacgctgacccttgagtgtgtgggtggggagctctgagacgcctcctgtcccacgctctccggtgtccgtgtctacacaggggtccccatgatacccaccggccccagcagggcagaccggaccggggacgggcacggtgaagggctgcagcctggggtctgacgtggcccctagtgctgtctcaggagaaggctctggaggacttgaggcatgctgggcctggtgcagtgatggcgctaaggagacccggggaaagacagtatcgtggtcacgtatgcttaggaagcagcacagccgtgtccttagggatgttcgcgtccagtaaagacactggtaactgcggtttcagccaacactcttcatggcagtgtcgacctcgggttagcttctgttgtctttgtggatggttttcctggagcggcctgacgttgacgtgttctctggtcccatgtcttagcggggcatggtacggtttcgtgcctgacgcgtgcattagggtgttctcttatactttcagtagcatctttccacagcaagggccaaaccctcctggttcccttcagagtctttttggcctgatgatgactcttgagtgataccctgtgatgcagacatgccccagatggattctactttctttaaaactagggactttcaagattaaaaaaaagattgtcactactaatttgacgcctaacttcagaagcttcactgtctacatgtgaacttttccagaaaaactgtgccatggacatttttcctctggggaattaacatctaaattctggtaactattaaaagacagatctggttaatttaaaaaaaaa

SEQ ID NO: 354123 - DNA, 2315 bp, Homo sapiens
cttccaatggctggtttccggcgacggcgcgggggcagctgggaatccggaatgctgcccgatggccctgggtcctcgctgtggggcaatccgggcttgcagacgagtgacagccccaatgctgttcatgaggtggagaagtggctgccccggctgcatgctcttgtcgtaggacctggcttgggtagagatgatgcgcttctcagaaatgtccagggcattttggaagtgtcaaaggccagggacatccctgttgtcatcgacgcggtgagttgacttctctcctcctggctcggactcccggaaggcctgtgcagtgagcacggctccttgttctgtgcaggatggcctgtggctggtcgctcagcagccggccctcatccatggctaccggaaggctgtgctcactcccaaccacgtggagttcagcagactgtatgacgctgtgctcagaggccctatggacagcgatgacagccatggatctgtgctaagactcagccaagccctgggcaacgtgacggtggtccagaaaggagagcgcgacatcctctccaacggccagcaggtgcttgtgtgcagccaggaaggcagcagccgcaggtgtggagggcaaggggacctcctgtcgggctccctgggcgtcctggtacactgggcgctccttgctggaccacagaaaacaaatgggtccagccctctcctggtggccgcgtttggcgcctgctctctcaccaggcagtgcaaccaccaagccttccagaagcacggtcgctccaccaccacctccgacatgatcgccgaggtgggggccgccttcagcaagctctttgaaacctgagcccgcgcagaccagaagtaaacaggcaccttggacgggggagagcgtgtgtgtgatgggaaaatccggacccacgcgtgtgctgaaggcgtacggtgcttgccagattttcaacttgagcataaattggttgccattgagaatttaagaatctggaatattgcagcttttggttaaacttaatgcatggttggagatgttatggcgacactaaacaaagtattcctgaactttccttagctccttggtagtaactgggaagacagaaatgaagaaaatcacatgagaatgaagaattctttagcagctcaacagagtttctcggcctgctcccagatcggcgaagtttctacttgttactctctctgccggcgcccttcgttcctcctctgcttcccttccctagtctttcctccggcagggagctgggcaggggtccccgggtgtctccctgagtcccgactgcactgactgggtccatcagagggctgcttcgttctccagctcatcttcttttaaagtggtgactagcttggtggtatctggctgctggtgtttggcttattgacatactccagggtaatcaatgatgactttgtttggaaacccttttggaggcaccatgggaacagaaggaaacatgagtgacgctgacccttgagtgtgtgggtggggagctctgagacgcctcctgtcccacgctctccggtgtccgtgtctacacaggggtccccatgatacccaccggccccagcagggcagaccggaccggggacgggcacggtgaagggctgcagcctggggtctgacgtggcccctagtgctgtctcaggagaaggctctggaggacttgaggcatgctgggcctggtgcagtgatggcgctaaggagacccggggaaagacagtatcgtggtcacgtatgcttaggaagcagcacagccgtgtccttagggatgttcgcgtccagtaaagacactggtaactgcggtttcagccaacactcttcatggcagtgtcgacctcgggttagcttctgttgtctttgtggatggttttcctggagcggcctgacgttgacgtgttctctggtcccatgtcttagcggggcatggtacggtttcgtgcctgacgcgtgcattagggtgttctcttatactttcagtagcatctttccacagcaagggccaaaccctcctggttcccttcagagtctttttggcctgatgatgactcttgagtgataccctgtgatgcagacatgccccagatggattctactttctttaaaactagggactttcaagattaaaaaaaagattgtcactactaatttgacgcctaacttcagaagcttcactgtctacatgtgaacttttccagaaaaactgtgccatggacatttttcctctggggaattaacatctaaattctggtaactattaaaagacagatctggttaatttaaaaaaaaa

SEQ ID NO: 354124 - DNA, 2357 bp, Homo sapiens
  misc_feature (28)..(28): n is a, c, g, or t
  misc_feature (31)..(31): n is a, c, g, or t
gccaggtagcgaggccccttggggtgtnggnctcgctgtggggcaccgggctgcagacgagttttagaaagagcgttttcgctacgtaaagcacattcgataaaggatatggaaaatactttgcagctggtgagaaatatcatacctcctctgtcttccacaaagcacaaagggcaagatggaagaataggcgtagttggaggctgtcaggagtacactggagccccatattttgcagcaatctcagctctcaaagtgggcattttggaagtgtcaaaggccagggacatccctgttgtcatcgacgcggtgagttgacttctctcctcctggctcggactcccggaaggcctgtgcagtgagcacggctccttgttctgtgcaggatggcctgtggctggtcgctcagcagccggccctcatccatggctaccggaaggctgtgctcactcccaaccacgtggagttcagcagactgtatgacgctgtgctcagaggccctatggacagcgatgacagccatggatctgtgctaagactcagccaagccctgggcaacgtgacggtggtccagaaaggagagcgcgacatcctctccaacggccagcaggtgcttgtgtgcagccaggaaggcagcagccgcaggtgtggagggcaaggggacctcctgtcgggctccctgggcgtcctggtacactgggcgctccttgctggaccacagaaaacaaatgggtccagccctctcctggtggccgcgtttggcgcctgctctctcaccaggcagtgcaaccaccaagccttccagaagcacggtcgctccaccaccacctccgacatgatcgccgaggtgggggccgccttcagcaagctctttgaaacctgagcccgcgcagaccagaagtaaacaggcaccttggacgggggagagcgtgtgtgtgatgggaaaatccggacccacgcgtgtgctgaaggcgtacggtgcttgccagattttcaacttgagcataaattggttgccattgagaatttaagaatctggaatattgcagcttttggttaaacttaatgcatggttggagatgttatggcgacactaaacaaagtattcctgaactttccttagctccttggtagtaactgggaagacagaaatgaagaaaatcacatgagaatgaagaattctttagcagctcaacagagtttctcggcctgctcccagatcggcgaagtttctacttgttactctctctgccggcgcccttcgttcctcctctgcttcccttccctagtctttcctccggcagggagctgggcaggggtccccgggtgtctccctgagtcccgactgcactgactgggtccatcagagggctgcttcgttctccagctcatcttcttttaaagtggtgactagcttggtggtatctggctgctggtgtttggcttattgacatactccagggtaatcaatgatgactttgtttggaaacccttttggaggcaccatgggaacagaaggaaacatgagtgacgctgacccttgagtgtgtgggtggggagctctgagacgcctcctgtcccacgctctccggtgtccgtgtctacacaggggtccccatgatacccaccggccccagcagggcagaccggaccggggacgggcacggtgaagggctgcagcctggggtctgacgtggcccctagtgctgtctcaggagaaggctctggaggacttgaggcatgctgggcctggtgcagtgatggcgctaaggagacccggggaaagacagtatcgtggtcacgtatgcttaggaagcagcacagccgtgtccttagggatgttcgcgtccagtaaagacactggtaactgcggtttcagccaacactcttcatggcagtgtcgacctcgggttagcttctgttgtctttgtggatggttttcctggagcggcctgacgttgacgtgttctctggtcccatgtcttagcggggcatggtacggtttcgtgcctgacgcgtgcattagggtgttctcttatactttcagtagcatctttccacagcaagggccaaaccctcctggttcccttcagagtctttttggcctgatgatgactcttgagtgataccctgtgatgcagacatgccccagatggattctactttctttaaaactagggactttcaagattaaaaaaaagattgtcactactaatttgacgcctaacttcagaagcttcactgtctacatgtgaacttttccagaaaaactgtgccatggacatttttcctctggggaattaacatctaaattctggtaactattaaaagacagatctggttaatttaaaaaaaaa

SEQ ID NO: 354125 - DNA, 2398 bp, Homo sapiens
cttccaatggctggtttccggcgacggcgcgggggcagctgggaatccggaatgctgcccgatggccctgggtcctcgctgtggggcaatccgggcttgcagacgagttttagaaagagcgttttcgctacgtaaagcacattcgataaaggatatggaaaatactttgcagctggtgagaaatatcatacctcctctgtcttccacaaagcacaaagggcaagatggaagaataggcgtagttggaggctgtcaggagtacactggagccccatattttgcagcaatctcagctctcaaagtgtgacagccccaatgctgttcatgaggtggagaagtggctgccccggctgcatgctcttgtcgtaggacctggcttgggtagagatgatgcgcttctcagaaatgtccagggcattttggaagtgtcaaaggccagggacatccctgttgtcatcgacgcggtgagttgacttctctcctcctggctcggactcccggaaggcctgtgcagtgagcacggctccttgttctgtgcaggatggcctgtggctggtcgctcagcagccggccctcatccatggctaccggaaggctgtgctcactcccaaccacgtggagttcagcagactgtatgacgctgtgctcagaggccctatggacagcgatgacagccatggatctgtgctaagactcagccaagccctgggcaacgtgacggtggtccagaaaggagagcgcgacatcctctccaacggccagcaggtgcttgtgtgcagccaggaaggcagcagcgcgtttggcgcctgctctctcaccaggcagtgcaaccaccaagccttccagaagcacggtcgctccaccaccacctccgacatgatcgccgaggtgggggccgccttcagcaagctctttgaaacctgagcccgcgcagaccagaagtaaacaggcaccttggacgggggagagcgtgtgtgtgatgggaaaatccggacccacgcgtgtgctgaaggcgtacggtgcttgccagattttcaacttgagcataaattggttgccattgagaatttaagaatctggaatattgcagcttttggttaaacttaatgcatggttggagatgttatggcgacactaaacaaagtattcctgaactttccttagctccttggtagtaactgggaagacagaaatgaagaaaatcacatgagaatgaagaattctttagcagctcaacagagtttctcggcctgctcccagatcggcgaagtttctacttgttactctctctgccggcgcccttcgttcctcctctgcttcccttccctagtctttcctccggcagggagctgggcaggggtccccgggtgtctccctgagtcccgactgcactgactgggtccatcagagggctgcttcgttctccagctcatcttcttttaaagtggtgactagcttggtggtatctggctgctggtgtttggcttattgacatactccagggtaatcaatgatgactttgtttggaaacccttttggaggcaccatgggaacagaaggaaacatgagtgacgctgacccttgagtgtgtgggtggggagctctgagacgcctcctgtcccacgctctccggtgtccgtgtctacacaggggtccccatgatacccaccggccccagcagggcagaccggaccggggacgggcacggtgaagggctgcagcctggggtctgacgtggcccctagtgctgtctcaggagaaggctctggaggacttgaggcatgctgggcctggtgcagtgatggcgctaaggagacccggggaaagacagtatcgtggtcacgtatgcttaggaagcagcacagccgtgtccttagggatgttcgcgtccagtaaagacactggtaactgcggtttcagccaacactcttcatggcagtgtcgacctcgggttagcttctgttgtctttgtggatggttttcctggagcggcctgacgttgacgtgttctctggtcccatgtcttagcggggcatggtacggtttcgtgcctgacgcgtgcattagggtgttctcttatactttcagtagcatctttccacagcaagggccaaaccctcctggttcccttcagagtctttttggcctgatgatgactcttgagtgataccctgtgatgcagacatgccccagatggattctactttctttaaaactagggactttcaagattaaaaaaaagattgtcactactaatttgacgcctaacttcagaagcttcactgtctacatgtgaacttttccagaaaaactgtgccatggacatttttcctctggggaattaacatctaaattctggtaactattaaaagacagatctggttaatttaaaaaaaaa

SEQ ID NO: 354126 - DNA, 2031 bp, Homo sapiens
ctggagcaggcaccgtgtcagcacctgctcggaggactcactgcaggtgatatcctgggcatcctcccacctacatggcctttaacaggtgcctgggtgatccctttagacacgagagcatgagtctcatggcggatgggacagggctatctgtcgtcgtgtgtctgaggaagactttgctttttctctgtcttcctgtgttgtcatagctcagaggccctatggacagcgatgacagccatggatctgtgctaagactcagccaagccctgggcaacgtgacggtggtccagaaaggagagcgcgacatcctctccaacggccagcaggtgcttgtgtgcagccaggaaggcagcagccgcaggtgtggagggcaaggggacctcctgtcgggctccctgggcgtcctggtacactgggcgctccttgctggaccacagaaaacaaatggcaggcagtgcaaccaccaagccttccagaagcacggtcgctccaccaccacctccgacatgatcgccgaggtgggggccgccttcagcaagctctttgaaacctgagcccgcgcagaccagaagtaaacaggcaccttggacgggggagagcgtgtgtgtgatgggaaaatccggacccacgcgtgtgctgaaggcgtacggtgcttgccagattttcaacttgagcataaattggttgccattgagaatttaagaatctggaatattgcagcttttggttaaacttaatgcatggttggagatgttatggcgacactaaacaaagtattcctgaactttccttagctccttggtagtaactgggaagacagaaatgaagaaaatcacatgagaatgaagaattctttagcagctcaacagagtttctcggcctgctcccagatcggcgaagtttctacttgttactctctctgccggcgcccttcgttcctcctctgcttcccttccctagtctttcctccggcagggagctgggcaggggtccccgggtgtctccctgagtcccgactgcactgactgggtccatcagagggctgcttcgttctccagctcatcttcttttaaagtggtgactagcttggtggtatctggctgctggtgtttggcttattgacatactccagggtaatcaatgatgactttgtttggaaacccttttggaggcaccatgggaacagaaggaaacatgagtgacgctgacccttgagtgtgtgggtggggagctctgagacgcctcctgtcccacgctctccggtgtccgtgtctacacaggggtccccatgatacccaccggccccagcagggcagaccggaccggggacgggcacggtgaagggctgcagcctggggtctgacgtggcccctagtgctgtctcaggagaaggctctggaggacttgaggcatgctgggcctggtgcagtgatggcgctaaggagacccggggaaagacagtatcgtggtcacgtatgcttaggaagcagcacagccgtgtccttagggatgttcgcgtccagtaaagacactggtaactgcggtttcagccaacactcttcatggcagtgtcgacctcgggttagcttctgttgtctttgtggatggttttcctggagcggcctgacgttgacgtgttctctggtcccatgtcttagcggggcatggtacggtttcgtgcctgacgcgtgcattagggtgttctcttatactttcagtagcatctttccacagcaagggccaaaccctcctggttcccttcagagtctttttggcctgatgatgactcttgagtgataccctgtgatgcagacatgccccagatggattctactttctttaaaactagggactttcaagattaaaaaaaagattgtcactactaatttgacgcctaacttcagaagcttcactgtctacatgtgaacttttccagaaaaactgtgccatggacatttttcctctggggaattaacatctaaattctggtaactattaaaagacagatctggttaatttaaaaaaaaa

SEQ ID NO: 354127 - DNA, 1207 bp, Homo sapiens
taagtgctagtacgaggccggtgtttgaatcggccgagggctcaacagagtttctcggcctgctcccagatcggcgaagtttctacttgttactctctctgccggcgcccttcgttcctcctctgcttcccttccctagtctttcctccggcagggagctgggcaggggtccccgggtgtctccctgagtcccgactgcactgactgggtccatcagagggctgcttcgttctccagctcatcttcttttaaagtggtgactagcttggtggtatctggctgctggtgtttggcttattgacatactccagggtaatcaatgatgactttgtttggaaacccttttggaggcaccatgggaacagaaggaaacatgagtgacgctgacccttgagtgtgtgggtggggagctctgagacgcctcctgtcccacgctctccggtgtccgtgtctacacaggggtccccatgatacccaccggccccagcagggcagaccggaccggggacgggcacggtgaagggctgcagcctggggtctgacgtggcccctagtgctgtctcaggagaaggctctggaggacttgaggcatgctgggcctggtgcagtgatggcgctaaggagacccggggaaagacagtatcgtggtcacgtatgcttaggaagcagcacagccgtgtccttagggatgttcgcgtccagtaaagacactggtaactgcggtttcagccaacactcttcatggcagtgtcgacctcgggttagcttctgttgtctttgtggatggttttcctggagcggcctgacgttgacgtgttctctggtcccatgtcttagcggggcatggtacggtttcgtgcctgacgcgtgcattagggtgttctcttatactttcagtagcatctttccacagcaagggccaaaccctcctggttcccttcagagtctttttggcctgatgatgactcttgagtgataccctgtgatgcagacatgccccagatggattctactttctttaaaactagggactttcaagattaaaaaaaagattgtcactactaatttgacgcctaacttcagaagcttcactgtctacatgtgaacttttccagaaaaactgtgccatggacatttttcctctggggaattaacatctaaattctggtaactattaaaagacagatctggttaatttaaaaaaaaa

SEQ ID NO: 354128 - DNA, 2049 bp, Homo sapiens
cttccaatggctggtttccggcgacggcgcgggggcagctgggaatccggaatgctgcccgatggccctgggtcctcgctgtggggcaatccgggcttgcagacgagttttagaaagagcgttttcgctacgtaaagcacattcgataaaggatatggaaaatactttgcagctggtgagaaatatcatacctcctctgtcttccacaaagcacaaagggcaagatggaagaataggcgtagttggaggctgtcaggagtacactggagccccatattttgcagcaatctcagctctcaaagtgggcgcagacttgtcccacgtgttctgtgccagtgcggccgcacctgtgattaaggcctacagcccggagctgatcgtccacccagttcttgacagccccaatgctgttcatgaggtggagaagtggctgccccggctgcatgctcttgtcgtaggacctggcttgggtagagatgatgcgcttctcagaaatgtccagggcattttggaagtgtcaaaggccagggacatccctgttgtcatcgacgcggatggcctgtggctggtcgctcagcagccggccctcatccatggctaccggaaggctgtgctcactcccaaccacgtggagttcagcagactgtatgacgctgtgctcagaggccctatggacagcgatgacagccatggatctgtgctaagactcagccaagccctgggcaacgtgacggtggtccagaaaggagagcgcgacatcctctccaacggccagcaggtgcttgtgtgcagccaggaaggcagcagccgcaggtgtggagggcaaggggacctcctgtcgggctccctgggcgtcctggtacactgggcgctccttgctggaccacagaaaacaaatgggtccagccctctcctggtggccgcgtttggcgcctgctctctcaccaggcagtgcaaccaccaagccttccagaagcacggtcgctccaccaccacctccgacatgatcgccgaggtgggggccgccttcagcaagctctttgaaacctgagcccgcgcagaccagaagtaaacaggcaccttggacgggggagagcgtgtgtgtgatgggaaaatccggacccacgcgtgtgctgaaggcgtacggtgcttgccagattttcaacttgagcataaattggttgccattgagaatttaagaatctggaatattgcagcttttggttaaacttaatgcatggttggagatgttatggcgacactaaacaaagtattcctgaactttccttagctccttggtagtaactgggaagacagaaatgaagaaaatcacatgagaatgaagaattctttagcagctcaacagagtttctcggcctgctcccagatcggcgaagtttctacttgttactctctctgccggcgcccttcgttcctcctctgcttcccttccctagtctttcctccggcagggagctgggcaggggtccccgggtgtctccctgagtcccgactgcactgactgggtccatcagagggacttgaggcatgctgggcctggtgcagtgatggcgctaaggagacccggggaaagacagtatcgtggtcacgtatgcttaggaagcagcacagccgtgtccttagggatgttcgcgtccagtaaagacactggtaactgcggtttcagccaacactcttcatggcagtgtcgacctcgggttagcttctgttgtctttgtggatggttttcctggagcggcctgacgttgacgtgttctctggtcccatgtcttagcggggcatggtacggtttcgtgcctgacgcgtgcattagggtgttctcttatactttcagtagcatctttccacagcaagggccaaaccctcctggttcccttcagagtctttttggcctgatgatgactcttgagtgataccctgtgatgcagacatgccccagatggattctactttctttaaaactagggacttccagataaacattgtcctataattgagcttcagactcatgctctgtcttccggccgg

SEQ ID NO: 354129 - DNA, 1171 bp, Homo sapiens
cttccaatggctggtttccggcgacggcgcgggggcagctgggaatccggaatgctgcccgatggccctgggtcctcgctgtggggcaatccgggcttgcagacgagttttagaaagagcgttttcgctacgtaaagcacattcgataaaggatatggaaaatactttgcagctggtgagaaatatcatacctcctctgtcttccacaaagcacaaagggcaagatggaagaataggcgtagttggaggctgtcaggagtacactggagccccatattttgcagcaatctcagctctcaaagtgggcgcagacttgtcccacgtgttctgtgccagtgcggccgcacctgtgattaaggcctacagcccggagctgatcgtccacccagttcttgacagccccaatgctgttcatgaggtggagaagtggctgccccggctgcatgctcttgtcgtaggacctggcttgggtagagatgatgcgcttctcagaaatgtccagggcattttggaagtgtcaaaggccagggacatccctgttgtcatcgacgcggtgagttgacttctctcctcctggctcggactcccggaaggcctgtgcagtgagcacggctccttgttctgtgcaggatggcctgtggctggtcgctcagcagccggccctcatccatggctaccggaaggctgtgctcactcccaaccacgtggagttcagcagactgtatgacgctgtggtgagtcagtggaccccctggagggtagatgcaagccctgttcgtcctgaagagggtgaaggacgagctccatgcttctgcccagcctgtccctgtggacacacctgcaagtaatcgctgtgcctctcccagcggatggcgcgtcttcccattaatgcgcttggattggatgaacgatggtgtagtgggcttgggacaggcagggactcgggtcagtcagcccctcctgcagtgcactctggacaggtcactttgtctgtgtcctgagtgcctcatctgtaatgtgatgatggcatcagcttcacggggttgtgaggatgagatgaggaaacctatgtaaagccgtgagtccccacatggtaagtgtcccatcaatgttagtgcccagtacgactggaatttgtattactcctgcaaagctctcagaacccagtctt

SEQ ID NO: 354130 - DNA, 483 bp, Homo sapiens
  misc_feature (404)..(404): n is a, c, g, or t
  misc_feature (415)..(415): n is a, c, g, or t
  misc_feature (441)..(441): n is a, c, g, or t
  misc_feature (474)..(474): n is a, c, g, or t
ttccttctggccttctgggagctggtggggagatcactgtctgtgtgcagggctcagagctgctttctgatgacgaggtgcccctcgggatagggggacagttcttaaaacaccaggcagaggctcagccagaggatctgtccctggaggaagaggctcgattctccagccagcagcccccagcccagctgagccacaggccacagaggggcccgctgttgtggccagagagaggccctccagctccccggcatcaggagatggcgtcagcctcgcccttcctttcggcctggtcccaggtgcccgtgaacttggaggacgtggctgtatacctttctggggaggagccaagatgcatggacccagctcagcgggacgcgccgctggagaatgaagacctgggntccatttggangacggccgttgattggcaaggaagantgccccttttaaaatttgaattgtaacccaatnttttttgga

SEQ ID NO: 354131 - DNA, 386 bp, Homo sapiens
cacctggcgggcgtgtatccacatcaatagtgctccctctgatctctggagaacagcactgggggcgcagatgtccccagtttttgctggtgatcaacaagtgaggccgctgctccattctacacaggacagcatttccaggggtttccagtattctgtctagattcataaaggtcaaaggccttgagaatctatgtgtgcctttctatcttaggtaaagaagagaaagagaaagcaaattctcgttactcctctttcaaaaagttcattaaaagccaggctggcagctcacagtgctataatcccagcactgtggaaggcctaggcaggaggattgagaggagttccagaccaacctgggcaacaccgtgagaccccatctctac

SEQ ID NO: 354132 - DNA, 3216 bp, Homo sapiens
tcggccccggctctggcgtccctggctgccaagctgaggcccgcagtcctactcccgccgagacccgccgctccggtcctgccccgaactgcccacggccggcagcgcttccaggccctgaaaaaaactctcttcctgtgtctggccagaggtatagagagagacaggttcaactctaaggcctgaaaaggaacaaggcccaccggaagcaatggccactgtccctggcctccagcccctgccaaccttggagcaggacctggaacaggaagagatcctgattgtgaaggtggaggaggacttctgcttggaagaggagccctccgtggagacggaggaccccagccctgagactttccgccagctcttccggctcttctgctaccaggaggtggctgggccccgggaggccctgagccgcctctgggagctgtgctgccgctggctgcggccggagctgcgcaccaaggagcagatcctggagctgctggtgctggagcagttcctgactgtgctgccgggggagatccaggctcgggtacgcgagcagcagccggagagcggtgaggaggccgtggtcctcgtggaagggctgcagcggaagcccaggaaacacaggcagcggggctcagagctgctttctgatgacgaggtgcccctcgggatagggggacagttcttaaaacaccaggcagaggctcagccagaggatctgtccctggaggaagaggctcgattctccagccagcagcccccagcccagctgagccacaggccacagaggggcccgctgttgtggccagagagaggccctccagctccccggcatcaggagatggcgtcagcctcgcccttcctttcggcctggtcccaggtgcccgtgaacttggaggacgtggctgtatacctttctggggaggagccaagatgcatggacccagctcagcgggacgcgccgctggagaatgaaggacctgggatccagttggaggacggcggtgatggcagggaggatgccccgttgagaatggagtggtaccgagtgctctcggcacgatgccaggggcctggccacccgctcccaggtcagaggccagccccagtcaggggcttggtcaggcctgatcagccaagaggcggccccccaccaggaagacgggcttcccatggggctgacaagccgtacacctgccccgaatgtggcaaaggcttcagcaagacgtcccacttgaccaagcaccagcgcacacacacgggcgagcggccttacaagtgcctagtctgtgggaagggctttagcgaccgctccaacttcagcacgcaccagagggtgcacacaggcgagaagccctacccgtgccccgagtgtgggaagcgcttcagccagagctccagcctggtcatccaccgcaggacacacagcggggagcggccctatgcctgcacccagtgcgggaagcgcttcaacaacagctcgcacttcagcgcccaccgccggacgcacacaggtgagaagccctacacctgcccggcctgtggccggggcttccgccggggcaccgacctgcacaagcaccagcggacccacatgggggcaggctccttgccgacgctccagccggtggctcctggaggccccggtgcaaaagcctgatcaccatgcctgaaactccctttccaggactctcatccctgggcacagaattcaggaaactgctagacagcctggtccgaaagcattgccagctgcccgtttcctcccatggcccagtatgaggccagcaggggacatttgggatgcccaggccgcagaggaagctgggcactgggtgcagaacaagggcaaggacaggctctgagtgtccagtggcagccagaacaggtgacacagagcaggggcttcagccacagagacacactcaggaggccagaagccgacactcaaggtgttcgtggggctggctcctgaagggcctgggagggtccatcagctgcctccagcatccagtggctgctggcatacagcctcatccccacgtcccaacccctctcctgtgtgtctgtgaccctgtgcgctgtctctgtgtgtaccccccacctgctcccccccccttttttttttgagacggggccttgctgtgtcccccaggcgggaatacagtgccatgatcatagctcactgcagcctcgaatccctgggctcaagtgttcctcctgcctcatcctcctgagtagctggggttacaggtgtgtgccgccatgcccagtctcttttttggtagggccaccactcactgggtttagggttccccaatacactgtgacctcatcttaactaattatatcatcaaaacccgtgtttccaaataaggtcacattctgaggtctgggtgcacatgaatttgagggacccctcgtctgctgcagggagccctgctgtaccccagccttcccaggacgtggtctccagcttcttcatcctgccagagtttccaaatggagcccggggctctgcagcattccagtcccctttgcagatccatagctgctctgcagggcggaagacacctggggcgggaaagcacccctgagttccatcttcctgacatgtcgcctgggatgtgacgggcctgacatctccccagggccggggcccagggctgcctttgctcctggccccttagtgtctggaatgtggccttccacggttgccccactttgtctttctaaggtaagaagccttcaccttccagcttttgtctggcctgtgctgcgtgggagccactggtctgtgcacatccacggtgggtgagtggccaagacaagcagtgtgatagagtccttggtgggtttagtcatctcggaagtcgtagggcagctatggaaaccactgggttctggaacgttccagccaggcagtggttgttcctcataggtaggtggccttggccttcatcccagcctgggatgctccattgcatttgtcacctagtcactgtatatacgtgcacatttgaccttttggcacagcccaggttccaggtgcgtgacctgccctttttctcattcccttaactgacattatttagtgtcagaggccgagcacagtggctcccacctataatcctagcactttgggaggccaacgcgggtggattgcttgagcccaggagttcaagagcagcctgggcaatatagaaagacctcttccctacc

SEQ ID NO: 354133 - DNA, 5790 bp, Homo sapiens
  misc_feature (3292)..(3292): n is a, c, g, or t
  misc_feature (3573)..(3573): n is a, c, g, or t
  misc_feature (3578)..(3578): n is a, c, g, or t
  misc_feature (3580)..(3580): n is a, c, g, or t
  misc_feature (4338)..(4338): n is a, c, g, or t
  misc_feature (4354)..(4354): n is a, c, g, or t
  misc_feature (4379)..(4379): n is a, c, g, or t
  misc_feature (4444)..(4444): n is a, c, g, or t
tcggccccggctctggcgtccctggctgccaagctgaggcccgcagtcctactcccgccgagacccgccgctccggtcctgccccgaactgcccacggccggcagcgcttccaggccctgaaaaaaactctcttcctgtgtctggccagaggtatagagagagacaggttcaactctaaggcctgaaaaggaacaaggcccaccggaagcaatggccactgtccctggcctccagcccctgccaaccttggagcaggacctggaacaggaagagatcctgattgtgaaggtggaggaggacttctgcttggaagaggagccctccgtggagacggaggaccccagccctgagactttccgccagctcttccggctcttctgctaccaggaggtggctgggccccgggaggccctgagccgcctctgggagctgtgctgccgctggctgcggccggagctgcgcaccaaggagcagatcctggagctgctggtgctggagcagttcctgactgtgctgccgggggagatccaggctcgggtacgcgagcagcagccggagagcggtgaggaggccgtggtcctcgtggaagggctgcagcggaagcccaggaaacacaggcagcggggctcagagctgctttctgatgacgaggtgcccctcgggatagggggacagttcttaaaacaccaggcagaggctcagccagaggatctgtccctggaggaagaggctcgattctccagccagcagcccccagcccagctgagccacaggccacagaggggcccgctgttgtggccagagagaggccctccagctccccggcatcaggagatggcgtcagcctcgcccttcctttcggcctggtcccaggtgcccgtgaacttggaggacgtggctgtatacctttctggggaggagccaagatgcatggacccagctcagcgggacgcgccgctggagaatgaaggacctgggatccagttggaggacggcggtgatggcagggaggatgccccgttgagaatggagtggtaccgagtgctctcggcacgatgccaggggcctggccacccgctcccaggtcagaggccagccccagtcaggggcttggtcaggcctgatcagccaagaggcggccccccaccaggaagacgggcttcccatggggctgacaagccgtacacctgccccgaatgtggcaaaggcttcagcaagacgtcccacttgaccaagcaccagcgcacacacacgggcgagcggccttacaagtgcctagtctgtgggaagggctttagcgaccgctccaacttcagcacgcaccagagggtgcacacaggcgagaagccctacccgtgccccgagtgtgggaagcgcttcagccagagctccagcctggtcatccaccgcaggacacacagcggggagcggccctatgcctgcacccagtgcgggaagcgcttcaacaacagctcgcacttcagcgcccaccgccggacgcacacaggtgagaagccctacacctgcccggcctgtggccggggcttccgccggggcaccgacctgcacaagcaccagcggacccacatgggggcaggctccttgccgacgctccagccggtggctcctggaggccccggtgcaaaagcctgatcaccatgcctgaaactccctttccaggactctcatccctgggcacagaattcaggaaactgctagacagcctggtccgaaagcattgccagctgcccgtttcctcccatggcccagtatgaggccagcaggggacatttgggatgcccaggccgcagaggaagctgggcactgggtgcagaacaagggcaaggacaggctctgagtgtccagtggcagccagaacaggtgacacagagcaggggcttcagccacagagacacactcaggaggccagaagccgacactcaaggtgttcgtggggctggctcctgaagggcctgggagggtccatcagctgcctccagcatccagtggctgctggcatacagcctcatccccacgtcccaacccctctcctgtgtgtctgtgaccctgtgcgctgtctctgtgtgtaccccccacctgctcccccccccttttttttttgagacggggccttgctgtgtcccccaggcgggaatacagtgccatgatcatagctcactgcagcctcgaatccctgggctcaagtgttcctcctgcctcatcctcctgagtagctggggttacaggtgtgtgccgccatgcccagtctcttttttggtagggccaccactcactgggtttagggttccccaatacactgtgacctcatcttaactaattatatcatcaaaacccgtgtttccaaataaggtcacattctgaggtctgggtgcacatgaatttgagggacccctcgtctgctgcagggagccctgctgtaccccagccttcccaggacgtggtctccagcttcttcatcctgccagagtttccaaatggagcccggggctctgcagcattccagtcccctttgcagatccatagctgctctgcagggcggaagacacctggggcgggaaagcacccctgagttccatcttcctgacatgtcgcctgggatgtgacgggcctgacatctccccagggccggggcccagggctgcctttgctcctggccccttagtgtctggaatgtggccttccacggttgccccactttgtctttctaaggtaagaagccttcaccttccagcttttgtctggcctgtgctgcgtgggagccactggtctgtgcacatccacggtgggtgagtggccaagacaagcagtgtgatagagtccttggtgggtttagtcatctcggaagtcgtagggcagctatggaaaccactgggttctggaacgttccagccaggcagtggttgttcctcataggtaggtggccttggccttcatcccagcctgggatgctccattgcatttgtcacctagtcactgtatatacgtgcacatttgaccttttggcacagcccaggttccaggtgcgtgacctgccctttttctcattcccttaactgacattatttagtgtcagaggccgagcacagtggctcccacctataatcctagcactttgggaggccaacgcgggtggattgcttgagcccaggagttcaagagcagcctgggcaatatagaaagacctcttccctaccaaaaaaaaaaaaaaaaaaaaaaagccaggtgcagtggctcacgcttgtaatcccagcactttgggaggccgaggcnggtggatcacaaggtcaggagatcgagaccatcctggccaacatggtgaaaccccatctctactaaaaacacaaaaattagctaggcatggtggcgtggcacgtgcctgtagtcccagctactcgggaagctgaggcaagagaatcacttgaaccagggaggcggaggttgcagtgagccgaggtcgcaccgttgtactccagcctggtgatagaacgagactccacaaaaaaaaaaaaaaattagccaggcatgatggggtgtgcctgtagtcccagctncttgngnggctgaggctggaggatcacttgagcccaggaagttgaggctgcagtgagctgtgattgtgccactgcactcatcctggaagacagagtgagatcctgtctcagataaaataaacaattttttttttaagtcattgcttctggcccctgtgtgctctgtcctgtgtctgcagaatggggctgcctggttgagggacggcttttaccttctagactagctctgggatctctcatggggcatgaggtacccagctagatgtggccaggccacactccaggagctagcaaagcacccagcgttgctgacacccatctccccagcgcagcctgagcccccaggcccctctctcatatccaggcctgtgctggaggtggcggcctctgggggagtgtggttggggtctgcccacttccctccccctgccgaggctgtggcctcccgctggctgctgcttggccccatctcatggtcgctgcctgctgcttggccccatctcatgggcgtcatcctcagcactcacgtgatgggagagttttgtaggagctgtgagtcccaggtgcctgcgtgtgctgtgatgttatctcatgcagtccagtgaggggggactcccattagtctcctttttttgttttgttttgagacacagtctcacttcattacccaggctggagtgcaaggcacgatcttggctcaccacaacctccacctcccaggttcaagtgattctcctgcctcagcctcctgagtagctgggattncaggtgcgcaccactncgcctggctaatttttgtatttttngtagagatggggtttctccatgttggtcaggctggtcttgaactcccgaccttgtgatccacccncctcggcctcccaaagtgctgggattacaggcgtgagccaccgcgcccggccatgattctccttctgtgggtggaggaactgggcactgggagcgtgaaaaccttgcccaggtggcagagccagctttggacgcaggtctgacttcctacctcactccccttgccttgacagacacagtaattcagagttgaacttggaacagagtttattttccatcactgtaaaacattctcagtgaggttactggcattaaaaaggtgggagaaatggaagaaaatggggttgaagaaaaaaaaagcctttgctcttgacagctaggcagccacagcggaggccgccaggctgcgagggcagcgtatgggggcagagcccggttctggcggcacaggccccggagtggagggggcaggggagggtctctgtaggtgggagagggcctgggggctgggaggcagcctggccttgtgccctacaggagggacctcctgggactttatggaagcctgtcttgcctttgacttgcaatgaaaatgcccctcatcattgggagtggggtcgggtgggggtccccagtggccagatcacgtggggtccagagagcagacatctgtagccctgatcttggcggccagtgaccacggccaagcagggcctgtcttttgcctggtacaaggcttgatgagaagagacccctgcccatcctcagtggcctggcagccaggggtgaaccccaggggaagctgggacactgtcccaaaggcccggcgccctactgtgctgcctgagcccgtggcaccgtggggcccaaggtggtgatgatttctctgctcttcccacggggcagacagcaggacacatcctggagacaaggttggggagacaaacaggtgcccaggtcagggctgatcacagcagttacaaaagcatcccgtgaagacggggctgcaagacggtgctggcaaaggaacaggacccaggaagaccaggcttgtcctgtggaggggccgggtcttggcagggggcaagcagatgtccccagtttttgctggtgatcaacaagtgaggccgctgctccattctacacaggacagcatttccaggggtttccagtattctgtctagattcataaaggtcaaaggccttgagaatctatgtgtgcctttctatcttaggtaaagaagagaaagagaaagcaaattctcgttactcctctttcaaaaagttcattaaaagccaggctggcagctcacagtgctataatcccagcactgtggaaggcctaggcaggaggattgagaggagttccagaccaacctgggcaacaccgtgagaccccatctctac

SEQ ID NO: 354134 - DNA, 2482 bp, Homo sapiens
agagacgagatctcactgcgttgcccaagctggtcttgaactcctgggctcaagcaatcctcccacttcagccttccaaagtgctgggattataggcgtgagccacagtgcccagcccctgctaaatgttttgtaggggaaccttaggagccctgtgaggccttcattttcctattagaaggatttcccttgccctcttgctgtgagttcctagagatcgtgctttctctgtctcaggacctgggatccagttggaggacggcggtgatggcagggaggatgccccgttgagaatggagtggtaccgagtgctctcggcacgatgccaggggcctggccacccgctcccaggtcagaggccagccccagtcaggggcttggtcaggcctgatcagccaagaggcggccccccaccaggaagacgggcttcccatggggctgacaagccgtacacctgccccgaatgtggcaaaggcttcagcaagacgtcccacttgaccaagcaccagcgcacacacacgggcgagcggccttacaagtgcctagtctgtgggaagggctttagcgaccgctccaacttcagcacgcaccagagggtgcacacaggcgagaagccctacccgtgccccgagtgtgggaagcgcttcagccagagctccagcctggtcatccaccgcaggacacacagcggggagcggccctatgcctgcacccagtgcgggaagcgcttcaacaacagctcgcacttcagcgcccaccgccggacgcacacaggtgagaagccctacacctgcccggcctgtggccggggcttccgccggggcaccgacctgcacaagcaccagcggacccacatgggggcaggctccttgccgacgctccagccggtggctcctggaggccccggtgcaaaagcctgatcaccatgcctgaaactccctttccaggactctcatccctgggcacagaattcaggaaactgctagacagcctggtccgaaagcattgccagctgcccgtttcctcccatggcccagtatgaggccagcaggggacatttgggatgcccaggccgcagaggaagctgggcactgggtgcagaacaagggcaaggacaggctctgagtgtccagtggcagccagaacaggtgacacagagcaggggcttcagccacagagacacactcaggaggccagaagccgacactcaaggtgttcgtggggctggctcctgaagggcctgggagggtccatcagctgcctccagcatccagtggctgctggcatacagcctcatccccacgtcccaacccctctcctgtgtgtctgtgaccctgtgcgctgtctctgtgtgtaccccccacctgctcccccccccttttttttttgagacggggccttgctgtgtcccccaggcgggaatacagtgccatgatcatagctcactgcagcctcgaatccctgggctcaagtgttcctcctgcctcatcctcctgagtagctggggttacaggtgtgtgccgccatgcccagtctcttttttggtagggccaccactcactgggtttagggttccccaatacactgtgacctcatcttaactaattatatcatcaaaacccgtgtttccaaataaggtcacattctgaggtctgggtgcacatgaatttgagggacccctcgtctgctgcagggagccctgctgtaccccagccttcccaggacgtggtctccagcttcttcatcctgccagagtttccaaatggagcccggggctctgcagcattccagtcccctttgcagatccatagctgctctgcagggcggaagacacctggggcgggaaagcacccctgagttccatcttcctgacatgtcgcctgggatgtgacgggcctgacatctccccagggccggggcccagggctgcctttgctcctggccccttagtgtctggaatgtggccttccacggttgccccactttgtctttctaaggtaagaagccttcaccttccagcttttgtctggcctgtgctgcgtgggagccactggtctgtgcacatccacggtgggtgagtggccaagacaagcagtgtgatagagtccttggtgggtttagtcatctcggaagtcgtagggcagctatggaaaccactgggttctggaacgttccagccaggcagtggttgttcctcataggtaggtggccttggccttcatcccagcctgggatgctccattgcatttgtcacctagtcactgtatatacgtgcacatttgaccttttggcacagcccaggttccaggtgcgtgacctgccctttttctcattcccttaactgacattatttagtgtcagaggccgagcacagtggctcccacctataatcctagcactttgggaggccaacgcgggtggattgcttgagcccaggagttcaagagcagcctgggcaatatagaaagacctcttccctacc

SEQ ID NO: 354135 - DNA, 3657 bp, Homo sapiens
  misc_feature (2558)..(2558): n is a, c, g, or t
  misc_feature (2839)..(2839): n is a, c, g, or t
  misc_feature (2844)..(2844): n is a, c, g, or t
  misc_feature (2846)..(2846): n is a, c, g, or t
agagacgagatctcactgcgttgcccaagctggtcttgaactcctgggctcaagcaatcctcccacttcagccttccaaagtgctgggattataggcgtgagccacagtgcccagcccctgctaaatgttttgtaggggaaccttaggagccctgtgaggccttcattttcctattagaaggatttcccttgccctcttgctgtgagttcctagagatcgtgctttctctgtctcaggacctgggatccagttggaggacggcggtgatggcagggaggatgccccgttgagaatggagtggtaccgagtgctctcggcacgatgccaggggcctggccacccgctcccaggtcagaggccagccccagtcaggggcttggtcaggcctgatcagccaagaggcggccccccaccaggaagacgggcttcccatggggctgacaagccgtacacctgccccgaatgtggcaaaggcttcagcaagacgtcccacttgaccaagcaccagcgcacacacacgggcgagcggccttacaagtgcctagtctgtgggaagggctttagcgaccgctccaacttcagcacgcaccagagggtgcacacaggcgagaagccctacccgtgccccgagtgtgggaagcgcttcagccagagctccagcctggtcatccaccgcaggacacacagcggggagcggccctatgcctgcacccagtgcgggaagcgcttcaacaacagctcgcacttcagcgcccaccgccggacgcacacaggtgagaagccctacacctgcccggcctgtggccggggcttccgccggggcaccgacctgcacaagcaccagcggacccacatgggggcaggctccttgccgacgctccagccggtggctcctggaggccccggtgcaaaagcctgatcaccatgcctgaaactccctttccaggactctcatccctgggcacagaattcaggaaactgctagacagcctggtccgaaagcattgccagctgcccgtttcctcccatggcccagtatgaggccagcaggggacatttgggatgcccaggccgcagaggaagctgggcactgggtgcagaacaagggcaaggacaggctctgagtgtccagtggcagccagaacaggtgacacagagcaggggcttcagccacagagacacactcaggaggccagaagccgacactcaaggtgttcgtggggctggctcctgaagggcctgggagggtccatcagctgcctccagcatccagtggctgctggcatacagcctcatccccacgtcccaacccctctcctgtgtgtctgtgaccctgtgcgctgtctctgtgtgtaccccccacctgctcccccccccttttttttttgagacggggccttgctgtgtcccccaggcgggaatacagtgccatgatcatagctcactgcagcctcgaatccctgggctcaagtgttcctcctgcctcatcctcctgagtagctggggttacaggtgtgtgccgccatgcccagtctcttttttggtagggccaccactcactgggtttagggttccccaatacactgtgacctcatcttaactaattatatcatcaaaacccgtgtttccaaataaggtcacattctgaggtctgggtgcacatgaatttgagggacccctcgtctgctgcagggagccctgctgtaccccagccttcccaggacgtggtctccagcttcttcatcctgccagagtttccaaatggagcccggggctctgcagcattccagtcccctttgcagatccatagctgctctgcagggcggaagacacctggggcgggaaagcacccctgagttccatcttcctgacatgtcgcctgggatgtgacgggcctgacatctccccagggccggggcccagggctgcctttgctcctggccccttagtgtctggaatgtggccttccacggttgccccactttgtctttctaaggtaagaagccttcaccttccagcttttgtctggcctgtgctgcgtgggagccactggtctgtgcacatccacggtgggtgagtggccaagacaagcagtgtgatagagtccttggtgggtttagtcatctcggaagtcgtagggcagctatggaaaccactgggttctggaacgttccagccaggcagtggttgttcctcataggtaggtggccttggccttcatcccagcctgggatgctccattgcatttgtcacctagtcactgtatatacgtgcacatttgaccttttggcacagcccaggttccaggtgcgtgacctgccctttttctcattcccttaactgacattatttagtgtcagaggccgagcacagtggctcccacctataatcctagcactttgggaggccaacgcgggtggattgcttgagcccaggagttcaagagcagcctgggcaatatagaaagacctcttccctaccaaaaaaaaaaaaaaaaaaaaaaagccaggtgcagtggctcacgcttgtaatcccagcactttgggaggccgaggcnggtggatcacaaggtcaggagatcgagaccatcctggccaacatggtgaaaccccatctctactaaaaacacaaaaattagctaggcatggtggcgtggcacgtgcctgtagtcccagctactcgggaagctgaggcaagagaatcacttgaaccagggaggcggaggttgcagtgagccgaggtcgcaccgttgtactccagcctggtgatagaacgagactccacaaaaaaaaaaaaaaattagccaggcatgatggggtgtgcctgtagtcccagctncttgngnggctgaggctggaggatcacttgagcccaggaagttgaggctgcagtgagctgtgattgtgccactgcactcatcctggaagacagagtgagatcctgtctcagataaaataaacaattttttttttaagtcattgcttctggcccctgtgtgctctgtcctgtgtctgcagaatggggctgcctggttgagggacggcttttaccttctagactagctctgggatctctcatggggcatgaggtacccagctagatgtggccaggccacactccaggagctagcaaagcacccagcgttgctgacacccatctccccagcgcagcctgagcccccaggcccctctctcatatccaggcctgtgctggaggtggcggcctctgggggagtgtggttggggtctgcccacttccctccccctgccgaggctgtggcctcccgctggctgctgcttggccccatctcatggtcgctgcctgctgcttggccccatctcatgggcgtcatcctcagcactcacgtgatgggagagttttgtaggagctgtgagtcccaggtgcctgcgtgtgctgtgatgttatctcatgcagtccagtgaggggggactcccattagtctcctttttttgttttgttttgagacacagtctcacttcattacccaggctggagtgcaaggcacgatcttggctcaccacaacctccacctcccaggttcaaggagaatcacttgagccggggaggcggaggttgcagtgagccgaggtcgcaccgttgtactccagcctggtgatagaacgagactccacaaa

SEQ ID NO: 354136 - DNA, 3659 bp, Homo sapiens
  misc_feature (2558)..(2558): n is a, c, g, or t
  misc_feature (2839)..(2839): n is a, c, g, or t
  misc_feature (2844)..(2844): n is a, c, g, or t
  misc_feature (2846)..(2846): n is a, c, g, or t
agagacgagatctcactgcgttgcccaagctggtcttgaactcctgggctcaagcaatcctcccacttcagccttccaaagtgctgggattataggcgtgagccacagtgcccagcccctgctaaatgttttgtaggggaaccttaggagccctgtgaggccttcattttcctattagaaggatttcccttgccctcttgctgtgagttcctagagatcgtgctttctctgtctcaggacctgggatccagttggaggacggcggtgatggcagggaggatgccccgttgagaatggagtggtaccgagtgctctcggcacgatgccaggggcctggccacccgctcccaggtcagaggccagccccagtcaggggcttggtcaggcctgatcagccaagaggcggccccccaccaggaagacgggcttcccatggggctgacaagccgtacacctgccccgaatgtggcaaaggcttcagcaagacgtcccacttgaccaagcaccagcgcacacacacgggcgagcggccttacaagtgcctagtctgtgggaagggctttagcgaccgctccaacttcagcacgcaccagagggtgcacacaggcgagaagccctacccgtgccccgagtgtgggaagcgcttcagccagagctccagcctggtcatccaccgcaggacacacagcggggagcggccctatgcctgcacccagtgcgggaagcgcttcaacaacagctcgcacttcagcgcccaccgccggacgcacacaggtgagaagccctacacctgcccggcctgtggccggggcttccgccggggcaccgacctgcacaagcaccagcggacccacatgggggcaggctccttgccgacgctccagccggtggctcctggaggccccggtgcaaaagcctgatcaccatgcctgaaactccctttccaggactctcatccctgggcacagaattcaggaaactgctagacagcctggtccgaaagcattgccagctgcccgtttcctcccatggcccagtatgaggccagcaggggacatttgggatgcccaggccgcagaggaagctgggcactgggtgcagaacaagggcaaggacaggctctgagtgtccagtggcagccagaacaggtgacacagagcaggggcttcagccacagagacacactcaggaggccagaagccgacactcaaggtgttcgtggggctggctcctgaagggcctgggagggtccatcagctgcctccagcatccagtggctgctggcatacagcctcatccccacgtcccaacccctctcctgtgtgtctgtgaccctgtgcgctgtctctgtgtgtaccccccacctgctcccccccccttttttttttgagacggggccttgctgtgtcccccaggcgggaatacagtgccatgatcatagctcactgcagcctcgaatccctgggctcaagtgttcctcctgcctcatcctcctgagtagctggggttacaggtgtgtgccgccatgcccagtctcttttttggtagggccaccactcactgggtttagggttccccaatacactgtgacctcatcttaactaattatatcatcaaaacccgtgtttccaaataaggtcacattctgaggtctgggtgcacatgaatttgagggacccctcgtctgctgcagggagccctgctgtaccccagccttcccaggacgtggtctccagcttcttcatcctgccagagtttccaaatggagcccggggctctgcagcattccagtcccctttgcagatccatagctgctctgcagggcggaagacacctggggcgggaaagcacccctgagttccatcttcctgacatgtcgcctgggatgtgacgggcctgacatctccccagggccggggcccagggctgcctttgctcctggccccttagtgtctggaatgtggccttccacggttgccccactttgtctttctaaggtaagaagccttcaccttccagcttttgtctggcctgtgctgcgtgggagccactggtctgtgcacatccacggtgggtgagtggccaagacaagcagtgtgatagagtccttggtgggtttagtcatctcggaagtcgtagggcagctatggaaaccactgggttctggaacgttccagccaggcagtggttgttcctcataggtaggtggccttggccttcatcccagcctgggatgctccattgcatttgtcacctagtcactgtatatacgtgcacatttgaccttttggcacagcccaggttccaggtgcgtgacctgccctttttctcattcccttaactgacattatttagtgtcagaggccgagcacagtggctcccacctataatcctagcactttgggaggccaacgcgggtggattgcttgagcccaggagttcaagagcagcctgggcaatatagaaagacctcttccctaccaaaaaaaaaaaaaaaaaaaaaaagccaggtgcagtggctcacgcttgtaatcccagcactttgggaggccgaggcnggtggatcacaaggtcaggagatcgagaccatcctggccaacatggtgaaaccccatctctactaaaaacacaaaaattagctaggcatggtggcgtggcacgtgcctgtagtcccagctactcgggaagctgaggcaagagaatcacttgaaccagggaggcggaggttgcagtgagccgaggtcgcaccgttgtactccagcctggtgatagaacgagactccacaaaaaaaaaaaaaaattagccaggcatgatggggtgtgcctgtagtcccagctncttgngnggctgaggctggaggatcacttgagcccaggaagttgaggctgcagtgagctgtgattgtgccactgcactcatcctggaagacagagtgagatcctgtctcagataaaataaacaattttttttttaagtcattgcttctggcccctgtgtgctctgtcctgtgtctgcagaatggggctgcctggttgagggacggcttttaccttctagactagctctgggatctctcatggggcatgaggtacccagctagatgtggccaggccacactccaggagctagcaaagcacccagcgttgctgacacccatctccccagcgcagcctgagcccccaggcccctctctcatatccaggcctgtgctggaggtggcggcctctgggggagtgtggttggggtctgcccacttccctccccctgccgaggctgtggcctcccgctggctgctgcttggccccatctcatggtcgctgcctgctgcttggccccatctcatgggcgtcatcctcagcactcacgtgatgggagagttttgtaggagctgtgagtcccaggtgcctgcgtgtgctgtgatgttatctcatgcagtccagtgaggggggactcccattagtctcctttttttgttttgttttgagacacagtctcacttcattacccaggctggagtgcaaggcacgatcttggctcaccacaacctccacctcccaggttcaagagaatcgcttgaacccgggagttggaggttgcagtgaaccgagatcgcaccactgcactccagcctgggcgacagagcaagactccgcctcaa

SEQ ID NO: 354137 - DNA, 3217 bp, Homo sapiens
tcggctcactgcaacctgcgccttagcctcctgagtagctaggattacaggcatgaaccaccacgcccaggtttctccacgttagtcaggctggtctcgaactcccgacctcagggccctgaaaaaaactctcttcctgtgtctggccagaggtatagagagagacaggttcaactctaaggcctgaaaaggaacaaggcccaccggaagcaatggccactgtccctggcctccagcccctgccaaccttggagcaggacctggaacaggaagagatcctgattgtgaaggtggaggaggacttctgcttggaagaggagccctccgtggagacggaggaccccagccctgagactttccgccagctcttccggctcttctgctaccaggaggtggctgggccccgggaggccctgagccgcctctgggagctgtgctgccgctggctgcggccggagctgcgcaccaaggagcagatcctggagctgctggtgctggagcagttcctgactgtgctgccgggggagatccaggctcgggtacgcgagcagcagccggagagcggtgaggaggccgtggtcctcgtggaagggctgcagcggaagcccaggaaacacaggcagcggggctcagagctgctttctgatgacgaggtgcccctcgggatagggggacagttcttaaaacaccaggcagaggctcagccagaggatctgtccctggaggaagaggctcgattctccagccagcagcccccagcccagctgagccacaggccacagaggggcccgctgttgtggccagagagaggccctccagctccccggcatcaggagatggcgtcagcctcgcccttcctttcggcctggtcccaggtgcccgtgaacttggaggacgtggctgtatacctttctggggaggagccaagatgcatggacccagctcagcgggacgcgccgctggagaatgaaggacctgggatccagttggaggacggcggtgatggcagggaggatgccccgttgagaatggagtggtaccgagtgctctcggcacgatgccaggggcctggccacccgctcccaggtcagaggccagccccagtcaggggcttggtcaggcctgatcagccaagaggcggccccccaccaggaagacgggcttcccatggggctgacaagccgtacacctgccccgaatgtggcaaaggcttcagcaagacgtcccacttgaccaagcaccagcgcacacacacgggcgagcggccttacaagtgcctagtctgtgggaagggctttagcgaccgctccaacttcagcacgcaccagagggtgcacacaggcgagaagccctacccgtgccccgagtgtgggaagcgcttcagccagagctccagcctggtcatccaccgcaggacacacagcggggagcggccctatgcctgcacccagtgcgggaagcgcttcaacaacagctcgcacttcagcgcccaccgccggacgcacacaggtgagaagccctacacctgcccggcctgtggccggggcttccgccggggcaccgacctgcacaagcaccagcggacccacatgggggcaggctccttgccgacgctccagccggtggctcctggaggccccggtgcaaaagcctgatcaccatgcctgaaactccctttccaggactctcatccctgggcacagaattcaggaaactgctagacagcctggtccgaaagcattgccagctgcccgtttcctcccatggcccagtatgaggccagcaggggacatttgggatgcccaggccgcagaggaagctgggcactgggtgcagaacaagggcaaggacaggctctgagtgtccagtggcagccagaacaggtgacacagagcaggggcttcagccacagagacacactcaggaggccagaagccgacactcaaggtgttcgtggggctggctcctgaagggcctgggagggtccatcagctgcctccagcatccagtggctgctggcatacagcctcatccccacgtcccaacccctctcctgtgtgtctgtgaccctgtgcgctgtctctgtgtgtaccccccacctgctcccccccccttttttttttgagacggggccttgctgtgtcccccaggcgggaatacagtgccatgatcatagctcactgcagcctcgaatccctgggctcaagtgttcctcctgcctcatcctcctgagtagctggggttacaggtgtgtgccgccatgcccagtctcttttttggtagggccaccactcactgggtttagggttccccaatacactgtgacctcatcttaactaattatatcatcaaaacccgtgtttccaaataaggtcacattctgaggtctgggtgcacatgaatttgagggacccctcgtctgctgcagggagccctgctgtaccccagccttcccaggacgtggtctccagcttcttcatcctgccagagtttccaaatggagcccggggctctgcagcattccagtcccctttgcagatccatagctgctctgcagggcggaagacacctggggcgggaaagcacccctgagttccatcttcctgacatgtcgcctgggatgtgacgggcctgacatctccccagggccggggcccagggctgcctttgctcctggccccttagtgtctggaatgtggccttccacggttgccccactttgtctttctaaggtaagaagccttcaccttccagcttttgtctggcctgtgctgcgtgggagccactggtctgtgcacatccacggtgggtgagtggccaagacaagcagtgtgatagagtccttggtgggtttagtcatctcggaagtcgtagggcagctatggaaaccactgggttctggaacgttccagccaggcagtggttgttcctcataggtaggtggccttggccttcatcccagcctgggatgctccattgcatttgtcacctagtcactgtatatacgtgcacatttgaccttttggcacagcccaggttccaggtgcgtgacctgccctttttctcattcccttaactgacattatttagtgtcagaggccgagcacagtggctcccacctataatcctagcactttgggaggccaacgcgggtggattgcttgagcccaggagttcaagagcagcctgggcaatatagaaagacctcttccctacc

SEQ ID NO: 354138 - DNA, 2517 bp, Homo sapiens
gcggccgcatcagagacagcccgggccaggtcccatggacaccacctgcaccgtgattgaggaaccctgatctgaagatctctgagcgcacattacctgtggtctagttcattccctgtgcaaaaggcagaagtcaaaagggaaagaatttgccagccctcccggctcccaagtggttacgtggaatcctcagaagggaaggaatgagattctgcccagctctgtccaccagctcctggagcccagacacagcttccctctcagggtcacaggacctgggatccagttggaggacggcggtgatggcagggaggatgccccgttgagaatggagtggtaccgagtgctctcggcacgatgccaggggcctggccacccgctcccaggtcagaggccagccccagtcaggggcttggtcaggcctgatcagccaagaggcggccccccaccaggaagacgggcttcccatggggctgacaagccgtacacctgccccgaatgtggcaaaggcttcagcaagacgtcccacttgaccaagcaccagcgcacacacacgggcgagcggccttacaagtgcctagtctgtgggaagggctttagcgaccgctccaacttcagcacgcaccagagggtgcacacaggcgagaagccctacccgtgccccgagtgtgggaagcgcttcagccagagctccagcctggtcatccaccgcaggacacacagcggggagcggccctatgcctgcacccagtgcgggaagcgcttcaacaacagctcgcacttcagcgcccaccgccggacgcacacaggtgagaagccctacacctgcccggcctgtggccggggcttccgccggggcaccgacctgcacaagcaccagcggacccacatgggggcaggctccttgccgacgctccagccggtggctcctggaggccccggtgcaaaagcctgatcaccatgcctgaaactccctttccaggactctcatccctgggcacagaattcaggaaactgctagacagcctggtccgaaagcattgccagctgcccgtttcctcccatggcccagtatgaggccagcaggggacatttgggatgcccaggccgcagaggaagctgggcactgggtgcagaacaagggcaaggacaggctctgagtgtccagtggcagccagaacaggtgacacagagcaggggcttcagccacagagacacactcaggaggccagaagccgacactcaaggtgttcgtggggctggctcctgaagggcctgggagggtccatcagctgcctccagcatccagtggctgctggcatacagcctcatccccacgtcccaacccctctcctgtgtgtctgtgaccctgtgcgctgtctctgtgtgtaccccccacctgctcccccccccttttttttttgagacggggccttgctgtgtcccccaggcgggaatacagtgccatgatcatagctcactgcagcctcgaatccctgggctcaagtgttcctcctgcctcatcctcctgagtagctggggttacaggtgtgtgccgccatgcccagtctcttttttggtagggccaccactcactgggtttagggttccccaatacactgtgacctcatcttaactaattatatcatcaaaacccgtgtttccaaataaggtcacattctgaggtctgggtgcacatgaatttgagggacccctcgtctgctgcagggagccctgctgtaccccagccttcccaggacgtggtctccagcttcttcatcctgccagagtttccaaatggagcccggggctctgcagcattccagtcccctttgcagatccatagctgctctgcagggcggaagacacctggggcgggaaagcacccctgagttccatcttcctgacatgtcgcctgggatgtgacgggcctgacatctccccagggccggggcccagggctgcctttgctcctggccccttagtgtctggaatgtggccttccacggttgccccactttgtctttctaaggtaagaagccttcaccttccagcttttgtctggcctgtgctgcgtgggagccactggtctgtgcacatccacggtgggtgagtggccaagacaagcagtgtgatagagtccttggtgggtttagtcatctcggaagtcgtagggcagctatggaaaccactgggttctggaacgttccagccaggcagtggttgttcctcataggtaggtggccttggccttcatcccagcctgggatgctccattgcatttgtcacctagtcactgtatatacgtgcacatttgaccttttggcacagcccaggttccaggtgcgtgacctgccctttttctcattcccttaactgacattatttagtgtcagaggccgagcacagtggctcccacctataatcctagcactttgggaggccaacgcgggtggattgcttgagcccaggagttcaagagcagcctgggcaatatagaaagacctcttccctacc

SEQ ID NO: 354139 - DNA, 5014 bp, Homo sapiens
  misc_feature (2558)..(2558): n is a, c, g, or t
  misc_feature (2839)..(2839): n is a, c, g, or t
  misc_feature (2844)..(2844): n is a, c, g, or t
  misc_feature (2846)..(2846): n is a, c, g, or t
  misc_feature (3604)..(3604): n is a, c, g, or t
  misc_feature (3620)..(3620): n is a, c, g, or t
  misc_feature (3645)..(3645): n is a, c, g, or t
  misc_feature (3710)..(3710): n is a, c, g, or t
agagacgagatctcactgcgttgcccaagctggtcttgaactcctgggctcaagcaatcctcccacttcagccttccaaagtgctgggattataggcgtgagccacagtgcccagcccctgctaaatgttttgtaggggaaccttaggagccctgtgaggccttcattttcctattagaaggatttcccttgccctcttgctgtgagttcctagagatcgtgctttctctgtctcaggacctgggatccagttggaggacggcggtgatggcagggaggatgccccgttgagaatggagtggtaccgagtgctctcggcacgatgccaggggcctggccacccgctcccaggtcagaggccagccccagtcaggggcttggtcaggcctgatcagccaagaggcggccccccaccaggaagacgggcttcccatggggctgacaagccgtacacctgccccgaatgtggcaaaggcttcagcaagacgtcccacttgaccaagcaccagcgcacacacacgggcgagcggccttacaagtgcctagtctgtgggaagggctttagcgaccgctccaacttcagcacgcaccagagggtgcacacaggcgagaagccctacccgtgccccgagtgtgggaagcgcttcagccagagctccagcctggtcatccaccgcaggacacacagcggggagcggccctatgcctgcacccagtgcgggaagcgcttcaacaacagctcgcacttcagcgcccaccgccggacgcacacaggtgagaagccctacacctgcccggcctgtggccggggcttccgccggggcaccgacctgcacaagcaccagcggacccacatgggggcaggctccttgccgacgctccagccggtggctcctggaggccccggtgcaaaagcctgatcaccatgcctgaaactccctttccaggactctcatccctgggcacagaattcaggaaactgctagacagcctggtccgaaagcattgccagctgcccgtttcctcccatggcccagtatgaggccagcaggggacatttgggatgcccaggccgcagaggaagctgggcactgggtgcagaacaagggcaaggacaggctctgagtgtccagtggcagccagaacaggtgacacagagcaggggcttcagccacagagacacactcaggaggccagaagccgacactcaaggtgttcgtggggctggctcctgaagggcctgggagggtccatcagctgcctccagcatccagtggctgctggcatacagcctcatccccacgtcccaacccctctcctgtgtgtctgtgaccctgtgcgctgtctctgtgtgtaccccccacctgctcccccccccttttttttttgagacggggccttgctgtgtcccccaggcgggaatacagtgccatgatcatagctcactgcagcctcgaatccctgggctcaagtgttcctcctgcctcatcctcctgagtagctggggttacaggtgtgtgccgccatgcccagtctcttttttggtagggccaccactcactgggtttagggttccccaatacactgtgacctcatcttaactaattatatcatcaaaacccgtgtttccaaataaggtcacattctgaggtctgggtgcacatgaatttgagggacccctcgtctgctgcagggagccctgctgtaccccagccttcccaggacgtggtctccagcttcttcatcctgccagagtttccaaatggagcccggggctctgcagcattccagtcccctttgcagatccatagctgctctgcagggcggaagacacctggggcgggaaagcacccctgagttccatcttcctgacatgtcgcctgggatgtgacgggcctgacatctccccagggccggggcccagggctgcctttgctcctggccccttagtgtctggaatgtggccttccacggttgccccactttgtctttctaaggtaagaagccttcaccttccagcttttgtctggcctgtgctgcgtgggagccactggtctgtgcacatccacggtgggtgagtggccaagacaagcagtgtgatagagtccttggtgggtttagtcatctcggaagtcgtagggcagctatggaaaccactgggttctggaacgttccagccaggcagtggttgttcctcataggtaggtggccttggccttcatcccagcctgggatgctccattgcatttgtcacctagtcactgtatatacgtgcacatttgaccttttggcacagcccaggttccaggtgcgtgacctgccctttttctcattcccttaactgacattatttagtgtcagaggccgagcacagtggctcccacctataatcctagcactttgggaggccaacgcgggtggattgcttgagcccaggagttcaagagcagcctgggcaatatagaaagacctcttccctaccaaaaaaaaaaaaaaaaaaaaaaagccaggtgcagtggctcacgcttgtaatcccagcactttgggaggccgaggcnggtggatcacaaggtcaggagatcgagaccatcctggccaacatggtgaaaccccatctctactaaaaacacaaaaattagctaggcatggtggcgtggcacgtgcctgtagtcccagctactcgggaagctgaggcaagagaatcacttgaaccagggaggcggaggttgcagtgagccgaggtcgcaccgttgtactccagcctggtgatagaacgagactccacaaaaaaaaaaaaaaattagccaggcatgatggggtgtgcctgtagtcccagctncttgngnggctgaggctggaggatcacttgagcccaggaagttgaggctgcagtgagctgtgattgtgccactgcactcatcctggaagacagagtgagatcctgtctcagataaaataaacaattttttttttaagtcattgcttctggcccctgtgtgctctgtcctgtgtctgcagaatggggctgcctggttgagggacggcttttaccttctagactagctctgggatctctcatggggcatgaggtacccagctagatgtggccaggccacactccaggagctagcaaagcacccagcgttgctgacacccatctccccagcgcagcctgagcccccaggcccctctctcatatccaggcctgtgctggaggtggcggcctctgggggagtgtggttggggtctgcccacttccctccccctgccgaggctgtggcctcccgctggctgctgcttggccccatctcatggtcgctgcctgctgcttggccccatctcatgggcgtcatcctcagcactcacgtgatgggagagttttgtaggagctgtgagtcccaggtgcctgcgtgtgctgtgatgttatctcatgcagtccagtgaggggggactcccattagtctcctttttttgttttgttttgagacacagtctcacttcattacccaggctggagtgcaaggcacgatcttggctcaccacaacctccacctcccaggttcaagtgattctcctgcctcagcctcctgagtagctgggattncaggtgcgcaccactncgcctggctaatttttgtatttttngtagagatggggtttctccatgttggtcaggctggtcttgaactcccgaccttgtgatccacccncctcggcctcccaaagtgctgggattacaggcgtgagccaccgcgcccggccatgattctccttctgtgggtggaggaactgggcactgggagcgtgaaaaccttgcccaggtggcagagccagctttggacgcaggtctgacttcctacctcactccccttgccttgacagacacagtaattcagagttgaacttggaacagagtttattttccatcactgtaaaacattctcagtgaggttactggcattaaaaaggtgggagaaatggaagaaaatggggttgaagaaaaaaaaagcctttgctcttgacagctaggcagccacagcggaggccgccaggctgcgagggcagcgtatgggggcaggggagggtctctgtaggtgggagagggcctgggggctgggaggcagcctggccttgtgccctacaggagggacctcctgggactttatggaagcctgtcttgcctttgacttgcaatgaaaatgcccctcatcattgggagtggggtcgggtgggggtccccagtggccagatcacgtggggtccagagagcagacatctgtagccctgatcttggcggccagtgaccacggccaagcagggcctgtcttttgcctggtacaaggcttgatgagaagagacccctgcccatcctcagtggcctggcagccaggggtgaaccccaggggaagctgggacactgtcccaaaggcccggcgccctactgtgctgcctgagcccgtggcaccgtggggcccaaggtggtgatgatttctctgctcttcccacggggcagacagcaggacacatcctggagacaaggttggggagacaaacaggtgcccaggtcagggctgatcacagcagttacaaaagcatcccgtgaagacggggctgcaagacggtgctggcaaaggaacaggacccaggaagaccaggcttgtcctgtggaggggccgggtcttggcagggggcaagcagatgtccccagtttttgctggtgatcaacaagtgaggccgctgctccattctacacaggacagcatttccaggggtttccagtattctgtctagattcataaaggtcaaaggccttgagaatctatgtgtgcctttctatcttaggtaaagaagagaaagagaaagcaaattctcgttactcctctttcaaaaagttcattaaaagccaggctggcagctcacagtgctataatcccagcactgtggaaggcctaggcaggaggattgagaggagttccagaccaacctgggcaacaccgtgagaccccatctctac

SEQ ID NO: 354140 - DNA, 4987 bp, Homo sapiens
  misc_feature (2558)..(2558): n is a, c, g, or t
  misc_feature (2839)..(2839): n is a, c, g, or t
  misc_feature (2844)..(2844): n is a, c, g, or t
  misc_feature (2846)..(2846): n is a, c, g, or t
  misc_feature (3604)..(3604): n is a, c, g, or t
  misc_feature (3620)..(3620): n is a, c, g, or t
  misc_feature (3645)..(3645): n is a, c, g, or t
  misc_feature (3710)..(3710): n is a, c, g, or t
agagacgagatctcactgcgttgcccaagctggtcttgaactcctgggctcaagcaatcctcccacttcagccttccaaagtgctgggattataggcgtgagccacagtgcccagcccctgctaaatgttttgtaggggaaccttaggagccctgtgaggccttcattttcctattagaaggatttcccttgccctcttgctgtgagttcctagagatcgtgctttctctgtctcaggacctgggatccagttggaggacggcggtgatggcagggaggatgccccgttgagaatggagtggtaccgagtgctctcggcacgatgccaggggcctggccacccgctcccaggtcagaggccagccccagtcaggggcttggtcaggcctgatcagccaagaggcggccccccaccaggaagacgggcttcccatggggctgacaagccgtacacctgccccgaatgtggcaaaggcttcagcaagacgtcccacttgaccaagcaccagcgcacacacacgggcgagcggccttacaagtgcctagtctgtgggaagggctttagcgaccgctccaacttcagcacgcaccagagggtgcacacaggcgagaagccctacccgtgccccgagtgtgggaagcgcttcagccagagctccagcctggtcatccaccgcaggacacacagcggggagcggccctatgcctgcacccagtgcgggaagcgcttcaacaacagctcgcacttcagcgcccaccgccggacgcacacaggtgagaagccctacacctgcccggcctgtggccggggcttccgccggggcaccgacctgcacaagcaccagcggacccacatgggggcaggctccttgccgacgctccagccggtggctcctggaggccccggtgcaaaagcctgatcaccatgcctgaaactccctttccaggactctcatccctgggcacagaattcaggaaactgctagacagcctggtccgaaagcattgccagctgcccgtttcctcccatggcccagtatgaggccagcaggggacatttgggatgcccaggccgcagaggaagctgggcactgggtgcagaacaagggcaaggacaggctctgagtgtccagtggcagccagaacaggtgacacagagcaggggcttcagccacagagacacactcaggaggccagaagccgacactcaaggtgttcgtggggctggctcctgaagggcctgggagggtccatcagctgcctccagcatccagtggctgctggcatacagcctcatccccacgtcccaacccctctcctgtgtgtctgtgaccctgtgcgctgtctctgtgtgtaccccccacctgctcccccccccttttttttttgagacggggccttgctgtgtcccccaggcgggaatacagtgccatgatcatagctcactgcagcctcgaatccctgggctcaagtgttcctcctgcctcatcctcctgagtagctggggttacaggtgtgtgccgccatgcccagtctcttttttggtagggccaccactcactgggtttagggttccccaatacactgtgacctcatcttaactaattatatcatcaaaacccgtgtttccaaataaggtcacattctgaggtctgggtgcacatgaatttgagggacccctcgtctgctgcagggagccctgctgtaccccagccttcccaggacgtggtctccagcttcttcatcctgccagagtttccaaatggagcccggggctctgcagcattccagtcccctttgcagatccatagctgctctgcagggcggaagacacctggggcgggaaagcacccctgagttccatcttcctgacatgtcgcctgggatgtgacgggcctgacatctccccagggccggggcccagggctgcctttgctcctggccccttagtgtctggaatgtggccttccacggttgccccactttgtctttctaaggtaagaagccttcaccttccagcttttgtctggcctgtgctgcgtgggagccactggtctgtgcacatccacggtgggtgagtggccaagacaagcagtgtgatagagtccttggtgggtttagtcatctcggaagtcgtagggcagctatggaaaccactgggttctggaacgttccagccaggcagtggttgttcctcataggtaggtggccttggccttcatcccagcctgggatgctccattgcatttgtcacctagtcactgtatatacgtgcacatttgaccttttggcacagcccaggttccaggtgcgtgacctgccctttttctcattcccttaactgacattatttagtgtcagaggccgagcacagtggctcccacctataatcctagcactttgggaggccaacgcgggtggattgcttgagcccaggagttcaagagcagcctgggcaatatagaaagacctcttccctaccaaaaaaaaaaaaaaaaaaaaaaagccaggtgcagtggctcacgcttgtaatcccagcactttgggaggccgaggcnggtggatcacaaggtcaggagatcgagaccatcctggccaacatggtgaaaccccatctctactaaaaacacaaaaattagctaggcatggtggcgtggcacgtgcctgtagtcccagctactcgggaagctgaggcaagagaatcacttgaaccagggaggcggaggttgcagtgagccgaggtcgcaccgttgtactccagcctggtgatagaacgagactccacaaaaaaaaaaaaaaattagccaggcatgatggggtgtgcctgtagtcccagctncttgngnggctgaggctggaggatcacttgagcccaggaagttgaggctgcagtgagctgtgattgtgccactgcactcatcctggaagacagagtgagatcctgtctcagataaaataaacaattttttttttaagtcattgcttctggcccctgtgtgctctgtcctgtgtctgcagaatggggctgcctggttgagggacggcttttaccttctagactagctctgggatctctcatggggcatgaggtacccagctagatgtggccaggccacactccaggagctagcaaagcacccagcgttgctgacacccatctccccagcgcagcctgagcccccaggcccctctctcatatccaggcctgtgctggaggtggcggcctctgggggagtgtggttggggtctgcccacttccctccccctgccgaggctgtggcctcccgctggctgctgcttggccccatctcatggtcgctgcctgctgcttggccccatctcatgggcgtcatcctcagcactcacgtgatgggagagttttgtaggagctgtgagtcccaggtgcctgcgtgtgctgtgatgttatctcatgcagtccagtgaggggggactcccattagtctcctttttttgttttgttttgagacacagtctcacttcattacccaggctggagtgcaaggcacgatcttggctcaccacaacctccacctcccaggttcaagtgattctcctgcctcagcctcctgagtagctgggattncaggtgcgcaccactncgcctggctaatttttgtatttttngtagagatggggtttctccatgttggtcaggctggtcttgaactcccgaccttgtgatccacccncctcggcctcccaaagtgctgggattacaggcgtgagccaccgcgcccggccatgattctccttctgtgggtggaggaactgggcactgggagcgtgaaaaccttgcccaggtggcagagccagctttggacgcaggtctgacttcctacctcactccccttgccttgacagacacagtaattcagagttgaacttggaacagagtttattttccatcactgtaaaacattctcagtgaggttactggcattaaaaaggtgggagaaatggaagaaaatggggttgaagaaaaaaaaagcctttgctcttgacagctaggcagccacagcggagggggcaggggagggtctctgtaggtgggagagggcctgggggctgggaggcagcctggccttgtgccctacaggagggacctcctgggactttatggaagcctgtcttgcctttgacttgcaatgaaaatgcccctcatcattgggagtggggtcgggtgggggtccccagtggccagatcacgtggggtccagagagcagacatctgtagccctgatcttggcggccagtgaccacggccaagcagggcctgtcttttgcctggtacaaggcttgatgagaagagacccctgcccatcctcagtggcctggcagccaggggtgaaccccaggggaagctgggacactgtcccaaaggcccggcgccctactgtgctgcctgagcccgtggcaccgtggggcccaaggtggtgatgatttctctgctcttcccacggggcagacagcaggacacatcctggagacaaggttggggagacaaacaggtgcccaggtcagggctgatcacagcagttacaaaagcatcccgtgaagacggggctgcaagacggtgctggcaaaggaacaggacccaggaagaccaggcttgtcctgtggaggggccgggtcttggcagggggcaagcagatgtccccagtttttgctggtgatcaacaagtgaggccgctgctccattctacacaggacagcatttccaggggtttccagtattctgtctagattcataaaggtcaaaggccttgagaatctatgtgtgcctttctatcttaggtaaagaagagaaagagaaagcaaattctcgttactcctctttcaaaaagttcattaaaagccaggctggcagctcacagtgctataatcccagcactgtggaaggcctaggcaggaggattgagaggagttccagaccaacctgggcaacaccgtgagaccccatctctac

SEQ ID NO: 354141 - DNA, 407 bp, Homo sapiens
tgtgccatgatgttgcttctcaaggattcagccttgggcatgcatacagtcaccctgagatgacgatggtggcagggctctccttcactgtctctttcactgatcacacccaggtttaagctctgctgattgctgattgattgctctcattttcaaaatgtcgtggggcatcaattgtctattcagagaatcaattcagtttgggctcttttacgggtatagttatagacctagtgtacacctagcaggtagagttttttgagatcagtgtttgcgcttcattctgaccccaggagggctcttcttagctatttctgtttcctgttctctctggtaaaccaggcagcccacagtttaacttatatcgctaatctaccaatttcttcttcattgcttttaccacagcc

SEQ ID NO: 354142 - DNA, 4555 bp, Homo sapiens
aggctgggaggtgggactgactgagtcttccgtgtgtcgccgccgttgccgcctcagcttcagcctcgttactcctgcggttctgtggctgtgctgctggcgttaacggcgcgaggtgaagggaggtgacggagtgtgcccgcgcgcgcgggggtcccctcagtcccagcagttcccttcgtgcgcggggggcggcgagggtcttcagcagtcgggagaggcccttgacggcgccatgtcggcgggcggtccatgcccagcagcagccggagggggcccagggggcgcctcctgctccgtgggggcccctggcggggtatccatgttccggtggctggaggtgctggagaaggagttcgacaaagcttttgtggatgtggatctgctcctgggagagatcgatccagaccaagcggacatcacttatgaggggcgacagaagatgaccagcctgagctcctgctttgcacagctttgccacaaagcccagtctgtgtctcaaatcaaccacaagctggaggcacagttggtggatctgaaatctgaactgacagaaacccaagcagagaaagttgttttggagaaagaagtacatgatcagcttttacagctgcactctattcagctgcagcttcatgctaaaactggtcaaagtgctgactctggtaccattaaggcaaaattgtctggcccctctgtggaggagctggaaagagagcttgaggcaaacaaaaaagaaaaaatgaaagaagcacaacttgaagctgaagtgaaattgttgagaaaagagaatgaagcccttcgtagacatatagctgttctccaggctgaagtatatggggcgagactagctgccaagtacttggataaggaactggcaggaagggtccaacagatacaattgctaggacgagatatgaagggacctgctcatgataagctttggaaccaattagaagctgaaatacatttgcatcgtcacaaaactgtgatccgagcctgcagaggacgtaatgacttgaaacgaccaatgcaagcaccaccaggccatgatcaagattccctaaagaaaagccaaggtgttggtccaattagaaaagttctcctccttaaggaagatcatgaaggccttggcatttcaattacaggtgggaaagaacatggtgttccaatcctcatctctgagatccatccggggcaacctgctgatagatgcggagggctgcacgttggggatgctattttggcagtcaacggagttaacctaagggacacaaagcataaagaagctgtaactattctttctcagcagagaggagagattgaatttgaagtagtttatgtggctcctgaagtggattctgatgatgaaaacgtagagtatgaagatgagagtggacatcgttaccgtttgtaccttgatgagttagaaggaggtggtaaccctggtgctagttgcaaagacacaagtggggaaatcaaagtattacaaggatttaataagaaggcagtaactgacacacatgaaaatggagacctgggcactgcaagtgaaactccgctagatgacggtgcttcaaaattagatgatctgcacactctgtatcataaaaaatcttattaaattgaccatatctccagacaagattgttaatcagactattctgaatttggggcactggggaagatggtgacaaagactacaaaatcaggggaggctgtttgttgcctaaatgaaaggcgggtacctcagggcttcatgtgaacaattctcaatgcataaaacaccctgttttctgtggtagaccataattagctattgcatgtaaagcaattttgattttcttgaacttgtaagcaccaaagcatgtgtttcccaaaggggtattactgggctcttaagtaccaaatgaaaccctactgttttacttggttccttttccctttagtaggaggacagtgctaactggaattttataaggagtaccctttaaaatacagagagtaagtgaattcatattttatattctagaatgttaactgtggtatttcagaagacagagcttgactcaatgaattgtagaaatataggcttgacttaatttttgtaactgaaaggctttagacttaaaaaaatttattgtgcatcctaaaatctaaaccaattattaatgatcatttattgtaatgagtttgcatttcagctttattcaatgcagtacaaaatagttttctttaagcagtcttttatcaatcaatgctgcactagaaatagattctcaaaagttactaaacattttactttttttgttttttaaaagaaatgcagatgagtgtaaaacatctgttctcaattatgttgatctgtgtgcgcagtactggagcatttacccattcatgttgagcctcaaatgcttgttttctggggtccacaaaagacagttttatacattttgagttgttcataaagtttgtcttgtgatagtcctggcacttaaagacaaatttttctggtagtaaaagttcagatttattactatgtcatgaaacacagtacattcaaatcaaacggcagttttctttctaagtaaatgatttccagtcatctaaaaggtgggcaagatgagataaagacattttgatacagtaattgttttggttgggttttcatgtcagtttatgtttgactaaagctctcttcatatgcaggtttataaatttgttaggtctgttgtcccatgattaaacatggagtgcctcctctctgatttaatattctgcaggtcattgtaacctgctaggcaaagtcacaacattgcattaaagaggtgatagctttgctaatatcactgttttaaaggacgtacagttaaaggaatattaagtgggagaaagcctacaaggcttttagaatattatcagtatcttcatttctggtattcagatgttatgtgataaaacacattttttttggctttcccagatacactatatatttgttcaagggtaaatctataaaatgtatatactttattttgtggttttgctatttataaatttaatgttttaactgttgctcatttatggtttgttttgggtggtggtgttcatctgtatatcaccatgttaatttgtaatggaagtgcacttcgtagtgtatattgttactgacattaaaatactttatagcattgtctctgagcaaaagctagtatttaattgtacaaatgaataagcaagttacatgttattgtttgctcttgacagggtaggcctcttaaaagaaaaaaaacaacttgttttttctttatgaatcccctatgccaaacacataccttccatgcatgacatgagatctgcaaactggattttagccaccgtatttatttagtcaaaaaaattgtccattgtagcagacccgaaaacctttttgctgtgacatgaaaccatgttattcttatcttcttaaaacacagcctgggatggaatggccatggcatttttttcagagaacatcctttatctgctatgactgaatccttaggaaatgtaagctataaccctttgattttcaagaactaccgaataagtgtatgaagaggtggttttttaaaacttcaagttggaatttttatgaggtcactgtgtaatttgaagaattgtgtgagattgtcatgatataaattccttttaaggactgataaatagaatgaaaagtttccaggtagtttaaaactccacaggtcagtttccttttcattcctgcttcactgtggtttataagcctacgggagagcaccgttgctcagatgctactgtgagcttcctgtccggtgttagaaagtaactagttaaaagttcattttagaatgtatggtttttggggatgaactaagaattagttattagttccaaaggactgagaaccaattttaatattttcacatttataggaaagaaattcatatgtccctgaaacttctaggacaaaaccaaacaagtaaggagggaactgttgcaaagccatttcatcgagaaggggacagaaggagaaatacacacatgtatacacaaacagaatggttgagaaaacgttttaataaaatgtgagggttgtatgtgtgcgtgtatatatttacacttaacctctaaaattctcttctacagtatctctgttatgaatatgatggaaaagcaacattttggtggtgagactattgttaaaataaatttgagaaagacgaaaattttgtgagtcttgataattacaagtcaacagctatcgaaagttagcacagcttgtctgtggtgctgtttttttccccactgcagtggacttatgctgttttcatgtttagaaacaaaaaggtttcatgtgattcatgtgtaagatgcacagtatttgacatcctgattatgtaatccctattccatctatccagtcttacacttatggttggcctcaaatctattgcatttatgataatgtattatatctagttgagtttaatatttttttattagcctgtaaataaagatggcatcttctacatta

SEQ ID NO: 354143 - DNA, 4840 bp, Homo sapiens
cgaatcctttaaaaccagtatctagaaattacgttctaatcttttttttcccagaaattgagtctgctaatctttcatctgtttgtcatatatataacaaatatttttaatcaaagaagtgataaatatatctagcatttagtagttgtcattaattttagcttgtatgtgtgtgtgtatatgtaaatatattttttttaggattatcgtatttattgactagtattcaaatatatctattttgatgttgttcaaaacagtagaccaaaggaggcacattaaattagtaccaaaatatattccatgaattgctgaaaatttgcttaaatttgtttcttagcttctcaatatccagaataaaaagggaaataattatgtaaaataatcagtgcccatacaatagaaacaatactattcatcatttcctcaagagaaacaatttctctggtgctaaggtaggtttttatttacgtcctcacaaaagggacaaagggggtatagggaataatgtcttccacatattgtgaacaaatgtaaccatgttttcataggatttgtggattctgtaaaagcagttctgctcaggataaatgcaagttttcagtgtttacgtggtttttttgatctataaataacagttaaaatgtctattggggtccttatttaactctcaaaagggttttagaagtaaatagcagattcaactatccattgaagccacttttactaatatgtgataacatgagcttagagtagactacttttcttactatactccatatcagggtaacccatggcgtgcaattattttatctagaagtagttccaagatgttatggtactagttcaaaagaactacatccagatctttgtgttccattttatagagatgatacattgttgaactgtaggcttttgtgcattttcaggaacatggtctagtgctaaagagtttttattttcattaaattatatgcttttaaaaattacataggaaagagagcttgaggcaaacaaaaaagaaaaaatgaaagaagcacaacttgaagctgaagtgaaattgttgagaaaagagaatgaagcccttcgtagacatatagctgttctccaggctgaagtatatggggcgagactagctgccaagtacttggataaggaactggcaggaagggtccaacagatacaattgctaggacgagatatgaagggacctgctcatgataagctttggaaccaattagaagctgaaatacatttgcatcgtcacaaaactgtgatccgagcctgcagaggacgtaatgacttgaaacgaccaatgcaagcaccaccaggccatgatcaagattccctaaagaaaagccaaggtgttggtccaattagaaaagttctcctccttaaggaagatcatgaaggccttggcatttcaattacaggtgggaaagaacatggtgttccaatcctcatctctgagatccatccggggcaacctgctgatagatgcggagggctgcacgttggggatgctattttggcagtcaacggagttaacctaagggacacaaagcataaagaagctgtaactattctttctcagcagagaggagagattgaatttgaagtagtttatgtggctcctgaagtggattctgatgatgaaaacgtagagtatgaagatgagagtggacatcgttaccgtttgtaccttgatgagttagaaggaggtggtaaccctggtgctagttgcaaagacacaagtggggaaatcaaagtattacaaggatttaataagaaggcagtaactgacacacatgaaaatggagacctgggcactgcaagtgaaactccgctagatgacggtgcttcaaaattagatgatctgcacactctgtatcataaaaaatcttattaaattgaccatatctccagacaagattgttaatcagactattctgaatttggggcactggggaagatggtgacaaagactacaaaatcaggggaggctgtttgttgcctaaatgaaaggcgggtacctcagggcttcatgtgaacaattctcaatgcataaaacaccctgttttctgtggtagaccataattagctattgcatgtaaagcaattttgattttcttgaacttgtaagcaccaaagcatgtgtttcccaaaggggtattactgggctcttaagtaccaaatgaaaccctactgttttacttggttccttttccctttagtaggaggacagtgctaactggaattttataaggagtaccctttaaaatacagagagtaagtgaattcatattttatattctagaatgttaactgtggtatttcagaagacagagcttgactcaatgaattgtagaaatataggcttgacttaatttttgtaactgaaaggctttagacttaaaaaaatttattgtgcatcctaaaatctaaaccaattattaatgatcatttattgtaatgagtttgcatttcagctttattcaatgcagtacaaaatagttttctttaagcagtcttttatcaatcaatgctgcactagaaatagattctcaaaagttactaaacattttactttttttgttttttaaaagaaatgcagatgagtgtaaaacatctgttctcaattatgttgatctgtgtgcgcagtactggagcatttacccattcatgttgagcctcaaatgcttgttttctggggtccacaaaagacagttttatacattttgagttgttcataaagtttgtcttgtgatagtcctggcacttaaagacaaatttttctggtagtaaaagttcagatttattactatgtcatgaaacacagtacattcaaatcaaacggcagttttctttctaagtaaatgatttccagtcatctaaaaggtgggcaagatgagataaagacattttgatacagtaattgttttggttgggttttcatgtcagtttatgtttgactaaagctctcttcatatgcaggtttataaatttgttaggtctgttgtcccatgattaaacatggagtgcctcctctctgatttaatattctgcaggtcattgtaacctgctaggcaaagtcacaacattgcattaaagaggtgatagctttgctaatatcactgttttaaaggacgtacagttaaaggaatattaagtgggagaaagcctacaaggcttttagaatattatcagtatcttcatttctggtattcagatgttatgtgataaaacacattttttttggctttcccagatacactatatatttgttcaagggtaaatctataaaatgtatatactttattttgtggttttgctatttataaatttaatgttttaactgttgctcatttatggtttgttttgggtggtggtgttcatctgtatatcaccatgttaatttgtaatggaagtgcacttcgtagtgtatattgttactgacattaaaatactttatagcattgtctctgagcaaaagctagtatttaattgtacaaatgaataagcaagttacatgttattgtttgctcttgacagggtaggcctcttaaaagaaaaaaaacaacttgttttttctttatgaatcccctatgccaaacacataccttccatgcatgacatgagatctgcaaactggattttagccaccgtatttatttagtcaaaaaaattgtccattgtagcagacccgaaaacctttttgctgtgacatgaaaccatgttattcttatcttcttaaaacacagcctgggatggaatggccatggcatttttttcagagaacatcctttatctgctatgactgaatccttaggaaatgtaagctataaccctttgattttcaagaactaccgaataagtgtatgaagaggtggttttttaaaacttcaagttggaatttttatgaggtcactgtgtaatttgaagaattgtgtgagattgtcatgatataaattccttttaaggactgataaatagaatgaaaagtttccaggtagtttaaaactccacaggtcagtttccttttcattcctgcttcactgtggtttataagcctacgggagagcaccgttgctcagatgctactgtgagcttcctgtccggtgttagaaagtaactagttaaaagttcattttagaatgtatggtttttggggatgaactaagaattagttattagttccaaaggactgagaaccaattttaatattttcacatttataggaaagaaattcatatgtccctgaaacttctaggacaaaaccaaacaagtaaggagggaactgttgcaaagccatttcatcgagaaggggacagaaggagaaatacacacatgtatacacaaacagaatggttgagaaaacgttttaataaaatgtgagggttgtatgtgtgcgtgtatatatttacacttaacctctaaaattctcttctacagtatctctgttatgaatatgatggaaaagcaacattttggtggtgagactattgttaaaataaatttgagaaagacgaaaattttgtgagtcttgataattacaagtcaacagctatcgaaagttagcacagcttgtctgtggtgctgtttttttccccactgcagtggacttatgctgttttcatgtttagaaacaaaaaggtttcatgtgattcatgtgtaagatgcacagtatttgacatcctgattatgtaatccctattccatctatccagtcttacacttatggttggcctcaaatctattgcatttatgataatgtattatatctagttgagtttaatatttttttattagcctgtaaataaagatggcatcttctacatta

SEQ ID NO: 354144 - DNA, 4236 bp, Homo sapiens
aggctgggaggtgggactgactgagtcttccgtgtgtcgccgccgttgccgcctcagcttcagcctcgttactcctgcggttctgtggctgtgctgctggcgttaacggcgcgaggtgaagggaggtgacggagtgtgcccgcgcgcgcgggggtcccctcagtcccagcagttcccttcgtgcgcggggggcggcgagggtcttcagcagtcgggagaggcccttgacggcgccatgtcggcgggcggtccatgcccagcagcagccggagggggcccagggggcgcctcctgctccgtgggggcccctggcggggtatccatgttccggtggctggaggtgctggagaaggagttcgacaaagcttttgtggatgtggatctgctcctgggagagatcgatccagaccaagcggacatcacttatgaggggcgacagaagatgaccagcctgagctcctgctttgcacagctttgccacaaagcccagtctgtgtctcaaatcaaccacaagctggaggcacagttggtggatctgaaatctgaactgacagaaacccaagcagagaaagttgttttggagaaagaagtacatgatcagcttttacagctgcactctattcagctgcagcttcatgctaaaactggtcaaagtgctgactctggtaccattaaggcaaaattggaaagagagcttgaggcaaacaaaaaagaaaaaatgaaagaagcacaacttgaagctgaagtgaaattgttgagaaaagagaatgaagcccttcgtagacatatagctgttctccaggctgaagtatatggggcgagactagctgccaagtacttggataaggaactggcaggaagggtccaacagatacaattgctaggacgagatatgaagggacctgctcatgataagctttggaaccaattagaagctgaaatacatttgcatcgtcacaaaactgtgatccgagcctgcagaggacgtaatgacttgaaacgaccaatgcaagcaccaccaggccatcatgcccggcgaatttttgtatttttaatagagacggggtttcaccacattgtccaggctggtctcgaacccctaacctcaggttatccacccaccttggcctctcaaagtgctgggattacaggtatgagccactgcacctgaccaaaaccaactttttaaaccagaaagtgtctgctttttttttctcctttctttcaggatttaataagaaggcagtaactgacacacatgaaaatggagacctgggcactgcaagtgaaactccgctagatgacggtgcttcaaaattagatgatctgcacactctgtatcataaaaaatcttattaaattgaccatatctccagacaagattgttaatcagactattctgaatttggggcactggggaagatggtgacaaagactaccatgtgaacaattctcaatgcataaaacaccctgttttctgtggtagaccataattagctattgcatgtaaagcaattttgattttcttgaacttgtaagcaccaaagcatgtgtttcccaaaggggtattactgggctcttaagtaccaaatgaaaccctactgttttacttggttccttttccctttagtaggaggacagtgctaactggaattttataaggagtaccctttaaaatacagagagtaagtgaattcatattttatattctagaatgttaactgtggtatttcagaagacagagcttgactcaatgaattgtagaaatataggcttgacttaatttttgtaactgaaaggctttagacttaaaaaaatttattgtgcatcctaaaatctaaaccaattattaatgatcatttattgtaatgagtttgcatttcagctttattcaatgcagtacaaaatagttttctttaagcagtcttttatcaatcaatgctgcactagaaatagattctcaaaagttactaaacattttactttttttgttttttaaaagaaatgcagatgagtgtaaaacatctgttctcaattatgttgatctgtgtgcgcagtactggagcatttacccattcatgttgagcctcaaatgcttgttttctggggtccacaaaagacagttttatacattttgagttgttcataaagtttgtcttgtgatagtcctggcacttaaagacaaatttttctggtagtaaaagttcagatttattactatgtcatgaaacacagtacattcaaatcaaacggcagttttctttctaagtaaatgatttccagtcatctaaaaggtgggcaagatgagataaagacattttgatacagtaattgttttggttgggttttcatgtcagtttatgtttgactaaagctctcttcatatgcaggtttataaatttgttaggtctgttgtcccatgattaaacatggagtgcctcctctctgatttaatattctgcaggtcattgtaacctgctaggcaaagtcacaacattgcattaaagaggtgatagctttgctaatatcactgttttaaaggacgtacagttaaaggaatattaagtgggagaaagcctacaaggcttttagaatattatcagtatcttcatttctggtattcagatgttatgtgataaaacacattttttttggctttcccagatacactatatatttgttcaagggtaaatctataaaatgtatatactttattttgtggttttgctatttataaatttaatgttttaactgttgctcatttatggtttgttttgggtggtggtgttcatctgtatatcaccatgttaatttgtaatggaagtgcacttcgtagtgtatattgttactgacattaaaatactttatagcattgtctctgagcaaaagctagtatttaattgtacaaatgaataagcaagttacatgttattgtttgctcttgacagggtaggcctcttaaaagaaaaaaaacaacttgttttttctttatgaatcccctatgccaaacacataccttccatgcatgacatgagatctgcaaactggattttagccaccgtatttatttagtcaaaaaaattgtccattgtagcagacccgaaaacctttttgctgtgacatgaaaccatgttattcttatcttcttaaaacacagcctgggatggaatggccatggcatttttttcagagaacatcctttatctgctatgactgaatccttaggaaatgtaagctataaccctttgattttcaagaactaccgaataagtgtatgaagaggtggttttttaaaacttcaagttggaatttttatgaggtcactgtgtaatttgaagaattgtgtgagattgtcatgatataaattccttttaaggactgataaatagaatgaaaagtttccaggtagtttaaaactccacaggtcagtttccttttcattcctgcttcactgtggtttataagcctacgggagagcaccgttgctcagatgctactgtgagcttcctgtccggtgttagaaagtaactagttaaaagttcattttagaatgtatggtttttggggatgaactaagaattagttattagttccaaaggactgagaaccaattttaatattttcacatttataggaaagaaattcatatgtccctgaaacttctaggacaaaaccaaacaagtaaggagggaactgttgcaaagccatttcatcgagaaggggacagaaggagaaatacacacatgtatacacaaacagaatggttgagaaaacgttttaataaaatgtgagggttgtatgtgtgcgtgtatatatttacacttaacctctaaaattctcttctacagtatctctgttatgaatatgatggaaaagcaacattttggtggtgagactattgttaaaataaatttgagaaagacgaaaattttgtgagtcttgataattacaagtcaacagctatcgaaagttagcacagcttgtctgtggtgctgtttttttccccactgcagtggacttatgctgttttcatgtttagaaacaaaaaggtttcatgtgattcatgtgtaagatgcacagtatttgacatcctgattatgtaatccctattccatctatccagtcttacacttatggttggcctcaaatctattgcatttatgataatgtattatatctagttgagtttaatatttttttattagcctgtaaataaagatggcatcttctacatta

SEQ ID NO: 354145 - DNA, 2979 bp, Homo sapiens
ttcagatctaagtatgtgtagacacgggatcctctaaagtctgaattgcatggatgatatctcgcgacaggatggtgttcacactattctgaatttggggcactggggaagatggtgacaaagactacaaaatcaggggaggctgtttgttgcctaaatgaaaggcgggtacctcagggcttcatgtgaacaattctcaatgcataaaacaccctgttttctgtggtagaccataattagctattgcatgtaaagcaattttgattttcttgaacttgtaagcaccaaagcatgtgtttcccaaaggggtattactgggctcttaagtaccaaatgaaaccctactgttttacttggttccttttccctttagtaggaggacagtgctaactggaattttataaggagtaccctttaaaatacagagagtaagtgaattcatattttatattctagaatgttaactgtggtatttcagaagacagagcttgactcaatgaattgtagaaatataggcttgacttaatttttgtaactgaaaggctttagacttaaaaaaatttattgtgcatcctaaaatctaaaccaattattaatgatcatttattgtaatgagtttgcatttcagctttattcaatgcagtacaaaatagttttctttaagcagtcttttatcaatcaatgctgcactagaaatagattctcaaaagttactaaacattttactttttttgttttttaaaagaaatgcagatgagtgtaaaacatctgttctcaattatgttgatctgtgtgcgcagtactggagcatttacccattcatgttgagcctcaaatgcttgttttctggggtccacaaaagacagttttatacattttgagttgttcataaagtttgtcttgtgatagtcctggcacttaaagacaaatttttctggtagtaaaagttcagatttattactatgtcatgaaacacagtacattcaaatcaaacggcagttttctttctaagtaaatgatttccagtcatctaaaaggtgggcaagatgagataaagacattttgatacagtaattgttttggttgggttttcatgtcagtttatgtttgactaaagctctcttcatatgcaggtttataaatttgttaggtctgttgtcccatgattaaacatggagtgcctcctctctgatttaatattctgcaggtcattgtaacctgctaggcaaagtcacaacattgcattaaagaggtgatagctttgctaatatcactgttttaaaggacgtacagttaaaggaatattaagtgggagaaagcctacaaggcttttagaatattatcagtatcttcatttctggtattcagatgttatgtgataaaacacattttttttggctttcccagatacactatatatttgttcaagggtaaatctataaaatgtatatactttattttgtggttttgctatttataaatttaatgttttaactgttgctcatttatggtttgttttgggtggtggtgttcatctgtatatcaccatgttaatttgtaatggaagtgcacttcgtagtgtatattgttactgacattaaaatactttatagcattgtctctgagcaaaagctagtatttaattgtacaaatgaataagcaagttacatgttattgtttgctcttgacagggtaggcctcttaaaagaaaaaaaacaacttgttttttctttatgaatcccctatgccaaacacataccttccatgcatgacatgagatctgcaaactggattttagccaccgtatttatttagtcaaaaaaattgtccattgtagcagacccgaaaacctttttgctgtgacatgaaaccatgttattcttatcttcttaaaacacagcctgggatggaatggccatggcatttttttcagagaacatcctttatctgctatgactgaatccttaggaaatgtaagctataaccctttgattttcaagaactaccgaataagtgtatgaagaggtggttttttaaaacttcaagttggaatttttatgaggtcactgtgtaatttgaagaattgtgtgagattgtcatgatataaattccttttaaggactgataaatagaatgaaaagtttccaggtagtttaaaactccacaggtcagtttccttttcattcctgcttcactgtggtttataagcctacgggagagcaccgttgctcagatgctactgtgagcttcctgtccggtgttagaaagtaactagttaaaagttcattttagaatgtatggtttttggggatgaactaagaattagttattagttccaaaggactgagaaccaattttaatattttcacatttataggaaagaaattcatatgtccctgaaacttctaggacaaaaccaaacaagtaaggagggaactgttgcaaagccatttcatcgagaaggggacagaaggagaaatacacacatgtatacacaaacagaatggttgagaaaacgttttaataaaatgtgagggttgtatgtgtgcgtgtatatatttacacttaacctctaaaattctcttctacagtatctctgttatgaatatgatggaaaagcaacattttggtggtgagactattgttaaaataaatttgagaaagacgaaaattttgtgagtcttgataattacaagtcaacagctatcgaaagttagcacagcttgtctgtggtgctgtttttttccccactgcagtggacttatgctgttttcatgtttagaaacaaaaaggtttcatgtgattcatgtgtaagatgcacagtatttgacatcctgattatgtaatccctattccatctatccagtcttacacttatggttggcctcaaatctattgcatttatgataatgtattatatctagttgagtttaatatttttttattagcctgtaaataaagatggcatcttctacatta

SEQ ID NO: 354146 - DNA, 2539 bp, Homo sapiens
agctgcccccgttatgtagatactgtggagatctagaatatatgagaatggaatagcagaactggcttctgggtgtcactactggaggagcttgaccttggctggtgcccaactttgcatttcagctttattcaatgcagtacaaaatagttttctttaagcagtcttttatcaatcaatgctgcactagaaatagattctcaaaagttactaaacattttactttttttgttttttaaaagaaatgcagatgagtgtaaaacatctgttctcaattatgttgatctgtgtgcgcagtactggagcatttacccattcatgttgagcctcaaatgcttgttttctggggtccacaaaagacagttttatacattttgagttgttcataaagtttgtcttgtgatagtcctggcacttaaagacaaatttttctggtagtaaaagttcagatttattactatgtcatgaaacacagtacattcaaatcaaacggcagttttctttctaagtaaatgatttccagtcatctaaaaggtgggcaagatgagataaagacattttgatacagtaattgttttggttgggttttcatgtcagtttatgtttgactaaagctctcttcatatgcaggtttataaatttgttaggtctgttgtcccatgattaaacatggagtgcctcctctctgatttaatattctgcaggtcattgtaacctgctaggcaaagtcacaacattgcattaaagaggtgatagctttgctaatatcactgttttaaaggacgtacagttaaaggaatattaagtgggagaaagcctacaaggcttttagaatattatcagtatcttcatttctggtattcagatgttatgtgataaaacacattttttttggctttcccagatacactatatatttgttcaagggtaaatctataaaatgtatatactttattttgtggttttgctatttataaatttaatgttttaactgttgctcatttatggtttgttttgggtggtggtgttcatctgtatatcaccatgttaatttgtaatggaagtgcacttcgtagtgtatattgttactgacattaaaatactttatagcattgtctctgagcaaaagctagtatttaattgtacaaatgaataagcaagttacatgttattgtttgctcttgacagggtaggcctcttaaaagaaaaaaaacaacttgttttttctttatgaatcccctatgccaaacacataccttccatgcatgacatgagatctgcaaactggattttagccaccgtatttatttagtcaaaaaaattgtccattgtagcagacccgaaaacctttttgctgtgacatgaaaccatgttattcttatcttcttaaaacacagcctgggatggaatggccatggcatttttttcagagaacatcctttatctgctatgactgaatccttaggaaatgtaagctataaccctttgattttcaagaactaccgaataagtgtatgaagaggtggttttttaaaacttcaagttggaatttttatgaggtcactgtgtaatttgaagaattgtgtgagattgtcatgatataaattccttttaaggactgataaatagaatgaaaagtttccaggtagtttaaaactccacaggtcagtttccttttcattcctgcttcactgtggtttataagcctacgggagagcaccgttgctcagatgctactgtgagcttcctgtccggtgttagaaagtaactagttaaaagttcattttagaatgtatggtttttggggatgaactaagaattagttattagttccaaaggactgagaaccaattttaatattttcacatttataggaaagaaattcatatgtccctgaaacttctaggacaaaaccaaacaagtaaggagggaactgttgcaaagccatttcatcgagaaggggacagaaggagaaatacacacatgtatacacaaacagaatggttgagaaaacgttttaataaaatgtgagggttgtatgtgtgcgtgtatatatttacacttaacctctaaaattctcttctacagtatctctgttatgaatatgatggaaaagcaacattttggtggtgagactattgttaaaataaatttgagaaagacgaaaattttgtgagtcttgataattacaagtcaacagctatcgaaagttagcacagcttgtctgtggtgctgtttttttccccactgcagtggacttatgctgttttcatgtttagaaacaaaaaggtttcatgtgattcatgtgtaagatgcacagtatttgacatcctgattatgtaatccctattccatctatccagtcttacacttatggttggcctcaaatctattgcatttatgataatgtattatatctagttgagtttaatatttttttattagcctgtaaataaagatggcatcttctacattaaaatgatattgatctcatttttttaaataaacattttgtttccttgacgttaaaaaaaaaaaa

SEQ ID NO: 354147 - DNA, 1916 bp, Homo sapiens
ttgtaacctgctaggcaaagtcacaatgacctgcagaatattaaatcagagaggaggcactccatgtttaatattctgcaggtcattgtaacctgctaggcaaagtcacaacattgcattaaagaggtgatagctttgctaatatcactgttttaaaggacgtacagttaaaggaatattaagtgggagaaagcctacaaggcttttagaatattatcagtatcttcatttctggtattcagatgttatgtgataaaacacattttttttggctttcccagatacactatatatttgttcaagggtaaatctataaaatgtatatactttattttgtggttttgctatttataaatttaatgttttaactgttgctcatttatggtttgttttgggtggtggtgttcatctgtatatcaccatgttaatttgtaatggaagtgcacttcgtagtgtatattgttactgacattaaaatactttatagcattgtctctgagcaaaagctagtatttaattgtacaaatgaataagcaagttacatgttattgtttgctcttgacagggtaggcctcttaaaagaaaaaaaacaacttgttttttctttatgaatcccctatgccaaacacataccttccatgcatgacatgagatctgcaaactggattttagccaccgtatttatttagtcaaaaaaattgtccattgtagcagacccgaaaacctttttgctgtgacatgaaaccatgttattcttatcttcttaaaacacagcctgggatggaatggccatggcatttttttcagagaacatcctttatctgctatgactgaatccttaggaaatgtaagctataaccctttgattttcaagaactaccgaataagtgtatgaagaggtggttttttaaaacttcaagttggaatttttatgaggtcactgtgtaatttgaagaattgtgtgagattgtcatgatataaattccttttaaggactgataaatagaatgaaaagtttccaggtagtttaaaactccacaggtcagtttccttttcattcctgcttcactgtggtttataagcctacgggagagcaccgttgctcagatgctactgtgagcttcctgtccggtgttagaaagtaactagttaaaagttcattttagaatgtatggtttttggggatgaactaagaattagttattagttccaaaggactgagaaccaattttaatattttcacatttataggaaagaaattcatatgtccctgaaacttctaggacaaaaccaaacaagtaaggagggaactgttgcaaagccatttcatcgagaaggggacagaaggagaaatacacacatgtatacacaaacagaatggttgagaaaacgttttaataaaatgtgagggttgtatgtgtgcgtgtatatatttacacttaacctctaaaattctcttctacagtatctctgttatgaatatgatggaaaagcaacattttggtggtgagactattgttaaaataaatttgagaaagacgaaaattttgtgagtcttgataattacaagtcaacagctatcgaaagttagcacagcttgtctgtggtgctgtttttttccccactgcagtggacttatgctgttttcatgtttagaaacaaaaaggtttcatgtgattcatgtgtaagatgcacagtatttgacatcctgattatgtaatccctattccatctatccagtcttacacttatggttggcctcaaatctattgcatttatgataatgtattatatctagttgagtttaatatttttttattagcctgtaaataaagatggcatcttctacattaaaatgatattgatctcatttttttaaataaacattttgtttccttgacgttaaaaaaaaaaaa

SEQ ID NO: 354148 - DNA, 1852 bp, Homo sapiens
aggctgggaggtgggactgactgagtcttccgtgtgtcgccgccgttgccgcctcagcttcagcctcgttactcctgcggttctgtggctgtgctgctggcgttaacggcgcgaggtgaagggaggtgacggagtgtgcccgcgcgcgcgggggtcccctcagtcccagcagttcccttcgtgcgcggggggcggcgagggtcttcagcagtcgggagaggcccttgacggcgccatgtcggcgggcggtccatgcccagcagcagccggagggggcccagggggcgcctcctgctccgtgggggcccctggcggggtatccatgttccggtggctggaggtgctggagaaggagttcgacaaagcttttgtggatgtggatctgctcctgggagagatcgatccagaccaagcggacatcacttatgaggggcgacagaagatgaccagcctgagctcctgctttgcacagctttgccacaaagcccagtctgtgtctcaaatcaaccacaagctggaggcacagttggtggatctgaaatctgaactgacagaaacccaagcagagaaagttgttttggagaaagaagtacatgatcagcttttacagctgcactctattcagctgcagcttcatgctaaaactggtcaaagtgctgactctggtaccattaaggcaaaattggaaagagagcttgaggcaaacaaaaaagaaaaaatgaaagaagcacaacttgaagctgaagtgaaattgttgagaaaagagaatgaagcccttcgtagacatatagctgttctccaggctgaagtatatggggcgagactagctgccaagtacttggataaggaactggcaggaagggtccaacagatacaattgctaggacgagatatgaagggacctgctcatgataagctttggaaccaattagaagctgaaatacatttgcatcgtcacaaaactgtgatccgagcctgcagaggacgtaatgacttgaaacgaccaatgcaagcaccaccaggccatgatcaagattccctaaagaaaagccaaggtgttggtccaattagaaaagttctcctccttaaggaagatcatgaaggccttggcatttcaattacaggtgggaaagaacatggtgttccaatcctcatctctgagatccatccggggcaacctgctgatagatgcggagggctgcacgttggggatgctattttggcagtcaacggagttaacctaagggacacaaagcataaagaagctgtaactattctttctcagcagagaggagagattgaatttgaagtagtttatgtggctcctgaagtggattctgatgatgaaaacgtagagtatgaagatgagagtggacatcgttaccgtttgtaccttgatgagttagaaggaggtggtaaccctggtgctagttgcaaagacacaagtggggaaatcaaagtattacaagtctggcatagaagattaaagaatcaaaaaagtgccaaggaaggggtgacagtgcttataaacgaagacaaagagttggctgagctgcgaggtctggcagccggagtaggcctggctaatgcctgctatgcaatacagtatgtagctttggccatcattatggagcacctaggcaaaggtactcttccaacccaagaggagattgaaaatcttcctgccttccctcgggaaaaactgactctgcgtctcttgctgggaagtggagcctttggagaagtgtatgaaggaacagcagtggacatcttaggagttggaagtggagaaatcaaagtagcagtgaagactttgaagaagggttccacagaccaggagaagattgaattc

SEQ ID NO: 354149 - DNA, 221 bp, Homo sapiens
tagatttgaggccaaccataagtgtaagactggattgatggaatagggattacataatcaggatctcaaatctattgcatttatgataatgtattatatctagttgagtttaatatttttttattagcctgtaaataaagatggcatcttctacattaaaatgatattgatctcatttttttaaataaacattttgtttccttgacgttaaaaaaaaaaaa

SEQ ID NO: 354150 - DNA, 4594 bp, Homo sapiens
aggctgggaggtgggactgactgagtcttccgtgtgtcgccgccgttgccgcctcagcttcagcctcgttactcctgcggttctgtggctgtgctgctggcgttaacggcgcgaggtgaagggaggtgacggagtgtgcccgcgcgcgcgggggtcccctcagtcccagcagttcccttcgtgcgcggggggcggcgagggtcttcagcagtcgggagaggcccttgacggcgccatgtcggcgggcggtccatgcccagcagcagccggagggggcccagggggcgcctcctgctccgtgggggcccctggcggggtatccatgttccggtggctggaggtgctggagaaggagttcgacaaagcttttgtggatgtggatctgctcctgggagagatcgatccagaccaagcggacatcacttatgaggggcgacagaagatgaccagcctgagctcctgctttgcacagctttgccacaaagcccagtctgtgtctcaaatcaaccacaagctggaggcacagttggtggatctgaaatctgaactgacagaaacccaagcagagaaagttgttttggagaaagaagtacatgatcagcttttacagctgcactctattcagctgcagcttcatgctaaaactggtcaaagtgctgactctggtaccattaaggcaaaattggaaagagagcttgaggcaaacaaaaaagaaaaaatgaaagaagcacaacttgaagctgaagtgaaattgttgagaaaagagaatgaagcccttcgtagacatatagctgttctccaggctgaagtatatggggcgagactagctgccaagtacttggataaggaactggcaggaagggtccaacagatacaattgctaggacgagatatgaagggacctgctcatgataagctttggaaccaattagaagctgaaatacatttgcatcgtcacaaaactgtgatccgagcctgcagaggacgtaatgacttgaaacgaccaatgcaagcaccaccaggccatgatcaagattccctaaagaaaagccaaggtgttggtccaattagaaaagttctcctccttaaggaagatcatgaaggccttggcatttcaattacaggtgggaaagaacatggtgttccaatcctcatctctgagatccatccggggcaacctgctgatagatgcggagggctgcacgttggggatgctattttggcagtcaacggagttaacctaagggacacaaagcataaagaagctgtaactattctttctcagcagagaggagagattgaatttgaagtagtttatgtggctcctgaagtggattctgatgatgaaaacgtagagtatgaagatgagagtggacatcgttaccgtttgtaccttgatgagttagaaggaggtggtaaccctggtgctagttgcaaagacacaagtggggaaatcaaagtattacaaggatttaataagaaggcagtaactgacacacatgaaaatggagacctgggcactgcaagtgaaactccgctagatgacggtgcttcaaaattagatgatctgcacactctgtatcataaaaaatcttattaaattgaccatatctccagacaagattgttaatcagactattctgaatttggggcactggggaagatggtgacaaagactacaaaatcaggggaggctgtttgttgcctaaatgaaaggcgggtacctcagggcttcatgtgaacaattctcaatgcataaaacaccctgttttctgtggtagaccataattagctattgcatgtaaagcaattttgattttcttgaacttgtaagcaccaaagcatgtgtttcccaaaggggtattactgggctcttaagtaccaaatgaaaccctactgttttacttggttccttttccctttagtaggaggacagtgctaactggaattttataaggagtaccctttaaaatacagagagtaagtgaattcatattttatattctagaatgttaactgtggtatttcagaagacagagcttgactcaatgaattgtagaaatataggcttgacttaatttttgtaactgaaaggctttagacttaaaaaaatttattgtgcatcctaaaatctaaaccaattattaatgatcatttattgtaatgagtttgcatttcagctttattcaatgcagtacaaaatagttttctttaagcagtcttttatcaatcaatgctgcactagaaatagattctcaaaagttactaaacattttactttttttgttttttaaaagaaatgcagatgagtgtaaaacatctgttctcaattatgttgatctgtgtgcgcagtactggagcatttacccattcatgttgagcctcaaatgcttgttttctggggtccacaaaagacagttttatacattttgagttgttcataaagtttgtcttgtgatagtcctggcacttaaagacaaatttttctggtagtaaaagttcagatttattactatgtcatgaaacacagtacattcaaatcaaacggcagttttctttctaagtaaatgatttccagtcatctaaaaggtgggcaagatgagataaagacattttgatacagtaattgttttggttgggttttcatgtcagtttatgtttgactaaagctctcttcatatgcaggtttataaatttgttaggtctgttgtcccatgattaaacatggagtgcctcctctctgatttaatattctgcaggtcattgtaacctgctaggcaaagtcacaacattgcattaaagaggtgatagctttgctaatatcactgttttaaaggacgtacagttaaaggaatattaagtgggagaaagcctacaaggcttttagaatattatcagtatcttcatttctggtattcagatgttatgtgataaaacacattttttttggctttcccagatacactatatatttgttcaagggtaaatctataaaatgtatatactttattttgtggttttgctatttataaatttaatgttttaactgttgctcatttatggtttgttttgggtggtggtgttcatctgtatatcaccatgttaatttgtaatggaagtgcacttcgtagtgtatattgttactgacattaaaatactttatagcattgtctctgagcaaaagctagtatttaattgtacaaatgaataagcaagttacatgttattgtttgctcttgacagggtaggcctcttaaaagaaaaaaaacaacttgttttttctttatgaatcccctatgccaaacacataccttccatgcatgacatgagatctgcaaactggattttagccaccgtatttatttagtcaaaaaaattgtccattgtagcagacccgaaaacctttttgctgtgacatgaaaccatgttattcttatcttcttaaaacacagcctgggatggaatggccatggcatttttttcagagaacatcctttatctgctatgactgaatccttaggaaatgtaagctataaccctttgattttcaagaactaccgaataagtgtatgaagaggtggttttttaaaacttcaagttggaatttttatgaggtcactgtgtaatttgaagaattgtgtgagattgtcatgatataaattccttttaaggactgataaatagaatgaaaagtttccaggtagtttaaaactccacaggtcagtttccttttcattcctgcttcactgtggtttataagcctacgggagagcaccgttgctcagatgctactgtgagcttcctgtccggtgttagaaagtaactagttaaaagttcattttagaatgtatggtttttggggatgaactaagaattagttattagttccaaaggactgagaaccaattttaatattttcacatttataggaaagaaattcatatgtccctgaaacttctaggacaaaaccaaacaagtaaggagggaactgttgcaaagccatttcatcgagaaggggacagaaggagaaatacacacatgtatacacaaacagaatggttgagaaaacgttttaataaaatgtgagggttgtatgtgtgcgtgtatatatttacacttaacctctaaaattctcttctacagtatctctgttatgaatatgatggaaaagcaacattttggtggtgagactattgttaaaataaatttgagaaagacgaaaattttgtgagtcttgataattacaagtcaacagctatcgaaagttagcacagcttgtctgtggtgctgtttttttccccactgcagtggacttatgctgttttcatgtttagaaacaaaaaggtttcatgtgattcatgtgtaagatgcacagtatttgacatcctgattatgtaatccctattccatctatccagtcttacacttatggttggcctcaaatctattgcatttatgataatgtattatatctagttgagtttaatatttttttattagcctgtaaataaagatggcatcttctacattaaaatgatattgatctcatttttttaaataaacattttgtttccttgacgttaaaaaaaaaaaa

SEQ ID NO: 354151 - DNA, 401 bp, Homo sapiens
tcactcccactgccccctgcctctctcctcctaacccagccagttcaggcttctaacccagttcaggctcctaacccagacagttctccggcaaggtttctgcaactaagaaaagtaaaccccagagacagaatgaaagagccgggagttggaaggaccaagagcagagacagagagcaaggaccgaaactgcttcttcatgacaccaaaatacaaagtaaaacatgcagtcagccattcacgtgatcgagagctgagtcggagatgtgcagcccaaataccacaacgactcgctgcatttttcactttccgtctaatgtttcgaaatcaaggcactgacgtgaagatcaaagacggtataagaaagaaagcaagagacagatgacagagtcctccccccc

SEQ ID NO: 354152 - DNA, 5017 bp, Homo sapiens
  misc_feature (112)..(112): n is a, c, g, or t
gattataaccagtttttttttaacctatatgaatattcagtaggacatgtgaaagctgtgtgggatcaggacagttttcttgtgtgataccatcttgcaatgtgcaagacanggagcctccttggctcctctcccccaatcatttgacaacaaaattgccccgaacatttccaaattgctccttagggagggtgccattctggttggggaaccactgtggtggtctgaatgctttacctgttccctgttccccagccttaccttgggctgttctcccctcaccaggctcaaagatgccctgggccttcccagttcttctccaagccaatctctttcctctctcaggacattctggtgctcttttctttgcctggaaaactgtccacttcatgtctggataacttttcctgaacctttggatctcagcattgccaaattcccagtctaatttaatactttgtttagtttttccacaggactctgtgcttttctgcaatggtacttatcagactgggatttctacctgttttattcttgctatgtcaagcgtgtttattacctgtctccctcaactttcagttccctgagagcagggaccatgcccatctcgtccaccgcttgtttacccagcactcacgaagatgcccggaacttagcatccttagatgaacgtacgtgcctggcaaacaacaaacatttcttaggcaactgaaaggctgatgggattccacagccaattgggagaaaagcgctctcgagggtgggggtatgctttttccagggcagatggtgttcagcccaagttacggggcagctttggtccactctggatttgcctggattcgcgtatgtgggggcgaacgcgtcttatcggggggcggccggttggggccaggcagcccggatcccagccgaggaggtgcgcggtgctgagaggccgtgggagcgaccatagagaacgcgcgggcggagcgagcggccggatgcggtcaccatagagacgggtgactgacaggcagcggaagaggaagctgcggacaggggctgtgaggtggcagcggctgcagcggcggagccggcgcctcagcgggcactggggtctgttcccccttccccgtccctgctccctgccaggcgcgtgcgggacgccgctcttggtccccacgcctccgccccgccccctcccgggacgccgggagaccccggccgtcctttatccggtgtccgccggcccccggccctgaaacccgggcctcctccccgagggccttgggcgtccctcctggtcctgcgctcgcggcctcgatgctgtctctggcgcggcctccgctcccgccgactggcctgagaacgaggtctgtgccccagtctcccagccgcgacctccgaccccgcctcgcagaacgacccgagctggtctcccgagcccccttctcagcagcccggtgacgtggccagtttatttctgttttgagacgaacggcgaagactcgcgtcgggtcttcgttctagggctagacttggtctctgatcgccgagaggtagcgcaggggctgtgggcccccggcaggggtcctgtcggaagctggccgcgcttctgtttgcgttcccaggaccctggcattgtctctagttgctgcttgtgctctctctttgcttttggtttgcttcatttggcccctggggccctggtaaaaccaggcaccgaatcgctcgcacacagagttccagtccccgcctgctgtctcctcagcagctggggttccgaggagaatgccctgcaagatggctccatcggccatggcgctcctgagaggctgtcagtgctgagtcaccgatctacctcattcgggtgggcagaacttatgtgtgccatgcgagtggctccagaccgctcctgagtgggaggaggggttcctgtagccgttgcgtcttctcaaacacggggagcagagtagaaagaggctctggccccttcccttgtgcccaccgggcctgccgcagtggctcagcagccccttcagtagcccgcctgaggaccgatgccagaggcaggcattcttccggaaaggcccactgaggcaggctccggctcctctggttggggctgttgttttgatggatcgtgtgcttttcccttacctcttatcacttgctgtcatctgttgacttaggcccagtctgcagatgtgtgtagtgttcctttttgggttagctttggcagtattgagttttacttcctcctctttttagtggaagacagaccataatcccagtgtgagtgaaattgattgtttcatttattaccgttttggctgggggttagttccgacaccttcacagttgaagagcaggcagaaggagttgtgaagacaggacaatcttcttggggatgctggtcctggaagccagcgggcctcgctctgtctttggcctcattgaccccaggttctctggttaaaactgaaagcctactactggcctggtgcccatcaatccattgatccttgaggctgtgcccctggggcacccacctggcagggcctaccaccatgcgactgagctccctgttggctctgctgcggccagcgcttcccctcatcttagggctgtctctggggtgcagcctgagcctcctgcgggtttcctggatccagggggagggagaagatccctgtgtcgaggctgtaggggagcgaggagggccacagaatccagattccagagctcggctagaccaaagtgatgaagacttcaaaccccggattgtcccctactacagggaccccaacaagccctacaagaaggtgctcaggactcggtacatccagacagagctgggctcccgtgagcggttgctggtggctgtcctgacctcccgagctacactgtccactttggccgtggctgtgaaccgtacggtggcccatcacttccctcggttactctacttcactgggcagcggggggcccgggctccagcagggatgcaggtggtgtctcatggggatgagcggcccgcctggctcatgtcagagaccctgcgccaccttcacacacactttggggccgactacgactggttcttcatcatgcaggatgacacatatgtgcaggccccccgcctggcagcccttgctggccacctcagcatcaaccaagacctgtacttaggccgggcagaggagttcattggcgcaggcgagcaggcccggtactgtcatgggggctttggctacctgttgtcacggagtctcctgcttcgtctgcggccacatctggatggctgccgaggagacattctcagtgcccgtcctgacgagtggcttggacgctgcctcattgactctctgggcgtcggctgtgtctcacagcaccaggggcagcagtatcgctcatttgaactggccaaaaatagggaccctgagaaggaagggagctcggctttcctgagtgccttcgccgtgcaccctgtctccgaaggtaccctcatgtaccggctccacaaacgcttcagcgctctggagttggagcgggcttacagtgaaatagaacaactgcaggctcagatccggaacctgaccgtgctgacccccgaaggggaggcagggctgagctggcccgttgggctccctgctcctttcacaccacactctcgctttgaggtgctgggctgggactacttcacagagcagcacaccttctcctgtgcagatggggctcccaagtgcccactacagggggctagcagggcggacgtgggtgatgcgttggagactgccctggagcagctcaatcggcgctatcagccccgcctgcgcttccagaagcagcgactgctcaacggctatcggcgcttcgacccagcacggggcatggagtacaccctggacctgctgttggaatgtgtgacacagcgtgggcaccggcgggccctggctcgcagggtcagcctgctgcggccactgagccgggtggaaatcctacctatgccctatgtcactgaggccacccgagtgcagctggtgctgccactcctggtggctgaagctgctgcagccccggctttcctcgaggcctttgcagccaatgtcctggagccacgagaacatgcattgctcaccctgttgctggtctacgggccacgagaaggtggccgtggagctccagacccatttcttggggtgaaggctgcagcagcggagttagagcgacggtaccctgggacgaggctggcctggctcgctgtgcgagcagaggccccttcccaggtgcgactcatggacgtggtctcgaagaagcaccctgtggacactctcttcttccttaccaccgtgtggacaaggcctgggcccgaagtcctcaaccgctgtcgcatgaatgccatctctggctggcaggccttctttccagtccatttccaggagttcaatcctgccctgtcaccacagagatcacccccagggcccccgggggctggccctgaccccccctcccctcctggtgctgacccctcccggggggctcctataggggggagatttgaccggcaggcttctgcggagggctgcttctacaacgctgactacctggcggcccgagcccggctggcaggtgaactggcaggccaggaagaggaggaagccctggaggggctggaggtgatggatgttttcctccggttctcagggctccacctctttcgggccgtagagccagggctggtgcagaagttctccctgcgagactgcagcccacggctcagtgaagaactctaccaccgctgccgcctcagcaacctggaggggctagggggccgtgcccagctggctatggctctctttgagcaggagcaggccaatagcacttagcccgcctgggggccctaacctcattacctttcctttgtctgcctcagccccaggaagggcaaggcaagatggtggacagatagagaattgttgctgtattttttaaatatgaaaatgttattaaacatgtcttctgccaaactgtt

SEQ ID NO: 354153 - DNA, 3081 bp, Homo sapiens
  misc_feature (112)..(112): n is a, c, g, or t
gattataaccagtttttttttaacctatatgaatattcagtaggacatgtgaaagctgtgtgggatcaggacagttttcttgtgtgataccatcttgcaatgtgcaagacanggagcctccttggctcctctcccccaatcatttgacaacaaaattgccccgaacatttccaaattgctccttagggagggtgccattctggttggggaaccactgtggtggtctgaatgctttacctgttccctgttccccagccttaccttgggctgttctcccctcaccaggctcaaagatgccctgggccttcccagttcttctccaagccaatctctttcctctctcaggacattctggtgctcttttctttgcctggaaaactgtccacttcatgtctggataacttttcctgaacctttggatctcagcattgccaaattcccagtctaatttaatactttgtttagtttttccacaggactctgtgcttttctgcaatggtacttatcagactgggatttctacctgttttattcttgctatgtcaagcgtgtttattacctgtctccctcaactttcagttccctgagagcagggaccatgcccatctcgtccaccgcttgtttacccagcactcacgaagatgcccggaacttagcatccttagatgaacgtacgtgcctggcaaacaacaaacatttcttaggcaactgaaaggctgatgggattccacagccaattgggagaaaagcgctctcgagggtgggggtatgctttttccagggcagatggtgttcagcccaagttacggggcagctttggtccactctggatttgcctggattcgcgtatgtgggggcgaacgcgtcttatcggggggcggccggttggggccaggcagcccggatcccagccgaggaggtgcgcggtgctgagaggccgtgggagcgaccatagagaacgcgcgggcggagcgagcggccggatgcggtcaccatagagacgggtgactgacaggcagcggaagaggaagctgcggacaggggctgtgaggtggcagcggctgcagcggcggagccggcgcctcagcgggcactggggtctgttcccccttccccgtccctgctccctgccaggcgcgtgcgggacgccgctcttggtccccacgcctccgccccgccccctcccgggacgccgggagaccccggccgtcctttatccggtgtccgccggcccccggccctgaaacccgggcctcctccccgagggccttgggcgtccctcctggtcctgcgctcgcggcctcgatgctgtctctggcgcggcctccgctcccgccgactggcctgagaacgaggtctgtgccccagtctcccagccgcgacctccgaccccgcctcgcagaacgacccgagctggtctcccgagcccccttctcagcagcccggtgacgtggccagtttatttctgttttgagacgaacggcgaagactcgcgtcgggtcttcgttctagggctagacttggtctctgatcgccgagaggtagcgcaggggctgtgggcccccggcaggggtcctgtcggaagctggccgcgcttctgtttgcgttcccaggaccctggcattgtctctagttgctgcttgtgctctctctttgcttttggtttgcttcatttggcccctggggccctggtaaaaccaggcaccgaatcgctcgcacacagagttccagtccccgcctgctgtctcctcagcagctggggttccgaggagaatgccctgcaagatggctccatcggccatggcgctcctgagaggctgtcagtgctgagtcaccgatctacctcattcgggtgggcagaacttatgtgtgccatgcgagtggctccagaccgctcctgagtgggaggaggggttcctgtagccgttgcgtcttctcaaacacggggagcagagtagaaagaggctctggccccttcccttgtgcccaccgggcctgccgcagtggctcagcagccccttcagtagcccgcctgaggaccgatgccagaggcaggcattcttccggaaaggcccactgaggcaggctccggctcctctggttggggctgttgttttgatggatcgtgtgcttttcccttacctcttatcacttgctgtcatctgttgacttaggcccagtctgcagatgtgtgtagtgttcctttttgggttagctttggcagtattgagttttacttcctcctctttttagtggaagacagaccataatcccagtgtgagtgaaattgattgtttcatttattaccgttttggctgggggttagttccgacaccttcacagttgaagagcaggcagaaggagttgtgaagacaggacaatcttcttggggatgctggtcctggaagccagcgggcctcgctctgtctttggcctcattgaccccaggttctctggttaaaactgaaagcctactactggcctggtgcccatcaatccattgatccttgaggctgtgcccctggggcacccacctggcagggcctaccaccatgcgactgagctccctgttggctctgctgcggccagcgcttcccctcatcttagggctgtctctggggtgcagcctgagcctcctgcgggtttcctggatccagggggagggagaagatccctgtgtcgaggctgtaggggagcgaggagggccacagaatccagattccagagctcggctagaccaaagtgatgaagacttcaaaccccggattgtcccctactacagggaccccaacaagccctacaagaaggtgctcaggactcggtacatccagacagagctgggctcccgtgagcggttgctggtggctgtcctgacctcccgagctacactgtccatatggctctctttgagcaggagcaggccaatagcacttagcccgcctgggggccctaacctcattacctttcctttgtctgcctcagccccaggaagggcaaggcaagatggtggacagatagagaattgttgctgtattttttaaatatgaaaatgttattaaacatgtcttctgccaaactgtt

SEQ ID NO: 354154 - DNA, 182 bp, Homo sapiens
  misc_feature (3)..(3): n is a, c, g, or t
  misc_feature (15)..(15): n is a, c, g, or t
  misc_feature (29)..(29): n is a, c, g, or t
ggntcccccgggctncaggattcggcacnaggagaattgttgctgtccaccatcttgccttgcccttcctggggctgaggcagacaaaggaagggcaaggcaagatggtggacagatagagaattgttgctgtattttttaaatatgaaaatgttattaaacatgtcttctgccaaactgtt

SEQ ID NO: 354155 - DNA, 5435 bp, Homo sapiens
  misc_feature (112)..(112): n is a, c, g, or t
gattataaccagtttttttttaacctatatgaatattcagtaggacatgtgaaagctgtgtgggatcaggacagttttcttgtgtgataccatcttgcaatgtgcaagacanggagcctccttggctcctctcccccaatcatttgacaacaaaattgccccgaacatttccaaattgctccttagggagggtgccattctggttggggaaccactgtggtggtctgaatgctttacctgttccctgttccccagccttaccttgggctgttctcccctcaccaggctcaaagatgccctgggccttcccagttcttctccaagccaatctctttcctctctcaggacattctggtgctcttttctttgcctggaaaactgtccacttcatgtctggataacttttcctgaacctttggatctcagcattgccaaattcccagtctaatttaatactttgtttagtttttccacaggactctgtgcttttctgcaatggtacttatcagactgggatttctacctgttttattcttgctatgtcaagcgtgtttattacctgtctccctcaactttcagttccctgagagcagggaccatgcccatctcgtccaccgcttgtttacccagcactcacgaagatgcccggaacttagcatccttagatgaacgtacgtgcctggcaaacaacaaacatttcttaggcaactgaaaggctgatgggattccacagccaattgggagaaaagcgctctcgagggtgggggtatgctttttccagggcagatggtgttcagcccaagttacggggcagctttggtccactctggatttgcctggattcgcgtatgtgggggcgaacgcgtcttatcggggggcggccggttggggccaggcagcccggatcccagccgaggaggtgcgcggtgctgagaggccgtgggagcgaccatagagaacgcgcgggcggagcgagcggccggatgcggtcaccatagagacgggtgactgacaggcagcggaagaggaagctgcggacaggggctgtgaggtggcagcggctgcagcggcggagccggcgcctcagcgggcactggggtctgttcccccttccccgtccctgctccctgccaggcgcgtgcgggacgccgctcttggtccccacgcctccgccccgccccctcccgggacgccgggagaccccggccgtcctttatccggtgtccgccggcccccggccctgaaacccgggcctcctccccgagggccttgggcgtccctcctggtcctgcgctcgcggcctcgatgctgtctctggcgcggcctccgctcccgccgactggcctgagaacgaggtctgtgccccagtctcccagccgcgacctccgaccccgcctcgcagaacgacccgagctggtctcccgagcccccttctcagcagcccggtgacgtggccagtttatttctgttttgagacgaacggcgaagactcgcgtcgggtcttcgttctagggctagacttggtctctgatcgccgagaggtagcgcaggggctgtgggcccccggcaggggtcctgtcggaagctggccgcgcttctgtttgcgttcccaggaccctggcattgtctctagttgctgcttgtgctctctctttgcttttggtttgcttcatttggcccctggggccctggtaaaaccaggcaccgaatcgctcgcacacagagttccagtccccgcctgctgtctcctcagcagctggggttccgaggagaatgccctgcaagatggctccatcggccatggcgctcctgagaggctgtcagtgctgagtcaccgatctacctcattcgggtgggcagaacttatgtgtgccatgcgagtggctccagaccgctcctgagtgggaggaggggttcctgtagccgttgcgtcttctcaaacacggggagcagagtagaaagaggctctggccccttcccttgtgcccaccgggcctgccgcagtggctcagcagccccttcagtagcccgcctgaggaccgatgccagaggcaggcattcttccggaaaggcccactgaggcaggctccggctcctctggttggggctgttgttttgatggatcgtgtgcttttcccttacctcttatcacttgctgtcatctgttgacttaggcccagtctgcagatgtgtgtagtgttcctttttgggttagctttggcagtattgagttttacttcctcctctttttagtggaagacagaccataatcccagtgtgagtgaaattgattgtttcatttattaccgttttggctgggggttagttccgacaccttcacagttgaagagcaggcagaaggagttgtgaagacaggacaatcttcttggggatgctggtcctggaagccagcgggcctcgctctgtctttggcctcattgaccccaggttctctggttaaaactgaaagcctactactggcctggtgcccatcaatccattgatccttgaggctgtgcccctggggcacccacctggcagggcctaccaccatgcgactgagctccctgttggctctgctgcggccagcgcttcccctcatcttagggctgtctctggggtgcagcctgagcctcctgcgggtttcctggatccagggggagggagaagatccctgtgtcgaggctgtaggggagcgaggagggccacagaatccagattccagagctcggctagaccaaagtgatgaagacttcaaaccccggattgtcccctactacagggaccccaacaagccctacaagaaggtgctcaggactcggtacatccagacagagctgggctcccgtgagcggttgctggtggctgtcctgacctcccgagctacactgtccactttggccgtggctgtgaaccgtacggtggcccatcacttccctcggttactctacttcactgggcagcggggggcccgggctccagcagggatgcaggtggtgtctcatggggatgagcggcccgcctggctcatgtcagagaccctgcgccaccttcacacacactttggggccgactacgactggttcttcatcatgcaggatgacacatatgtgcaggccccccgcctggcagcccttgctggccacctcagcatcaaccaagacctgtacttaggccgggcagaggagttcattggcgcaggcgagcaggcccggtactgtcatgggggctttggctacctgttgtcacggagtctcctgcttcgtctgcggccacatctggatggctgccgaggagacattctcagtgcccgtcctgacgagtggcttggacgctgcctcattgactctctgggcgtcggctgtgtctcacagcaccaggggcagcagtatcgctcatttgaactggccaaaaatagggaccctgagaaggaagggagctcggctttcctgagtgccttcgccgtgcaccctgtctccgaaggtaccctcatgtaccggctccacaaacgcttcagcgctctggagttggagcgggcttacagtgaaatagaacaactgcagaactgtcccaagaaagcccaagggtagaagggagaattctcaagttgaacgtcaggcttggcagaggtggagtgtagatgaaaacaaaggtgtgattatgaagaggatgtgagtcctttgggtgtaggagagaaaggctgttgagcttctatttcaagatacttttacctgtgcaaaaagcacattttccacctccttctcatggcatttgtgtaaggtgagtatgattcctattccatctgcattttagaggtgaagaataacgtacaagggattcagtgattagcaagggacccctcactaagtgttgatggagttaggacagagctcagctgtttgaatctcagagcccaggcagctggagctgggtaggatcctggagctggcactaatgtgaggtgcattccctccaacccaggctcagatccggaacctgaccgtgctgacccccgaaggggaggcagggctgagctggcccgttgggctccctgctcctttcacaccacactctcgctttgaggtgctgggctgggactacttcacagagcagcacaccttctcctgtgcagatggggctcccaagtgcccactacagggggctagcagggcggacgtgggtgatgcgttggagactgccctggagcagctcaatcggcgctatcagccccgcctgcgcttccagaagcagcgactgctcaacggctatcggcgcttcgacccagcacggggcatggagtacaccctggacctgctgttggaatgtgtgacacagcgtgggcaccggcgggccctggctcgcagggtcagcctgctgcggccactgagccgggtggaaatcctacctatgccctatgtcactgaggccacccgagtgcagctggtgctgccactcctggtggctgaagctgctgcagccccggctttcctcgaggcctttgcagccaatgtcctggagccacgagaacatgcattgctcaccctgttgctggtctacgggccacgagaaggtggccgtggagctccagacccatttcttggggtgaaggctgcagcagcggagttagagcgacggtaccctgggacgaggctggcctggctcgctgtgcgagcagaggccccttcccaggtgcgactcatggacgtggtctcgaagaagcaccctgtggacactctcttcttccttaccaccgtgtggacaaggcctgggcccgaagtcctcaaccgctgtcgcatgaatgccatctctggctggcaggccttctttccagtccatttccaggagttcaatcctgccctgtcaccacagagatcacccccagggcccccgggggctggccctgaccccccctcccctcctggtgctgacccctcccggggggctcctataggggggagatttgaccggcaggcttctgcggagggctgcttctacaacgctgactacctggcggcccgagcccggctggcaggtgaactggcaggccaggaagaggaggaagccctggaggggctggaggtgatggatgttttcctccggttctcagggctccacctctttcgggccgtagagccagggctggtgcagaagttctccctgcgagactgcagcccacggctcagtgaagaactctaccaccgctgccgcctcagcaacctggaggggctagggggccgtgcccagctggctatggctctctttgagcaggagcaggccaatagcacttagcccgcctgggggccctaacctcattacctttcctttgtctgcctcagccccaggaagggcaaggcaagatggtggacagatagagaattgttgctgtattttttaaatatgaaaatgttattaaacatgtcttctgccaaactgtt

SEQ ID NO: 354156 - DNA, 5234 bp, Homo sapiens
  misc_feature (112)..(112): n is a, c, g, or t
gattataaccagtttttttttaacctatatgaatattcagtaggacatgtgaaagctgtgtgggatcaggacagttttcttgtgtgataccatcttgcaatgtgcaagacanggagcctccttggctcctctcccccaatcatttgacaacaaaattgccccgaacatttccaaattgctccttagggagggtgccattctggttggggaaccactgtggtggtctgaatgctttacctgttccctgttccccagccttaccttgggctgttctcccctcaccaggctcaaagatgccctgggccttcccagttcttctccaagccaatctctttcctctctcaggacattctggtgctcttttctttgcctggaaaactgtccacttcatgtctggataacttttcctgaacctttggatctcagcattgccaaattcccagtctaatttaatactttgtttagtttttccacaggactctgtgcttttctgcaatggtacttatcagactgggatttctacctgttttattcttgctatgtcaagcgtgtttattacctgtctccctcaactttcagttccctgagagcagggaccatgcccatctcgtccaccgcttgtttacccagcactcacgaagatgcccggaacttagcatccttagatgaacgtacgtgcctggcaaacaacaaacatttcttaggcaactgaaaggctgatgggattccacagccaattgggagaaaagcgctctcgagggtgggggtatgctttttccagggcagatggtgttcagcccaagttacggggcagctttggtccactctggatttgcctggattcgcgtatgtgggggcgaacgcgtcttatcggggggcggccggttggggccaggcagcccggatcccagccgaggaggtgcgcggtgctgagaggccgtgggagcgaccatagagaacgcgcgggcggagcgagcggccggatgcggtcaccatagagacgggtgactgacaggcagcggaagaggaagctgcggacaggggctgtgaggtggcagcggctgcagcggcggagccggcgcctcagcgggcactggggtctgttcccccttccccgtccctgctccctgccaggcgcgtgcgggacgccgctcttggtccccacgcctccgccccgccccctcccgggacgccgggagaccccggccgtcctttatccggtgtccgccggcccccggccctgaaacccgggcctcctccccgagggccttgggcgtccctcctggtcctgcgctcgcggcctcgatgctgtctctggcgcggcctccgctcccgccgactggcctgagaacgaggtctgtgccccagtctcccagccgcgacctccgaccccgcctcgcagaacgacccgagctggtctcccgagcccccttctcagcagcccggtgacgtggccagtttatttctgttttgagacgaacggcgaagactcgcgtcgggtcttcgttctagggctagacttggtctctgatcgccgagaggtagcgcaggggctgtgggcccccggcaggggtcctgtcggaagctggccgcgcttctgtttgcgttcccaggaccctggcattgtctctagttgctgcttgtgctctctctttgcttttggtttgcttcatttggcccctggggccctggtaaaaccaggcaccgaatcgctcgcacacagagttccagtccccgcctgctgtctcctcagcagctggggttccgaggagaatgccctgcaagatggctccatcggccatggcgctcctgagaggctgtcagtgctgagtcaccgatctacctcattcgggtgggcagaacttatgtgtgccatgcgagtggctccagaccgctcctgagtgggaggaggggttcctgtagccgttgcgtcttctcaaacacggggagcagagtagaaagaggctctggccccttcccttgtgcccaccgggcctgccgcagtggctcagcagccccttcagtagcccgcctgaggaccgatgccagaggcaggcattcttccggaaaggcccactgaggcaggctccggctcctctggttggggctgttgttttgatggatcgtgtgcttttcccttacctcttatcacttgctgtcatctgttgacttaggcccagtctgcagatgtgtgtagtgttcctttttgggttagctttggcagtattgagttttacttcctcctctttttagtggaagacagaccataatcccagtgtgagtgaaattgattgtttcatttattaccgttttggctgggggttagttccgacaccttcacagttgaagagcaggcagaaggagttgtgaagacaggacaatcttcttggggatgctggtcctggaagccagcgggcctcgctctgtctttggcctcattgaccccaggttctctggttaaaactgaaagcctactactggcctggtgcccatcaatccattgatccttgaggctgtgcccctggggcacccacctggcagggcctaccaccatgcgactgagctccctgttggctctgctgcggccagcgcttcccctcatcttagggctgtctctggggtgcagcctgagcctcctgcgggtttcctggatccagggggagggagaagatccctgtgtcgaggctgtaggggagcgaggagggccacagaatccagattccagagctcggctagaccaaagtgatgaagacttcaaaccccggattgtcccctactacagggaccccaacaagccctacaagaaggtgctcaggactcggtacatccagacagagctgggctcccgtgagcggttgctggtggctgtcctgacctcccgagctacactgtccactttggccgtggctgtgaaccgtacggtggcccatcacttccctcggttactctacttcactgggcagcggggggcccgggctccagcagggatgcaggtggtgtctcatggggatgagcggcccgcctggctcatgtcagagaccctgcgccaccttcacacacactttggggccgactacgactggttcttcatcatgcaggatgacacatatgtgcaggccccccgcctggcagcccttgctggccacctcagcatcaaccaagacctgtacttaggccgggcagaggagttcattggcgcaggcgagcaggcccggtactgtcatgggggctttggctacctgttgtcacggagtctcctgcttcgtctgcggccacatctggatggctgccgaggagacattctcagtgcccgtcctgacgagtggcttggacgctgcctcattgactctctgggcgtcggctgtgtctcacagcaccaggggcagcagtatcgctcatttgaactggccaaaaatagggaccctgagaaggaagggagctcggctttcctgagtgccttcgccgtgcaccctgtctccgaaggtaccctcatgtaccggctccacaaacgcttcagcgctctggagttggagcgggcttacagtgaaatagaacaactgcagaactgtcccaagaaagcccaagggtagaagggagaattctcaagttgaacgtcaggcttggcagaggtggagtgtagatgaaaacaaaggtgtgattatgaagaggatgtgagtcctttgggtgtaggagagaaaggctgttgagcttctatttcaagatacttttacctgtgcaaaaagcacattttccacctccttctcatggcatttgtgtaaggctcagatccggaacctgaccgtgctgacccccgaaggggaggcagggctgagctggcccgttgggctccctgctcctttcacaccacactctcgctttgaggtgctgggctgggactacttcacagagcagcacaccttctcctgtgcagatggggctcccaagtgcccactacagggggctagcagggcggacgtgggtgatgcgttggagactgccctggagcagctcaatcggcgctatcagccccgcctgcgcttccagaagcagcgactgctcaacggctatcggcgcttcgacccagcacggggcatggagtacaccctggacctgctgttggaatgtgtgacacagcgtgggcaccggcgggccctggctcgcagggtcagcctgctgcggccactgagccgggtggaaatcctacctatgccctatgtcactgaggccacccgagtgcagctggtgctgccactcctggtggctgaagctgctgcagccccggctttcctcgaggcctttgcagccaatgtcctggagccacgagaacatgcattgctcaccctgttgctggtctacgggccacgagaaggtggccgtggagctccagacccatttcttggggtgaaggctgcagcagcggagttagagcgacggtaccctgggacgaggctggcctggctcgctgtgcgagcagaggccccttcccaggtgcgactcatggacgtggtctcgaagaagcaccctgtggacactctcttcttccttaccaccgtgtggacaaggcctgggcccgaagtcctcaaccgctgtcgcatgaatgccatctctggctggcaggccttctttccagtccatttccaggagttcaatcctgccctgtcaccacagagatcacccccagggcccccgggggctggccctgaccccccctcccctcctggtgctgacccctcccggggggctcctataggggggagatttgaccggcaggcttctgcggagggctgcttctacaacgctgactacctggcggcccgagcccggctggcaggtgaactggcaggccaggaagaggaggaagccctggaggggctggaggtgatggatgttttcctccggttctcagggctccacctctttcgggccgtagagccagggctggtgcagaagttctccctgcgagactgcagcccacggctcagtgaagaactctaccaccgctgccgcctcagcaacctggaggggctagggggccgtgcccagctggctatggctctctttgagcaggagcaggccaatagcacttagcccgcctgggggccctaacctcattacctttcctttgtctgcctcagccccaggaagggcaaggcaagatggtggacagatagagaattgttgctgtattttttaaatatgaaaatgttattaaacatgtcttctgccaaactgtt

SEQ ID NO: 354157 - DNA, 4920 bp, Homo sapiens
  misc_feature (112)..(112): n is a, c, g, or t
gattataaccagtttttttttaacctatatgaatattcagtaggacatgtgaaagctgtgtgggatcaggacagttttcttgtgtgataccatcttgcaatgtgcaagacanggagcctccttggctcctctcccccaatcatttgacaacaaaattgccccgaacatttccaaattgctccttagggagggtgccattctggttggggaaccactgtggtggtctgaatgctttacctgttccctgttccccagccttaccttgggctgttctcccctcaccaggctcaaagatgccctgggccttcccagttcttctccaagccaatctctttcctctctcaggacattctggtgctcttttctttgcctggaaaactgtccacttcatgtctggataacttttcctgaacctttggatctcagcattgccaaattcccagtctaatttaatactttgtttagtttttccacaggactctgtgcttttctgcaatggtacttatcagactgggatttctacctgttttattcttgctatgtcaagcgtgtttattacctgtctccctcaactttcagttccctgagagcagggaccatgcccatctcgtccaccgcttgtttacccagcactcacgaagatgcccggaacttagcatccttagatgaacgtacgtgcctggcaaacaacaaacatttcttaggcaactgaaaggctgatgggattccacagccaattgggagaaaagcgctctcgagggtgggggtatgctttttccagggcagatggtgttcagcccaagttacggggcagctttggtccactctggatttgcctggattcgcgtatgtgggggcgaacgcgtcttatcggggggcggccggttggggccaggcagcccggatcccagccgaggaggtgcgcggtgctgagaggccgtgggagcgaccatagagaacgcgcgggcggagcgagcggccggatgcggtcaccatagagacgggtgactgacaggcagcggaagaggaagctgcggacaggggctgtgaggtggcagcggctgcagcggcggagccggcgcctcagcgggcactggggtctgttcccccttccccgtccctgctccctgccaggcgcgtgcgggacgccgctcttggtccccacgcctccgccccgccccctcccgggacgccgggagaccccggccgtcctttatccggtgtccgccggcccccggccctgaaacccgggcctcctccccgagggccttgggcgtccctcctggtcctgcgctcgcggcctcgatgctgtctctggcgcggcctccgctcccgccgactggcctgagaacgaggtctgtgccccagtctcccagccgcgacctccgaccccgcctcgcagaacgacccgagctggtctcccgagcccccttctcagcagcccggtgacgtggccagtttatttctgttttgagacgaacggcgaagactcgcgtcgggtcttcgttctagggctagacttggtctctgatcgccgagaggtagcgcaggggctgtgggcccccggcaggggtcctgtcggaagctggccgcgcttctgtttgcgttcccaggaccctggcattgtctctagttgctgcttgtgctctctctttgcttttggtttgcttcatttggcccctggggccctggtaaaaccaggcaccgaatcgctcgcacacagagttccagtccccgcctgctgtctcctcagcagctggggttccgaggagaatgccctgcaagatggctccatcggccatggcgctcctgagaggctgtcagtgctgagtcaccgatctacctcattcgggtgggcagaacttatgtgtgccatgcgagtggctccagaccgctcctgagtgggaggaggggttcctgtagccgttgcgtcttctcaaacacggggagcagagtagaaagaggctctggccccttcccttgtgcccaccgggcctgccgcagtggctcagcagccccttcagtagcccgcctgaggaccgatgccagaggcaggcattcttccggaaaggcccactgaggcaggctccggctcctctggttggggctgttgttttgatggatcgtgtgcttttcccttacctcttatcacttgctgtcatctgttgacttaggcccagtctgcagatgtgtgtagtgttcctttttgggttagctttggcagtattgagttttacttcctcctctttttagtggaagacagaccataatcccagtgtgagtgaaattgattgtttcatttattaccgttttggctgggggttagttccgacaccttcacagttgaagagcaggcagaaggagttgtgaagacaggacaatcttcttggggatgctggtcctggaagccagcgggcctcgctctgtctttggcctcattgaccccaggttctctggttaaaactgaaagcctactactggcctggtgcccatcaatccattgatccttgaggctgtgcccctggggcacccacctggcagggcctaccaccatgcgactgagctccctgttggctctgctgcggccagcgcttcccctcatcttagggctgtctctggggtgcagcctgagcctcctgcgggtttcctggatccagggggagggagaagatccctgtgtcgaggctgtaggggagcgaggagggccacagaatccagattccagagctcggctagaccaaagtgatgaagacttcaaaccccggattgtcccctactacagggaccccaacaagccctacaagaaggtgctcaggactcggtacatccagacagagctgggctcccgtgagcggttgctggtggctgtcctgacctcccgagctacactgtccactttggccgtggctgtgaaccgtacggtggcccatcacttccctcggttactctacttcactgggcagcggggggcccgggctccagcagggatgcaggtggtgtctcatggggatgagcggcccgcctggctcatgtcagagaccctgcgccaccttcacacacactttggggccgactacgactggttcttcatcatgcaggatgacacatatgtgcaggccccccgcctggcagcccttgctggccacctcagcatcaaccaagacctgtacttaggccgggcagaggagttcattggcgcaggcgagcaggcccggtactgtcatgggggctttggctacctgttgtcacggagtctcctgcttcgtctgcggccacatctggatggctgccgaggagacattctcagtgcccgtcctgacgagtggcttggacgctgcctcattgactctctgggcgtcggctgtgtctcacagcaccaggggcagcagtatcgctcatttgaactggccaaaaatagggaccctgagaaggaagggagctcggctttcctgagtgccttcgccgtgcaccctgtctccgaaggtaccctcatgtaccggctccacaaacgcttcagcgctctggagttggagcgggcttacagtgaaatagaacaactgcaggctcagatccggaacctgaccgtgctgacccccgaaggggaggcagggctgagctggcccgttgggctccctgctcctttcacaccacactctcgctttgaggtgctgggctgggactacttcacagacagctcaatcggcgctatcagccccgcctgcgcttccagaagcagcgactgctcaacggctatcggcgcttcgacccagcacggggcatggagtacaccctggacctgctgttggaatgtgtgacacagcgtgggcaccggcgggccctggctcgcagggtcagcctgctgcggccactgagccgggtggaaatcctacctatgccctatgtcactgaggccacccgagtgcagctggtgctgccactcctggtggctgaagctgctgcagccccggctttcctcgaggcctttgcagccaatgtcctggagccacgagaacatgcattgctcaccctgttgctggtctacgggccacgagaaggtggccgtggagctccagacccatttcttggggtgaaggctgcagcagcggagttagagcgacggtaccctgggacgaggctggcctggctcgctgtgcgagcagaggccccttcccaggtgcgactcatggacgtggtctcgaagaagcaccctgtggacactctcttcttccttaccaccgtgtggacaaggcctgggcccgaagtcctcaaccgctgtcgcatgaatgccatctctggctggcaggccttctttccagtccatttccaggagttcaatcctgccctgtcaccacagagatcacccccagggcccccgggggctggccctgaccccccctcccctcctggtgctgacccctcccggggggctcctataggggggagatttgaccggcaggcttctgcggagggctgcttctacaacgctgactacctggcggcccgagcccggctggcaggtgaactggcaggccaggaagaggaggaagccctggaggggctggaggtgatggatgttttcctccggttctcagggctccacctctttcgggccgtagagccagggctggtgcagaagttctccctgcgagactgcagcccacggctcagtgaagaactctaccaccgctgccgcctcagcaacctggaggggctagggggccgtgcccagctggctatggctctctttgagcaggagcaggccaatagcacttagcccgcctgggggccctaacctcattacctttcctttgtctgcctcagccccaggaagggcaaggcaagatggtggacagatagagaattgttgctgtattttttaaatatgaaaatgttattaaacatgtcttctgccaaactgtt

SEQ ID NO: 354158 - DNA, 2190 bp, Homo sapiens
agagagagcctgagatgtccaggcgtgcaatgaacgagcagctggcagtggggctgggctaggccctgtataatggcagggcaggaagaggccgaccatacttaaatttaaagcaactacagggacaaaggtctttgggggtccaaagcaatcataaggtaagctcccagcacaacttgaatgcagctaaaggggtttgcaagtagactctgaggatcaggaagctccgcacagtgttcagacagaatagttttagctcctcctcaatagtgcctgtccactgaggaggcaaaaactctgaagtttctttacttctagaactgtcccaagaaagcccaagggtagaagggagaattctcaagttgaacgtcaggcttggcagaggtggagtgtagatgaaaacaaaggtgtgattatgaagaggatgtgagtcctttgggtgtaggagagaaaggctgttgagcttctatttcaagatacttttacctgtgcaaaaagcacattttccacctccttctcatggcatttgtgtaaggtgagtatgattcctattccatctgcattttagaggtgaagaataacgtacaagggattcagtgattagcaagggacccctcactaagtgttgatggagttaggacagagctcagctgtttgaatctcagagcccaggcagctggagctgggtaggatcctggagctggcactaatgtgaggtgcattccctccaacccaggctcagatccggaacctgaccgtgctgacccccgaaggggaggcagggctgagctggcccgttgggctccctgctcctttcacaccacactctcgctttgaggtgctgggctgggactacttcacagagcagcacaccttctcctgtgcagatggggctcccaagtgcccactacagggggctagcagggcggacgtgggtgatgcgttggagactgccctggagcagctcaatcggcgctatcagccccgcctgcgcttccagaagcagcgactgctcaacggctatcggcgcttcgacccagcacggggcatggagtacaccctggacctgctgttggaatgtgtgacacagcgtgggcaccggcgggccctggctcgcagggtcagcctgctgcggccactgagccgggtggaaatcctacctatgccctatgtcactgaggccacccgagtgcagctggtgctgccactcctggtggctgaagctgctgcagccccggctttcctcgaggcctttgcagccaatgtcctggagccacgagaacatgcattgctcaccctgttgctggtctacgggccacgagaaggtggccgtggagctccagacccatttcttggggtgaaggctgcagcagcggagttagagcgacggtaccctgggacgaggctggcctggctcgctgtgcgagcagaggccccttcccaggtgcgactcatggacgtggtctcgaagaagcaccctgtggacactctcttcttccttaccaccgtgtggacaaggcctgggcccgaagtcctcaaccgctgtcgcatgaatgccatctctggctggcaggccttctttccagtccatttccaggagttcaatcctgccctgtcaccacagagatcacccccagggcccccgggggctggccctgaccccccctcccctcctggtgctgacccctcccggggggctcctataggggggagatttgaccggcaggcttctgcggagggctgcttctacaacgctgactacctggcggcccgagcccggctggcaggtgaactggcaggccaggaagaggaggaagccctggaggggctggaggtgatggatgttttcctccggttctcagggctccacctctttcgggccgtagagccagggctggtgcagaagttctccctgcgagactgcagcccacggctcagtgaagaactctaccaccgctgccgcctcagcaacctggaggggctagggggccgtgcccagctggctatggctctctttgagcaggagcaggccaatagcacttagcccgcctgggggccctaacctcattacctttcctttgtctgcctcagccccaggaagggcaaggcaagatggtggacagatagagaattgttgctgtattttttaaatatgaaaatgttattaaacatgtcttctgccaaactgtt

SEQ ID NO: 354159 - DNA, 5564 bp, Homo sapiens
  misc_feature (112)..(112): n is a, c, g, or t
  misc_feature (5564)..(5564): n is a, c, g, or t
gattataaccagtttttttttaacctatatgaatattcagtaggacatgtgaaagctgtgtgggatcaggacagttttcttgtgtgataccatcttgcaatgtgcaagacanggagcctccttggctcctctcccccaatcatttgacaacaaaattgccccgaacatttccaaattgctccttagggagggtgccattctggttggggaaccactgtggtggtctgaatgctttacctgttccctgttccccagccttaccttgggctgttctcccctcaccaggctcaaagatgccctgggccttcccagttcttctccaagccaatctctttcctctctcaggacattctggtgctcttttctttgcctggaaaactgtccacttcatgtctggataacttttcctgaacctttggatctcagcattgccaaattcccagtctaatttaatactttgtttagtttttccacaggactctgtgcttttctgcaatggtacttatcagactgggatttctacctgttttattcttgctatgtcaagcgtgtttattacctgtctccctcaactttcagttccctgagagcagggaccatgcccatctcgtccaccgcttgtttacccagcactcacgaagatgcccggaacttagcatccttagatgaacgtacgtgcctggcaaacaacaaacatttcttaggcaactgaaaggctgatgggattccacagccaattgggagaaaagcgctctcgagggtgggggtatgctttttccagggcagatggtgttcagcccaagttacggggcagctttggtccactctggatttgcctggattcgcgtatgtgggggcgaacgcgtcttatcggggggcggccggttggggccaggcagcccggatcccagccgaggaggtgcgcggtgctgagaggccgtgggagcgaccatagagaacgcgcgggcggagcgagcggccggatgcggtcaccatagagacgggtgactgacaggcagcggaagaggaagctgcggacaggggctgtgaggtggcagcggctgcagcggcggagccggcgcctcagcgggcactggggtctgttcccccttccccgtccctgctccctgccaggcgcgtgcgggacgccgctcttggtccccacgcctccgccccgccccctcccgggacgccgggagaccccggccgtcctttatccggtgtccgccggcccccggccctgaaacccgggcctcctccccgagggccttgggcgtccctcctggtcctgcgctcgcggcctcgatgctgtctctggcgcggcctccgctcccgccgactggcctgagaacgaggtctgtgccccagtctcccagccgcgacctccgaccccgcctcgcagaacgacccgagctggtctcccgagcccccttctcagcagcccggtgacgtggccagtttatttctgttttgagacgaacggcgaagactcgcgtcgggtcttcgttctagggctagacttggtctctgatcgccgagaggtagcgcaggggctgtgggcccccggcaggggtcctgtcggaagctggccgcgcttctgtttgcgttcccaggaccctggcattgtctctagttgctgcttgtgctctctctttgcttttggtttgcttcatttggcccctggggccctggtaaaaccaggcaccgaatcgctcgcacacagagttccagtccccgcctgctgtctcctcagcagctggggttccgaggagaatgccctgcaagatggctccatcggccatggcgctcctgagaggctgtcagtgctgagtcaccgatctacctcattcgggtgggcagaacttatgtgtgccatgcgagtggctccagaccgctcctgagtgggaggaggggttcctgtagccgttgcgtcttctcaaacacggggagcagagtagaaagaggctctggccccttcccttgtgcccaccgggcctgccgcagtggctcagcagccccttcagtagcccgcctgaggaccgatgccagaggcaggcattcttccggaaaggcccactgaggcaggctccggctcctctggttggggctgttgttttgatggatcgtgtgcttttcccttacctcttatcacttgctgtcatctgttgacttaggcccagtctgcagatgtgtgtagtgttcctttttgggttagctttggcagtattgagttttacttcctcctctttttagtggaagacagaccataatcccagtgtgagtgaaattgattgtttcatttattaccgttttggctgggggttagttccgacaccttcacagttgaagagcaggcagaaggagttgtgaagacaggacaatcttcttggggatgctggtcctggaagccagcgggcctcgctctgtctttggcctcattgaccccaggttctctggttaaaactgaaagcctactactggcctggtgcccatcaatccattgatccttgaggctgtgcccctggggcacccacctggcagggcctaccaccatgcgactgagctccctgttggctctgctgcggccagcgcttcccctcatcttagggctgtctctggggtgcagcctgagcctcctgcgggtttcctggatccagggggagggagaagatccctgtgtcgaggctgtaggggagcgaggagggccacagaatccagattccagagctcggctagaccaaagtgatgaagacttcaaaccccggattgtcccctactacagggaccccaacaagccctacaagaaggtgctcaggactcggtacatccagacagagctgggctcccgtgagcggttgctggtggctgtcctgacctcccgagctacactgtccactttggccgtggctgtgaaccgtacggtggcccatcacttccctcggttactctacttcactgggcagcggggggcccgggctccagcagggatgcaggtggtgtctcatggggatgagcggcccgcctggctcatgtcagagaccctgcgccaccttcacacacactttggggccgactacgactggttcttcatcatgcaggatgacacatatgtgcaggccccccgcctggcagcccttgctggccacctcagcatcaaccaagacctgtacttaggccgggcagaggagttcattggcgcaggcgagcaggcccggtactgtcatgggggctttggctacctgttgtcacggagtctcctgcttcgtctgcggccacatctggatggctgccgaggagacattctcagtgcccgtcctgacgagtggcttggacgctgcctcattgactctctgggcgtcggctgtgtctcacagcaccaggggcagcagtatcgctcatttgaactggccaaaaatagggaccctgagaaggaagggagctcggctttcctgagtgccttcgccgtgcaccctgtctccgaaggtaccctcatgtaccggctccacaaacgcttcagcgctctggagttggagcgggcttacagtgaaatagaacaactgcaggctcagatccggaacctgaccgtgctgacccccgaaggggaggcagggctgagctggcccgttgggctccctgctcctttcacaccacactctcgctttgaggtgctgggctgggactacttcacagagcagcacaccttctcctgtgcagatggggctcccaagtgcccactacagggggctagcagggcggacgtgggtgatgcgttggagactgccctggagcagctcaatcggcgctatcagccccgcctgcgcttccagaagcagcgactgctcaacggctatcggcgcttcgacccagcacggggcatggagtacaccctggacctgctgttggaatgtgtgacacagcgtgggcaccggcgggccctggctcgcagggtcagcctgctgcggccactgagccgggtggaaatcctacctatgccctatgtcactgaggccacccgagtgcagctggtgctgccactcctggtggctgaagctgctgcagccccggctttcctcgaggcctttgcagccaatgtcctggagccacgagaacatgcattgctcaccctgttgctggtctacgggccacgagaaggtggccgtggagctccagacccatttcttggggtgaaggctgcagcagcggagttagagcgacggtaccctgggacgaggctggcctggctcgctgtgcgagcagaggccccttcccaggtgcgactcatggacgtggtctcgaagaagcaccctgtggacactctcttcttccttaccaccgtgtggacaaggcctgggcccgaagtcctcaaccgctgtcgcatgaatgccatctctggctggcaggccttctttccagtccatttccaggagttcaatcctgccctgtcaccacagagatcacccccagggcccccgggggctggccctgaccccccctcccctcctggtgctgacccctcccggggggctcctataggggggagatttgaccggcaggcttctgcggagggctgcttctacaacgctgactacctggcggcccgagcccggctggcaggtgaactggcaggccaggaagaggaggaagccctggaggggctggaggtgatggatgttttcctccggttctcagggctccacctctttcgggccgtagagccagggctggtgcagaagttctccctgcgagactgcagcccacggctcagtgaagaactctaccaccgctgccgcctcagcaacctggaggggctagggggccgtgcccagctggctatggctctctttgagcaggagcaggccaatagcacttagcccgcctgggggccctaacctcattacctttcctttgtctgcctcagccccaggaagggcaaggcaagatggtggacagatagagaattgttgctgtattttttaaatatgaaaatgttattaaacatgtcttctgccaaactgttaaaaaaaaaaaaaaaaaaaaaaaaaaaaaaaaaaaaaaaaaaaaaaaaaaaaaaaaaaaaaaaaaaagggggggggggccaaaaattcccccggggggggccccactattatgagcgaacaccccccgcgtttggttggaaacaagaggggggccccccaaagagaggcgaggagatattataatacacagcagcgaaccgcggcggcggccgcgattaacaaccaccacacggctggagtggtggggaaaacaggcggttagtcccggggggccaagcctgctggtgggaagagacaaccaccccatcttccgccggggggggggaaccacaccttatgtgtgggccaaccgccctcctctcaacgcaagaaagatataattgacgcgccccccgcagacgaaaatatatttaacaaactggcggcagcgagtataagtacgtgggggctaacacccacaagccgcataattataggttgccgcgccggaagacaaatgtggcaaccaggaggaattatattagcacaacaattattcaccggggn

SEQ ID NO: 354160 - DNA, 305 bp, Homo sapiens
ccaagggcaaatctctggagaaagtcacaggtgtcagtcactagtcttgccctggcagcagataggggaggggtttgatgacttatacaaaggcatcaacagtgtctattgcagcaggcaggcattcgaggatgtagtaattgctttgtatttcctggacgttggctctttgggtgtttggcttgggagctatggtgaagaaaaatggtttctctcttcatcgctctctctccctccccacttcacctccagtcctttttgtttaaaatgaaacttcattttttgtatttcttctattgaggaaa

SEQ ID NO: 354161 - DNA, 1301 bp, Homo sapiens
ttaaataacttggaaaaactactggactggatggtctcttaagattgcaagtgccaagccttggcactctaggacccatcccttttaacagtagcatctatttttagactagacaaggatacctaagctgtattacaaatatagttccagacacatcatggtactctacatctagtccggttcctgatacctttaaccaatgctctggcctggccattcctgcagtgcctgtccttctcctttggcttatgctatcctcagcagcacatgcattatttgtaagcctcccttacccatttgatactacccaatcaagactctagtataaatgttctgtcccttcaagaaaccttccccagttggccattttcccaaagtacattttccactcttatggttcagtacactttgctttgtctggtagttttatgtgtaaagctcagaggactggatcttgggtttctttatagtaaaccatccaaatgccttgcattgtactatactgaaggtaacatggatccaagtcatatggcttaaaaattcttttctctttcaggatcgaatcatcaatttagttgttggcagcttaacatccttattgattctagtaacgctgataagtgcttttgttttccctcaactacctccaaaaccgttgaatatattctttgctgtctgcatctctttgagtagtattactgcctgcatacttatctactggtatcgacaaggagacttagaaccgaaatttagaaagctaatttactatatcatattttctatcatcatgttgtgtatatgtgcaaacctgtacttccatgatgtgggaaggtgaggctgccaaggagaagtacttaccaggactcttcaaaatgatacattaggacagtgagtaatttttggataaggtatgctgaagaatctcctgcagaagtctgatacatgattttcatgttaattgtaaatgttaattccctcttgcaagggagacatatcctagatcactttgctttttctttaaggagctgatgttgcacctaaacattccaacccttaaagctaaaacagcacaaaaaaatttcacttttgaaatgaaatttttataattgtatggcaaaaggctatgtaaaaacaaatcttgcatcttaagacaaatattcttttatttctgttaaactgaatatacaattgttccctaggcaaccaacttttgcttataactacaatttaatttcacgttgacaaaacacagtgaaaagacaactttgtgaagatctaattacaataataaataaaataat

SEQ ID NO: 354162 - DNA, 820 bp, Homo sapiens
gccgacttgcgacggaggcagcgggtccgggtcgggggacctgagaaggagccgggaggtgatccgcagcgctgcgacgggaccgcgcgattcctctcccacgcatctggcccgcgttcctgggcctcggcaccggatcccggcgggggtgtggacccagggcccactctccccggcgcggccagggccccccagcgtgcgagcgcctaggggatgccgaggtttggcgggcgcgggaccaatatgggcagggccgaggcgggattctccctctcgctgtgcctagaccgtactcctgctgcagttccggcagagagcgcggggagagcagcggcgggagctgcggcgagcacgccggccctggggtagatgcaacacatgagaggggatccaagttgcttgggtcggccccggcagcgacctgaacccgccgccctgcgggaggggtgtgcggagcgctgggctgtgctccggcaacttcactcctcccgccgccactggggaacgtagtgggggagacgcagaaggctaggcgaggggttctcaatgcgttcttccaagaaaactttttctcccttgaacatgaaggaatacgtgcttaccgtagaaacattgggaaaacatgggaaattattgtgtaaaaatggggggcgacgtgtgggagtctctcccggggcgaggggactgcgatttgctgtgctagccgggggcgagcggcgggcggcgctaccctggcggcccagaggggcggagagccacgcggcgccaagggctgagatttgaggaagtgggagctgcccgggcgggggcgtcccgctga

SEQ ID NO: 354163 - DNA, 484 bp, Homo sapiens
gtttcctcccagggccattgttaccacctgatcatttgagttttagtttctctagcagatgctggctaatgactgaccaggatcgaatcatcaatttagttgttggcagcttaacatccttattgattctagtaacgctgataagtgcttttgttttccctcaactacctccaaaaccgttgaatatattctttgctgtctgcatctctttgagtagtattactgcctgcatacttgtaagtactgttgagaatttaaacagtgttcttgagggtttaagttgcaatgcacaggacaaaaattttcagccttgggtctatacaaaagggtatctcttaattatatcctcatcctccccctaaaagtatgttagaattctcaataaaatctgagtcttctccttttctcctaaatcccaaagttgtaaccccaaagagaaattccactcccttgatagcttaaaaaaaaaaaaaaaaaaaaaaaa

SEQ ID NO: 354164 - DNA, 1299 bp, Homo sapiens
  misc_feature (1263)..(1263): n is a, c, g, or t
  misc_feature (1265)..(1265): n is a, c, g, or t
  misc_feature (1268)..(1268): n is a, c, g, or t
  misc_feature (1299)..(1299): n is a, c, g, or t
gccgacttgcgacggaggcagcgggtccgggtcgggggacctgagaaggagccgggaggtgatccgcagcgctgcgacgggaccgcgcgattcctctcccacgcatctggcccgcgttcctgggcctcggcaccggatcccggcgggggtgtggacccagggcccactctccccggcgcggccagggccccccagcgtgcgagcgcctaggggatgccgagctgctcaagatgaggaggtgcgcggggccggggcggagcagtcgcgttccccgcgtgtgagcccccacccatccctggcgccagcgcttccccgaccactcgggttcggctatgcgggagccgtgaggaggaggcttgcagtcgtggacctgagacctcgggaggtcatgctgtcttgcttttaagtggcttggggaaagtgaagaaaccccaaaatggaggactttgctaccaggacctacggcaccagtggcctggacaacagacctctgtttggggagacgtccgccaaggatcgaatcatcaatttagttgttggcagcttaacatccttattgattctagtaacgctgataagtgcttttgttttccctcaactacctccaaaaccgttgaatatattctttgctgtctgcatctctttgagtagtattactgcctgcatacttatctactggtatcgacaaggagacttagaaccgaaatttagaaagctaatttactatatcatattttctatcatcatgttgtgtatatgtgcaaacctgtacttccatgatgtgggaaggtgaggctgccaaggagaagtacttaccaggactcttcaaaatgatacattaggacagtgagtaatttttggataaggtatgctgaagaatctcctgcagaagtctgatacatgattttcatgttaattgtaaatgttaattccctcttgcaagggagacatatcctagatcactttgctttttctttaaggagctgatgttgcacctaaacattccaacccttaaagctaaaacagcacaaaaaaatttcacttttgaaatgaaatttttataattgtatggcaaaaggctatgtaaaaacaaatcttgcatcttaagacaaatattcttttatttctgttaaactgaatatacaattgttccctaggcaaccaacttttgcttataactacaatttaatttcacgttgacaaaacacagtgaaaagacaactttgtgaagatctaattacaataataaataaaataatggcntngtnggcctcagcggtggagctctgcggcccgaan

SEQ ID NO: 354165 - DNA, 769 bp, Homo sapiens
  misc_feature (24)..(24): n is a, c, g, or t
ccagaggaccccgactagtccaangatcgaatcatcaatttagttgttggcagcttaacatccttattgattctagtaacgctgataagtgcttttgttttccctcaactacctccaaaaccgttgaatatattctttgctgtctgcatctctttgagtagtattactgcctgcatacttatctactggtatcgacaaggagacttagaaccgaaatttagaaagctaatttactatatcatattttctatcatcatgttgtgtatatgtgcaaacctgtacttccatgatgtgggaaggtgaggctgccaaggagaagtacttaccaggactcttcaaaatgatacattaggacagtgagtaatttttggataaggtatgctgaagaatctcctgcagaagtctgatacatgattttcatgttaattgtaaatgttaattccctcttgcaagggagacatatcctagatcactttgctttttctttaaggagctgatgttgcacctaaacattccaacccttaaagctaaaacagcacaaaaaaatttcacttttgaaatgaaatttttataattgtatggcaaaaggctatgtaaaaacaaatcttgcatcttaagacaaatattcttttatttctgttaaactgaatatacaattgttccctaggcaaccaacttttgcttataactacaatttaatttcacgttgacaaaacacagtgaaaagacaactttgtgaagatctaattacaataataaataaaataat

SEQ ID NO: 354166 - DNA, 1201 bp, Homo sapiens
gccgacttgcgacggaggcagcgggtccgggtcgggggacctgagaaggagccgggaggtgatccgcagcgctgcgacgggaccgcgcgattcctctcccacgcatctggcccgcgttcctgggcctcggcaccggatcccggcgggggtgtggacccagggcccactctccccggcgcggccagggccccccagcgtgcgagcgcctaggggatgccgagctgctcaagatgaggaggtgcgcggggccggggcggagcagtcgcgttccccgcgtgtgagcccccacccatccctggcgccagcgcttccccgaccactcgggttcggctatgcgggagccgtgaggaggaggcttgcagtcgtggacctgagacctcgggaggtcatgctgtcttgcttttaagtggcttggggaaagtgaagaaaccccaaaatggaggactttgctaccaggacctacggcaccagtggcctggacaacagacctctgtttggggagacgtccgccaaggatcgaatcatcaatttagttgttggcagcttaacatccttattgattctagtaacgctgataagtgcttttgttttccctcaactacctccaaaaccatctactggtatcgacaaggagacttagaaccgaaatttagaaagctaatttactatatcatattttctatcatcatgttgtgtatatgtgcaaacctgtacttccatgatgtgggaaggtgaggctgccaaggagaagtacttaccaggactcttcaaaatgatacattaggacagtgagtaatttttggataaggtatgctgaagaatctcctgcagaagtctgatacatgattttcatgttaattgtaaatgttaattccctcttgcaagggagacatatcctagatcactttgctttttctttaaggagctgatgttgcacctaaacattccaacccttaaagctaaaacagcacaaaaaaatttcacttttgaaatgaaatttttataattgtatggcaaaaggctatgtaaaaacaaatcttgcatcttaagacaaatattcttttatttctgttaaactgaatatacaattgttccctaggcaaccaacttttgcttataactacaatttaatttcacgttgacaaaacacagtgaaaagacaactttgtgaagatctaattacaataataaataaaataat

SEQ ID NO: 354167 - DNA, 751 bp, Homo sapiens
  misc_feature (14)..(14): n is a, c, g, or t
  misc_feature (22)..(22): n is a, c, g, or t
  misc_feature (34)..(34): n is a, c, g, or t
  misc_feature (41)..(41): n is a, c, g, or t
gcgtggttgggacnatcactcnaggctggtgggngctaacnatccttattgattctagtaacgctgataagtgcttttgttttccctcaactacctccaaaaccgttgaatatattctttgctgtctgcatctctttgagtagtattactgcctgcatacttatctactggtatcgacaaggagacttagaaccgaaatttagaaagctaatttactatatcatattttctatcatcatgttgtgtatatgtgcaaacctgtacttccatgatgtgggaaggtgaggctgccaaggagaagtacttaccaggactcttcaaaatgatacattaggacagtgagtaatttttggataaggtatgctgaagaatctcctgcagaagtctgatacatgattttcatgttaattgtaaatgttaattccctcttgcaagggagacatatcctagatcactttgctttttctttaaggagctgatgttgcacctaaacattccaacccttaaagctaaaacagcacaaaaaaatttcacttttgaaatgaaatttttataattgtatggcaaaaggctatgtaaaaacaaatcttgcatcttaagacaaatattcttttatttctgttaaactgaatatacaattgttccctaggcaaccaacttttgcttataactacaatttaatttcacgttgacaaaacacagtgaaaagacaactttgtgaagatctaattacaataataaataaaataat

SEQ ID NO: 354168 - DNA, 455 bp, Homo sapiens
caaacttggtggcagatgtaattttataacatgaagcattttgtagtactgttgcctagactccagttggtaattaccaagtcttggaattactgttaaggccttacataatttctcttcatacaggtaacgctgataagtgcttttgttttccctcaactacctccaaaaccgttgaatatattctttgctgtctgcatctctttgagtagtattactgcctgcatacttgtaagtactgttgagaatttaaacagtgttcttgagggtttaagttgcaatgcacaggacaaaaattttcagccttgggtctatacaaaagggtatctcttaattatatcctcatcctccccctaaaagtatgttagaattctcaataaaatctgagtcttctccttttctcctaaatcccaaagttgtaaccccaaagagaaattccactcccttgatagctt

SEQ ID NO: 354169 - DNA, 918 bp, Homo sapiens
gccgacttgcgacggaggcagcgggtccgggtcgggggacctgagaaggagccgggaggtgatccgcagcgctgcgacgggaccgcgcgattcctctcccacgcatctggcccgcgttcctgggcctcggcaccggatcccggcgggggtgtggacccagggcccactctccccggcgcggccagggccccccagcgtgcgagcgcctaggggatgccgagctgctcaagatgaggaggtgcgcggggccggggcggagcagtcgcgttccccgcgtgtgagcccccacccatccctggcgccagcgcttccccgaccactcgggttcggctatgcgggagccgtgaggaggaggcttgcagtcgtggacctgagacctcgggaggtcatgctgtcttgcttttaagtggcttggggaaagtgaagaaaccccaaaatggaggactttgctaccaggacctacggcaccagtggcctggacaacagacctctgtttggggagacgtccgccaaggatcgaatcatcaatttagttgttggcagcttaacatccttattgattctagtaacgctgataagtgcttttgttttccctcaactacctccaaaaccgttgaatatattctttgctgtctgcatctctttgagtagtattactgcctgcatacttgtaagtactgttgagaatttaaacagtgttcttgagggtttaagttgcaatgcacaggacaaaaattttcagccttgggtctatacaaaagggtatctcttaattatatcctcatcctccccctaaaagtatgttagaattctcaataaaatctgagtcttctccttttctcctaaatcccaaagttgtaaccccaaagagaaattccactcccttgatagcttaaaaaaaaaaaaaaaaaaaaaaaa

SEQ ID NO: 354170 - DNA, 1259 bp, Homo sapiens
gccgacttgcgacggaggcagcgggtccgggtcgggggacctgagaaggagccgggaggtgatccgcagcgctgcgacgggaccgcgcgattcctctcccacgcatctggcccgcgttcctgggcctcggcaccggatcccggcgggggtgtggacccagggcccactctccccggcgcggccagggccccccagcgtgcgagcgcctaggggatgccgagctgctcaagatgaggaggtgcgcggggccggggcggagcagtcgcgttccccgcgtgtgagcccccacccatccctggcgccagcgcttccccgaccactcgggttcggctatgcgggagccgtgaggaggaggcttgcagtcgtggacctgagacctcgggaggtcatgctgtcttgcttttaagtggcttggggaaagtgaagaaaccccaaaatggaggactttgctaccaggacctacggcaccagtggcctggacaacagacctctgtttggggagacgtccgccaaggatcgaatcatcaatttagttgttggcagcttaacatccttattgattctagtaacgctgataagtgcttttgttttccctcaactacctccaaaaccgttgaatatattctttgctgtctgcatctctttgagtagtattactgcctgcatacttatctactggtatcgacaaggagacttagaaccgaaatttagaaagctaatttactatatcatattttctatcatcatgttgtgtatatgtgcaaacctgtacttccatgatgtgggaaggtgaggctgccaaggagaagtacttaccaggactcttcaaaatgatacattaggacagtgagtaatttttggataaggtatgctgaagaatctcctgcagaagtctgatacatgattttcatgttaattgtaaatgttaattccctcttgcaagggagacatatcctagatcactttgctttttctttaaggagctgatgttgcacctaaacattccaacccttaaagctaaaacagcacaaaaaaatttcacttttgaaatgaaatttttataattgtatggcaaaaggctatgtaaaaacaaatcttgcatcttaagacaaatattcttttatttctgttaaactgaatatacaattgttccctaggcaaccaacttttgcttataactacaatttaatttcacgttgacaaaacacagtgaaaagacaactttgtgaagatctaattacaataataaataaaataat

SEQ ID NO: 354171 - DNA, 325 bp, Homo sapiens
cactctgttccttcatctccgaggccgagagcctctgccagaactggcggggatggcgcaaacagtcagcggggcccaattcccccactggcggcggtggcggaggtggcagtggcggtaccagaatgcgaggtgagagtgagctggggggaagaggagcggcaggccctgcttgggcctcgctcgggagctgtccgggaccaggagctgtccccgaccaagagctctcttcaaccaggggaagaaaggggagctgtccccggccgggagctgtccccgactgggagctgtcccaagcttagaacagacttcagaactcgctttt

SEQ ID NO: 354172 - DNA, 6366 bp, Homo sapiens
ccttgagtggtaactttatcttagtccaggtgattccagttgcagcagtagctaggtgccctgcgataactctctccccttgagggtttccagtgtgggaagttgtcatttaggcgcgccaaaagtggtctggcctctcgtgcttcttgagatcccttccgggctctggtctatcttgtctccttagctgggggcctacagtcatctagagtaaaagggatggttaaaaaaaaaaaaaaaaggcaatcggagacaagaatgccagaggagagacattaaccatgtaatttgaatttaaaatgctcatggaatatgggaaattcagtgctgagccatgtgagcagggttacttgctagggtcctggaacgcacctgtctggccaggagtttcttaagatatctctggtatcttctgttctagaccttaggtgtagccggctgtgggctggggattatccagctcccctttcccatatggagccttaagggttagtgtatcctgatagggggatccctaggactttcatccaggtctcttctttctttcatagtgaagatgaggcccaggatgttgtactggcatgagtgccaagagaccatggcccttttcatttcctattctctttcccctgatcccaaccattgtttgcaaagatggactggtgatcccattggtggagctgtcagcaaagcaggtggcatttcatatcccatttgaagtggtggagaaagtttacccaccagtgcctgagcagctacagctccgaattgctttttggagcttccctgagaatgaagaggacattcggctgtattcgtgcctggccaatggcagtgcggatgagtttcagcgaggggatcagctcttccgcatgcgggctgtgaaggacccattgcagatagggttccacctgagtgctacagtggtgccacctcagatggtccctcctaaaggggcctacaacgtggctgtgatgtttgaccgctgccgggtcacttcctgcagctgtacctgtggggctggggccaaatggtgcacccacgtcgtggcactctgtctcttccgcatccacaacgcttctgcagtctgcctgcgagccccagtctcagagtccctgtcccggctacagagggaccagctgcaaaagtttgctcagtacctcatcagtgagctccctcagcaggtgggtgaggtcggcaccccctcctgcaattagctccgggccaggccgcataacagccttcctgttaggcccaggcctccatgggttcacctaggccgtgttctgcctgcctccgtctctttctccctcagatcctccccacagctcagcgtctcctggacgaactcctgtcttcccagtcaacagccatcaatacagtgtgtggagctccggaccccacagcagggccctcagcatcggaccagagtacttggtatctggatgaatcgacactcactgacaacatcaaaaagacactgcacaagttctgtggcccctcccctgtggtcttcagtgatgtgaactccatgtatctgtcttccacggagccgccagccgctgctgaatgggcatgtctgctgcgccctctgaggggccgtgagccagagggcgtctggaacctgctaagcattgtgcgggagatgttcaagcggagggacagcaatgctgcccccttgttggaaatcctcactgaccagtgcctcacctatgaacagataacaggttggtggtatagcgtacgtacctcagcctcacacagcagtgccagtgggcacacgggccgtagcaacgggcagtcagaggtggcagcccatgcctgtgccagcatgtgtgacgagatggtcacactgtggaggctggccgtgctggaccctgcactcagcccccagcggcgccgggaactgtgtacgcagctgcggcagtggcaactgaaggtgattgagaacgtcaagcggggccaacacaagaagacgctggagcggctcttccccggcttccggccagcggtggaggcctgctacttcaactgggaagaggcctacccacttcctggtgtcacctacagcggcactgacaggaagctggcactgtgctgggcccgggccctgccctctcggccaggtgcctcccgctctgggggcctggaggaatcccgggaccggccccgaccccttcctactgagccagctgtgcggcccaaggagcctgggaccaagcgaaagggcttgggtgagggggtcccctcatcacagcggggtccccgccgcctctcagctgaagggggagataaagctctacataagatgggtccaggtgggggcaaagccaaggcactgggtggggctggcagtgggagcaagggctcagcaggtggcggaagcaagcgacggctgagcagcgaagacagctccctggagccagacctggccgagatgagcctggatgacagcagcctggccctgggcgcagaggccagcaccttcgggggattccctgagagccctccaccctgtcctctccacggtggctcccgaggcccttccactttccttcctgagcccccagatacttatgaagaagatggtggtgtgtacttctcggaagggcctgagcctcccacagcctctgttggcccccctggcctactgcctggggatgtctgtacccaggacgacctcccttctacagatgagagtggcaatgggcttcccaaaaccaaagaggcagcccctgcagttggagaggaggatgatgactaccaggcgtactatctgaatgcccaggatggggctgggggcgaggaagagaaggccgagggcggggctggggaggagcacgacctgtttgctgggctgaagccactggaacaggagagtcgcatggaggtactgtttgcctgtgctgaggccctgcatgcgcatggctatagcagtgaggcctcccgtctcactgtggagcttgcccaggatctgctagccaacccacccgacctcaaggtagagccgccccctgccaagggcaagaagaacaaggtatccacgagccgtcagacctgggtggctaccaacaccctgagcaaggcggccttcctgttgacagtgctaagtgagcgtccagagcaccacaacctggccttccgagttggcatgtttgccttggagctacagaggcctccagcttctaccaaggccttggaggtgaagctggcataccaggagtctgaggtggctgccctgctcaagaagatccctctgggtccaagtgagatgagtaccatgcggtgccgggcagaggaacttcgggaggggacactctgtgactatcggcctgtgttgcctctcatgctggccagtttcatctttgacgttctctgtgctccagggttcccggcccccaagtcgcaactggaacagcgagacacctggggatgaggagcttggatttgaagcagcagttgctgccttgggcatgaagacaacagtgagcgaggcagaacatcccctcttatgtgaaggcacacgtcgggagaagggtgacctggcattagcactaatgatcacttacaaggacgaccaggccaagcttaagaagatcttagacaaactcttggaccgagagagccagacacataagccacagacgctgagttctttctactcatctagccgcccaaccacagccagccagaggtctccttcaaagcacgggggcccatctgccccaggggccctgcaaccactgacctcaggctctgcagggcctgctcaaccagggagtgtggcaggggctgggccaggccccactgagggcttcacagagaagaatgtgcctgagagttccccacattccccctgtgagggtcttccatctgaggcagctttgaccccaaggccagaagggaaggttcctagccgcttggcacttggcagtcgtggaggctataatggacggggatgggggtccccaggacggcctaagaagaagcacacaggcatggccagcattgacagcagtgcccctgaaacaacatcggatagttcccccaccttaagccggagaccacttcgagggggctgggcccccacctcctggggtcgaggtcaggacagtgacagcattagcagctcttcttcggactccctgggctcctcatcctccagtggaagtcgccgggccagtgccagtggaggagcccgggcgaagactgttgaagttggcaggtacaagggccgccgccccgagagtcatgcccctcatgtacccaatcagccatcagaggcagctgcacacttctacttcgagctggcgaagacagtgctgatcaaggcagggggcaacagcagcacttccattttcacacatccatcttcctcagggggccaccagggtcctcaccgcaacctgcacctttgcgccttcgagattgggctttatgcccttggcctgcacaactttgtttctcccaactggctctcacgtacttattcttcccacgtttcctggattacaggccaggccatggagataggcagcgcagccctgactatactggtagaatgctgggatgggcacctgacaccccctgaggttgcatccctggctgacagggcatcacgggcaagagactccaatatggtgagggcggcagcagagctggccctgagctgcctgcctcacgcccatgcattgaaccctaatgagatccagcgggccctggtgcagtgcaaggaacaggacaacctgatgttggagaaggcctgcatggcagtggaagaggcagctaagggtgggggcgtgtaccctgaagtgttgtttgaggttgctcaccagtggttctggctatatgagcaaactgcaggtggctcatccacagcccgtgaaggggctacaagctgtagtgccagtgggatcagggcaggtggggaagctgggcggggtatgcctgagggtagagggggcccagggactgagccggttacagtggcagcggcagcagtgacagcagcagccacagtggtgcccgtcatatcggtggggtctagtttatacccgggtccaggactggggcatggccactcccctggcctgcacccctacactgctctacagccccacctgccctgtagccctcagtatctcactcacccagctcaccctgcccaccccatgcctcacatgccccggcctgccgtcttccctgtgcccagctctgcatacccacagggtgtgcatcctgcattcctaggggctcagtacccttattcagtgactcctccctcacttgctgccactgctgtgtctttccccgttccttccatggcacccatcacagtacatccctaccacacagagccagggcttccactgcccaccagtgtggcctgtgagttgtggggccagggaacagtgagcagtgtccatccagcatccacgtttccagccatccaaggtgcctcactgcctgccctgaccacacagcccagccctctggtgagcggaggttttccaccgcccgaggaggagacacacagtcagccagtcaatccccacagcctgcaccacctgcatgctgcctaccgtgtcggaatgctggcactggagatgctgggtcgccgggcacacaacgatcaccccaacaacttctcccgctcccccccctacactgatgatgtcaaatggttgctggggctggcagcaaagctgggagtgaactacgtgcaccagttctgtgtgggggcagccaagggggtgctgagcccgtttgtgctgcaggagatcgtcatggagacgctgcagcggctgagtcccgctcatgcccacaaccacctgcgtgccccggccttccaccaactggtgcagcgctgccagcaggcatacatgcagtacatccaccaccgcttgattcacctgactcctgcggactacgacgactttgtgaatgcgatccggagtgcccgcagcgccttctgcctgacgcccatgggcatgatgcagttcaacgacatcctacagaacctcaagcgcagcaaacagaccaaggagctgtggcagcgggtctcactcgagatggccaccttctccccctgagtctttcacccttagggtcctatacagggacccaggcctgtggctatgggggcccctcacacagggggagtgaaacttggctggacagatcatcctcactcagttccctggtagcacagactgacagctgctcttgggctatagcttggggccaagatgtctcacaccctagaagcctagggctgggggagacagccctgtctgggagggggcgttgggtggcctctggtatttatttggcatttataaatatataaactccttttttactcta

SEQ ID NO: 354173 - DNA, 5689 bp, Homo sapiens
cactctgttccttcatctccgaggccgagagcctctgccagaactggcggggatggcgcaaacagtcagcggggcccaattcccccactggcggcggtggcggaggtggcagtggcggtaccagaatgcgagatggactggtgatcccattggtggagctgtcagcaaagcaggtggcatttcatatcccatttgaagtggtggagaaagtttacccaccagtgcctgagcagctacagctccgaattgctttttggagcttccctgagaatgaagaggacattcggctgtattcgtgcctggccaatggcagtgcggatgagtttcagcgaggggatcagctcttccgcatgcgggctgtgaaggacccattgcagatagggttccacctgagtgctacagtggtgccacctcagatggtccctcctaaaggggcctacaacgtggctgtgatgtttgaccgctgccgggtcacttcctgcagctgtacctgtggggctggggccaaatggtgcacccacgtcgtggcactctgtctcttccgcatccacaacgcttctgcagtctgcctgcgagccccagtctcagagtccctgtcccggctacagagggaccagctgcaaaagtttgctcagtacctcatcagtgagctccctcagcaggtgggtgaggtcggcaccccctcctgcaattagctccgggccaggccgcataacagccttcctgttaggcccaggcctccatgggttcacctaggccgtgttctgcctgcctccgtctctttctccctcagatcctccccacagctcagcgtctcctggacgaactcctgtcttcccagtcaacagccatcaatacagtgtgtggagctccggaccccacagcagggccctcagcatcggaccagagtacttggtatctggatgaatcgacactcactgacaacatcaaaaagacactgcacaagttctgtggcccctcccctgtggtcttcagtgatgtgaactccatgtatctgtcttccacggagccgccagccgctgctgaatgggcatgtctgctgcgccctctgaggggccgtgagccagagggcgtctggaacctgctaagcattgtgcgggagatgttcaagcggagggacagcaatgctgcccccttgttggaaatcctcactgaccagtgcctcacctatgaacagataacaggttggtggtatagcgtacgtacctcagcctcacacagcagtgccagtgggcacacgggccgtagcaacgggcagtcagaggtggcagcccatgcctgtgccagcatgtgtgacgagatggtcacactgtggaggctggccgtgctggaccctgcactcagcccccagcggcgccgggaactgtgtacgcagctgcggcagtggcaactgaaggtgattgagaacgtcaagcggggccaacacaagaagacgctggagcggctcttccccggcttccggccagcggtggaggcctgctacttcaactgggaagaggcctacccacttcctggtgtcacctacagcggcactgacaggaagctggcactgtgctgggcccgggccctgccctctcggccaggtgcctcccgctctgggggcctggaggaatcccgggaccggccccgaccccttcctactgagccagctgtgcggcccaaggagcctgggaccaagcgaaagggcttgggtgagggggtcccctcatcacagcggggtccccgccgcctctcagctgaagggggagataaagctctacataagatgggtccaggtgggggcaaagccaaggcactgggtggggctggcagtgggagcaagggctcagcaggtggcggaagcaagcgacggctgagcagcgaagacagctccctggagccagacctggccgagatgagcctggatgacagcagcctggccctgggcgcagaggccagcaccttcgggggattccctgagagccctccaccctgtcctctccacggtggctcccgaggcccttccactttccttcctgagcccccagatacttatgaagaagatggtggtgtgtacttctcggaagggcctgagcctcccacagcctctgttggcccccctggcctactgcctggggatgtctgtacccaggacgacctcccttctacagatgagagtggcaatgggcttcccaaaaccaaagaggcagcccctgcagttggagaggaggatgatgactaccaggcgtactatctgaatgcccaggatggggctgggggcgaggaagagaaggccgagggcggggctggggaggagcacgacctgtttgctgggctgaagccactggaacaggagagtcgcatggaggtactgtttgcctgtgctgaggccctgcatgcgcatggctatagcagtgaggcctcccgtctcactgtggagcttgcccaggatctgctagccaacccacccgacctcaaggtagagccgccccctgccaagggcaagaagaacaaggtatccacgagccgtcagacctgggtggctaccaacaccctgagcaaggcggccttcctgttgacagtgctaagtgagcgtccagagcaccacaacctggccttccgagttggcatgtttgccttggagctacagaggcctccagcttctaccaaggccttggaggtgaagctggcataccaggagtctgaggtggctgccctgctcaagaagatccctctgggtccaagtgagatgagtaccatgcggtgccgggcagaggaacttcgggaggggacactctgtgactatcggcctgtgttgcctctcatgctggccagtttcatctttgacgttctctgtgctccagggttcccggcccccaagtcgcaactggaacagcgagacacctggggatgaggagcttggatttgaagcagcagttgctgccttgggcatgaagacaacagtgagcgaggcagaacatcccctcttatgtgaaggcacacgtcgggagaagggtgacctggcattagcactaatgatcacttacaaggacgaccaggccaagcttaagaagatcttagacaaactcttggaccgagagagccagacacataagccacagacgctgagttctttctactcatctagccgcccaaccacagccagccagaggtctccttcaaagcacgggggcccatctgccccaggggccctgcaaccactgacctcaggctctgcagggcctgctcaaccagggagtgtggcaggggctgggccaggccccactgagggcttcacagagaagaatgtgcctgagagttccccacattccccctgtgagggtcttccatctgaggcagctttgaccccaaggccagaagggaaggttcctagccgcttggcacttggcagtcgtggaggctataatggacggggatgggggtccccaggacggcctaagaagaagcacacaggcatggccagcattgacagcagtgcccctgaaacaacatcggatagttcccccaccttaagccggagaccacttcgagggggctgggcccccacctcctggggtcgaggtcaggacagtgacagcattagcagctcttcttcggactccctgggctcctcatcctccagtggaagtcgccgggccagtgccagtggaggagcccgggcgaagactgttgaagttggcagggggccaccagggtcctcaccgcaacctgcacctttgcgccttcgagattgggctttatgcccttggcctgcacaactttgtttctcccaactggctctcacgtacttattcttcccacgtttcctggattacaggccaggccatggagataggcagcgcagccctgactatactggtagaatgctgggatgggcacctgacaccccctgaggttgcatccctggctgacagggcatcacgggcaagagactccaatatggtgagggcggcagcagagctggccctgagctgcctgcctcacgcccatgcattgaaccctaatgagatccagcgggccctggtgcagtgcaaggaacaggacaacctgatgttggagaaggcctgcatggcagtggaagaggcagctaagggtgggggcgtgtaccctgaagtgttgtttgaggttgctcaccagtggttctggctatatgagcaaactgcaggtggctcatccacagcccgtgaaggggctacaagctgtagtgccagtgggatcagggcaggtggggaagctgggcggggtatgcctgagggtagagggggcccagggactgagccggttacagtggcagcggcagcagtgacagcagcagccacagtggtgcccgtcatatcggtggggtctagtttatacccgggtccaggactggggcatggccactcccctggcctgcacccctacactgctctacagccccacctgccctgtagccctcagtatctcactcacccagctcaccctgcccaccccatgcctcacatgccccggcctgccgtcttccctgtgcccagctctgcatacccacagggtgtgcatcctgcattcctaggggctcagtacccttattcagtgactcctccctcacttgctgccactgctgtgtctttccccgttccttccatggcacccatcacagtacatccctaccacacagagccagggcttccactgcccaccagtgtggcctgtgagttgtggggccagggaacagtgagcagtgtccatccagcatccacgtttccagccatccaaggtgcctcactgcctgccctgaccacacagcccagccctctggtgagcggaggttttccaccgcccgaggaggagacacacagtcagccagtcaatccccacagcctgcaccacctgcatgctgcctaccgtgtcggaatgctggcactggagatgctgggtcgccgggcacacaacgatcaccccaacaacttctcccgctcccccccctacactgatgatgtcaaatggttgctggggctggcagcaaagctgggagtgaactacgtgcaccagttctgtgtgggggcagccaagggggtgctgagcccgtttgtgctgcaggagatcgtcatggagacgctgcagcggctgagtcccgctcatgcccacaaccacctgcgtgccccggccttccaccaactggtgcagcgctgccagcaggcatacatgcagtacatccaccaccgcttgattcacctgactcctgcggactacgacgactttgtgaatgcgatccggagtgcccgcagcgccttctgcctgacgcccatgggcatgatgcagttcaacgacatcctacagaacctcaagcgcagcaaacagaccaaggagctgtggcagcgggtctcactcgagatggccaccttctccccctgagtctttcacccttagggtcctatacagggacccaggcctgtggctatgggggcccctcacacagggggagtgaaacttggctggacagatcatcctcactcagttccctggtagcacagactgacagctgctcttgggctatagcttggggccaagatgtctcacaccctagaagcctagggctgggggagacagccctgtctgggagggggcgttgggtggcctctggtatttatttggcatttataaatatataaactccttttttactcta

SEQ ID NO: 354174 - DNA, 5295 bp, Homo sapiens
  misc_feature (13)..(13): n is a, c, g, or t
agtgacccggcancggtcaaacatcacagccagtctcagagtccctgtcccggctacagagggaccagctgcaaaagtttgctcagtacctcatcagtgagctccctcagcaggtgggtgaggtcggcaccccctcctgcaattagctccgggccaggccgcataacagccttcctgttaggcccaggcctccatgggttcacctaggccgtgttctgcctgcctccgtctctttctccctcagatcctccccacagctcagcgtctcctggacgaactcctgtcttcccagtcaacagccatcaatacagtgtgtggagctccggaccccacagcagggccctcagcatcggaccagagtacttggtatctggatgaatcgacactcactgacaacatcaaaaagacactgcacaagttctgtggcccctcccctgtggtcttcagtgatgtgaactccatgtatctgtcttccacggagccgccagccgctgctgaatgggcatgtctgctgcgccctctgaggggccgtgagccagagggcgtctggaacctgctaagcattgtgcgggagatgttcaagcggagggacagcaatgctgcccccttgttggaaatcctcactgaccagtgcctcacctatgaacagataacaggttggtggtatagcgtacgtacctcagcctcacacagcagtgccagtgggcacacgggccgtagcaacgggcagtcagaggtggcagcccatgcctgtgccagcatgtgtgacgagatggtcacactgtggaggctggccgtgctggaccctgcactcagcccccagcggcgccgggaactgtgtacgcagctgcggcagtggcaactgaaggtgattgagaacgtcaagcggggccaacacaagaagacgctggagcggctcttccccggcttccggccagcggtggaggcctgctacttcaactgggaagaggcctacccacttcctggtgtcacctacagcggcactgacaggaagctggcactgtgctgggcccgggccctgccctctcggccaggtgcctcccgctctgggggcctggaggaatcccgggaccggccccgaccccttcctactgagccagctgtgcggcccaaggagcctgggaccaagcgaaagggcttgggtgagggggtcccctcatcacagcggggtccccgccgcctctcagctgaagggggagataaagctctacataagatgggtccaggtgggggcaaagccaaggcactgggtggggctggcagtgggagcaagggctcagcaggtggcggaagcaagcgacggctgagcagcgaagacagctccctggagccagacctggccgagatgagcctggatgacagcagcctggccctgggcgcagaggccagcaccttcgggggattccctgagagccctccaccctgtcctctccacggtggctcccgaggcccttccactttccttcctgagcccccagatacttatgaagaagatggtggtgtgtacttctcggaagggcctgagcctcccacagcctctgttggcccccctggcctactgcctggggatgtctgtacccaggacgacctcccttctacagatgagagtggcaatgggcttcccaaaaccaaagaggcagcccctgcagttggagaggaggatgatgactaccaggcgtactatctgaatgcccaggatggggctgggggcgaggaagagaaggccgagggcggggctggggaggagcacgacctgtttgctgggctgaagccactggaacaggagagtcgcatggaggtactgtttgcctgtgctgaggccctgcatgcgcatggctatagcagtgaggcctcccgtctcactgtggagcttgcccaggatctgctagccaacccacccgacctcaaggtagagccgccccctgccaagggcaagaagaacaaggtatccacgagccgtcagacctgggtggctaccaacaccctgagcaaggcggccttcctgttgacagtgctaagtgagcgtccagagcaccacaacctggccttccgagttggcatgtttgccttggagctacagaggcctccagcttctaccaaggccttggaggtgaagctggcataccaggagtctgaggtggctgccctgctcaagaagatccctctgggtccaagtgagatgagtaccatgcggtgccgggcagaggaacttcgggaggggacactctgtgactatcggcctgtgttgcctctcatgctggccagtttcatctttgacgttctctgtgctccagggttcccggcccccaagtcgcaactggaacagcgagacacctggggatgaggagcttggatttgaagcagcagttgctgccttgggcatgaagacaacagtgagcgaggcagaacatcccctcttatgtgaaggcacacgtcgggagaagggtgacctggcattagcactaatgatcacttacaaggacgaccaggccaagcttaagaagatcttagacaaactcttggaccgagagagccagacacataagccacagacgctgagttctttctactcatctagccgcccaaccacagccagccagaggtctccttcaaagcacgggggcccatctgccccaggggccctgcaaccactgacctcaggctctgcagggcctgctcaaccagggagtgtggcaggggctgggccaggccccactgagggcttcacagagaagaatgtgcctgagagttccccacattccccctgtgagggtcttccatctgaggcagctttgaccccaaggccagaagggaaggttcctagccgcttggcacttggcagtcgtggaggctataatggacggggatgggggtccccaggacggcctaagaagaagcacacaggcatggccagcattgacagcagtgcccctgaaacaacatcggatagttcccccaccttaagccggagaccacttcgagggggctgggcccccacctcctggggtcgaggtcaggacagtgacagcattagcagctcttcttcggactccctgggctcctcatcctccagtggaagtcgccgggccagtgccagtggaggagcccgggcgaagactgttgaagttggcaggtacaagggccgccgccccgagagtcatgcccctcatgtacccaatcagccatcagaggcagctgcacacttctacttcgagctggcgaagacagtgctgatcaaggcagggggcaacagcagcacttccattttcacacatccatcttcctcagggggccaccagggtcctcaccgcaacctgcacctttgcgccttcgagattgggctttatgcccttggcctgcacaactttgtttctcccaactggctctcacgtacttattcttcccacgtttcctggattacaggccaggccatggagataggcagcgcagccctgactatactggtagaatgctgggatgggcacctgacaccccctgaggttgcatccctggctgacagggcatcacgggcaagagactccaatatggtgagggcggcagcagagctggccctgagctgcctgcctcacgcccatgcattgaaccctaatgagatccagcgggccctggtgcagtgcaaggaacaggacaacctgatgttggagaaggcctgcatggcagtggaagaggcagctaagggtgggggcgtgtaccctgaagtgttgtttgaggttgctcaccagtggttctggctatatgagcaaactgcaggtggctcatccacagcccgtgaaggggctacaagctgtagtgccagtgggatcagggcaggtggggaagctgggcggggtatgcctgagggtagagggggcccagggactgagccggttacagtggcagcggcagcagtgacagcagcagccacagtggtgcccgtcatatcggtggggtctagtttatacccgggtccaggactggggcatggccactcccctggcctgcacccctacactgctctacagccccacctgccctgtagccctcagtatctcactcacccagctcaccctgcccaccccatgcctcacatgccccggcctgccgtcttccctgtgcccagctctgcatacccacagggtgtgcatcctgcattcctaggggctcagtacccttattcagtgactcctccctcacttgctgccactgctgtgtctttccccgttccttccatggcacccatcacagtacatccctaccacacagagccagggcttccactgcccaccagtgtggcctgtgagttgtggggccagggaacagtgagcagtgtccatccagcatccacgtttccagccatccaaggtgcctcactgcctgccctgaccacacagcccagccctctggtgagcggaggttttccaccgcccgaggaggagacacacagtcagccagtcaatccccacagcctgcaccacctgcatgctgcctaccgtgtcggaatgctggcactggagatgctgggtcgccgggcacacaacgatcaccccaacaacttctcccgctcccccccctacactgatgatgtcaaatggttgctggggctggcagcaaagctgggagtgaactacgtgcaccagttctgtgtgggggcagccaagggggtgctgagcccgtttgtgctgcaggagatcgtcatggagacgctgcagcggctgagtcccgctcatgcccacaaccacctgcgtgccccggccttccaccaactggtgcagcgctgccagcaggcatacatgcagtacatccaccaccgcttgattcacctgactcctgcggactacgacgactttgtgaatgcgatccggagtgcccgcagcgccttctgcctgacgcccatgggcatgatgcagttcaacgacatcctacagaacctcaagcgcagcaaacagaccaaggagctgtggcagcgggtctcactcgagatggccaccttctccccctgagtctttcacccttagggtcctatacagggacccaggcctgtggctatgggggcccctcacacagggggagtgaaacttggctggacagatcatcctcactcagttccctggtagcacagactgacagctgctcttgggctatagcttggggccaagatgtctcacaccctagaagcctagggctgggggagacagccctgtctgggagggggcgttgggtggcctctggtatttatttggcatttataaatatataaactccttttttactcta

SEQ ID NO: 354175 - DNA, 6323 bp, Homo sapiens
cactctgttccttcatctccgaggccgagagcctctgccagaactggcggggatggcgcaaacagtcagcggggcccaattcccccactggcggcggtggcggaggtggcagtggcggtaccagaatgcgagatggactggtgatcccattggtggagctgtcagcaaagcaggtggcatttcatatcccatttgaagtggtggagaaagtttacccaccagtgcctgagcagctacagctccgaattgctttttggagcttccctgagaatgaagaggacattcggctgtattcgtgcctggccaatggcagtgcggatgagtttcagcgaggggatcagctcttccgcatgcgggctgtgaaggacccattgcagatagggttccacctgagtgctacagtggtgccacctcagatggtccctcctaaaggggcctacaacgtggctgtgatgtttgaccgctgccgggtcacttcctgcagctgtacctgtggggctggggccaaatggtgcacccacgtcgtggcactctgtctcttccgcatccacaacgcttctgcagtctgcctgcgagccccagtctcagagtccctgtcccggctacagagggaccagctgcaaaagtttgctcagtacctcatcagtgagctccctcagcaggtgggtgaggtcggcaccccctcctgcaattagctccgggccaggccgcataacagccttcctgttaggcccaggcctccatgggttcacctaggccgtgttctgcctgcctccgtctctttctccctcagatcctccccacagctcagcgtctcctggacgaactcctgtcttcccagtcaacagccatcaatacagtgtgtggagctccggaccccacagcagggccctcagcatcggaccagagtacttggtatctggatgaatcgacactcactgacaacatcaaaaagacactgcacaagttctgtggcccctcccctgtggtcttcagtgatgtgaactccatgtatctgtcttccacggagccgccagccgctgctgaatgggcatgtctgctgcgccctctgaggggccgtgagccagagggcgtctggaacctgctaagcattgtgcgggagatgttcaagcggagggacagcaatgctgcccccttgttggaaatcctcactgaccagtgcctcacctatgaacagataacaggttggtggtatagcgtacgtacctcagcctcacacagcagtgccagtgggcacacgggccgtagcaacgggcagtcagaggtggcagcccatgcctgtgccagcatgtgtgacgagatggtcacactgtggaggctggccgtgctggaccctgcactcagcccccagcggcgccgggaactgtgtacgcagctgcggcagtggcaactgaaggtgattgagaacgtcaagcggggccaacacaagaagacgctggagcggctcttccccggcttccggccagcggtggaggcctgctacttcaactgggaagaggcctacccacttcctggtgtcacctacagcggcactgacaggaagctggcactgtgctgggcccgggccctgccctctcggccaggtgcctcccgctctgggggcctggaggaatcccgggaccggccccgaccccttcctactgagccagctgtgcggcccaaggagcctgggaccaagcgaaagggcttgggtgagggggtcccctcatcacagcggggtccccgccgcctctcagctgaagggggagataaagctctacataagatgggtccaggtgggggcaaagccaaggcactgggtggggctggcagtgggagcaagggctcagcaggtggcggaagcaagcgacggctgagcagcgaagacagctccctggagccagacctggccgagatgagcctggatgacagcagcctggccctgggcgcagaggccagcaccttcgggggattccctgagagccctccaccctgtcctctccacggtggctcccgaggcccttccactttccttcctgagcccccagatacttatgaagaagatggtggtgtgtacttctcggaagggcctgagcctcccacagcctctgttggcccccctggcctactgcctggggatgtctgtacccaggacgacctcccttctacagatgagagtggcaatgggcttcccaaaaccaaagaggcagcccctgcagttggagaggaggatgatgactaccaggcgtactatctgaatgcccaggatggggctgggggcgaggaagagaaggccgagggcggggctggggaggagcacgacctgtttgctgggctgaagccactggaacaggagagtcgcatggaggtactgtttgcctgtgctgaggccctgcatgcgcatggctatagcagtgaggcctcccgtctcactgtggagcttgcccaggatctgctagccaacccacccgacctcaagggcaagaagaacaaggtatccacgagccgtcagacctgggtggctaccaacaccctgagcaaggcggccttcctgttgacagtgctaagtgagcgtccagagcaccacaacctggccttccgagttggcatgtttgccttggagctacagaggcctccagcttctaccaaggccttggaggtgaagctggcataccaggagtctgaggtggctgccctgctcaagaagatccctctgggtccaagtgagatgagtaccatgcggtgccgggcagaggaacttcgggaggggacactctgtgactatcggcctgtgttgcctctcatgctggccagtttcatctttgacgttctctgtgctccagggttcccggcccccaagtcgcaactggaacagcgagacacctggggatgaggagcttggatttgaagcagcagttgctgccttgggcatgaagacaacagtgagcgaggcagaacatcccctcttatgtgaaggcacacgtcgggagaagggtgacctggcattagcactaatgatcacttacaaggacgaccaggccaagcttaagaagatcttagacaaactcttggaccgagagagccagacacataagccacagacgctgagttctttctactcatctagccgcccaaccacagccagccagaggtctccttcaaagcacgggggcccatctgccccaggggccctgcaaccactgacctcaggctctgcagggcctgctcaaccagggagtgtggcaggggctgggccaggccccactgagggcttcacagagaagaatgtgcctgagagttccccacattccccctgtgagggtcttccatctgaggcagctttgaccccaaggccagaagggaaggttcctagccgcttggcacttggcagtcgtggaggctataatggacggggatgggggtccccaggacggcctaagaagaagcacacaggcatggccagcattgacagcagtgcccctgaaacaacatcggatagttcccccaccttaagccggagaccacttcgagggggctgggcccccacctcctggggtcgaggtcaggacagtgacagcattagcagctcttcttcggactccctgggctcctcatcctccagtggaagtcgccgggccagtgccagtggaggagcccgggcgaagactgttgaagttggcaggtacaagggccgccgccccgagagtcatgcccctcatgtacccaatcagccatcagaggcagctgcacacttctacttcgagctggcgaagacagtgctgatcaaggcagggggcaacagcagcacttccattttcacacatccatcttcctcagggggccaccagggtcctcaccgcaacctgcacctttgcgccttcgagattgggctttatgcccttggcctgcacaactttgtttctcccaactggctctcacgtacttattcttcccacgtttcctggattacaggccaggccatggagataggcagcgcagccctgactatactggtagaatgctgggatgggcacctgacaccccctgaggttgcatccctggctgacagggcatcacgggcaagagactccaatatggtgagggcggcagcagagctggccctgagctgcctgcctcacgcccatgcattgaaccctaatgagatccagcgggccctggtgcagtgcaaggaacaggacaacctgatgttggagaaggcctgcatggcagtggaagaggcagctaagggtgggggcgtgtaccctgaagtgttgtttgaggttgctcaccagtggttctggctatatgagcaaactgcaggtggctcatccacagcccgtgaaggggctacaagctgtagtgccagtgggatcagggcaggtggggaagctgggcggggtatgcctgagggtagagggggcccagggactgagccggttacagtggcagcggcagcagtgacagcagcagccacagtggtgcccgtcatatcggtggggtctagtttatacccgggtccaggactggggcatggccactcccctggcctgcacccctacactgctctacagccccacctgccctgtagccctcagtatctcactcacccagctcaccctgcccaccccatgcctcacatgccccggcctgccgtcttccctgtgcccagctctgcatacccacaggtgagaccagtgttctgctggggggtaaggcatgggaaaatactgggaattcatagggggttggagtgggtactctgggagtataattggtcagtcggagagtcctggtgaggtggtgggagtctgggggacccagcccaactaaaataagaaatgacggccgggcatggtggctcatgcctgtaatcccagcactttgagaggccgatgtgggtggatcacttgaggtcaggagttcgagaccagcctggccaacatggggaaaccccgtctctactaaaaattagctgagtgcacgcctgtaatcccagcttcttgggaggctgagatgggaatcacttgaacctgggaggcagaggttgcagtgagccgatatcgtgccactgcactccagcctggaggacagagcgagactctatctatctcaaaaaaaacatgtcaggatagcagcttgtgggggtgaagcacgacagcaacatcctaatcaagtttggcatcttcccctttcttctccctgcccctagggtgtgcatcctgcattcctaggggctcagtacccttattcagtgactcctccctcacttgctgccactgctgtgtctttccccgttccttccatggcacccatcacagtacatccctaccacacagagccagggcttccactgcccaccagtgtggccttgagcagtgtccatccagcatccacgtttccagccatccaaggtgcctcactgcctgccctgaccacacagcccagccctctggtgagcggaggttttccaccgcccgaggaggagacacacagtcagccagtcaatccccacagcctgcaccacctgcatgctgcctaccgtgtcggaatgctggcactggagatgctgggtcgccgggcacacaacgatcaccccaacaacttctcccgctcccccccctacactgatgatgtcaaatggttgctggggctggcagcaaagctgggagtgaactacgtgcaccagttctgtgtgggggcagccaagggggtgctgagcccgtttgtgctgcaggagatcgtcatggagacgctgcagcggctgagtcccgctcatgcccacaaccacctgcgtgccccggccttccaccaactggtgcagcgctgccagcaggcatacatgcagtacatccaccaccgcttgattcacctgactcctgcggactacgacgactttgtgaatgcgatccggagtgcccgcagcgccttctgcctgacgcccatgggcatgatgcagttcaacgacatcctacagaacctcaagcgcagcaaacagaccaaggagctgtggcagcgggtctcactcgagatggccaccttctccccctgagtctttcacccttagggtcctatacagggacccaggcctgtggctatgggggcccctcacacagggggagtgaaacttggctggacagatcatcctcactcagttccctggtagcacagactgacagctgctcttgggctatagcttggggccaagatgtctcacaccctagaagcctagggctgggggagacagccctgtctgggagggggcgttgggtggcctctggtatttatttggcatttataaatatataaactccttttttactcta

SEQ ID NO: 354176 - DNA, 6255 bp, Homo sapiens
cactctgttccttcatctccgaggccgagagcctctgccagaactggcggggatggcgcaaacagtcagcggggcccaattcccccactggcggcggtggcggaggtggcagtggcggtaccagaatgcgagatggactggtgatcccattggtggagctgtcagcaaagcaggtggcatttcatatcccatttgaagtggtggagaaagtttacccaccagtgcctgagcagctacagctccgaattgctttttggagcttccctgagaatgaagaggacattcggctgtattcgtgcctggccaatggcagtgcggatgagtttcagcgaggggatcagctcttccgcatgcgggctgtgaaggacccattgcagatagggttccacctgagtgctacagtggtgccacctcagatggtccctcctaaaggggcctacaacgtggctgtgatgtttgaccgctgccgggtcacttcctgcagctgtacctgtggggctggggccaaatggtgcacccacgtcgtggcactctgtctcttccgcatccacaacgcttctgcagtctgcctgcgagccccagtctcagagtccctgtcccggctacagagggaccagctgcaaaagtttgctcagtacctcatcagtgagctccctcagcaggtgggtgaggtcggcaccccctcctgcaattagctccgggccaggccgcataacagccttcctgttaggcccaggcctccatgggttcacctaggccgtgttctgcctgcctccgtctctttctccctcagatcctccccacagctcagcgtctcctggacgaactcctgtcttcccagtcaacagccatcaatacagtgtgtggagctccggaccccacagcagggccctcagcatcggaccagagtacttggtatctggatgaatcgacactcactgacaacatcaaaaagacactgcacaagttctgtggcccctcccctgtggtcttcagtgatgtgaactccatgtatctgtcttccacggagccgccagccgctgctgaatgggcatgtctgctgcgccctctgaggggccgtgagccagagggcgtctggaacctgctaagcattgtgcgggagatgttcaagcggagggacagcaatgctgcccccttgttggaaatcctcactgaccagtgcctcacctatgaacagataacaggttggtggtatagcgtacgtacctcagcctcacacagcagtgccagtgggcacacgggccgtagcaacgggcagtcagaggtggcagcccatgcctgtgccagcatgtgtgacgagatggtcacactgtggaggctggccgtgctggaccctgcactcagcccccagcggcgccgggaactgtgtacgcagctgcggcagtggcaactgaaggtgattgagaacgtcaagcggggccaacacaagaagacgctggagcggctcttccccggcttccggccagcggtggaggcctgctacttcaactgggaagaggcctacccacttcctggtgtcacctacagcggcactgacaggaagctggcactgtgctgggcccgggccctgccctctcggccaggtgcctcccgctctgggggcctggaggaatcccgggaccggccccgaccccttcctactgagccagctgtgcggcccaaggagcctgggaccaagcgaaagggcttgggtgagggggtcccctcatcacagcggggtccccgccgcctctcagctgaagggggagataaagctctacataagatgggtccaggtgggggcaaagccaaggcactgggtggggctggcagtgggagcaagggctcagcaggtggcggaagcaagcgacggctgagcagcgaagacagctccctggagccagacctggccgagatgagcctggatgacagcagcctggccctgggcgcagaggccagcaccttcgggggattccctgagagccctccaccctgtcctctccacggtggctcccgaggcccttccactttccttcctgagcccccagatacttatgaagaagatggtggtgtgtacttctcggaagggcctgagcctcccacagcctctgttggcccccctggcctactgcctggggatgtctgtacccaggacgacctcccttctacagatgagagtggcaatgggcttcccaaaaccaaagaggcagcccctgcagttggagaggaggatgatgactaccaggcgtactatctgaatgcccaggatggggctgggggcgaggaagagaaggccgagggcggggctggggaggagcacgacctgtttgctgggctgaagccactggaacaggagagtcgcatggaggtactgtttgcctgtgctgaggccctgcatgcgcatggctatagcagtgaggcctcccgtctcactgtggagcttgcccaggatctgctagccaacccacccgacctcaagggcaagaagaacaaggtatccacgagccgtcagacctgggtggctaccaacaccctgagcaaggcggccttcctgttgacagtgctaagtgagcgtccagagcaccacaacctggccttccgagttggcatgtttgccttggagctacagaggcctccagcttctaccaaggccttggaggtgaagctggcataccaggagtctgaggtggctgccctgctcaagaagatccctctgggtccaagtgagatgagtaccatgcggtgccgggcagaggaacttcgggaggggacactctgtgactatcggcctgtgttgcctctcatgctggccagtttcatctttgacgttctctgtgctccagggttcccggcccccaagtcgcaactggaacagcgagacacctggggatgaggagcttggatttgaagcagcagttgctgccttgggcatgaagacaacagtgagcgaggcagaacatcccctcttatgtgaaggcacacgtcgggagaagggtgacctggcattagcactaatgatcacttacaaggacgaccaggccaagcttaagaagatcttagacaaactcttggaccgagagagccagacacataagccacagacgctgagttctttctactcatctagccgcccaaccacagccagccagaggtctccttcaaagcacgggggcccatctgccccaggggccctgcaaccactgacctcaggctctgcagggcctgctcaaccagggagtgtggcaggggctgggccaggccccactgagggcttcacagagaagaatgtgcctgagagttccccacattccccctgtgagggtcttccatctgaggcagctttgaccccaaggccagaagggaaggttcctagccgcttggcacttggcagtcgtggaggctataatggacggggatgggggtccccaggacggcctaagaagaagcacacaggcatggccagcattgacagcagtgcccctgaaacaacatcggatagttcccccaccttaagccggagaccacttcgagggggctgggcccccacctcctggggtcgaggtcaggacagtgacagcattagcagctcttcttcggactccctgggctcctcatcctccagtggaagtcgccgggccagtgccagtggaggagcccgggcgaagactgttgaagttggcaggtacaagggccgccgccccgagagtcatgcccctcatgtacccaatcagccatcagaggcagctgcacacttctacttcgagctggcgaagacagtgctgatcaaggcagggggcaacagcagcacttccattttcacacatccatcttcctcagggggccaccagggtcctcaccgcaacctgcacctttgcgccttcgagattgggctttatgcccttggcctgcacaactttgtttctcccaactggctctcacgtacttattcttcccacgtttcctggattacaggccaggccatggagataggcagcgcagccctgactatactggtagaatgctgggatgggcacctgacaccccctgaggttgcatccctggctgacagggcatcacgggcaagagactccaatatggtgagggcggcagcagagctggccctgagctgcctgcctcacgcccatgcattgaaccctaatgagatccagcgggccctggtgcagtgcaaggaacaggacaacctgatgttggagaaggcctgcatggcagtggaagaggcagctaagggtgggggcgtgtaccctgaagtgttgtttgaggttgctcaccagtggttctggctatatgagcaaactgcaggtggctcatccacagcccgtgaaggggctacaagctgtagtgccagtgggatcagggcaggtggggaagctgggcggggtatgcctgagggtagagggggcccagggactgagccggttacagtggcagcggcagcagtgacagcagcagccacagtggtgcccgtcatatcggtggggtctagtttatacccgggtccaggactggggcatggccactcccctggcctgcacccctacactgctctacagccccacctgccctgtagccctcagtatctcactcacccagctcaccctgcccaccccatgcctcacatgccccggcctgccgtcttccctgtgcccagctctgcatacccacaggtgagaccagtgttctgctggggggtaaggcatgggaaaatactgggaattcatagggggttggagtgggtactctgggagtataattggtcagtcggagagtcctggtgaggtggtgggagtctgggggacccagcccaactaaaataagaaatgacggccgggcatggtggctcatgcctgtaatcccagcactttgagaggccgatgtgggtggatcacttgaggtcaggagttcgagaccagcctggccaacatggggaaaccccgtctctactaaaaattagctgagtgcacgcctgtaatcccagcttcttgggaggctgagatgggaatcacttgaacctgggaggcagaggttgcagtgagccgatatcgtgccactgcactccagcctggaggacagagcgagactctatctatctcaaaaaaaacatgtcaggatagcagcttgtgggggtgaagcacgacagcaacatcctaatcaagtttggcatcttcccctttcttctccctgcccctagggtgtgcatcctgcattcctaggggctcagtacccttattcagtgactcctccctcacttgctgccactgctgtgtctttccccgttccttccatggcacccatcacagtacatccctaccacacagagccagggcttccactgcccaccagtgtggccttgagcagtgtccatccagcatccacgtttccagccatccaaggtgcctcactgcctgccctgaccacacagcccagccctctggtgagcggaggttttccaccgcccgaggaggagacacacagtcagccagtcaatccccacagcctgcaccacctgcatgctgcctaccgtgtcggaatgctggcactggagatgctgggtcgccgggcacacaacgatcaccccaacaacttctcccgctcccccccctacactgatgatgtcaaatggttgctggggctggcagcaaagctgggagatcgtcatggagacgctgcagcggctgagtcccgctcatgcccacaaccacctgcgtgccccggccttccaccaactggtgcagcgctgccagcaggcatacatgcagtacatccaccaccgcttgattcacctgactcctgcggactacgacgactttgtgaatgcgatccggagtgcccgcagcgccttctgcctgacgcccatgggcatgatgcagttcaacgacatcctacagaacctcaagcgcagcaaacagaccaaggagctgtggcagcgggtctcactcgagatggccaccttctccccctgagtctttcacccttagggtcctatacagggacccaggcctgtggctatgggggcccctcacacagggggagtgaaacttggctggacagatcatcctcactcagttccctggtagcacagactgacagctgctcttgggctatagcttggggccaagatgtctcacaccctagaagcctagggctgggggagacagccctgtctgggagggggcgttgggtggcctctggtatttatttggcatttataaatatataaactccttttttactcta

SEQ ID NO: 354177 - DNA, 5805 bp, Homo sapiens
cactctgttccttcatctccgaggccgagagcctctgccagaactggcggggatggcgcaaacagtcagcggggcccaattcccccactggcggcggtggcggaggtggcagtggcggtaccagaatgcgagatggactggtgatcccattggtggagctgtcagcaaagcaggtggcatttcatatcccatttgaagtggtggagaaagtttacccaccagtgcctgagcagctacagctccgaattgctttttggagcttccctgagaatgaagaggacattcggctgtattcgtgcctggccaatggcagtgcggatgagtttcagcgaggggatcagctcttccgcatgcgggctgtgaaggacccattgcagatagggttccacctgagtgctacagtggtgccacctcagatggtccctcctaaaggggcctacaacgtggctgtgatgtttgaccgctgccgggtcacttcctgcagctgtacctgtggggctggggccaaatggtgcacccacgtcgtggcactctgtctcttccgcatccacaacgcttctgcagtctgcctgcgagccccagtctcagagtccctgtcccggctacagagggaccagctgcaaaagtttgctcagtacctcatcagtgagctccctcagcaggtgggtgaggtcggcaccccctcctgcaattagctccgggccaggccgcataacagccttcctgttaggcccaggcctccatgggttcacctaggccgtgttctgcctgcctccgtctctttctccctcagatcctccccacagctcagcgtctcctggacgaactcctgtcttcccagtcaacagccatcaatacagtgtgtggagctccggaccccacagcagggccctcagcatcggaccagagtacttggtatctggatgaatcgacactcactgacaacatcaaaaagacactgcacaagttctgtggcccctcccctgtggtcttcagtgatgtgaactccatgtatctgtcttccacggagccgccagccgctgctgaatgggcatgtctgctgcgccctctgaggggccgtgagccagagggcgtctggaacctgctaagcattgtgcgggagatgttcaagcggagggacagcaatgctgcccccttgttggaaatcctcactgaccagtgcctcacctatgaacagataacaggttggtggtatagcgtacgtacctcagcctcacacagcagtgccagtgggcacacgggccgtagcaacgggcagtcagaggtggcagcccatgcctgtgccagcatgtgtgacgagatggtcacactgtggaggctggccgtgctggaccctgcactcagcccccagcggcgccgggaactgtgtacgcagctgcggcagtggcaactgaaggtgattgagaacgtcaagcggggccaacacaagaagacgctggagcggctcttccccggcttccggccagcggtggaggcctgctacttcaactgggaagaggcctacccacttcctggtgtcacctacagcggcactgacaggaagctggcactgtgctgggcccgggccctgccctctcggccaggtgcctcccgctctgggggcctggaggaatcccgggaccggccccgaccccttcctactgagccagctgtgcggcccaaggagcctgggaccaagcgaaagggcttgggtgagggggtcccctcatcacagcggggtccccgccgcctctcagctgaagggggagataaagctctacataagatgggtccaggtgggggcaaagccaaggcactgggtggggctggcagtgggagcaagggctcagcaggtggcggaagcaagcgacggctgagcagcgaagacagctccctggagccagacctggccgagatgagcctggatgacagcagcctggccctgggcgcagaggccagcaccttcgggggattccctgagagccctccaccctgtcctctccacggtggctcccgaggcccttccactttccttcctgagcccccagatacttatgaagaagatggtggtgtgtacttctcggaagggcctgagcctcccacagcctctgttggcccccctggcctactgcctggggatgtctgtacccaggacgacctcccttctacagatgagagtggcaatgggcttcccaaaaccaaagaggcagcccctgcagttggagaggaggatgatgactaccaggcgtactatctgaatgcccaggatggggctgggggcgaggaagagaaggccgagggcggggctggggaggagcacgacctgtttgctgggctgaagccactggaacaggagagtcgcatggaggtactgtttgcctgtgctgaggccctgcatgcgcatggctatagcagtgaggcctcccgtctcactgtggagcttgcccaggatctgctagccaacccacccgacctcaaggtagagccgccccctgccaagggcaagaagaacaaggtatccacgagccgtcagacctgggtggctaccaacaccctgagcaaggcggccttcctgttgacagtgctaagtgagcgtccagagcaccacaacctggccttccgagttggcatgtttgccttggagctacagaggcctccagcttctaccaaggccttggaggtgaagctggcataccaggagtctgaggtggctgccctgctcaagaagatccctctgggtccaagtgagatgagtaccatgcggtgccgggcagaggaacttcgggaggggacactctgtgactatcggcctgtgttgcctctcatgctggccagtttcatctttgacgttctctgtgctccagggttcccggcccccaagtcgcaactggaacagcgagacacctggggatgaggagcttggatttgaagcagcagttgctgccttgggcatgaagacaacagtgagcgaggcagaacatcccctcttatgtgaaggcacacgtcgggagaagggtgacctggcattagcactaatgatcacttacaaggacgaccaggccaagcttaagaagatcttagacaaactcttggaccgagagagccagacacataagccacagacgctgagttctttctactcatctagccgcccaaccacagccagccagaggtctccttcaaagcacgggggcccatctgccccaggggccctgcaaccactgacctcaggctctgcagggcctgctcaaccagggagtgtggcaggggctgggccaggccccactgagggcttcacagagaagaatgtgcctgagagttccccacattccccctgtgagggtcttccatctgaggcagctttgaccccaaggccagaagggaaggttcctagccgcttggcacttggcagtcgtggaggctataatggacggggatgggggtccccaggacggcctaagaagaagcacacaggcatggccagcattgacagcagtgcccctgaaacaacatcggatagttcccccacctcctggggtcgaggtcaggacagtgacagcattagcagctcttcttcggactccctgggctcctcatcctccagtggaagtcgccgggccagtgccagtggaggagcccgggcgaagactgttgaagttggcaggtacaagggccgccgccccgagagtcatgcccctcatgtacccaatcagccatcagaggcagctgcacacttctacttcgagctggcgaagacagtgctgatcaaggcagggggcaacagcagcacttccattttcacacatccatcttcctcagggggccaccagggtcctcaccgcaacctgcacctttgcgccttcgagattgggctttatgcccttggcctgcacaactttgtttctcccaactggctctcacgtacttattcttcccacgtttcctggattacaggccaggccatggagataggcagcgcagccctgactatactggtagaatgctgggatgggcacctgacaccccctgaggttgcatccctggctgacagggcatcacgggcaagagactccaatatggtgagggcggcagcagagctggccctgagctgcctgcctcacgcccatgcattgaaccctaatgagatccagcgggccctggtgcagtgcaaggaacaggacaacctgatgttggagaaggcctgcatggcagtggaagaggcagctaagggtgggggcgtgtaccctgaagtgttgtttgaggttgctcaccagtggttctggctatatgagcaaactgcaggtggctcatccacagcccgtgaaggggctacaagctgtagtgccagtgggatcagggcaggtggggaagctgggcggggtatgcctgagggtagagggggcccagggactgagccggttacagtggcagcggcagcagtgacagcagcagccacagtggtgcccgtcatatcggtggggtctagtttatacccgggtccaggactggggcatggccactcccctggcctgcacccctacactgctctacagccccacctgccctgtagccctcagtatctcactcacccagctcaccctgcccaccccatgcctcacatgccccggcctgccgtcttccctgtgcccagctctgcatacccacagggtgtgcatcctgcattcctaggggctcagtacccttattcagtgactcctccctcacttgctgccactgctgtgtctttccccgttccttccatggcacccatcacagtacatccctaccacacagagccagggcttccactgcccaccagtgtggcctgtgagttgtggggccagggaacagtgagcagtgtccatccagcatccacgtttccagccatccaaggtgcctcactgcctgccctgaccacacagcccagccctctggtgagcggaggttttccaccgcccgaggaggagacacacagtcagccagtcaatccccacagcctgcaccacctgcatgctgcctaccgtgtcggaatgctggcactggagatgctgggtcgccgggcacacaacgatcaccccaacaacttctcccgctcccccccctacactgatgatgtcaaatggttgctggggctggcagcaaagctgggagtgaactacgtgcaccagttctgtgtgggggcagccaagggggtgctgagcccgtttgtgctgcaggagatcgtcatggagacgctgcagcggctgagtcccgctcatgcccacaaccacctgcgtgccccggccttccaccaactggtgcagcgctgccagcaggcatacatgcagtacatccaccaccgcttgattcacctgactcctgcggactacgacgactttgtgaatgcgatccggagtgcccgcagcgccttctgcctgacgcccatgggcatgatgcagttcaacgacatcctacagaacctcaagcgcagcaaacagaccaaggagctgtggcagcgggtctcactcgagatggccaccttctccccctgagtctttcacccttagggtcctatacagggacccaggcctgtggctatgggggcccctcacacagggggagtgaaacttggctggacagatcatcctcactcagttccctggtagcacagactgacagctgctcttgggctatagcttggggccaagatgtctcacaccctagaagcctagggctgggggagacagccctgtctgggagggggcgttgggtggcctctggtatttatttggcatttataaatatataaactccttttttactcta

SEQ ID NO: 354178 - DNA, 5752 bp, Homo sapiens
cactctgttccttcatctccgaggccgagagcctctgccagaactggcggggatggcgcaaacagtcagcggggcccaattcccccactggcggcggtggcggaggtggcagtggcggtaccagaatgcgagatggactggtgatcccattggtggagctgtcagcaaagcaggtggcatttcatatcccatttgaagtggtggagaaagtttacccaccagtgcctgagcagctacagctccgaattgctttttggagcttccctgagaatgaagaggacattcggctgtattcgtgcctggccaatggcagtgcggatgagtttcagcgaggggatcagctcttccgcatgcgggctgtgaaggacccattgcagatagggttccacctgagtgctacagtggtgccacctcagatggtccctcctaaaggggcctacaacgtggctgtgatgtttgaccgctgccgggtcacttcctgcagctgtacctgtggggctggggccaaatggtgcacccacgtcgtggcactctgtctcttccgcatccacaacgcttctgcagtctgcctgcgagccccagtctcagagtccctgtcccggctacagagggaccagctgcaaaagtttgctcagtacctcatcagtgagctccctcagcaggtgggtgaggtcggcaccccctcctgcaattagctccgggccaggccgcataacagccttcctgttaggcccaggcctccatgggttcacctaggccgtgttctgcctgcctccgtctctttctccctcagatcctccccacagctcagcgtctcctggacgaactcctgtcttcccagtcaacagccatcaatacagtgtgtggagctccggaccccacagcagggccctcagcatcggaccagagtacttggtatctggatgaatcgacactcactgacaacatcaaaaagacactgcacaagttctgtggcccctcccctgtggtcttcagtgatgtgaactccatgtatctgtcttccacggagccgccagccgctgctgaatgggcatgtctgctgcgccctctgaggggccgtgagccagagggcgtctggaacctgctaagcattgtgcgggagatgttcaagcggagggacagcaatgctgcccccttgttggaaatcctcactgaccagtgcctcacctatgaacagataacaggttggtggtatagcgtacgtacctcagcctcacacagcagtgccagtgggcacacgggccgtagcaacgggcagtcagaggtggcagcccatgcctgtgccagcatgtgtgacgagatggtcacactgtggaggctggccgtgctggaccctgcactcagcccccagcggcgccgggaactgtgtacgcagctgcggcagtggcaactgaaggtgattgagaacgtcaagcggggccaacacaagaagacgctggagcggctcttccccggcttccggccagcggtggaggcctgctacttcaactgggaagaggcctacccacttcctggtgtcacctacagcggcactgacaggaagctggcactgtgctgggcccgggccctgccctctcggccaggtgcctcccgctctgggggcctggaggaatcccgggaccggccccgaccccttcctactgagccagctgtgcggcccaaggagcctgggaccaagcgaaagggcttgggtgagggggtcccctcatcacagcggggtccccgccgcctctcagctgaagggggagataaagctctacataagatgggtccaggtgggggcaaagccaaggcactgggtggggctggcagtgggagcaagggctcagcaggtggcggaagcaagcgacggctgagcagcgaagacagctccctggagccagacctggccgagatgagcctggatgacagcagcctggccctgggcgcagaggccagcaccttcgggggattccctgagagccctccaccctgtcctctccacggtggctcccgaggcccttccactttccttcctgagcccccagatacttatgaagaagatggtggtgtgtacttctcggaagggcctgagcctcccacagcctctgttggcccccctggcctactgcctggggatgtctgtacccaggacgacctcccttctacagatgagagtggcaatgggcttcccaaaaccaaagaggcagcccctgcagttggagaggaggatgatgactaccaggcgtactatctgaatgcccaggatggggctgggggcgaggaagagaaggccgagggcggggctggggaggagcacgacctgtttgctgggctgaagccactggaacaggagagtcgcatggaggtactgtttgcctgtgctgaggccctgcatgcgcatggctatagcagtgaggcctcccgtctcactgtggagcttgcccaggatctgctagccaacccacccgacctcaaggtagagccgccccctgccaagggcaagaagaacaaggtatccacgagccgtcagacctgggtggctaccaacaccctgagcaaggcggccttcctgttgacagtgctaagtgagcgtccagagcaccacaacctggccttccgagttggcatgtttgccttggagctacagaggcctccagcttctaccaaggccttggaggtgaagctggcataccaggagtctgaggtggctgccctgctcaagaagatccctctgggtccaagtgagatgagtaccatgcggtgccgggcagaggaacttcgggaggggacactctgtgactatcggcctgtgttgcctctcatgctggccagtttcatctttgacgttctctgtgctccagggttcccggcccccaagtcgcaactggaacagcgagacacctggggatgaggagcttggatttgaagcagcagttgctgccttgggcatgaagacaacagtgagcgaggcagaacatcccctcttatgtgaaggcacacgtcgggagaagggtgacctggcattagcactaatgatcacttacaaggacgaccaggccaagcttaagaagatcttagacaaactcttggaccgagagagccagacacataagccacagacgctgagttctttctactcatctagccgcccaaccacagccagccagaggtctccttcaaagcacgggggcccatctgccccaggggccctgcaaccactgacctcaggctctgcagggcctgctcaaccagggagtgtggcaggggctgggccaggccccactgagggcttcacagagaagaatgtgcctgagagttccccacattccccctgtgagggtcttccatctgaggcagctttgaccccaaggccagaagggaaggttcctagccgcttggcacttggcagtcgtggaggctataatggacggggatgggggtccccaggacggcctaagaagaagcacacaggcatggccagcattgacagcagtgcccctgaaacaacatcggatagttcccccaccttaagccggagaccacttcgagggggctgggcccccacctcctggggtcgaggtcaggacagtgacagcattagcagctcttcttcggactccctgggctcctcatcctccagtggaagtcgccgggccagtgccagtggaggagcccgggcgaagactgttgaagttggcaggtacaagggccgccgccccgagagtcatgcccctcatgtacccaatcagccatcagaggcagctgcacacttctacttcgagctggcgaagacagtgctgatcaaggcagggggcaacagcagcacttccattttcacacatccatcttcctcagggggccaccagggtcctcaccgcaacctgcacctttgcgccttcgagattgggctttatgcccttggcctgcacaactttgtttctcccaactggctctcacgtacttattcttcccacgtttcctggattacaggccaggccatggagataggcagcgcagccctgactatactggtagaatgctgggatgggcacctgacaccccctgaggttgcatccctggctgacagggcatcacgggcaagagactccaatatggtgagggcggcagcagagctggccctgagctgcctgcctcacgcccatgcattgaaccctaatgagatccagcgggccctggtgcagtgcaaggaacaggacaacctgatgttggagaaggcctgcatggcagtggaagaggcagctaagggtgggggcgtgtaccctgaagtgttgtttgaggttgctcaccagtggttctggctatatgagcaaactgcaggtggctcatccacagcccgtgaaggggctacaagctgtagtgccagtgggatcagggcaggtggggaagctgggcggggtatgcctgagggtagagggggcccagggactgagccggttacagtggcagcggcagcagtgacagcagcagccacagtggtgcccgtcatatcggtggggtctagtttatacccgggtccaggactggggcatggccactcccctggcctgcacccctacactgctctacagccccacctgccctgtagccctcagtatctcactcacccagctcaccctgcccaccccatgcctcacatgccccggcctgccgtcttccctgtgcccagctctgcatacccacagggtgtgcatcctgcattcctaggggctcagtacccttattcagtgactcctccctcacttgctgccactgctgtgtctttccccgttccttccatggcacccatcacagtacatccctaccacacagagccagggcttccactgcccaccagtgtggccttgagcagtgtccatccagcatccacgtttccagccatccaaggtgcctcactgcctgccctgaccacacagcccagccctctggtgagcggaggttttccaccgcccgaggaggagacacacagtcagccagtcaatccccacagcctgcaccacctgcatgctgcctaccgtgtcggaatgctggcactggagatgctgggtcgccgggcacacaacgatcaccccaacaacttctcccgctcccccccctacactgatgatgtcaaatggttgctggggctggcagcaaagctgggagatcgtcatggagacgctgcagcggctgagtcccgctcatgcccacaaccacctgcgtgccccggccttccaccaactggtgcagcgctgccagcaggcatacatgcagtacatccaccaccgcttgattcacctgactcctgcggactacgacgactttgtgaatgcgatccggagtgcccgcagcgccttctgcctgacgcccatgggcatgatgcagttcaacgacatcctacagaacctcaagcgcagcaaacagaccaaggagctgtggcagcgggtctcactcgagatggccaccttctccccctgagtctttcacccttagggtcctatacagggacccaggcctgtggctatgggggcccctcacacagggggagtgaaacttggctggacagatcatcctcactcagttccctggtagcacagactgacagctgctcttgggctatagcttggggccaagatgtctcacaccctagaagcctagggctgggggagacagccctgtctgggagggggcgttgggtggcctctggtatttatttggcatttataaatatataaactccttttttactcta

SEQ ID NO: 354179 - DNA, 6004 bp, Homo sapiens
cactctgttccttcatctccgaggccgagagcctctgccagaactggcggggatggcgcaaacagtcagcggggcccaattcccccactggcggcggtggcggaggtggcagtggcggtaccagaatgcgagatggactggtgatcccattggtggagctgtcagcaaagcaggtggcatttcatatcccatttgaagtggtggagaaagtttacccaccagtgcctgagcagctacagctccgaattgctttttggagcttccctgagaatgaagaggacattcggctgtattcgtgcctggccaatggcagtgcggatgagtttcagcgaggggatcagctcttccgcatgcgggctgtgaaggacccattgcagatagggttccacctgagtgctacagtggtgccacctcagatggtccctcctaaaggggcctacaacgtggctgtgatgtttgaccgctgccgggtcacttcctgcagctgtacctgtggggctggggccaaatggtgcacccacgtcgtggcactctgtctcttccgcatccacaacgcttctgcagtctgcctgcgagccccagtctcagagtccctgtcccggctacagagggaccagctgcaaaagtttgctcagtacctcatcagtgagctccctcagcaggtgggtgaggtcggcaccccctcctgcaattagctccgggccaggccgcataacagccttcctgttaggcccaggcctccatgggttcacctaggccgtgttctgcctgcctccgtctctttctccctcagatcctccccacagctcagcgtctcctggacgaactcctgtcttcccagtcaacagccatcaatacagtgtgtggagctccggaccccacagcagggccctcagcatcggaccagagtacttggtatctggatgaatcgacactcactgacaacatcaaaaagacactgcacaagttctgtggcccctcccctgtggtcttcagtgatgtgaactccatgtatctgtcttccacggagccgccagccgctgctgaatgggcatgtctgctgcgccctctgaggggccgtgagccagagggcgtctggaacctgctaagcattgtgcgggagatgttcaagcggagggacagcaatgctgcccccttgttggaaatcctcactgaccagtgcctcacctatgaacagataacaggttggtggtatagcgtacgtacctcagcctcacacagcagtgccagtgggcacacgggccgtagcaacgggcagtcagaggtggcagcccatgcctgtgccagcatgtgtgacgagatggtcacactgtggaggctggccgtgctggaccctgcactcagcccccagcggcgccgggaactgtgtacgcagctgcggcagtggcaactgaaggtgattgagaacgtcaagcggggccaacacaagaagacgctggagcggctcttccccggcttccggccagcggtggaggcctgctacttcaactgggaagaggcctacccacttcctggtgtcacctacagcggcactgacaggaagctggcactgtgctgggcccgggccctgccctctcggccaggtgcctcccgctctgggggcctggaggaatcccgggaccggccccgaccccttcctactgagccagctgtgcggcccaaggagcctgggaccaagcgaaagggcttgggtgagggggtcccctcatcacagcggggtccccgccgcctctcagctgaagggggagataaagctctacataagatgggtccaggtgggggcaaagccaaggcactgggtggggctggcagtgggagcaagggctcagcaggtggcggaagcaagcgacggctgagcagcgaagacagctccctggagccagacctggccgagatgagcctggatgacagcagcctggccctgggcgcagaggccagcaccttcgggggattccctgagagccctccaccctgtcctctccacggtggctcccgaggcccttccactttccttcctgagcccccagatacttatgaagaagatggtggtgtgtacttctcggaagggcctgagcctcccacagcctctgttggcccccctggcctactgcctggggatgtctgtacccaggacgacctcccttctacagatgagagtggcaatgggcttcccaaaaccaaagaggcagcccctgcagttggagaggaggatgatgactaccaggcgtactatctgaatgcccaggatggggctgggggcgaggaagagaaggccgagggcggggctggggaggagcacgacctgtttgctgggctgaagccactggaacaggagagtcgcatggaggtactgtttgcctgtgctgaggccctgcatgcgcatggctatagcagtgaggcctcccgtctcactgtggagcttgcccaggatctgctagccaacccacccgacctcaagggcaagaagaacaaggtatccacgagccgtcagacctgggtggctaccaacaccctgagcaaggcggccttcctgttgacagtgctaagtgagcgtccagagcaccacaacctggccttccgagttggcatgtttgccttggagctacagaggcctccagcttctaccaaggccttggaggtgaagctggcataccaggagtctgaggtggctgccctgctcaagaagatccctctgggtccaagtgagatgagtaccatgcggtgccgggcagaggaacttcgggaggggacactctgtgactatcggcctgtgttgcctctcatgctggccagtttcatctttgacgttctctgtgctccagggttcccggcccccaagtcgcaactggaacagcgagacacctggggatgaggagcttggatttgaagcagcagttgctgccttgggcatgaagacaacagtgagcgaggcagaacatcccctcttatgtgaaggcacacgtcgggagaagggtgacctggcattagcactaatgatcacttacaaggacgaccaggccaagcttaagaagatcttagacaaactcttggaccgagagagccagacacataagccacagacgctgagttctttctactcatctagccgcccaaccacagccagccagaggtctccttcaaagcacgggggcccatctgccccaggggccctgcaaccactgacctcaggctctgcagggcctgctcaaccagggagtgtggcaggggctgggccaggccccactgagggcttcacagagaagaatgtgcctgagagttccccacattccccctgtgagggtcttccatctgaggcagctttgaccccaaggccagaagggaaggttcctagccgcttggcacttggcagtcgtggaggctataatggacggggatgggggtccccaggacggcctaagaagaagcacacaggcatggccagcattgacagcagtgcccctgaaacaacatcggatagttcccccaccttaagccggagaccacttcgagggggctgggcccccacctcctggggtcgaggtcaggacagtgacagcattagcagctcttcttcggactccctgggctcctcatcctccagtggaagtcgccgggccagtgccagtggaggagcccgggcgaagactgttgaagttggcaggtacaagggccgccgccccgagagtcatgcccctcatgtacccaatcagccatcagaggcagctgcacacttctacttcgagctggcgaagacagtgctgatcaaggcagggggcaacagcagcacttccattttcacacatccatcttcctcagggggccaccagggtcctcaccgcaacctgcacctttgcgccttcgagattgggctttatgcccttggcctgcacaactttgtttctcccaactggctctcacgtacttattcttcccacgtttcctggattacaggccaggccatggagataggcagcgcagccctgactatactggtagaatgctgggatgggcacctgacaccccctgaggttgcatccctggctgacagggcatcacgggcaagagactccaatatggtgagggcggcagcagagctggccctgagctgcctgcctcacgcccatgcattgaaccctaatgagatccagcgggccctggtgcagtgcaaggaacaggacaacctgatgttggagaaggcctgcatggcagtggaagaggcagctaagggtgggggcgtgtaccctgaagtgttgtttgaggttgctcaccagtggttctggctatatgagcaaactgcaggtggctcatccacagcccgtgaaggggctacaagctgtagtgccagtgggatcagggcaggtggggaagctgggcggggtatgcctgagggtagagggggcccagggactgagccggttacagtggcagcggcagcagtgacagcagcagccacagtggtgcccgtcatatcggtggggtctagtttatacccgggtccaggactggggcatggccactcccctggcctgcacccctacactgctctacagccccacctgccctgtagccctcagtatctcactcacccagctcaccctgcccaccccatgcctcacatgccccggcctgccgtcttccctgtgcccagctctgcatacccacaggtgagaccagtgttctgctggggggtaaggcatgggaaaatactgggaattcatagggggttggagtgggtactctgggagtataattggtcagtcggagagtcctggtgaggtggtgggagtctgggggacccagcccaactaaaataagaaatgacggccgggcatggtggctcatgcctgtaatcccagcactttgagaggccgatgtgggtggatcacttgaggtcaggagttcgagaccagcctggccaacatggggaaaccccgtctctactaaaaattagctgagtgcacgcctgtaatcccagcttcttgggaggctgagatgggaatcacttgaacctgggaggcagaggttgcagtgagccgatatcgtgccactgcactccagcctggaggacagagcgagactctatctatctcaaaaaaaacatgtcaggatagcagcttgtgggggtgaagcacgacagcaacatcctaatcaagtttggcatcttcccctttcttctccctgcccctagggtgtgcatcctgcattcctaggggctcagtacccttattcagtgactcctccctcacttgctgccactgctgtgtctttccccgttccttccatggcacccatcacagtacatccctaccacacagagccagggcttccactgcccaccagtgtggccttgagcagtgtccatccagcatccacgtttccagccatccaaggtgcctcactgcctgccctgaccacacagcccagccctctggtgagcggaggttttccaccgcccgaggaggagacacacagtcagccagtcaatccccacagcctgcaccacctgcatgctgcctaccgtgtcggtgagaggacatccctttctgtgctcctacctgcagttgtgccagtggctcttcagaggacccttcctctagctcttcatttgtttactgtggggtcaggtgacaggttggggtaaagggtgaagaggatacaccgtaccatgtgcccaccctatctatctatctcccaggaatgctggcactggagatgctgggtcgccgggcacacaacgatcaccccaacaacttctcccgctcccccccctacactgatgatgtcaaatggttgctggggctggcagcaaagctgggtaacacctcccctccctaggaccattgccccccccccacctgctctccccaccttccttatcccagacctccttcctagctcttgctcagagttgaggccttggtcgggtatgtgtgcgtgcgcggggggcggagggttacctcagctcctggggtggagggaggct

SEQ ID NO: 354180 - DNA, 5137 bp, Homo sapiens
cactctgttccttcatctccgaggccgagagcctctgccagaactggcggggatggcgcaaacagtcagcggggcccaattcccccactggcggcggtggcggaggtggcagtggcggtaccagaatgcgagatggactggtgatcccattggtggagctgtcagcaaagcaggtggcatttcatatcccatttgaagtggtggagaaagtttacccaccagtgcctgagcagctacagctccgaattgctttttggagcttccctgagaatgaagaggacattcggctgtattcgtgcctggccaatggcagtgcggatgagtttcagcgaggggatcagctcttccgcatgcgggctgtgaaggacccattgcagatagggttccacctgagtgctacagtggtgccacctcagatggtccctcctaaaggggcctacaacgtggctgtgatgtttgaccgctgccgggtcacttcctgcagctgtacctgtggggctggggccaaatggtgcacccacgtcgtggcactctgtctcttccgcatccacaacgcttctgcagtctgcctgcgagccccagtctcagagtccctgtcccggctacagagggaccagctgcaaaagtttgctcagtacctcatcagtgagctccctcagcaggtgggtgaggtcggcaccccctcctgcaattagctccgggccaggccgcataacagccttcctgttaggcccaggcctccatgggttcacctaggccgtgttctgcctgcctccgtctctttctccctcagatcctccccacagctcagcgtctcctggacgaactcctgtcttcccagtcaacagccatcaatacagtgtgtggagctccggaccccacagcagggccctcagcatcggaccagagtacttggtatctggatgaatcgacactcactgacaacatcaaaaagacactgcacaagttctgtggcccctcccctgtggtcttcagtgatgtgaactccatgtatctgtcttccacggagccgccagccgctgctgaatgggcatgtctgctgcgccctctgaggggccgtgagccagagggcgtctggaacctgctaagcattgtgcgggagatgttcaagcggagggacagcaatgctgcccccttgttggaaatcctcactgaccagtgcctcacctatgaacagataacaggttggtggtatagcgtacgtacctcagcctcacacagcagtgccagtgggcacacgggccgtagcaacgggcagtcagaggtggcagcccatgcctgtgccagcatgtgtgacgagatggtcacactgtggaggctggccgtgctggaccctgcactcagcccccagcggcgccgggaactgtgtacgcagctgcggcagtggcaactgaaggtgattgagaacgtcaagcggggccaacacaagaagacgctggagcggctcttccccggcttccggccagcggtggaggcctgctacttcaactgggaagaggcctacccacttcctggtgtcacctacagcggcactgacaggaagctggcactgtgctgggcccgggccctgccctctcggccaggtgcctcccgctctgggggcctggaggaatcccgggaccggccccgaccccttcctactgagccagctgtgcggcccaaggagcctgggaccaagcgaaagggcttgggtgagggggtcccctcatcacagcggggtccccgccgcctctcagctgaagggggagataaagctctacataagatgggtccaggtgggggcaaagccaaggcactgggtggggctggcagtgggagcaagggctcagcaggtggcggaagcaagcgacggctgagcagcgaagacagctccctggagccagacctggccgagatgagcctggatgacagcagcctggccctgggcgcagaggccagcaccttcgggggattccctgagagccctccaccctgtcctctccacggtggctcccgaggcccttccactttccttcctgagcccccagatacttatgaagaagatggtggtgtgtacttctcggaagggcctgagcctcccacagcctctgttggcccccctggcctactgcctggggatgtctgtacccaggacgacctcccttctacagatgagagtggcaatgggcttcccaaaaccaaagaggcagcccctgcagttggagaggaggatgatgactaccaggcgtactatctgaatgcccaggatggggctgggggcgaggaagagaaggccgagggcggggctggggaggagcacgacctgtttgctgggctgaagccactggaacaggagagtcgcatggaggtactgtttgcctgtgctgaggccctgcatgcgcatggctatagcagtgaggcctcccgtctcactgtggagcttgcccaggatctgctagccaacccacccgacctcaaggtagagccgccccctgccaagggcaagaagaacaaggtatccacgagccgtcagacctgggtggctaccaacaccctgagcaaggcggccttcctgttgacagtgctaagtgagcgtccagagcaccacaacctggccttccgagttggcatgtttgccttggagctacagaggcctccagcttctaccaaggccttggaggtgaagctggcataccaggagtctgaggtggctgccctgctcaagaagatccctctgggtccaagtgagatgagtaccatgcggtgccgggcagaggaacttcgggaggggacactctgtgactatcggcctgtgttgcctctcatgctggccagtttcatctttgacgttctctgtgctccagggttcccggcccccaagtcgcaactggaacagcgagacacctggggatgaggagcttggatttgaagcagcagttgctgccttgggcatgaagacaacagtgagcgaggcagaacatcccctcttatgtgaaggcacacgtcgggagaagggtgacctggcattagcactaatgatcacttacaaggacgaccaggccaagcttaagaagatcttagacaaactcttggaccgagagagccagacacataagccacagacgctgagttctttctactcatctagccgcccaaccacagccagccagaggtctccttcaaagcacgggggcccatctgccccaggggccctgcaaccactgacctcaggctctgcagggcctgctcaaccagggagtgtggcaggggctgggccaggccccactgagggcttcacagagaagaatgtgcctgagagttccccacattccccctgtgagggtcttccatctgaggcagctttgaccccaaggccagaagggaaggttcctagccgcttggcacttggcagtcgtggaggctataatggacggggatgggggtccccaggacggcctaagaagaagcacacaggcatggccagcattgacagcagtgcccctgaaacaacatcggatagttcccccaccttaagccggagaccacttcgagggggctgggcccccacctcctggggtcgaggtcaggacagtgacagcattagcagctcttcttcggactccctgggctcctcatcctccagtggaagtcgccgggccagtgccagtggaggagcccgggcgaagactgttgaagttggcaggtacaagggccgccgccccgagagtcatgcccctcatgtacccaatcagccatcagaggcagctgcacacttctacttcgagctggcgaagacagtgctgatcaaggcagggggcaacagcagcacttccattttcacacatccatcttcctcagggggccaccagggtcctcaccgcaacctgcacctttgcgccttcgagattgggctttatgcccttggcctgcacaactttgtttctcccaactggctctcacgtacttattcttcccacgtttcctggattacaggccaggccatggagataggcagcgcagccctgactatactggtagaatgctgggatgggcacctgacaccccctgaggttgcatccctggctgacagggcatcacgggcaagagactccaatatggtgagggcggcagcagagctggccctgagctgcctgcctcacgcccatgcattgaaccctaatgagatccagcgggccctggtgcagtgcaaggaacaggacaacctgatgttggagaaggcctgcatggcagtggaagaggcagctaagggtgggggcgtgtaccctgaagtgttgtttgaggttgctcaccagtggttctggctatatgagcaaactgcaggtggctcatccacagcccgtgaaggggctacaagctgtactgccctgtagccctcagtatctcactcacccagctcaccctgcccaccccatgcctcacatgccccggcctgccgtcttccctgtgcccagctctgcatacccacagggtgtgcatcctgcattcctaggggctcagtacccttattcagtgactcctccctcacttgctgccactgctgtgtctttccccgttccttccatggcacccatcacagtacatccctaccacacagagccagggcttccactgcccaccagtgtggcctgtgagttgtggggccagggaacagtgagcagtgtccatccagcatccacgtttccagccatccaaggtgcctcactgcctgccctgaccacacagcccagccctctggtgagcggaggttttccaccgcccgaggaggagacacacagtcagccagtcaatccccacagcctgcaccacctgcatgctgcctaccgtgtcggaatgctggcactggagatgctgggtcgccgggcacacaacgatcaccccaacaacttctcccgctcccccccctacactgatgatgtcaaatggttgctggggctggcagcaaagctgggtaacacctcccctccctaggaccattgccccccccccacctgctctccccaccttccttatcccagacctccttcctagctcttgctcagagttgaggccttggtcgggtatgtgtgcgtgcgcggggggcggagggttacctcagctcctggggtggagggaggct

SEQ ID NO: 354181 - DNA, 3117 bp, Homo sapiens
cactctgttccttcatctccgaggccgagagcctctgccagaactggcggggatggcgcaaacagtcagcggggcccaattcccccactggcggcggtggcggaggtggcagtggcggtaccagaatgcgagatggactggtgatcccattggtggagctgtcagcaaagcaggtggcatttcatatcccatttgaagtggtggagaaagtttacccaccagtgcctgagcagctacagctccgaattgctttttggagcttccctgagaatgaagaggacattcggctgtattcgtgcctggccaatggcagtgcggatgagtttcagcgaggggatcagctcttccgcatgcgggctgtgaaggacccattgcagatagggttccacctgagtgctacagtggtgccacctcagatggtccctcctaaaggggcctacaacgtggctgtgatgtttgaccgctgccgggtcacttcctgcagctgtacctgtggggctggggccaaatggtgcacccacgtcgtggcactctgtctcttccgcatccacaacgcttctgcagtctgcctgcgagccccagtctcagagtccctgtcccggctacagagggaccagctgcaaaagtttgctcagtacctcatcagtgagctccctcagcaggtgggtgaggtcggcaccccctcctgcaattagctccgggccaggccgcataacagccttcctgttaggcccaggcctccatgggttcacctaggccgtgttctgcctgcctccgtctctttctccctcagatcctccccacagctcagcgtctcctggacgaactcctgtcttcccagtcaacagccatcaatacagtgtgtggagctccggaccccacagcagggccctcagcatcggaccagagtacttggtatctggatgaatcgacactcactgacaacatcaaaaagacactgcacaagttctgtggcccctcccctgtggtcttcagtgatgtgaactccatgtatctgtcttccacggagccgccagccgctgctgaatgggcatgtctgctgcgccctctgaggggccgtgagccagagggcgtctggaacctgctaagcattgtgcgggagatgttcaagcggagggacagcaatgctgcccccttgttggaaatcctcactgaccagtgcctcacctatgaacagataacaggttggtggtatagcgtacgtacctcagcctcacacagcagtgccagtgggcacacgggccgtagcaacgggcagtcagaggtggcagcccatgcctgtgccagcatgtgtgacgagatggtcacactgtggaggctggccgtgctggaccctgcactcagcccccagcggcgccgggaactgtgtacgcagctgcggcagtggcaactgaaggtgattgagaacgtcaagcggggccaacacaagaagacgctggagcggctcttccccggcttccggccagcggtggaggcctgctacttcaactgggaagaggcctacccacttcctggtgtcacctacagcggcactgacaggaagctggcactgtgctgggcccgggccctgccctctcggccaggtgcctcccgctctgggggcctggaggaatcccgggaccggccccgaccccttcctactgagccagctgtgcggcccaaggagcctgggaccaagcgaaagggcttgggtgagggggtcccctcatcacagcggggtccccgccgcctctcagctgaagggggagataaagctctacataagatgggtccaggtgggggcaaagccaaggcactgggtggggctggcagtgggagcaagggctcagcaggtggcggaagcaagcgacggctgagcagcgaagacagctccctggagccagacctggccgagatgagcctggatgacagcagcctggccctgggcgcagaggccagcaccttcgggggattccctgagagccctccaccctgtcctctccacggtggctcccgaggcccttccactttccttcctgagcccccagatacttatgaagaagatggtggtgtgtacttctcggaagggcctgagcctcccacagcctctgttggcccccctggcctactgcctggggatgtctgtacccaggacgacctcccttctacagatgagagtggcaatgggcttcccaaaaccaaagaggcagcccctgcagttggagaggaggatgatgactaccaggcgtactatctgaatgcccaggatggggctgggggcgaggaagagaaggccgagggcggggctggggaggagcacgacctgtttgctgggctgaagccactggaacaggagagtcgcatggaggtactgtttgcctgtgctgaggccctgcatgcgcatggctatagcagtgaggcctcccgtctcactgtggagcttgcccaggatctgctagccaacccacccgacctcaaggtagagccgccccctgccaagggcaagaagaacaaggtatccacgagccgtcagacctgggtggctaccaacaccctgagcaaggcggccttcctgttgacagtgctaagtgagcgtccagagcaccacaacctggccttccgagttggcatgtttgccttggagctacagaggcctccagcttctaccaaggccttggaggtgaagctggcataccaggagtctgaggtggctgccctgctcaagaagatccctctgggtccaagtgagatgagtaccatgcggtgccgggcagaggaacttcgggaggggacactctgtgactatcggcctgtgttgcctctcatgctggccagtttcatctttgacgttctctgtgctccagggttcccggcccccaagtcgcaactggaacagcgagacacctggggatgaggagcttggatttgaagcagcagttgctgccttgggcatgaagacaacagtgagcgaggcagaacatcccctcttatgtgaaggcacacgtcgggagaagggtgacctggcattagcactaatgatcacttacaaggacgaccaggccaagcttaagaagcctgggcaacagagcgagaccctgtctcttaaaaaaaaaagaa

SEQ ID NO: 354182 - DNA, 3337 bp, Homo sapiens
cactctgttccttcatctccgaggccgagagcctctgccagaactggcggggatggcgcaaacagtcagcggggcccaattcccccactggcggcggtggcggaggtggcagtggcggtaccagaatgcgagatggactggtgatcccattggtggagctgtcagcaaagcaggtggcatttcatatcccatttgaagtggtggagaaagtttacccaccagtgcctgagcagctacagctccgaattgctttttggagcttccctgagaatgaagaggacattcggctgtattcgtgcctggccaatggcagtgcggatgagtttcagcgaggggatcagctcttccgcatgcgggctgtgaaggacccattgcagatagggttccacctgagtgctacagtggtgccacctcagatggtccctcctaaaggggcctacaacgtggctgtgatgtttgaccgctgccgggtcacttcctgcagctgtacctgtggggctggggccaaatggtgcacccacgtcgtggcactctgtctcttccgcatccacaacgcttctgcagtctgcctgcgagccccagtctcagagtccctgtcccggctacagagggaccagctgcaaaagtttgctcagtacctcatcagtgagctccctcagcaggtgggtgaggtcggcaccccctcctgcaattagctccgggccaggccgcataacagccttcctgttaggcccaggcctccatgggttcacctaggccgtgttctgcctgcctccgtctctttctccctcagatcctccccacagctcagcgtctcctggacgaactcctgtcttcccagtcaacagccatcaatacagtgtgtggagctccggaccccacagcagggccctcagcatcggaccagagtacttggtatctggatgaatcgacactcactgacaacatcaaaaagacactgcacaagttctgtggcccctcccctgtggtcttcagtgatgtgaactccatgtatctgtcttccacggagccgccagccgctgctgaatgggcatgtctgctgcgccctctgaggggccgtgagccagagggcgtctggaacctgctaagcattgtgcgggagatgttcaagcggagggacagcaatgctgcccccttgttggaaatcctcactgaccagtgcctcacctatgaacagataacaggttggtggtatagcgtacgtacctcagcctcacacagcagtgccagtgggcacacgggccgtagcaacgggcagtcagaggtggcagcccatgcctgtgccagcatgtgtgacgagatggtcacactgtggaggctggccgtgctggaccctgcactcagcccccagcggcgccgggaactgtgtacgcagctgcggcagtggcaactgaaggtgattgagaacgtcaagcggggccaacacaagaagacgctggagcggctcttccccggcttccggccagcggtggaggcctgctacttcaactgggaagaggcctacccacttcctggtgtcacctacagcggcactgacaggaagctggcactgtgctgggcccgggccctgccctctcggccaggtgcctcccgctctgggggcctggaggaatcccgggaccggccccgaccccttcctactgagccagctgtgcggcccaaggagcctgggaccaagcgaaagggcttgggtgagggggtcccctcatcacagcggggtccccgccgcctctcagctgaagggggagataaagctctacataagatgggtccaggtgggggcaaagccaaggcactgggtggggctggcagtgggagcaagggctcagcaggtggcggaagcaagcgacggctgagcagcgaagacagctccctggagccagacctggccgagatgagcctggatgacagcagcctggccctgggcgcagaggccagcaccttcgggggattccctgagagccctccaccctgtcctctccacggtggctcccgaggcccttccactttccttcctgagcccccagatacttatgaagaagatggtggtgtgtacttctcggaagggcctgagcctcccacagcctctgttggcccccctggcctactgcctggggatgtctgtacccaggacgacctcccttctacagatgagagtggcaatgggcttcccaaaaccaaagaggcagcccctgcagttggagaggaggatgatgactaccaggcgtactatctgaatgcccaggatggggctgggggcgaggaagagaaggccgagggcggggctggggaggagcacgacctgtttgctgggctgaagccactggaacaggagagtcgcatggaggtactgtttgcctgtgctgaggccctgcatgcgcatggctatagcagtgaggcctcccgtctcactgtggagcttgcccaggatctgctagccaacccacccgacctcaaggtagagccgccccctgccaagggcaagaagaacaaggtatccacgagccgtcagacctgggtggctaccaacaccctgagcaaggcggccttcctgttgacagtgctaagtgagcgtccagagcaccacaacctggccttccgagttggcatgtttgccttggagctacagaggcctccagcttctaccaaggccttggaggtgaagctggcataccaggagtctgaggtggctgccctgctcaagaagatccctctgggtccaagtgagatgagtaccatgcggtgccgggcagaggaacttcgggaggggacactctgtgactatcggcctgtgttgcctctcatgctggccagtttcatctttgacgttctctgtgctccaggtatgatgcctgaccctacagtaagtggggaactggggtaggggtagctttctctaagaaagaccaagagccccaagtttctgaatcacctttaggacccatcaggcagcttcatgggtaggtctgtgatgatgaggattttgggttcccctgtattttttcccatgcatgatacttctgtctgcctgacttaccccaacttttatacagtggtttctccggttcccggcccccaagtcgcaactggaacagcgagacacctggggatgaggagcttggatttgaagcagcagttgctgccttgggcatgaagacaacagtgagcgaggcagaacatcccctcttatgtgaaggcacacgtcgggagaagggtgacctggcattagcactaatgatcacttacaaggacgaccaggccaagcttaagaagcctgggcaacagagcgagaccctgtctcttaaaaaaaaaagaa

SEQ ID NO: 354183 - DNA, 935 bp, Homo sapiens
ccctgagctgcctgcctcacgcccatgcattgaaccctaatgagatccagcgggccctggtgcagtgcaaggaacaggtatttctacgggcaatctgggaacctcttctggggcatctgggcagggaggttgggcatgggaaagctaagggcccagctcttgattcccgtatcctggagtttacagatgattgttggtcctctcatggcaacattttacccattaatgtgctttcacacccatctttcctttaccttacaactcaaaggttaggtttatttctattttacagataaggaaatggaggcctacggtttagggaccaagatgatcactcaggatagaaaacttagggaaggcctcatacatctaagacttgaatgggagggggctgttaaattagtttggaactgggactataacctgggtcttgactcattttggtcagtatttactcagtgtgtgaagcactcactgctctgataatggactctaagcattgacactgacctctgatgattccctgggaatgagacagctctgagggagacattggaatctcatctaacaccttccatgtggtaaaggcctttcccccttaacactctgtgcccctctcttccaggacaacctgatgttggagaaggcctgcatggcagtggaagaggcagctaagggtgggggcgtgtaccctgaagtgttgtttgaggttgctcaccagtggttctggctatatgagcaaactgcaggtggctcatccacagcccgtgaaggggctacaagctgtagtgccagtgggatcagggcaggtggggaagctgggcggggtatgcctgagggtagagggggcccagggactgagccggttacagtggcagcggcagcagtgacagcagcagccacagtggtgcccgtcatatcggtggggtctagtt

SEQ ID NO: 354184 - DNA, 144 bp, Homo sapiens
gatgggggtccccaggacggcctaagaagaagcacacaggtaggatagcctgtgggctagcatagagggaaggataatcctgaaggttggagtcttaacatctgggactcctgacttctgagactgacttctcttgggggttag

SEQ ID NO: 354185 - DNA, 5844 bp, Homo sapiens
cactctgttccttcatctccgaggccgagagcctctgccagaactggcggggatggcgcaaacagtcagcggggcccaattcccccactggcggcggtggcggaggtggcagtggcggtaccagaatgcgagatggactggtgatcccattggtggagctgtcagcaaagcaggtggcatttcatatcccatttgaagtggtggagaaagtttacccaccagtgcctgagcagctacagctccgaattgctttttggagcttccctgagaatgaagaggacattcggctgtattcgtgcctggccaatggcagtgcggatgagtttcagcgaggggatcagctcttccgcatgcgggctgtgaaggacccattgcagatagggttccacctgagtgctacagtggtgccacctcagatggtccctcctaaaggggcctacaacgtggctgtgatgtttgaccgctgccgggtcacttcctgcagctgtacctgtggggctggggccaaatggtgcacccacgtcgtggcactctgtctcttccgcatccacaacgcttctgcagtctgcctgcgagccccagtctcagagtccctgtcccggctacagagggaccagctgcaaaagtttgctcagtacctcatcagtgagctccctcagcaggtgggtgaggtcggcaccccctcctgcaattagctccgggccaggccgcataacagccttcctgttaggcccaggcctccatgggttcacctaggccgtgttctgcctgcctccgtctctttctccctcagatcctccccacagctcagcgtctcctggacgaactcctgtcttcccagtcaacagccatcaatacagtgtgtggagctccggaccccacagcagggccctcagcatcggaccagagtacttggtatctggatgaatcgacactcactgacaacatcaaaaagacactgcacaagttctgtggcccctcccctgtggtcttcagtgatgtgaactccatgtatctgtcttccacggagccgccagccgctgctgaatgggcatgtctgctgcgccctctgaggggccgtgagccagagggcgtctggaacctgctaagcattgtgcgggagatgttcaagcggagggacagcaatgctgcccccttgttggaaatcctcactgaccagtgcctcacctatgaacagataacaggttggtggtatagcgtacgtacctcagcctcacacagcagtgccagtgggcacacgggccgtagcaacgggcagtcagaggtggcagcccatgcctgtgccagcatgtgtgacgagatggtcacactgtggaggctggccgtgctggaccctgcactcagcccccagcggcgccgggaactgtgtacgcagctgcggcagtggcaactgaaggtgattgagaacgtcaagcggggccaacacaagaagacgctggagcggctcttccccggcttccggccagcggtggaggcctgctacttcaactgggaagaggcctacccacttcctggtgtcacctacagcggcactgacaggaagctggcactgtgctgggcccgggccctgccctctcggccaggtgcctcccgctctgggggcctggaggaatcccgggaccggccccgaccccttcctactgagccagctgtgcggcccaaggagcctgggaccaagcgaaagggcttgggtgagggggtcccctcatcacagcggggtccccgccgcctctcagctgaagggggagataaagctctacataagatgggtccaggtgggggcaaagccaaggcactgggtggggctggcagtgggagcaagggctcagcaggtggcggaagcaagcgacggctgagcagcgaagacagctccctggagccagacctggccgagatgagcctggatgacagcagcctggccctgggcgcagaggccagcaccttcgggggattccctgagagccctccaccctgtcctctccacggtggctcccgaggcccttccactttccttcctgagcccccagatacttatgaagaagatggtggtgtgtacttctcggaagggcctgagcctcccacagcctctgttggcccccctggcctactgcctggggatgtctgtacccaggacgacctcccttctacagatgagagtggcaatgggcttcccaaaaccaaagaggcagcccctgcagttggagaggaggatgatgactaccaggcgtactatctgaatgcccaggatggggctgggggcgaggaagagaaggccgagggcggggctggggaggagcacgacctgtttgctgggctgaagccactggaacaggagagtcgcatggaggtactgtttgcctgtgctgaggccctgcatgcgcatggctatagcagtgaggcctcccgtctcactgtggagcttgcccaggatctgctagccaacccacccgacctcaaggtagagccgccccctgccaagggcaagaagaacaaggtatccacgagccgtcagacctgggtggctaccaacaccctgagcaaggcggccttcctgttgacagtgctaagtgagcgtccagagcaccacaacctggccttccgagttggcatgtttgccttggagctacagaggcctccagcttctaccaaggccttggaggtgaagctggcataccaggagtctgaggtggctgccctgctcaagaagatccctctgggtccaagtgagatgagtaccatgcggtgccgggcagaggaacttcgggaggggacactctgtgactatcggcctgtgttgcctctcatgctggccagtttcatctttgacgttctctgtgctccagggttcccggcccccaagtcgcaactggaacagcgagacacctggggatgaggagcttggatttgaagcagcagttgctgccttgggcatgaagacaacagtgagcgaggcagaacatcccctcttatgtgaaggcacacgtcgggagaagggtgacctggcattagcactaatgatcacttacaaggacgaccaggccaagcttaagaagatcttagacaaactcttggaccgagagagccagacacataagccacagacgctgagttctttctactcatctagccgcccaaccacagccagccagaggtctccttcaaagcacgggggcccatctgccccaggggccctgcaaccactgacctcaggctctgcagggcctgctcaaccagggagtgtggcaggggctgggccaggccccactgagggcttcacagagaagaatgtgcctgagagttccccacattccccctgtgagggtcttccatctgaggcagctttgaccccaaggccagaagggaaggttcctagccgcttggcacttggcagtcgtggaggctataatggacggggatgggggtccccaggacggcctaagaagaagcacacaggcatggccagcattgacagcagtgcccctgaaacaacatcggatagttcccccaccttaagccggagaccacttcgagggggctgggcccccacctcctggggtcgaggtcaggacagtgacagcattagcagctcttcttcggactccctgggctcctcatcctccagtggaagtcgccgggccagtgccagtggaggagcccgggcgaagactgttgaagttggcaggtacaagggccgccgccccgagagtcatgcccctcatgtacccaatcagccatcagaggcagctgcacacttctacttcgagctggcgaagacagtgctgatcaaggcagggggcaacagcagcacttccattttcacacatccatcttcctcagggggccaccagggtcctcaccgcaacctgcacctttgcgccttcgagattgggctttatgcccttggcctgcacaactttgtttctcccaactggctctcacgtacttattcttcccacgtttcctggattacaggccaggccatggagataggcagcgcagccctgactatactggtagaatgctgggatgggcacctgacaccccctgaggttgcatccctggctgacagggcatcacgggcaagagactccaatatggtgagggcggcagcagagctggccctgagctgcctgcctcacgcccatgcattgaaccctaatgagatccagcgggccctggtgcagtgcaaggaacaggacaacctgatgttggagaaggcctgcatggcagtggaagaggcagctaagggtgggggcgtgtaccctgaagtgttgtttgaggttgctcaccagtggttctggctatatgagcaaactgcaggtggctcatccacagcccgtgaaggggctacaagctgtagtgccagtgggatcagggcaggtggggaagctgggcggggtatgcctgagggtagagggggcccagggactgagccggttacagtggcagcggcagcagtgacagcagcagccacagtggtgcccgtcatatcggtggggtctagtttatacccgggtccaggactggggcatggccactcccctggcctgcacccctacactgctctacagccccacctgccctgtagccctcagtatctcactcacccagctcaccctgcccaccccatgcctcacatgccccggcctgccgtcttccctgtgcccagctctgcatacccacagggtgtgcatcctgcattcctaggggctcagtacccttattcagtgactcctccctcacttgctgccactgctgtgtctttccccgttccttccatggcacccatcacagtacatccctaccacacagagccagggcttccactgcccaccagtgtggcctgtgagttgtggggccagggaacagtgagcagtgtccatccagcatccacgtttccagccatccaaggtgcctcactgcctgccctgaccacacagcccagccctctggtgagcggaggttttccaccgcccgaggaggagacacacagtcagccagtcaatccccacagcctgcaccacctgcatgctgcctaccgtgtcggaatgctggcactggagatgctgggtcgccgggcacacaacgatcaccccaacaacttctcccgctcccccccctacactgatgatgtcaaatggttgctggggctggcagcaaagctgggagtgaactacgtgcaccagttctgtgtgggggcagccaagggggtgctgagcccgtttgtgctgcaggagatcgtcatggagacgctgcagcggctgagtcccgctcatgcccacaaccacctgcgtgccccggccttccaccaactggtgcagcgctgccagcaggcatacatgcagtacatccaccaccgcttgattcacctgactcctgcggactacgacgactttgtgaatgcgatccggagtgcccgcagcgccttctgcctgacgcccatgggcatgatgcagttcaacgacatcctacagaacctcaagcgcagcaaacagaccaaggagctgtggcagcgggtctcactcgagatggccaccttctccccctgagtctttcacccttagggtcctatacagggacccaggcctgtggctatgggggcccctcacacagggggagtgaaacttggctggacagatcatcctcactcagttccctggtagcacagactgacagctgctcttgggctatagcttggggccaagatgtctcacaccctagaagcctagggctgggggagacagccctgtctgggagggggcgttgggtggcctctggtatttatttggcatttataaatatataaactccttttttactcta

SEQ ID NO: 354186 - DNA, 6235 bp, Homo sapiens
ccttgagtggtaactttatcttagtccaggtgattccagttgcagcagtagctaggtgccctgcgataactctctccccttgagggtttccagtgtgggaagttgtcatttaggcgcgccaaaagtggtctggcctctcgtgcttcttgagatcccttccgggctctggtctatcttgtctccttagctgggggcctacagtcatctagagtaaaagggatggttaaaaaaaaaaaaaaaaggcaatcggagacaagaatgccagaggagagacattaaccatgtaatttgaatttaaaatgctcatggaatatgggaaattcagtgctgagccatgtgagcagggttacttgctagggtcctggaacgcacctgtctggccaggagtttcttaagatatctctggtatcttctgttctagaccttaggtgtagccggctgtgggctggggattatccagctcccctttcccatatggagccttaagggttagtgtatcctgatagggggatccctaggactttcatccaggtctcttctttctttcatagtgaagatgaggcccaggatgttgtactggcatgagtgccaagagaccatggcccttttcatttcctattctctttcccctgatcccaaccattgtttgcaaagatggactggtgatcccattggtggagctgtcagcaaagcaggtggcatttcatatcccatttgaagtggtggagaaagtttacccaccagtgcctgagcagctacagctccgaattgctttttggagcttccctgagaatgaagaggacattcggctgtattcgtgcctggccaatggcagtgcggatgagtttcagcgaggggatcagctcttccgcatgcgggctgtgaaggacccattgcagatagggttccacctgagtgctacagtggtgccacctcagatggtccctcctaaaggggcctacaacgtggctgtgatgtttgaccgctgccgggtcacttcctgcagctgtacctgtggggctggggccaaatggtgcacccacgtcgtggcactctgtctcttccgcatccacaacgcttctgcagtctgcctgcgagccccagtctcagagtccctgtcccggctacagagggaccagctgcaaaagtttgctcagtacctcatcagtgagctccctcagcagatcctccccacagctcagcgtctcctggacgaactcctgtcttcccagtcaacagccatcaatacagtgtgtggagctccggaccccacagcagggccctcagcatcggaccagagtacttggtatctggatgaatcgacactcactgacaacatcaaaaagacactgcacaagttctgtggcccctcccctgtggtcttcagtgatgtgaactccatgtatctgtcttccacggagccgccagccgctgctgaatgggcatgtctgctgcgccctctgaggggccgtgagccagagggcgtctggaacctgctaagcattgtgcgggagatgttcaagcggagggacagcaatgctgcccccttgttggaaatcctcactgaccagtgcctcacctatgaacagataacaggttggtggtatagcgtacgtacctcagcctcacacagcagtgccagtgggcacacgggccgtagcaacgggcagtcagaggtggcagcccatgcctgtgccagcatgtgtgacgagatggtcacactgtggaggctggccgtgctggaccctgcactcagcccccagcggcgccgggaactgtgtacgcagctgcggcagtggcaactgaaggtgattgagaacgtcaagcggggccaacacaagaagacgctggagcggctcttccccggcttccggccagcggtggaggcctgctacttcaactgggaagaggcctacccacttcctggtgtcacctacagcggcactgacaggaagctggcactgtgctgggcccgggccctgccctctcggccaggtgcctcccgctctgggggcctggaggaatcccgggaccggccccgaccccttcctactgagccagctgtgcggcccaaggagcctgggaccaagcgaaagggcttgggtgagggggtcccctcatcacagcggggtccccgccgcctctcagctgaagggggagataaagctctacataagatgggtccaggtgggggcaaagccaaggcactgggtggggctggcagtgggagcaagggctcagcaggtggcggaagcaagcgacggctgagcagcgaagacagctccctggagccagacctggccgagatgagcctggatgacagcagcctggccctgggcgcagaggccagcaccttcgggggattccctgagagccctccaccctgtcctctccacggtggctcccgaggcccttccactttccttcctgagcccccagatacttatgaagaagatggtggtgtgtacttctcggaagggcctgagcctcccacagcctctgttggcccccctggcctactgcctggggatgtctgtacccaggacgacctcccttctacagatgagagtggcaatgggcttcccaaaaccaaagaggcagcccctgcagttggagaggaggatgatgactaccaggcgtactatctgaatgcccaggatggggctgggggcgaggaagagaaggccgagggcggggctggggaggagcacgacctgtttgctgggctgaagccactggaacaggagagtcgcatggaggtactgtttgcctgtgctgaggccctgcatgcgcatggctatagcagtgaggcctcccgtctcactgtggagcttgcccaggatctgctagccaacccacccgacctcaaggtagagccgccccctgccaagggcaagaagaacaaggtatccacgagccgtcagacctgggtggctaccaacaccctgagcaaggcggccttcctgttgacagtgctaagtgagcgtccagagcaccacaacctggccttccgagttggcatgtttgccttggagctacagaggcctccagcttctaccaaggccttggaggtgaagctggcataccaggagtctgaggtggctgccctgctcaagaagatccctctgggtccaagtgagatgagtaccatgcggtgccgggcagaggaacttcgggaggggacactctgtgactatcggcctgtgttgcctctcatgctggccagtttcatctttgacgttctctgtgctccagggttcccggcccccaagtcgcaactggaacagcgagacacctggggatgaggagcttggatttgaagcagcagttgctgccttgggcatgaagacaacagtgagcgaggcagaacatcccctcttatgtgaaggcacacgtcgggagaagggtgacctggcattagcactaatgatcacttacaaggacgaccaggccaagcttaagaagatcttagacaaactcttggaccgagagagccagacacataagccacagacgctgagttctttctactcatctagccgcccaaccacagccagccagaggtctccttcaaagcacgggggcccatctgccccaggggccctgcaaccactgacctcaggctctgcagggcctgctcaaccagggagtgtggcaggggctgggccaggccccactgagggcttcacagagaagaatgtgcctgagagttccccacattccccctgtgagggtcttccatctgaggcagctttgaccccaaggccagaagggaaggttcctagccgcttggcacttggcagtcgtggaggctataatggacggggatgggggtccccaggacggcctaagaagaagcacacaggcatggccagcattgacagcagtgcccctgaaacaacatcggatagttcccccaccttaagccggagaccacttcgagggggctgggcccccacctcctggggtcgaggtcaggacagtgacagcattagcagctcttcttcggactccctgggctcctcatcctccagtggaagtcgccgggccagtgccagtggaggagcccgggcgaagactgttgaagttggcaggtacaagggccgccgccccgagagtcatgcccctcatgtacccaatcagccatcagaggcagctgcacacttctacttcgagctggcgaagacagtgctgatcaaggcagggggcaacagcagcacttccattttcacacatccatcttcctcagggggccaccagggtcctcaccgcaacctgcacctttgcgccttcgagattgggctttatgcccttggcctgcacaactttgtttctcccaactggctctcacgtacttattcttcccacgtttcctggattacaggccaggccatggagataggcagcgcagccctgactatactggtagaatgctgggatgggcacctgacaccccctgaggttgcatccctggctgacagggcatcacgggcaagagactccaatatggtgagggcggcagcagagctggccctgagctgcctgcctcacgcccatgcattgaaccctaatgagatccagcgggccctggtgcagtgcaaggaacaggacaacctgatgttggagaaggcctgcatggcagtggaagaggcagctaagggtgggggcgtgtaccctgaagtgttgtttgaggttgctcaccagtggttctggctatatgagcaaactgcaggtggctcatccacagcccgtgaaggggctacaagctgtagtgccagtgggatcagggcaggtggggaagctgggcggggtatgcctgagggtagagggggcccagggactgagccggttacagtggcagcggcagcagtgacagcagcagccacagtggtgcccgtcatatcggtggggtctagtttatacccgggtccaggactggggcatggccactcccctggcctgcacccctacactgctctacagccccacctgccctgtagccctcagtatctcactcacccagctcaccctgcccaccccatgcctcacatgccccggcctgccgtcttccctgtgcccagctctgcatacccacagggtgtgcatcctgcattcctaggggctcagtacccttattcagtgactcctccctcacttgctgccactgctgtgtctttccccgttccttccatggcacccatcacagtacatccctaccacacagagccagggcttccactgcccaccagtgtggcctgtgagttgtggggccagggaacagtgagcagtgtccatccagcatccacgtttccagccatccaaggtgcctcactgcctgccctgaccacacagcccagccctctggtgagcggaggttttccaccgcccgaggaggagacacacagtcagccagtcaatccccacagcctgcaccacctgcatgctgcctaccgtgtcggaatgctggcactggagatgctgggtcgccgggcacacaacgatcaccccaacaacttctcccgctcccccccctacactgatgatgtcaaatggttgctggggctggcagcaaagctgggagtgaactacgtgcaccagttctgtgtgggggcagccaagggggtgctgagcccgtttgtgctgcaggagatcgtcatggagacgctgcagcggctgagtcccgctcatgcccacaaccacctgcgtgccccggccttccaccaactggtgcagcgctgccagcaggcatacatgcagtacatccaccaccgcttgattcacctgactcctgcggactacgacgactttgtgaatgcgatccggagtgcccgcagcgccttctgcctgacgcccatgggcatgatgcagttcaacgacatcctacagaacctcaagcgcagcaaacagaccaaggagctgtggcagcgggtctcactcgagatggccaccttctccccctgagtctttcacccttagggtcctatacagggacccaggcctgtggctatgggggcccctcacacagggggagtgaaacttggctggacagatcatcctcactcagttccctggtagcacagactgacagctgctcttgggctatagcttggggccaagatgtctcacaccctagaagcctagggctgggggagacagccctgtctgggagggggcgttgggtggcctctggtatttatttggcatttataaatatataaactccttttttactcta

SEQ ID NO: 354187 - DNA, 5480 bp, Homo sapiens
gttcgatcgagctcgtgtaccgtctgagcagctgggaatgaagaggacattcggctgtattcgtgcctggccaatggcagtgcggatgagtttcagcgaggggatcagctcttccgcatgcgggctgtgaaggacccattgcagatagggttccacctgagtgctacagtggtgccacctcagatggtccctcctaaaggggcctacaacgtggctgtgatgtttgaccgctgccgggtcacttcctgcagctgtacctgtggggctggggccaaatggtgcacccacgtcgtggcactctgtctcttccgcatccacaacgcttctgcagtctgcctgcgagccccagtctcagagtccctgtcccggctacagagggaccagctgcaaaagtttgctcagtacctcatcagtgagctccctcagcagatcctccccacagctcagcgtctcctggacgaactcctgtcttcccagtcaacagccatcaatacagtgtgtggagctccggaccccacagcagggccctcagcatcggaccagagtacttggtatctggatgaatcgacactcactgacaacatcaaaaagacactgcacaagttctgtggcccctcccctgtggtcttcagtgatgtgaactccatgtatctgtcttccacggagccgccagccgctgctgaatgggcatgtctgctgcgccctctgaggggccgtgagccagagggcgtctggaacctgctaagcattgtgcgggagatgttcaagcggagggacagcaatgctgcccccttgttggaaatcctcactgaccagtgcctcacctatgaacagataacaggttggtggtatagcgtacgtacctcagcctcacacagcagtgccagtgggcacacgggccgtagcaacgggcagtcagaggtggcagcccatgcctgtgccagcatgtgtgacgagatggtcacactgtggaggctggccgtgctggaccctgcactcagcccccagcggcgccgggaactgtgtacgcagctgcggcagtggcaactgaaggtgattgagaacgtcaagcggggccaacacaagaagacgctggagcggctcttccccggcttccggccagcggtggaggcctgctacttcaactgggaagaggcctacccacttcctggtgtcacctacagcggcactgacaggaagctggcactgtgctgggcccgggccctgccctctcggccaggtgcctcccgctctgggggcctggaggaatcccgggaccggccccgaccccttcctactgagccagctgtgcggcccaaggagcctgggaccaagcgaaagggcttgggtgagggggtcccctcatcacagcggggtccccgccgcctctcagctgaagggggagataaagctctacataagatgggtccaggtgggggcaaagccaaggcactgggtggggctggcagtgggagcaagggctcagcaggtggcggaagcaagcgacggctgagcagcgaagacagctccctggagccagacctggccgagatgagcctggatgacagcagcctggccctgggcgcagaggccagcaccttcgggggattccctgagagccctccaccctgtcctctccacggtggctcccgaggcccttccactttccttcctgagcccccagatacttatgaagaagatggtggtgtgtacttctcggaagggcctgagcctcccacagcctctgttggcccccctggcctactgcctggggatgtctgtacccaggacgacctcccttctacagatgagagtggcaatgggcttcccaaaaccaaagaggcagcccctgcagttggagaggaggatgatgactaccaggcgtactatctgaatgcccaggatggggctgggggcgaggaagagaaggccgagggcggggctggggaggagcacgacctgtttgctgggctgaagccactggaacaggagagtcgcatggaggtactgtttgcctgtgctgaggccctgcatgcgcatggctatagcagtgaggcctcccgtctcactgtggagcttgcccaggatctgctagccaacccacccgacctcaaggtagagccgccccctgccaagggcaagaagaacaaggtatccacgagccgtcagacctgggtggctaccaacaccctgagcaaggcggccttcctgttgacagtgctaagtgagcgtccagagcaccacaacctggccttccgagttggcatgtttgccttggagctacagaggcctccagcttctaccaaggccttggaggtgaagctggcataccaggagtctgaggtggctgccctgctcaagaagatccctctgggtccaagtgagatgagtaccatgcggtgccgggcagaggaacttcgggaggggacactctgtgactatcggcctgtgttgcctctcatgctggccagtttcatctttgacgttctctgtgctccagggttcccggcccccaagtcgcaactggaacagcgagacacctggggatgaggagcttggatttgaagcagcagttgctgccttgggcatgaagacaacagtgagcgaggcagaacatcccctcttatgtgaaggcacacgtcgggagaagggtgacctggcattagcactaatgatcacttacaaggacgaccaggccaagcttaagaagatcttagacaaactcttggaccgagagagccagacacataagccacagacgctgagttctttctactcatctagccgcccaaccacagccagccagaggtctccttcaaagcacgggggcccatctgccccaggggccctgcaaccactgacctcaggctctgcagggcctgctcaaccagggagtgtggcaggggctgggccaggccccactgagggcttcacagagaagaatgtgcctgagagttccccacattccccctgtgagggtcttccatctgaggcagctttgaccccaaggccagaagggaaggttcctagccgcttggcacttggcagtcgtggaggctataatggacggggatgggggtccccaggacggcctaagaagaagcacacaggcatggccagcattgacagcagtgcccctgaaacaacatcggatagttcccccaccttaagccggagaccacttcgagggggctgggcccccacctcctggggtcgaggtcaggacagtgacagcattagcagctcttcttcggactccctgggctcctcatcctccagtggaagtcgccgggccagtgccagtggaggagcccgggcgaagactgttgaagttggcaggtacaagggccgccgccccgagagtcatgcccctcatgtacccaatcagccatcagaggcagctgcacacttctacttcgagctggcgaagacagtgctgatcaaggcagggggcaacagcagcacttccattttcacacatccatcttcctcagggggccaccagggtcctcaccgcaacctgcacctttgcgccttcgagattgggctttatgcccttggcctgcacaactttgtttctcccaactggctctcacgtacttattcttcccacgtttcctggattacaggccaggccatggagataggcagcgcagccctgactatactggtagaatgctgggatgggcacctgacaccccctgaggttgcatccctggctgacagggcatcacgggcaagagactccaatatggtgagggcggcagcagagctggccctgagctgcctgcctcacgcccatgcattgaaccctaatgagatccagcgggccctggtgcagtgcaaggaacaggacaacctgatgttggagaaggcctgcatggcagtggaagaggcagctaagggtgggggcgtgtaccctgaagtgttgtttgaggttgctcaccagtggttctggctatatgagcaaactgcaggtggctcatccacagcccgtgaaggggctacaagctgtagtgccagtgggatcagggcaggtggggaagctgggcggggtatgcctgagggtagagggggcccagggactgagccggttacagtggcagcggcagcagtgacagcagcagccacagtggtgcccgtcatatcggtggggtctagtttatacccgggtccaggactggggcatggccactcccctggcctgcacccctacactgctctacagccccacctgccctgtagccctcagtatctcactcacccagctcaccctgcccaccccatgcctcacatgccccggcctgccgtcttccctgtgcccagctctgcatacccacagggtgtgcatcctgcattcctaggggctcagtacccttattcagtgactcctccctcacttgctgccactgctgtgtctttccccgttccttccatggcacccatcacagtacatccctaccacacagagccagggcttccactgcccaccagtgtggcctgtgagttgtggggccagggaacagtgagcagtgtccatccagcatccacgtttccagccatccaaggtgcctcactgcctgccctgaccacacagcccagccctctggtgagcggaggttttccaccgcccgaggaggagacacacagtcagccagtcaatccccacagcctgcaccacctgcatgctgcctaccgtgtcggaatgctggcactggagatgctgggtcgccgggcacacaacgatcaccccaacaacttctcccgctcccccccctacactgatgatgtcaaatggttgctggggctggcagcaaagctgggagtgaactacgtgcaccagttctgtgtgggggcagccaagggggtgctgagcccgtttgtgctgcaggagatcgtcatggagacgctgcagcggctgagtcccgctcatgcccacaaccacctgcgtgccccggccttccaccaactggtgcagcgctgccagcaggcatacatgcagtacatccaccaccgcttgattcacctgactcctgcggactacgacgactttgtgaatgcgatccggagtgcccgcagcgccttctgcctgacgcccatgggcatgatgcagttcaacgacatcctacagaacctcaagcgcagcaaacagaccaaggagctgtggcagcgggtctcactcgagatggccaccttctccccctgagtctttcacccttagggtcctatacagggacccaggcctgtggctatgggggcccctcacacagggggagtgaaacttggctggacagatcatcctcactcagttccctggtagcacagactgacagctgctcttgggctatagcttggggccaagatgtctcacaccctagaagcctagggctgggggagacagccctgtctgggagggggcgttgggtggcctctggtatttatttggcatttataaatatataaactccttttttactcta

SEQ ID NO: 354188 - DNA, 6493 bp, Homo sapiens
cactctgttccttcatctccgaggccgagagcctctgccagaactggcggggatggcgcaaacagtcagcggggcccaattcccccactggcggcggtggcggaggtggcagtggcggtaccagaatgcgagatggactggtgatcccattggtggagctgtcagcaaagcaggtggcatttcatatcccatttgaagtggtggagaaagtttacccaccagtgcctgagcagctacagctccgaattgctttttggagcttccctgagaatgaagaggacattcggctgtattcgtgcctggccaatggcagtgcggatgagtttcagcgaggggatcagctcttccgcatgcgggctgtgaaggacccattgcagatagggttccacctgagtgctacagtggtgccacctcagatggtccctcctaaaggggcctacaacgtggctgtgatgtttgaccgctgccgggtcacttcctgcagctgtacctgtggggctggggccaaatggtgcacccacgtcgtggcactctgtctcttccgcatccacaacgcttctgcagtctgcctgcgagccccagtctcagagtccctgtcccggctacagagggaccagctgcaaaagtttgctcagtacctcatcagtgagctccctcagcaggtgggtgaggtcggcaccccctcctgcaattagctccgggccaggccgcataacagccttcctgttaggcccaggcctccatgggttcacctaggccgtgttctgcctgcctccgtctctttctccctcagatcctccccacagctcagcgtctcctggacgaactcctgtcttcccagtcaacagccatcaatacagtgtgtggagctccggaccccacagcagggccctcagcatcggaccagagtacttggtatctggatgaatcgacactcactgacaacatcaaaaagacactgcacaagttctgtggcccctcccctgtggtcttcagtgatgtgaactccatgtatctgtcttccacggagccgccagccgctgctgaatgggcatgtctgctgcgccctctgaggggccgtgagccagagggcgtctggaacctgctaagcattgtgcgggagatgttcaagcggagggacagcaatgctgcccccttgttggaaatcctcactgaccagtgcctcacctatgaacagataacaggttggtggtatagcgtacgtacctcagcctcacacagcagtgccagtgggcacacgggccgtagcaacgggcagtcagaggtggcagcccatgcctgtgccagcatgtgtgacgagatggtcacactgtggaggctggccgtgctggaccctgcactcagcccccagcggcgccgggaactgtgtacgcagctgcggcagtggcaactgaaggtgattgagaacgtcaagcggggccaacacaagaagacgctggagcggctcttccccggcttccggccagcggtggaggcctgctacttcaactgggaagaggcctacccacttcctggtgtcacctacagcggcactgacaggaagctggcactgtgctgggcccgggccctgccctctcggccaggtgcctcccgctctgggggcctggaggaatcccgggaccggccccgaccccttcctactgagccagctgtgcggcccaaggagcctgggaccaagcgaaagggcttgggtgagggggtcccctcatcacagcggggtccccgccgcctctcagctgaagggggagataaagctctacataagatgggtccaggtgggggcaaagccaaggcactgggtggggctggcagtgggagcaagggctcagcaggtggcggaagcaagcgacggctgagcagcgaagacagctccctggagccagacctggccgagatgagcctggatgacagcagcctggccctgggcgcagaggccagcaccttcgggggattccctgagagccctccaccctgtcctctccacggtggctcccgaggcccttccactttccttcctgagcccccagatacttatgaagaagatggtggtgtgtacttctcggaagggcctgagcctcccacagcctctgttggcccccctggcctactgcctggggatgtctgtacccaggacgacctcccttctacagatgagagtggcaatgggcttcccaaaaccaaagaggcagcccctgcagttggagaggaggatgatgactaccaggcgtactatctgaatgcccaggatggggctgggggcgaggaagagaaggccgagggcggggctggggaggagcacgacctgtttgctgggctgaagccactggaacaggagagtcgcatggaggtactgtttgcctgtgctgaggccctgcatgcgcatggctatagcagtgaggcctcccgtctcactgtggagcttgcccaggatctgctagccaacccacccgacctcaagggcaagaagaacaaggtatccacgagccgtcagacctgggtggctaccaacaccctgagcaaggcggccttcctgttgacagtgctaagtgagcgtccagagcaccacaacctggccttccgagttggcatgtttgccttggagctacagaggcctccagcttctaccaaggccttggaggtgaagctggcataccaggagtctgaggtggctgccctgctcaagaagatccctctgggtccaagtgagatgagtaccatgcggtgccgggcagaggaacttcgggaggggacactctgtgactatcggcctgtgttgcctctcatgctggccagtttcatctttgacgttctctgtgctccagggttcccggcccccaagtcgcaactggaacagcgagacacctggggatgaggagcttggatttgaagcagcagttgctgccttgggcatgaagacaacagtgagcgaggcagaacatcccctcttatgtgaaggcacacgtcgggagaagggtgacctggcattagcactaatgatcacttacaaggacgaccaggccaagcttaagaagatcttagacaaactcttggaccgagagagccagacacataagccacagacgctgagttctttctactcatctagccgcccaaccacagccagccagaggtctccttcaaagcacgggggcccatctgccccaggggccctgcaaccactgacctcaggctctgcagggcctgctcaaccagggagtgtggcaggggctgggccaggccccactgagggcttcacagagaagaatgtgcctgagagttccccacattccccctgtgagggtcttccatctgaggcagctttgaccccaaggccagaagggaaggttcctagccgcttggcacttggcagtcgtggaggctataatggacggggatgggggtccccaggacggcctaagaagaagcacacaggcatggccagcattgacagcagtgcccctgaaacaacatcggatagttcccccaccttaagccggagaccacttcgagggggctgggcccccacctcctggggtcgaggtcaggacagtgacagcattagcagctcttcttcggactccctgggctcctcatcctccagtggaagtcgccgggccagtgccagtggaggagcccgggcgaagactgttgaagttggcaggtacaagggccgccgccccgagagtcatgcccctcatgtacccaatcagccatcagaggcagctgcacacttctacttcgagctggcgaagacagtgctgatcaaggcagggggcaacagcagcacttccattttcacacatccatcttcctcagggggccaccagggtcctcaccgcaacctgcacctttgcgccttcgagattgggctttatgcccttggcctgcacaactttgtttctcccaactggctctcacgtacttattcttcccacgtttcctggattacaggccaggccatggagataggcagcgcagccctgactatactggtagaatgctgggatgggcacctgacaccccctgaggttgcatccctggctgacagggcatcacgggcaagagactccaatatggtgagggcggcagcagagctggccctgagctgcctgcctcacgcccatgcattgaaccctaatgagatccagcgggccctggtgcagtgcaaggaacaggacaacctgatgttggagaaggcctgcatggcagtggaagaggcagctaagggtgggggcgtgtaccctgaagtgttgtttgaggttgctcaccagtggttctggctatatgagcaaactgcaggtggctcatccacagcccgtgaaggggctacaagctgtagtgccagtgggatcagggcaggtggggaagctgggcggggtatgcctgagggtagagggggcccagggactgagccggttacagtggcagcggcagcagtgacagcagcagccacagtggtgcccgtcatatcggtggggtctagtttatacccgggtccaggactggggcatggccactcccctggcctgcacccctacactgctctacagccccacctgccctgtagccctcagtatctcactcacccagctcaccctgcccaccccatgcctcacatgccccggcctgccgtcttccctgtgcccagctctgcatacccacaggtgagaccagtgttctgctggggggtaaggcatgggaaaatactgggaattcatagggggttggagtgggtactctgggagtataattggtcagtcggagagtcctggtgaggtggtgggagtctgggggacccagcccaactaaaataagaaatgacggccgggcatggtggctcatgcctgtaatcccagcactttgagaggccgatgtgggtggatcacttgaggtcaggagttcgagaccagcctggccaacatggggaaaccccgtctctactaaaaattagctgagtgcacgcctgtaatcccagcttcttgggaggctgagatgggaatcacttgaacctgggaggcagaggttgcagtgagccgatatcgtgccactgcactccagcctggaggacagagcgagactctatctatctcaaaaaaaacatgtcaggatagcagcttgtgggggtgaagcacgacagcaacatcctaatcaagtttggcatcttcccctttcttctccctgcccctagggtgtgcatcctgcattcctaggggctcagtacccttattcagtgactcctccctcacttgctgccactgctgtgtctttccccgttccttccatggcacccatcacagtacatccctaccacacagagccagggcttccactgcccaccagtgtggccttgagcagtgtccatccagcatccacgtttccagccatccaaggtgcctcactgcctgccctgaccacacagcccagccctctggtgagcggaggttttccaccgcccgaggaggagacacacagtcagccagtcaatccccacagcctgcaccacctgcatgctgcctaccgtgtcggtgagaggacatccctttctgtgctcctacctgcagttgtgccagtggctcttcagaggacccttcctctagctcttcatttgtttactgtggggtcaggtgacaggttggggtaaagggtgaagaggatacaccgtaccatgtgcccaccctatctatctatctcccaggaatgctggcactggagatgctgggtcgccgggcacacaacgatcaccccaacaacttctcccgctcccccccctacactgatgatgtcaaatggttgctggggctggcagcaaagctgggagtgaactacgtgcaccagttctgtgtgggggcagccaagggggtgctgagcccgtttgtgctgcaggagatcgtcatggagacgctgcagcggctgagtcccgctcatgcccacaaccacctgcgtgccccggccttccaccaactggtgcagcgctgccagcaggcatacatgcagtacatccaccaccgcttgattcacctgactcctgcggactacgacgactttgtgaatgcgatccggagtgcccgcagcgccttctgcctgacgcccatgggcatgatgcagttcaacgacatcctacagaacctcaagcgcagcaaacagaccaaggagctgtggcagcgggtctcactcgagatggccaccttctccccctgagtctttcacccttagggtcctatacagggacccaggcctgtggctatgggggcccctcacacagggggagtgaaacttggctggacagatcatcctcactcagttccctggtagcacagactgacagctgctcttgggctatagcttggggccaagatgtctcacaccctagaagcctagggctgggggagacagccctgtctgggagggggcgttgggtggcctctggtatttatttggcatttataaatatataaactccttttttactcta

SEQ ID NO: 354189 - DNA, 5820 bp, Homo sapiens
cactctgttccttcatctccgaggccgagagcctctgccagaactggcggggatggcgcaaacagtcagcggggcccaattcccccactggcggcggtggcggaggtggcagtggcggtaccagaatgcgagatggactggtgatcccattggtggagctgtcagcaaagcaggtggcatttcatatcccatttgaagtggtggagaaagtttacccaccagtgcctgagcagctacagctccgaattgctttttggagcttccctgagaatgaagaggacattcggctgtattcgtgcctggccaatggcagtgcggatgagtttcagcgaggggatcagctcttccgcatgcgggctgtgaaggacccattgcagatagggttccacctgagtgctacagtggtgccacctcagatggtccctcctaaaggggcctacaacgtggctgtgatgtttgaccgctgccgggtcacttcctgcagctgtacctgtggggctggggccaaatggtgcacccacgtcgtggcactctgtctcttccgcatccacaacgcttctgcagtctgcctgcgagccccagtctcagagtccctgtcccggctacagagggaccagctgcaaaagtttgctcagtacctcatcagtgagctccctcagcaggtgggtgaggtcggcaccccctcctgcaattagctccgggccaggccgcataacagccttcctgttaggcccaggcctccatgggttcacctaggccgtgttctgcctgcctccgtctctttctccctcagatcctccccacagctcagcgtctcctggacgaactcctgtcttcccagtcaacagccatcaatacagtgtgtggagctccggaccccacagcagggccctcagcatcggaccagagtacttggtatctggatgaatcgacactcactgacaacatcaaaaagacactgcacaagttctgtggcccctcccctgtggtcttcagtgatgtgaactccatgtatctgtcttccacggagccgccagccgctgctgaatgggcatgtctgctgcgccctctgaggggccgtgagccagagggcgtctggaacctgctaagcattgtgcgggagatgttcaagcggagggacagcaatgctgcccccttgttggaaatcctcactgaccagtgcctcacctatgaacagataacaggttggtggtatagcgtacgtacctcagcctcacacagcagtgccagtgggcacacgggccgtagcaacgggcagtcagaggtggcagcccatgcctgtgccagcatgtgtgacgagatggtcacactgtggaggctggccgtgctggaccctgcactcagcccccagcggcgccgggaactgtgtacgcagctgcggcagtggcaactgaaggtgattgagaacgtcaagcggggccaacacaagaagacgctggagcggctcttccccggcttccggccagcggtggaggcctgctacttcaactgggaagaggcctacccacttcctggtgtcacctacagcggcactgacaggaagctggcactgtgctgggcccgggccctgccctctcggccaggtgcctcccgctctgggggcctggaggaatcccgggaccggccccgaccccttcctactgagccagctgtgcggcccaaggagcctgggaccaagcgaaagggcttgggtgagggggtcccctcatcacagcggggtccccgccgcctctcagctgaagggggagataaagctctacataagatgggtccaggtgggggcaaagccaaggcactgggtggggctggcagtgggagcaagggctcagcaggtggcggaagcaagcgacggctgagcagcgaagacagctccctggagccagacctggccgagatgagcctggatgacagcagcctggccctgggcgcagaggccagcaccttcgggggattccctgagagccctccaccctgtcctctccacggtggctcccgaggcccttccactttccttcctgagcccccagatacttatgaagaagatggtggtgtgtacttctcggaagggcctgagcctcccacagcctctgttggcccccctggcctactgcctggggatgtctgtacccaggacgacctcccttctacagatgagagtggcaatgggcttcccaaaaccaaagaggcagcccctgcagttggagaggaggatgatgactaccaggcgtactatctgaatgcccaggatggggctgggggcgaggaagagaaggccgagggcggggctggggaggagcacgacctgtttgctgggctgaagccactggaacaggagagtcgcatggaggtactgtttgcctgtgctgaggccctgcatgcgcatggctatagcagtgaggcctcccgtctcactgtggagcttgcccaggatctgctagccaacccacccgacctcaaggtagagccgccccctgccaagggcaagaagaacaaggtatccacgagccgtcagacctgggtggctaccaacaccctgagcaaggcggccttcctgttgacagtgctaagtgagcgtccagagcaccacaacctggccttccgagttggcatgtttgccttggagctacagaggcctccagcttctaccaaggccttggaggtgaagctggcataccaggagtctgaggtggctgccctgctcaagaagatccctctgggtccaagtgagatgagtaccatgcggtgccgggcagaggaacttcgggaggggacactctgtgactatcggcctgtgttgcctctcatgctggccagtttcatctttgacgttctctgtgctccagggttcccggcccccaagtcgcaactggaacagcgagacacctggggatgaggagcttggatttgaagcagcagttgctgccttgggcatgaagacaacagtgagcgaggcagaacatcccctcttatgtgaaggcacacgtcgggagaagggtgacctggcattagcactaatgatcacttacaaggacgaccaggccaagcttaagaagatcttagacaaactcttggaccgagagagccagacacataagccacagacgctgagttctttctactcatctagccgcccaaccacagccagccagaggtctccttcaaagcacgggggcccatctgccccaggggccctgcaaccactgacctcaggctctgcagggcctgctcaaccagggagtgtggcaggggctgggccaggccccactgagggcttcacagagaagaatgtgcctgagagttccccacattccccctgtgagggtcttccatctgaggcagctttgaccccaaggccagaagggaaggttcctagccgcttggcacttggcagtcgtggaggctataatggacggggatgggggtccccaggacggcctaagaagaagcacacaggcatggccagcattgacagcagtgcccctgaaacaacatcggatagttcccccaccttaagccggagaccacttcgagggggctgggcccccacctcctggggtcgaggtcaggacagtgacagcattagcagctcttcttcggactccctgggctcctcatcctccagtggaagtcgccgggccagtgccagtggaggagcccgggcgaagactgttgaagttggcaggtacaagggccgccgccccgagagtcatgcccctcatgtacccaatcagccatcagaggcagctgcacacttctacttcgagctggcgaagacagtgctgatcaaggcagggggcaacagcagcacttccattttcacacatccatcttcctcagggggccaccagggtcctcaccgcaacctgcacctttgcgccttcgagattgggctttatgcccttggcctgcacaactttgtttctcccaactggctctcacgtacttattcttcccacgtttcctggattacaggccaggccatggagataggcagcgcagccctgactatactggtagaatgctgggatgggcacctgacaccccctgaggttgcatccctggctgacagggcatcacgggcaagagactccaatatggtgagggcggcagcagagctggccctgagctgcctgcctcacgcccatgcattgaaccctaatgagatccagcgggccctggtgcagtgcaaggaacaggacaacctgatgttggagaaggcctgcatggcagtggaagaggcagctaagggtgggggcgtgtaccctgaagtgttgtttgaggttgctcaccagtggttctggctatatgagcaaactgcaggtggctcatccacagcccgtgaaggggctacaagctgtagtgccagtgggatcagggcaggtggggaagctgggcggggtatgcctgagggtagagggggcccagggactgagccggttacagtggcagcggcagcagtgacagcagcagccacagtggtgcccgtcatatcggtggggtctagtttatacccgggtccaggactggggcatggccactcccctggcctgcacccctacactgctctacagccccacctgccctgtagccctcagtatctcactcacccagctcaccctgcccaccccatgcctcacatgccccggcctgccgtcttccctgtgcccagctctgcatacccacagggtgtgcatcctgcattcctaggggctcagtacccttattcagtgactcctccctcacttgctgccactgctgtgtctttccccgttccttccatggcacccatcacagtacatccctaccacacagagccagggcttccactgcccaccagtgtggccttgagcagtgtccatccagcatccacgtttccagccatccaaggtgcctcactgcctgccctgaccacacagcccagccctctggtgagcggaggttttccaccgcccgaggaggagacacacagtcagccagtcaatccccacagcctgcaccacctgcatgctgcctaccgtgtcggaatgctggcactggagatgctgggtcgccgggcacacaacgatcaccccaacaacttctcccgctcccccccctacactgatgatgtcaaatggttgctggggctggcagcaaagctgggagtgaactacgtgcaccagttctgtgtgggggcagccaagggggtgctgagcccgtttgtgctgcaggagatcgtcatggagacgctgcagcggctgagtcccgctcatgcccacaaccacctgcgtgccccggccttccaccaactggtgcagcgctgccagcaggcatacatgcagtacatccaccaccgcttgattcacctgactcctgcggactacgacgactttgtgaatgcgatccggagtgcccgcagcgccttctgcctgacgcccatgggcatgatgcagttcaacgacatcctacagaacctcaagcgcagcaaacagaccaaggagctgtggcagcgggtctcactcgagatggccaccttctccccctgagtctttcacccttagggtcctatacagggacccaggcctgtggctatgggggcccctcacacagggggagtgaaacttggctggacagatcatcctcactcagttccctggtagcacagactgacagctgctcttgggctatagcttggggccaagatgtctcacaccctagaagcctagggctgggggagacagccctgtctgggagggggcgttgggtggcctctggtatttatttggcatttataaatatataaactccttttttactcta

SEQ ID NO: 354190 - DNA, 6967 bp, Homo sapiens
  misc_feature (6967)..(6967): n is a, c, g, or t
cactctgttccttcatctccgaggccgagagcctctgccagaactggcggggatggcgcaaacagtcagcggggcccaattcccccactggcggcggtggcggaggtggcagtggcggtaccagaatgcgagatggactggtgatcccattggtggagctgtcagcaaagcaggtggcatttcatatcccatttgaagtggtggagaaagtttacccaccagtgcctgagcagctacagctccgaattgctttttggagcttccctgagaatgaagaggacattcggctgtattcgtgcctggccaatggcagtgcggatgagtttcagcgaggggatcagctcttccgcatgcgggctgtgaaggacccattgcagatagggttccacctgagtgctacagtggtgccacctcagatggtccctcctaaaggggcctacaacgtggctgtgatgtttgaccgctgccgggtcacttcctgcagctgtacctgtggggctggggccaaatggtgcacccacgtcgtggcactctgtctcttccgcatccacaacgcttctgcagtctgcctgcgagccccagtctcagagtccctgtcccggctacagagggaccagctgcaaaagtttgctcagtacctcatcagtgagctccctcagcaggtgggtgaggtcggcaccccctcctgcaattagctccgggccaggccgcataacagccttcctgttaggcccaggcctccatgggttcacctaggccgtgttctgcctgcctccgtctctttctccctcagatcctccccacagctcagcgtctcctggacgaactcctgtcttcccagtcaacagccatcaatacagtgtgtggagctccggaccccacagcagggccctcagcatcggaccagagtacttggtatctggatgaatcgacactcactgacaacatcaaaaagacactgcacaagttctgtggcccctcccctgtggtcttcagtgatgtgaactccatgtatctgtcttccacggagccgccagccgctgctgaatgggcatgtctgctgcgccctctgaggggccgtgagccagagggcgtctggaacctgctaagcattgtgcgggagatgttcaagcggagggacagcaatgctgcccccttgttggaaatcctcactgaccagtgcctcacctatgaacagataacaggttggtggtatagcgtacgtacctcagcctcacacagcagtgccagtgggcacacgggccgtagcaacgggcagtcagaggtggcagcccatgcctgtgccagcatgtgtgacgagatggtcacactgtggaggctggccgtgctggaccctgcactcagcccccagcggcgccgggaactgtgtacgcagctgcggcagtggcaactgaaggtgattgagaacgtcaagcggggccaacacaagaagacgctggagcggctcttccccggcttccggccagcggtggaggcctgctacttcaactgggaagaggcctacccacttcctggtgtcacctacagcggcactgacaggaagctggcactgtgctgggcccgggccctgccctctcggccaggtgcctcccgctctgggggcctggaggaatcccgggaccggccccgaccccttcctactgagccagctgtgcggcccaaggagcctgggaccaagcgaaagggcttgggtgagggggtcccctcatcacagcggggtccccgccgcctctcagctgaagggggagataaagctctacataagatgggtccaggtgggggcaaagccaaggcactgggtggggctggcagtgggagcaagggctcagcaggtggcggaagcaagcgacggctgagcagcgaagacagctccctggagccagacctggccgagatgagcctggatgacagcagcctggccctgggcgcagaggccagcaccttcgggggattccctgagagccctccaccctgtcctctccacggtggctcccgaggcccttccactttccttcctgagcccccagatacttatgaagaagatggtggtgtgtacttctcggaagggcctgagcctcccacagcctctgttggcccccctggcctactgcctggggatgtctgtacccaggacgacctcccttctacagatgagagtggcaatgggcttcccaaaaccaaagaggcagcccctgcagttggagaggaggatgatgactaccaggcgtactatctgaatgcccaggatggggctgggggcgaggaagagaaggccgagggcggggctggggaggagcacgacctgtttgctgggctgaagccactggaacaggagagtcgcatggaggtactgtttgcctgtgctgaggccctgcatgcgcatggctatagcagtgaggcctcccgtctcactgtggagcttgcccaggatctgctagccaacccacccgacctcaagggcaagaagaacaaggtatccacgagccgtcagacctgggtggctaccaacaccctgagcaaggcggccttcctgttgacagtgctaagtgagcgtccagagcaccacaacctggccttccgagttggcatgtttgccttggagctacagaggcctccagcttctaccaaggccttggaggtgaagctggcataccaggagtctgaggtggctgccctgctcaagaagatccctctgggtccaagtgagatgagtaccatgcggtgccgggcagaggaacttcgggaggggacactctgtgactatcggcctgtgttgcctctcatgctggccagtttcatctttgacgttctctgtgctccagggttcccggcccccaagtcgcaactggaacagcgagacacctggggatgaggagcttggatttgaagcagcagttgctgccttgggcatgaagacaacagtgagcgaggcagaacatcccctcttatgtgaaggcacacgtcgggagaagggtgacctggcattagcactaatgatcacttacaaggacgaccaggccaagcttaagaagatcttagacaaactcttggaccgagagagccagacacataagccacagacgctgagttctttctactcatctagccgcccaaccacagccagccagaggtctccttcaaagcacgggggcccatctgccccaggggccctgcaaccactgacctcaggctctgcagggcctgctcaaccagggagtgtggcaggggctgggccaggccccactgagggcttcacagagaagaatgtgcctgagagttccccacattccccctgtgagggtcttccatctgaggcagctttgaccccaaggccagaagggaaggttcctagccgcttggcacttggcagtcgtggaggctataatggacggggatgggggtccccaggacggcctaagaagaagcacacaggcatggccagcattgacagcagtgcccctgaaacaacatcggatagttcccccaccttaagccggagaccacttcgagggggctgggcccccacctcctggggtcgaggtcaggacagtgacagcattagcagctcttcttcggactccctgggctcctcatcctccagtggaagtcgccgggccagtgccagtggaggagcccgggcgaagactgttgaagttggcaggtacaagggccgccgccccgagagtcatgcccctcatgtacccaatcagccatcagaggcagctgcacacttctacttcgagctggcgaagacagtgctgatcaaggcagggggcaacagcagcacttccattttcacacatccatcttcctcagggggccaccagggtcctcaccgcaacctgcacctttgcgccttcgagattgggctttatgcccttggcctgcacaactttgtttctcccaactggctctcacgtacttattcttcccacgtttcctggattacaggccaggccatggagataggcagcgcagccctgactatactggtagaatgctgggatgggcacctgacaccccctgaggttgcatccctggctgacagggcatcacgggcaagagactccaatatggtgagggcggcagcagagctggccctgagctgcctgcctcacgcccatgcattgaaccctaatgagatccagcgggccctggtgcagtgcaaggaacaggacaacctgatgttggagaaggcctgcatggcagtggaagaggcagctaagggtgggggcgtgtaccctgaagtgttgtttgaggttgctcaccagtggttctggctatatgagcaaactgcaggtggctcatccacagcccgtgaaggggctacaagctgtagtgccagtgggatcagggcaggtggggaagctgggcggggtatgcctgagggtagagggggcccagggactgagccggttacagtggcagcggcagcagtgacagcagcagccacagtggtgcccgtcatatcggtggggtctagtttatacccgggtccaggactggggcatggccactcccctggcctgcacccctacactgctctacagccccacctgccctgtagccctcagtatctcactcacccagctcaccctgcccaccccatgcctcacatgccccggcctgccgtcttccctgtgcccagctctgcatacccacaggtgagaccagtgttctgctggggggtaaggcatgggaaaatactgggaattcatagggggttggagtgggtactctgggagtataattggtcagtcggagagtcctggtgaggtggtgggagtctgggggacccagcccaactaaaataagaaatgacggccgggcatggtggctcatgcctgtaatcccagcactttgagaggccgatgtgggtggatcacttgaggtcaggagttcgagaccagcctggccaacatggggaaaccccgtctctactaaaaattagctgagtgcacgcctgtaatcccagcttcttgggaggctgagatgggaatcacttgaacctgggaggcagaggttgcagtgagccgatatcgtgccactgcactccagcctggaggacagagcgagactctatctatctcaaaaaaaacatgtcaggatagcagcttgtgggggtgaagcacgacagcaacatcctaatcaagtttggcatcttcccctttcttctccctgcccctagggtgtgcatcctgcattcctaggggctcagtacccttattcagtgactcctccctcacttgctgccactgctgtgtctttccccgttccttccatggcacccatcacagtacatccctaccacacagagccagggcttccactgcccaccagtgtggccttgagcagtgtccatccagcatccacgtttccagccatccaaggtgcctcactgcctgccctgaccacacagcccagccctctggtgagcggaggttttccaccgcccgaggaggagacacacagtcagccagtcaatccccacagcctgcaccacctgcatgctgcctaccgtgtcggaatgctggcactggagatgctgggtcgccgggcacacaacgatcaccccaacaacttctcccgctcccccccctacactgatgatgtcaaatggttgctggggctggcagcaaagctgggagtgaactacgtgcaccagttctgtgtgggggcagccaagggggtgctgagcccgtttgtgctgcaggagatcgtcatggagacgctgcagcggctgagtcccgctcatgcccacaaccacctgcgtgccccggccttccaccaactggtgcagcgctgccagcaggcatacatgcagtacatccaccaccgcttgattcacctgactcctgcggactacgacgactttgtgaatgcgatccggagtgcccgcagcgccttctgcctgacgcccatgggcatgatgcagttcaacgacatcctacagaacctcaagcgcagcaaacagaccaaggagctgtggcagcgggtctcactcgagatggccaccttctccccctgagtctttcacccttagggtcctatacagggacccaggcctgtggctatgggggcccctcacacagggggagtgaaacttggctggacagatcatcctcactcagttccctggtagcacagactgacagctgctcttgggctatagcttggggccaagatgtctcacaccctagaagcctagggctgggggagacagccctgtctgggagggggcgttgggtggcctctggtatttatttggcatttataaatatataaactccttttttactctaaaaaaaaaaaaaaaaaaaaaaaaaaaaaaaaaaaaaaaaaaaagaagagagagagagaagaaaaaaaaaaaaacacgaaaaaagagaagcaaacaaggaagagagggggggggcgcgccgccaagaaatgatcctcccccggggggggcgcccacagagacgggcgcccgcaccacacacgttttgggggaagaaggaggggcgcgccccacaaagaggggggggttttttaaagaaagaggggccggcgggcgggggcgactaatatataacaaaccggcaggccctgcgtggaggacaaaagcccggcggggcgcccaagtaagtcgctgctgaagaaaaaggaccacacccccctaacttttttgtggggggggcgggcggagcgaggatatagtgcgtgggacaacccctacccagcgggcgagatataattttggatgccaccccacacggggacgagcaaataataaccttccgcgacggtgagagtagatgtgggtgcttacaccaacgctctcagattattagtccgaacgccggtgtaggcaaacacgctgctgccccctcggcggaacagtattctttggcgacgcaaacaattcttcttaccgccgcgcgcgccggagcttgctattaatagn

SEQ ID NO: 354191 - DNA, 6064 bp, Homo sapiens
cactctgttccttcatctccgaggccgagagcctctgccagaactggcggggatggcgcaaacagtcagcggggcccaattcccccactggcggcggtggcggaggtggcagtggcggtaccagaatgcgagatggactggtgatcccattggtggagctgtcagcaaagcaggtggcatttcatatcccatttgaagtggtggagaaagtttacccaccagtgcctgagcagctacagctccgaattgctttttggagcttccctgagaatgaagaggacattcggctgtattcgtgcctggccaatggcagtgcggatgagtttcagcgaggggatcagctcttccgcatgcgggctgtgaaggacccattgcagatagggttccacctgagtgctacagtggtgccacctcagatggtccctcctaaaggggcctacaacgtggctgtgatgtttgaccgctgccgggtcacttcctgcagctgtacctgtggggctggggccaaatggtgcacccacgtcgtggcactctgtctcttccgcatccacaacgcttctgcagtctgcctgcgagccccagtctcagagtccctgtcccggctacagagggaccagctgcaaaagtttgctcagtacctcatcagtgagctccctcagcaggtgggtgaggtcggcaccccctcctgcaattagctccgggccaggccgcataacagccttcctgttaggcccaggcctccatgggttcacctaggccgtgttctgcctgcctccgtctctttctccctcagatcctccccacagctcagcgtctcctggacgaactcctgtcttcccagtcaacagccatcaatacagtgtgtggagctccggaccccacagcagggccctcagcatcggaccagagtacttggtatctggatgaatcgacactcactgacaacatcaaaaagacactgcacaagttctgtggcccctcccctgtggtcttcagtgatgtgaactccatgtatctgtcttccacggagccgccagccgctgctgaatgggcatgtctgctgcgccctctgaggggccgtgagccagagggcgtctggaacctgctaagcattgtgcgggagatgttcaagcggagggacagcaatgctgcccccttgttggaaatcctcactgaccagtgcctcacctatgaacagataacaggttggtggtatagcgtacgtacctcagcctcacacagcagtgccagtgggcacacgggccgtagcaacgggcagtcagaggtggcagcccatgcctgtgccagcatgtgtgacgagatggtcacactgtggaggctggccgtgctggaccctgcactcagcccccagcggcgccgggaactgtgtacgcagctgcggcagtggcaactgaaggtgattgagaacgtcaagcggggccaacacaagaagacgctggagcggctcttccccggcttccggccagcggtggaggcctgctacttcaactgggaagaggcctacccacttcctggtgtcacctacagcggcactgacaggaagctggcactgtgctgggcccgggccctgccctctcggccaggtgcctcccgctctgggggcctggaggaatcccgggaccggccccgaccccttcctactgagccagctgtgcggcccaaggagcctgggaccaagcgaaagggcttgggtgagggggtcccctcatcacagcggggtccccgccgcctctcagctgaagggggagataaagctctacataagatgggtccaggtgggggcaaagccaaggcactgggtggggctggcagtgggagcaagggctcagcaggtggcggaagcaagcgacggctgagcagcgaagacagctccctggagccagacctggccgagatgagcctggatgacagcagcctggccctgggcgcagaggccagcaccttcgggggattccctgagagccctccaccctgtcctctccacggtggctcccgaggcccttccactttccttcctgagcccccagatacttatgaagaagatggtggtgtgtacttctcggaagggcctgagcctcccacagcctctgttggcccccctggcctactgcctggggatgtctgtacccaggacgacctcccttctacagatgagagtggcaatgggcttcccaaaaccaaagaggcagcccctgcagttggagaggaggatgatgactaccaggcgtactatctgaatgcccaggatggggctgggggcgaggaagagaaggccgagggcggggctggggaggagcacgacctgtttgctgggctgaagccactggaacaggagagtcgcatggaggtactgtttgcctgtgctgaggccctgcatgcgcatggctatagcagtgaggcctcccgtctcactgtggagcttgcccaggatctgctagccaacccacccgacctcaaggtagagccgccccctgccaagggcaagaagaacaaggtatccacgagccgtcagacctgggtggctaccaacaccctgagcaaggcggccttcctgttgacagtgctaagtgagcgtccagagcaccacaacctggccttccgagttggcatgtttgccttggagctacagaggcctccagcttctaccaaggccttggaggtgaagctggcataccaggagtctgaggtggctgccctgctcaagaagatccctctgggtccaagtgagatgagtaccatgcggtgccgggcagaggaacttcgggaggggacactctgtgactatcggcctgtgttgcctctcatgctggccagtttcatctttgacgttctctgtgctccaggtatgatgcctgaccctacagtaagtggggaactggggtaggggtagctttctctaagaaagaccaagagccccaagtttctgaatcacctttaggacccatcaggcagcttcatgggtaggtctgtgatgatgaggattttgggttcccctgtattttttcccatgcatgatacttctgtctgcctgacttaccccaacttttatacagtggtttctccggttcccggcccccaagtcgcaactggaacagcgagacacctggggatgaggagcttggatttgaagcagcagttgctgccttgggcatgaagacaacagtgagcgaggcagaacatcccctcttatgtgaaggcacacgtcgggagaagggtgacctggcattagcactaatgatcacttacaaggacgaccaggccaagcttaagaagatcttagacaaactcttggaccgagagagccagacacataagccacagacgctgagttctttctactcatctagccgcccaaccacagccagccagaggtctccttcaaagcacgggggcccatctgccccaggggccctgcaaccactgacctcaggctctgcagggcctgctcaaccagggagtgtggcaggggctgggccaggccccactgagggcttcacagagaagaatgtgcctgagagttccccacattccccctgtgagggtcttccatctgaggcagctttgaccccaaggccagaagggaaggttcctagccgcttggcacttggcagtcgtggaggctataatggacggggatgggggtccccaggacggcctaagaagaagcacacaggcatggccagcattgacagcagtgcccctgaaacaacatcggatagttcccccaccttaagccggagaccacttcgagggggctgggcccccacctcctggggtcgaggtcaggacagtgacagcattagcagctcttcttcggactccctgggctcctcatcctccagtggaagtcgccgggccagtgccagtggaggagcccgggcgaagactgttgaagttggcaggtacaagggccgccgccccgagagtcatgcccctcatgtacccaatcagccatcagaggcagctgcacacttctacttcgagctggcgaagacagtgctgatcaaggcagggggcaacagcagcacttccattttcacacatccatcttcctcagggggccaccagggtcctcaccgcaacctgcacctttgcgccttcgagattgggctttatgcccttggcctgcacaactttgtttctcccaactggctctcacgtacttattcttcccacgtttcctggattacaggccaggccatggagataggcagcgcagccctgactatactggtagaatgctgggatgggcacctgacaccccctgaggttgcatccctggctgacagggcatcacgggcaagagactccaatatggtgagggcggcagcagagctggccctgagctgcctgcctcacgcccatgcattgaaccctaatgagatccagcgggccctggtgcagtgcaaggaacaggacaacctgatgttggagaaggcctgcatggcagtggaagaggcagctaagggtgggggcgtgtaccctgaagtgttgtttgaggttgctcaccagtggttctggctatatgagcaaactgcaggtggctcatccacagcccgtgaaggggctacaagctgtagtgccagtgggatcagggcaggtggggaagctgggcggggtatgcctgagggtagagggggcccagggactgagccggttacagtggcagcggcagcagtgacagcagcagccacagtggtgcccgtcatatcggtggggtctagtttatacccgggtccaggactggggcatggccactcccctggcctgcacccctacactgctctacagccccacctgccctgtagccctcagtatctcactcacccagctcaccctgcccaccccatgcctcacatgccccggcctgccgtcttccctgtgcccagctctgcatacccacagggtgtgcatcctgcattcctaggggctcagtacccttattcagtgactcctccctcacttgctgccactgctgtgtctttccccgttccttccatggcacccatcacagtacatccctaccacacagagccagggcttccactgcccaccagtgtggcctgtgagttgtggggccagggaacagtgagcagtgtccatccagcatccacgtttccagccatccaaggtgcctcactgcctgccctgaccacacagcccagccctctggtgagcggaggttttccaccgcccgaggaggagacacacagtcagccagtcaatccccacagcctgcaccacctgcatgctgcctaccgtgtcggaatgctggcactggagatgctgggtcgccgggcacacaacgatcaccccaacaacttctcccgctcccccccctacactgatgatgtcaaatggttgctggggctggcagcaaagctgggagtgaactacgtgcaccagttctgtgtgggggcagccaagggggtgctgagcccgtttgtgctgcaggagatcgtcatggagacgctgcagcggctgagtcccgctcatgcccacaaccacctgcgtgccccggccttccaccaactggtgcagcgctgccagcaggcatacatgcagtacatccaccaccgcttgattcacctgactcctgcggactacgacgactttgtgaatgcgatccggagtgcccgcagcgccttctgcctgacgcccatgggcatgatgcagttcaacgacatcctacagaacctcaagcgcagcaaacagaccaaggagctgtggcagcgggtctcactcgagatggccaccttctccccctgagtctttcacccttagggtcctatacagggacccaggcctgtggctatgggggcccctcacacagggggagtgaaacttggctggacagatcatcctcactcagttccctggtagcacagactgacagctgctcttgggctatagcttggggccaagatgtctcacaccctagaagcctagggctgggggagacagccctgtctgggagggggcgttgggtggcctctggtatttatttggcatttataaatatataaactccttttttactcta

SEQ ID NO: 354192 - DNA, 3463 bp, Homo sapiens
cactctgttccttcatctccgaggccgagagcctctgccagaactggcggggatggcgcaaacagtcagcggggcccaattcccccactggcggcggtggcggaggtggcagtggcggtaccagaatgcgagatggactggtgatcccattggtggagctgtcagcaaagcaggtggcatttcatatcccatttgaagtggtggagaaagtttacccaccagtgcctgagcagctacagctccgaattgctttttggagcttccctgagaatgaagaggacattcggctgtattcgtgcctggccaatggcagtgcggatgagtttcagcgaggggatcagctcttccgcatgcgggctgtgaaggacccattgcagatagggttccacctgagtgctacagtggtgccacctcagatggtccctcctaaaggggcctacaacgtggctgtgatgtttgaccgctgccgggtcacttcctgcagctgtacctgtggggctggggccaaatggtgcacccacgtcgtggcactctgtctcttccgcatccacaacgcttctgcagtctgcctgcgagccccagtctcagagtccctgtcccggctacagagggaccagctgcaaaagtttgctcagtacctcatcagtgagctccctcagcaggtgggtgaggtcggcaccccctcctgcaattagctccgggccaggccgcataacagccttcctgttaggcccaggcctccatgggttcacctaggccgtgttctgcctgcctccgtctctttctccctcagatcctccccacagctcagcgtctcctggacgaactcctgtcttcccagtcaacagccatcaatacagtgtgtggagctccggaccccacagcagggccctcagcatcggaccagagtacttggtatctggatgaatcgacactcactgacaacatcaaaaagacactgcacaagttctgtggcccctcccctgtggtcttcagtgatgtgaactccatgtatctgtcttccacggagccgccagccgctgctgaatgggcatgtctgctgcgccctctgaggggccgtgagccagagggcgtctggaacctgctaagcattgtgcgggagatgttcaagcggagggacagcaatgctgcccccttgttggaaatcctcactgaccagtgcctcacctatgaacagataacaggttggtggtatagcgtacgtacctcagcctcacacagcagtgccagtgggcacacgggccgtagcaacgggcagtcagaggtggcagcccatgcctgtgccagcatgtgtgacgagatggtcacactgtggaggctggccgtgctggaccctgcactcagcccccagcggcgccgggaactgtgtacgcagctgcggcagtggcaactgaaggtgattgagaacgtcaagcggggccaacacaagaagacgctggagcggctcttccccggcttccggccagcggtggaggcctgctacttcaactgggaagaggcctacccacttcctggtgtcacctacagcggcactgacaggaagctggcactgtgctgggcccgggccctgccctctcggccaggtgcctcccgctctgggggcctggaggaatcccgggaccggccccgaccccttcctactgagccagctgtgcggcccaaggagcctgggaccaagcgaaagggcttgggtgagggggtcccctcatcacagcggggtccccgccgcctctcagctgaagggggagataaagctctacataagatgggtccaggtgggggcaaagccaaggcactgggtggggctggcagtgggagcaagggctcagcaggtggcggaagcaagcgacggctgagcagcgaagacagctccctggagccagacctggccgagatgagcctggatgacagcagcctggccctgggcgcagaggccagcaccttcgggggattccctgagagccctccaccctgtcctctccacggtggctcccgaggcccttccactttccttcctgagcccccagatacttatgaagaagatggtggtgtgtacttctcggaagggcctgagcctcccacagcctctgttggcccccctggcctactgcctggggatgtctgtacccaggacgacctcccttctacagatgagagtggcaatgggcttcccaaaaccaaagaggcagcccctgcagttggagaggaggatgatgactaccaggcgtactatctgaatgcccaggatggggctgggggcgaggaagagaaggccgagggcggggctggggaggagcacgacctgtttgctgggctgaagccactggaacaggagagtcgcatggaggtactgtttgcctgtgctgaggccctgcatgcgcatggctatagcagtgaggcctcccgtctcactgtggagcttgcccaggatctgctagccaacccacccgacctcaaggtagagccgccccctgccaagggcaagaagaacaaggtatccacgagccgtcagacctgggtggctaccaacaccctgagcaaggcggccttcctgttgacagtgctaagtgagcgtccagagcaccacaacctggccttccgagttggcatgtttgccttggagctacagaggcctccagcttctaccaaggccttggaggtgaagctggcataccaggagtctgaggtggctgccctgctcaagaagatccctctgggtccaagtgagatgagtaccatgcggtgccgggcagaggaacttcgggaggggacactctgtgactatcggcctgtgttgcctctcatgctggccagtttcatctttgacgttctctgtgctccaggtatgatgcctgaccctacagtaagtggggaactggggtaggggtagctttctctaagaaagaccaagagccccaagtttctgaatcacctttaggacccatcaggcagcttcatgggtaggtctgtgatgatgaggattttgggttcccctgtattttttcccatgcatgatacttctgtctgcctgacttaccccaacttttatacagtggtttctccggttcccggcccccaagtcgcaactggaacagcgagacacctggggatgaggagcttggatttgaagcagcagttgctgccttgggtgagtcttgagcatatcaacgagctaagcctggttcaggtcttgaaggacatgagacctgtgccttgttgtgaagggctgtatggtaatgggaaggtcaggatgacatgtgtgagccaactagtgcctgtaagacaggaattgagggcaaaaatgtgtgctatatggctgggcgtggtggcccatgcttgtaatcgcagcgctttgggaggctgaagcaggaggattgtttgagctcaggagttcatgaccagcctgggcaacctagcaagacctcatctctacttaaaaaaa

SEQ ID NO: 354193 - DNA, 479 bp, Homo sapiens
gagccttcatctccttgtttgcagagacataccatgattttagtcctcgggaaacgggaggtgctgagcactggtgttagcagtgatttacgagtcctttttctgagaggctttcatccttccttcccctaaataacacccacttttcaaaattctccagtgtttcagtgatgcttatggggctgggtcaagaagtactttcctgtatcctttccccatgcctctctttggggtgtacacctactccatgcccatcctttcccagtagcccctcagcagcctcctgccccttgttcccacaggcgccgggaactgtgtacgcagctgcggcagtggcaactgaaggtgattgagaacgtcaagcggggccaacacaagaagacgctggagcggctcttccccggcttccggccagcggtggaggcctgctacttcaactgggaagaggcctacccacttcctggtgtcacctacagcgg

SEQ ID NO: 354194 - DNA, 176 bp, Homo sapiens
tcaactccattttcttctctcaatctcaactaacgctgagatccctgattcaaaccaccatcatacagcaagaatctctgaactggccttcttccaatcacttttgttctccacaatatgttgcatgcaacctgagttacattaaagatgcttaaagctctgcaatggcttctcat

SEQ ID NO: 354195 - DNA, 4215 bp, Homo sapiens
cttcctcttctccacgcaggcttcaacaggagatttatggagaatagcagcataattgcttgctataatgaactgattcaaatagaacatggggaagttcgctcccagttcaaattacgggcctgtaattcagtgtttacagcattagatcactgtcatgaagccatagaaataacaagcgatgaccacgtgattcagtatgtcaacccagccttcgaaaggatgatgggctaccacaaaggtgagctcctgggaaaagaactcgctgatctgcccaaaagcgataagaaccgggcagaccttctcgacaccatcaatacatgcatcaagaagggaaaggagtggcagggggtttactatgccagacggaaatccggggacagcatccaacagcacgtgaagatcaccccagtgattggccaaggagggaaaattaggcattttgtctcgctcaagaaactgtgttgtaccactgacaataataagcagattcacaagattcatcgtgattcaggagacaattctcagacagagcctcattcattcagatataagaacaggaggaaagagtccattgacgtgaaatcgatatcatctcgaggcagtgatgcaccaagcctgcagaatcgtcgctatccgtccatggcgaggatccactccatgaccatcgaggctcccatcacaaaggttataaatataatcaatgcagcccaagaaaacagcccagtcacagtagcggaagccttggacagagttctagagattttacggaccacagaactgtactcccctcagctgggtaccaaagatgaagatccccacaccagtgatcttgttggaggcctgatgactgacggcttgagaagactgtcaggaaacgagtatgtgtttactaagaatgtgcaccagagtcacagtcaccttgcaatgccaataaccatcaatgatgttcccccttgtatctctcaattacttgataatgaggagagttgggacttcaacatctttgaattggaagccattacgcataaaaggccattggtttatctgggcttaaaggtcttctctcggtttggagtatgtgagtttttaaactgttctgaaaccactcttcgggcctggttccaagtgatcgaagccaactaccactcttccaatgcctaccacaactccacccatgctgccgacgtcctgcacgccaccgctttctttcttggaaaggaaagagtaaagggaagcctcgatcagttggatgaggtggcagccctcattgctgccacagtccatgacgtggatcacccgggaaggaccaactctttcctctgcaatgcaggcagtgagcttgctgtgctctacaatgacactgctgttctggagagtcaccacaccgccctggccttccagctcacggtcaaggacaccaaatgcaacattttcaagaatattgacaggaaccattatcgaacgctgcgccaggctattattgacatggttttggcaacagagatgacaaaacactttgaacatgtgaataagtttgtgaacagcatcaacaagccaatggcagctgagattgaaggcagcgactgtgaatgcaaccctgctgggaagaacttccctgaaaaccaaatcctgatcaaacgcatgatgattaagtgtgctgacgtggccaacccatgccgccccttggacctgtgcattgaatgggctgggaggatctctgaggagtattttgcacagactgatgaagagaagagacagggactacctgtggtgatgccagtgtttgaccggaatacctgtagcatccccaagtctcagatctctttcattgactacttcataacagacatgtttgatgcttgggatgcctttgcacatctgccagccctgatgcaacatttggctgacaactacaaacactggaagacactagatgacctaaagtgcaaaagtttgaggcttccatctgacagctaaagccaagccacagagggggcctcttgaccgacaaaggacactgtgaatcacagtagcgtaaacaagaggccttcctttctaatgacaatgacaggtattggtgaaggagctaatgtttaatatttgaccttgaatcattcaagtccccaaatttcattcttagaaagttatgttccatgaagaaaaatatatgttcttttgaatacttaatgacagaacaaatacttggcaaactcctttgctctgctgtcatcctgtgtacccttgtcaatccatggagctggttcactgtaactagcaggccacaggaagcaaagccttggtgcctgtgagctcatctcccaggatggtgactaagtagcttagctagtgatcagctcatcctttaccataaaagtcatcattgctgtttagcttgactgttttcctcaagaacatcgatctgaaggattcataaggagcttatctgaacagatttatctaagaaaaaaaaaaaacgacataaaataagcgaaacaactaggaccaaattacagataaactagttagcttcacagcctctatggctacatggttcttctggccgatggtatgacacctaagttagaacacagccttggctggtgggtgccctctctagactggtatcagcagcctgtgtaacccctttcctgtaaaaggggttcatcttaacaaagtcatccatgatgagggaaaaagtggcatttcatttttggggaatccatgagcttcctttatttctggctcacagaggcagccacgaggcactacaccaagtattatataaaagccattaaatttgaatgcccttggacaagcttttcttaaaaaaaaaaaaaaaaagtttatatacatgtttaaaatttttattaaaatccaaattttctgggtgtaagcccatgcagtatgttgtgccatgcaccatctatacgtaatattttgggaggggataggggaagtttcaaggttcagatatttttaaccagtctatatttgaaatcatgccattagctttaacaatgttaaaattgtgtggtgtaaatatatcagaaaataggcatatggggaggcagtaaatactattttaagctattaattgtatgctaaaagcttctaaagcacaagtgcatatttttatactgctcttttcacaactccctgtgatctacataaagtcagactcgagattttcctttctcttttaccagctgatccttcctatgtattataaatattagactccgtaaacaaacttcatttttctttctctgtacttcatgctgcatttttaaaaggtataaacaaacagagactgaattaattgaatcagtaattacttttttccaatacaaattggaatgcagaatacttggaacttgtacatggggaaaaaatgacttatcactacataatgtgccaatgtttttttctatgttttgtaccaaaaatggaaaaatatgacaattccatgcaaagaaatgtatctaaattatttttgttagatgataagagaacttgcttggtcaggacagcagccagctttgtattgtaatgctatattatgtaaatgtgatgaaaatgtttttgtgaagtacttgtaactaaattcctacagccatttttcactcccaacagctgtttttattttacctctttggcctaaagttttcataatttcaaatttggggtttagtgtcctttatttcatgagtcacacactttgttttcagagcacattaaaatcaggatgccagaatcccatattaaggacctagctaacttgcctaggcttcagaagcttgcttgaggcaaggacaatctttttctgatcatctcactttcagttctatttggtaagtaacatttatcaggtgtcagacatcttctatatgaaatatttacagcttactcagttttatgtcaaatttcttgttaacttcaaactttttattagtaatgtgcaaatgtttaaaaatgctttaagacagctaggtactaaagcgtcaacaatttctgctctttaccagtgtaatctacggtataatcttctggcctgcgaactagtctattcttccacatagtcaacttgttagaaatacaggctttcagatgatatgtgtatcagatagtttatattatataaactattataactgcctcttacacagagttgtttacttaaatgtcatgtgctgaggagggccgtattaggaa

SEQ ID NO: 354196 - DNA, 4074 bp, Homo sapiens
cttcctcttctccacgcaggcttcaacaggagatttatggagaatagcagcataattgcttgctataatgaactgattcaaatagaacatggggaagttcgctcccagttcaaattacgggcctgtaattcagtgtttacagcattagatcactgtcatgaagccatagaaataacaagcgatgaccacgtgattcaggagtggcagggggtttactatgccagacggaaatccggggacagcatccaacagcacgtgaagatcaccccagtgattggccaaggagggaaaattaggcattttgtctcgctcaagaaactgtgttgtaccactgacaataataagcagattcacaagattcatcgtgattcaggagacaattctcagacagagcctcattcattcagatataagaacaggaggaaagagtccattgacgtgaaatcgatatcatctcgaggcagtgatgcaccaagcctgcagaatcgtcgctatccgtccatggcgaggatccactccatgaccatcgaggctcccatcacaaaggttataaatataatcaatgcagcccaagaaaacagcccagtcacagtagcggaagccttggacagagttctagagattttacggaccacagaactgtactcccctcagctgggtaccaaagatgaagatccccacaccagtgatcttgttggaggcctgatgactgacggcttgagaagactgtcaggaaacgagtatgtgtttactaagaatgtgcaccagagtcacagtcaccttgcaatgccaataaccatcaatgatgttcccccttgtatctctcaattacttgataatgaggagagttgggacttcaacatctttgaattggaagccattacgcataaaaggccattggtttatctgggcttaaaggtcttctctcggtttggagtatgtgagtttttaaactgttctgaaaccactcttcgggcctggttccaagtgatcgaagccaactaccactcttccaatgcctaccacaactccacccatgctgccgacgtcctgcacgccaccgctttctttcttggaaaggaaagagtaaagggaagcctcgatcagttggatgaggtggcagccctcattgctgccacagtccatgacgtggatcacccgggaaggaccaactctttcctctgcaatgcaggcagtgagcttgctgtgctctacaatgacactgctgttctggagagtcaccacaccgccctggccttccagctcacggtcaaggacaccaaatgcaacattttcaagaatattgacaggaaccattatcgaacgctgcgccaggctattattgacatggttttggcaacagagatgacaaaacactttgaacatgtgaataagtttgtgaacagcatcaacaagccaatggcagctgagattgaaggcagcgactgtgaatgcaaccctgctgggaagaacttccctgaaaaccaaatcctgatcaaacgcatgatgattaagtgtgctgacgtggccaacccatgccgccccttggacctgtgcattgaatgggctgggaggatctctgaggagtattttgcacagactgatgaagagaagagacagggactacctgtggtgatgccagtgtttgaccggaatacctgtagcatccccaagtctcagatctctttcattgactacttcataacagacatgtttgatgcttgggatgcctttgcacatctgccagccctgatgcaacatttggctgacaactacaaacactggaagacactagatgacctaaagtgcaaaagtttgaggcttccatctgacagctaaagccaagccacagagggggcctcttgaccgacaaaggacactgtgaatcacagtagcgtaaacaagaggccttcctttctaatgacaatgacaggtattggtgaaggagctaatgtttaatatttgaccttgaatcattcaagtccccaaatttcattcttagaaagttatgttccatgaagaaaaatatatgttcttttgaatacttaatgacagaacaaatacttggcaaactcctttgctctgctgtcatcctgtgtacccttgtcaatccatggagctggttcactgtaactagcaggccacaggaagcaaagccttggtgcctgtgagctcatctcccaggatggtgactaagtagcttagctagtgatcagctcatcctttaccataaaagtcatcattgctgtttagcttgactgttttcctcaagaacatcgatctgaaggattcataaggagcttatctgaacagatttatctaagaaaaaaaaaaaacgacataaaataagcgaaacaactaggaccaaattacagataaactagttagcttcacagcctctatggctacatggttcttctggccgatggtatgacacctaagttagaacacagccttggctggtgggtgccctctctagactggtatcagcagcctgtgtaacccctttcctgtaaaaggggttcatcttaacaaagtcatccatgatgagggaaaaagtggcatttcatttttggggaatccatgagcttcctttatttctggctcacagaggcagccacgaggcactacaccaagtattatataaaagccattaaatttgaatgcccttggacaagcttttcttaaaaaaaaaaaaaaaaagtttatatacatgtttaaaatttttattaaaatccaaattttctgggtgtaagcccatgcagtatgttgtgccatgcaccatctatacgtaatattttgggaggggataggggaagtttcaaggttcagatatttttaaccagtctatatttgaaatcatgccattagctttaacaatgttaaaattgtgtggtgtaaatatatcagaaaataggcatatggggaggcagtaaatactattttaagctattaattgtatgctaaaagcttctaaagcacaagtgcatatttttatactgctcttttcacaactccctgtgatctacataaagtcagactcgagattttcctttctcttttaccagctgatccttcctatgtattataaatattagactccgtaaacaaacttcatttttctttctctgtacttcatgctgcatttttaaaaggtataaacaaacagagactgaattaattgaatcagtaattacttttttccaatacaaattggaatgcagaatacttggaacttgtacatggggaaaaaatgacttatcactacataatgtgccaatgtttttttctatgttttgtaccaaaaatggaaaaatatgacaattccatgcaaagaaatgtatctaaattatttttgttagatgataagagaacttgcttggtcaggacagcagccagctttgtattgtaatgctatattatgtaaatgtgatgaaaatgtttttgtgaagtacttgtaactaaattcctacagccatttttcactcccaacagctgtttttattttacctctttggcctaaagttttcataatttcaaatttggggtttagtgtcctttatttcatgagtcacacactttgttttcagagcacattaaaatcaggatgccagaatcccatattaaggacctagctaacttgcctaggcttcagaagcttgcttgaggcaaggacaatctttttctgatcatctcactttcagttctatttggtaagtaacatttatcaggtgtcagacatcttctatatgaaatatttacagcttactcagttttatgtcaaatttcttgttaacttcaaactttttattagtaatgtgcaaatgtttaaaaatgctttaagacagctaggtactaaagcgtcaacaatttctgctctttaccagtgtaatctacggtataatcttctggcctgcgaactagtctattcttccacatagtcaacttgttagaaatacaggctttcagatgatatgtgtatcagatagtttatattatataaactattataactgcctcttacacagagttgtttacttaaatgtcatgtgctgaggagggccgtattaggaa

SEQ ID NO: 354197 - DNA, 2144 bp, Homo sapiens
gctgtcgctactactactaaattaacaacccgtcgaccttgaatcattcaagtccccaaatttcattcttagaaagttatgttccatgaagaaaaatatatgttcttttgaatacttaatgacagaacaaatacttggcaaactcctttgctctgctgtcatcctgtgtacccttgtcaatccatggagctggttcactgtaactagcaggccacaggaagcaaagccttggtgcctgtgagctcatctcccaggatggtgactaagtagcttagctagtgatcagctcatcctttaccataaaagtcatcattgctgtttagcttgactgttttcctcaagaacatcgatctgaaggattcataaggagcttatctgaacagatttatctaagaaaaaaaaaaaacgacataaaataagcgaaacaactaggaccaaattacagataaactagttagcttcacagcctctatggctacatggttcttctggccgatggtatgacacctaagttagaacacagccttggctggtgggtgccctctctagactggtatcagcagcctgtgtaacccctttcctgtaaaaggggttcatcttaacaaagtcatccatgatgagggaaaaagtggcatttcatttttggggaatccatgagcttcctttatttctggctcacagaggcagccacgaggcactacaccaagtattatataaaagccattaaatttgaatgcccttggacaagcttttcttaaaaaaaaaaaaaaaaagtttatatacatgtttaaaatttttattaaaatccaaattttctgggtgtaagcccatgcagtatgttgtgccatgcaccatctatacgtaatattttgggaggggataggggaagtttcaaggttcagatatttttaaccagtctatatttgaaatcatgccattagctttaacaatgttaaaattgtgtggtgtaaatatatcagaaaataggcatatggggaggcagtaaatactattttaagctattaattgtatgctaaaagcttctaaagcacaagtgcatatttttatactgctcttttcacaactccctgtgatctacataaagtcagactcgagattttcctttctcttttaccagctgatccttcctatgtattataaatattagactccgtaaacaaacttcatttttctttctctgtacttcatgctgcatttttaaaaggtataaacaaacagagactgaattaattgaatcagtaattacttttttccaatacaaattggaatgcagaatacttggaacttgtacatggggaaaaaatgacttatcactacataatgtgccaatgtttttttctatgttttgtaccaaaaatggaaaaatatgacaattccatgcaaagaaatgtatctaaattatttttgttagatgataagagaacttgcttggtcaggacagcagccagctttgtattgtaatgctatattatgtaaatgtgatgaaaatgtttttgtgaagtacttgtaactaaattcctacagccatttttcactcccaacagctgtttttattttacctctttggcctaaagttttcataatttcaaatttggggtttagtgtcctttatttcatgagtcacacactttgttttcagagcacattaaaatcaggatgccagaatcccatattaaggacctagctaacttgcctaggcttcagaagcttgcttgaggcaaggacaatctttttctgatcatctcactttcagttctatttggtaagtaacatttatcaggtgtcagacatcttctatatgaaatatttacagcttactcagttttatgtcaaatttcttgttaacttcaaactttttattagtaatgtgcaaatgtttaaaaatgctttaagacagctaggtactaaagcgtcaacaatttctgctctttaccagtgtaatctacggtataatcttctggcctgcgaactagtctattcttccacatagtcaacttgttagaaatacaggctttcagatgatatgtgtatcagatagtttatattatataaactattataactgcctcttacacagagttgtttacttaaatgtcatgtgctgaggagggccgtattaggaa

SEQ ID NO: 354198 - DNA, 3310 bp, Homo sapiens
cttcctcttctccacgcaggcttcaacaggagatttatggagaatagcagcataattgcttgctataatgaactgattcaaatagaacatggggaagttcgctcccagttcaaattacgggcctgtaattcagtgtttacagcattagatcactgtcatgaagccatagaaataacaagcgatgaccacgtgattcagtatgtcaacccagccttcgaaaggatgatgggctaccacaaaggtgagctcctgggaaaagaactcgctgatctgcccaaaagcgataagaaccgggcagaccttctcgacaccatcaatacatgcatcaagaagggaaaggagtggcagggggtttactatgccagacggaaatccggggacagcatccaacagcacgtgaagatcaccccagtgattggccaaggagggaaaattaggcattttgtctcgctcaagaaactgtgttgtaccactgacaataataagcagattcacaagattcatcgtgattcaggagacaattctcagacagagcctcattcattcagatataagaacaggaggaaagagtccattgacgtgaaatcgatatcatctcgaggcagtgatgcaccaagcctgcagaatcgtcgctatccgtccatggcgaggatccactccatgaccatcgaggctcccatcacaaaggttataaatataatcaatgcagcccaagaaaacagcccagtcacagtagcggaagccttggacagagttctagagattttacggaccacagaactgtactcccctcagctgggtaccaaagatgaagatccccacaccagtgatcttgttggaggcctgatgactgacggcttgagaagactgtcaggaaacgagtatgtgtttactaagaatgtgcaccagagtcacagtcaccttgcaatgccaataaccatcaatgatgttcccccttgtatctctcaattacttgataatgaggagagttgggacttcaacatctttgaattggaagccattacgcataaaaggccattggtttatctgggcttaaaggtcttctctcggtttggagtatgtgagtttttaaactgttctgaaaccactcttcgggcctggttccaagtgatcgaagccaactaccactcttccaatgcctaccacaactccacccatgctgccgacgtcctgcacgccaccgctttctttcttggaaaggaaagagtaaagggaagcctcgatcagttggatgaggtggcagccctcattgctgccacagtccatgacgtggatcacccgggaaggaccaactctttcctctgcaatgcaggcagtgagcttgctgtgctctacaatgacactgctgttctggagagtcaccacaccgccctggccttccagctcacggtcaaggacaccaaatgcaacattttcaagaatattgacaggaaccattatcgaacgctgcgccaggctattattgacatggttttggcaacagagatgacaaaacactttgaacatgtgaataagtttgtgaacagcatcaacaagccaatggcagctgagattgaaggcagcgactgtgaatgcaaccctgctgggaagaacttccctgaaaaccaaatcctgatcaaacgcatgatgattaagtgtgctgacgtggccaacccatgccgccccttggacctgtgcattgaatgggctgggaggatctctgaggagtattttgcacagactgatgaagagaagagacagggactacctgtggtgatgccagtgtttgaccggaatacctgtagcatccccaagtctcagatctctttcattgactacttcataacagacatgtttgatgcttgggatgcctttgcacatctgccagccctgatgcaacatttggctgacaactacaaacactggaagacactagatgacctaaagtgcaaaagtttgaggcttccatctgacagctaaagccaagccacagagggggcctcttgaccgacaaaggacactgtgaatcacagtagcgtaaacaagaggccttcctttctaatgacaatgacaggtattggtgaaggagctaatgtttaatatttgaccttgaatcattcaagtccccaaatttcattcttagaaagttatgttccatgaagaaaaatatatgttcttttgaatacttaatgacagaacaaatacttggcaaactcctttgctctgctgtcatcctgtgtacccttgtcaatccatggagctggttcactgtaactagcaggccacaggaagcaaagccttggtgcctgtgagctcatctcccaggatggtgactaagtagcttagctagtgatcagctcatcctttaccataaaagtcatcattgctgtttagcttgactgttttcctcaagaacatcgatctgaaggattcataaggagcttatctgaacagatttatctaagaaaaaaaaaaaacgacataaaataagcgaaacaactaggaccaaattacagataaactagttagcttcacagcctctatggctacatggttcttctggccgatggtatgacacctaagttagaacacagccttggctggtgggtgccctctctagactggtatcagcagcctgtgtaacccctttcctgtaaaaggggttcatcttaacaaagtcatccatgatgagggaaaaagtggcatttcatttttggggaatccatgagcttcctttatttctggctcacagaggcagccacgaggcactacaccaagtattatataaaagccattaaatttgaatgcccttggacaagcttttcttaaaaaaaaaaaaaaaaagtttatatacatgtttaaaatttttattaaaatccaaattttctgggtgtaagcccatgcagtatgttgtgccatgcaccatctatacgtaatattttgggaggggataggggaagtttcaaggttcagatatttttaaccagtctatatttgaaatcatgccattagctttaacaatgttaaaattgtgtggtgtaaatatatcagaaaataggcatatggggaggcagtaaatactattttaagctattaattgtatgctaaaagcttctaaagcacaagtgcatatttttatactgctcttttcacaactccctgtgatctacataaagtcagactcgagattttcctttctcttttaccagctgatccttcctatgtattataaatattagactccgtaaacaaacttcgccatcggaaacttcgccatcggatacttcgccatcggaaacttcgccatcgg

SEQ ID NO: 354199 - DNA, 4156 bp, Homo sapiens
cttcctcttctccacgcaggcttcaacaggagatttatggagaatagcagcataattgcttgctataatgaactgattcaaatagaacatggggaagttcgctcccagttcaaattacgggcctgtaattcagtgtttacagcattagatcactgtcatgaagccatagaaataacaagcgatgaccacgtgattcagtatgtcaacccagccttcgaaaggatgatgggctaccacaaaggtgagctcctgggaaaagaactcgctgatctgcccaaaagcgataagaaccgggcagaccttctcgacaccatcaatacatgcatcaagaagggaaaggagtggcagggggtttactatgccagacggaaatccggggacagcatccaacagcacgtgaagatcaccccagtgattggccaaggagggaaaattaggcattttgtctcgctcaagaaactgtgttgtaccactgacaataataagcagattcacaagattcatcgtgattcaggagacaattctcagacagagcctcattcattcagatataagaacaggaggaaagagtccattgacgtgaaatcgatatcatctcgaggcagtgatgcaccaagcctgcagaatcgtcgctatccgtccatggcgaggatccactccatgaccatcgaggctcccatcacaaaggttataaatataatcaatgcagcccaagaaaacagcccagtcacagtagcggaagccttggacagagttctagagattttacggaccacagaactgtactcccctcagctgggtaccaaagatgaagatccccacaccagtgatcttgttggaggcctgatgactgacggcttgagaagactgtcaggaaacgagtatgtgtttactaagaatgtgcaccagagtcacagtcaccttgcaatgccaataaccatcaatgatgttcccccttgtatctctcaattacttgataatgaggagagttgggacttcaacatctttgaattggaagccattacgcataaaaggccattggtttatctgggcttaaaggtcttctctcggtttggagtatgtgagtttttaaactgttctgaaaccactcttcgggcctggttccaagtgatcgaagccaactaccactcttccaatgcctaccacaactccacccatgctgccgacgtcctgcacgccaccgctttctttcttggaaaggaaagagtaaagggaagcctcgatcagttggatgaggtggcagccctcattgctgccacagtccatgacgtggatcacccgggaaggaccaactctttcctctgcaatgcaggcagtgagcttgctgtgctctacaatgacactgctgttctggagagtcaccacaccgccctggccttccagctcacggtcaaggacaccaaatgcaacattttcaagaatattgacaggaaccattatcgaacgctgcgccaggctattattgacatggttttggcaacagagatgacaaaacactttgaacatgtgaataagtttgtgaacagcatcaacaagccaatggcagctgagattgaaggcagcgactgtgaatgcaaccctgctgggaagaacttccctgaaaaccaaatcctgatcaaacgcatgatgattaagtgtgctgacgtggccaacccatgccgccccttggacctgtgcattgaatgggctgggaggatctctgaggagtattttgcacagactgatgaagagaagagacagggactacctgtggtgatgccagtgtttgaccggaatacctgtagcatccccaagtctcagatctctttcattgactacttcataacagacatgtttgatgcttgggatgcctttgcacatctgccagccctgatgcaacatttggctgacaactacaaacactggaagacactagatgacctaaagtgcaaaagtttgaggcttccatctgacagctaaagccaagccacagagggggcctcttgaccgacaaaggacactgtgaatcacagtagcgtaaacaagaggccttcctttctaatgacaatgacaggtattggtgaaggagctaatgtttaatatttgaccttgaatcattcaagtccccaaatttcattcttagaaagttatgttccatgaagaaaaatatatgttcttttgaatacttaatgacagaacaaatacttggcaaactcctttgctctgctgtcatcctgtgtacccttgtcaatccatggagctggttcactgtaactagcaggccacaggaagcaaagccttggtgcctgtgagctcatctcccaggatggtgactaagtagcttagctagtgatcagctcatcctttaccataaaagtcatcattgctgtttagcttgactgttttcctcaagaacatcgatctgaaggattcataaggagcttatctgaacagatttatctatagttagcttcacagcctctatggctacatggttcttctggccgatggtatgacacctaagttagaacacagccttggctggtgggtgccctctctagactggtatcagcagcctgtgtaacccctttcctgtaaaaggggttcatcttaacaaagtcatccatgatgagggaaaaagtggcatttcatttttggggaatccatgagcttcctttatttctggctcacagaggcagccacgaggcactacaccaagtattatataaaagccattaaatttgaatgcccttggacaagcttttcttaaaaaaaaaaaaaaaaagtttatatacatgtttaaaatttttattaaaatccaaattttctgggtgtaagcccatgcagtatgttgtgccatgcaccatctatacgtaatattttgggaggggataggggaagtttcaaggttcagatatttttaaccagtctatatttgaaatcatgccattagctttaacaatgttaaaattgtgtggtgtaaatatatcagaaaataggcatatggggaggcagtaaatactattttaagctattaattgtatgctaaaagcttctaaagcacaagtgcatatttttatactgctcttttcacaactccctgtgatctacataaagtcagactcgagattttcctttctcttttaccagctgatccttcctatgtattataaatattagactccgtaaacaaacttcatttttctttctctgtacttcatgctgcatttttaaaaggtataaacaaacagagactgaattaattgaatcagtaattacttttttccaatacaaattggaatgcagaatacttggaacttgtacatggggaaaaaatgacttatcactacataatgtgccaatgtttttttctatgttttgtaccaaaaatggaaaaatatgacaattccatgcaaagaaatgtatctaaattatttttgttagatgataagagaacttgcttggtcaggacagcagccagctttgtattgtaatgctatattatgtaaatgtgatgaaaatgtttttgtgaagtacttgtaactaaattcctacagccatttttcactcccaacagctgtttttattttacctctttggcctaaagttttcataatttcaaatttggggtttagtgtcctttatttcatgagtcacacactttgttttcagagcacattaaaatcaggatgccagaatcccatattaaggacctagctaacttgcctaggcttcagaagcttgcttgaggcaaggacaatctttttctgatcatctcactttcagttctatttggtaagtaacatttatcaggtgtcagacatcttctatatgaaatatttacagcttactcagttttatgtcaaatttcttgttaacttcaaactttttattagtaatgtgcaaatgtttaaaaatgctttaagacagctaggtactaaagcgtcaacaatttctgctctttaccagtgtaatctacggtataatcttctggcctgcgaactagtctattcttccacatagtcaacttgttagaaatacaggctttcagatgatatgtgtatcagatagtttatattatataaactattataactgcctcttacacagagttgtttacttaaatgtcatgtgctgaggagggccgtattaggaa

SEQ ID NO: 354200 - DNA, 569 bp, Homo sapiens
ccttggctgggcggggcttgctcgcggtggcttgtggctccttcctgcggtgcttctctctttcgctcaggcccgtggcgccgacaggatgggcaagtgtcgtggacttcgtactgctaggaagctccgtagtcaccgacgagaccagaagtggcatgataaacagtataagaaagctcatttgggcacagccctaaaggccaacccttttggaggtgcttctcatgcaaaaggaatcgtgctggaaaaagtaggagttgaagccaaacagccaaattctgccattaggaagtgtgtaagggtccagctgatcaagaatggcaagaaaatcacagcctttgtacccaatgacggttgcttgaactttattgaggaaaatgatgaagttctggttgctggatttggtcgcaaaggtcatgctgttggtgatattcctggagtccgctttaaggttgtcaaagtagccaatgtttctcttttggccctatacaaaggcaagaaggaaagaccaagatcataaatattaatggtgaaaacactgtagtaataaattttcatatgccaaaaaa

SEQ ID NO: 354201 - DNA, 711 bp, Homo sapiens
ccttggctgggcggggcttgctcgcggtggcttgtggctccttcctgcggtgcttctctctttcgctcaggcccgtggcgccgacaggatgggcaagtgtcgtggacttcgtactgctaggaagctccgtagtcaccgacgagaccagaagtggcatgataaacagtataagaaagctcatttgggcacagccctaaaggccaacccttttggaggtgcttctcatgcaaaaggaatcgtgctggaaaaagtaggagttgaagccaaacagccaaattctgccattaggaagtgtgtaagggtccagctgatcaagaatggcaagaaaatcacagcctttgtacccaatgacggttgcttgaactttattgaggaaaatgatgaagttctggttgctggatttggtcgcaaaggtcatgctgttggtgatattcctggagtccgctttaaggttgtcaaagtagccaatgtttctcttttggccctatacaaaggcaagaaggaaagaccaagatcataaatattaatggtgaaaacactgtagtaataaattttcatatgccaaaaaaaaaaacaaaacacaaaaccctgcggggaatcataagcgctgcaggccggcaaaaaagcgctccataaaaagtcgccatgggcaaaagcgctgtcctgtgaacacagttactgttacacaggggcaaactggcgggccaccca

SEQ ID NO: 354202 - DNA, 1257 bp, Homo sapiens
  misc_feature (635)..(635): n is a, c, g, or t
  misc_feature (1046)..(1046): n is a, c, g, or t
  misc_feature (1257)..(1257): n is a, c, g, or t
ccttggctgggcggggcttgctcgcggtggcttgtggctccttcctgcggtgcttctctctttcgctcaggcccgtggcgccgacaggatgggcaagtgtcgtggacttcgtactgctaggaagctccgtagtcaccgacgagaccagaagtggcatgataaacagtataagaaagctcatttgggcacagccctaaaggccaacccttttggaggtgcttctcatgcaaaaggaatcgtgctggaaaaagtaggagttgaagccaaacagccaaattctgccattaggaagtgtgtaagggtccagctgatcaagaatggcaagaaaatcacagcctttgtacccaatgacggttgcttgaactttattgaggaaaatgatgaagttctggttgctggatttggtcgcaaaggtcatgctgttggtgatattcctggagtccgctttaaggttgtcaaagtagccaatgtttctcttttggccctatacaaaggcaagaaggaaagaccaagatcataaatattaatggtgaaaacactgtagtaataaattttcatatgccaaaaaaaaaaaaaaaaaactcgagactagtctctgggggtgagaagccttgagcagcaaagtctctgggganaccctgtacgagggcggtgcgggaagtccggcacgggaaccagggcaagcgccgaggtccctggaaacggtggagttgcaaatcagtttgaaaaattttgatccccaaaagggacaagcgcttctccgggcaccgtcaggctataagtccattccacggcctaagttctctcggtgtgcgtccctgggggacccagcagcctgttggacagggcaagggcgcggggaattccccccacatgtggacttcgagggggctaaaaaattcctaggatattaatgtgggtcagagtgtggccgagtattgtaggcggttgggccacaagtcttgttaagagaatcccagagactctgtcgcggggtaaaaggggggagagtctctccgggtggccaccacaggaaaatggttgcncccgcggggaggggaggtcccccaaagtacccaaaaagagtatgtggtcatacatgtcgccgcaaataacacaaggttgttataaacacagcaattgtgttgtcaaaagaaaggggcttataataggacgcccatggtgttttttaaacagtgcgaggagctagagggctgacatactgacttattcttttcctcatctatcatttaaggn

SEQ ID NO: 354203 - DNA, 215 bp, Homo sapiens
gcggccgcctactactactactactactgctcgaattcaagcttctaacgatgtacggggacatgctgttggtgatattcctggagtccgctttaaggttgtcaaagtagccaatgtttctcttttggccctatacaaaggcaagaaggaaagaccaagatcataaatattaatggtgaaaacactgtagtaataaattttcatatgccaaaaaa

SEQ ID NO: 354204 - DNA, 613 bp, Homo sapiens
ttttaaaaaaaaccccccacttacttatttgtagagatgggagtctcactatgttgcccagggtagtcctggtctcaagcaatcctcccaccttggcttcccagcactttgggaggctgagttgggaagaaattaatagcttgaggccaggagttcaagatcatcctgggcagcaaagtcatacactcttgagggaagagagagaccttctcatattgttttatattgttttatactcagtacctgttttaagaaaaaaacaaggaagtgaaatcaaagacaggcagcccggcaccaggcctgaaaccagccctgggcctgcctggcctaaacctagtagttaaaaatcaacttacgacttagaacctgatgttatccgtagattccaagcattgtataaaaaaattgtgaaactccctgttgtgttctgtaccagtgcatgaaacccctgtcacatatcccctagattgctcaatcaatcacgaccctttcatgtgaaatctttagtgttgtgagcccttaaaagggacagaaattgtgcacttgaggagctcagattttaaggctgtagcttgccgatgctcccagctgaataaagcccttccttctacaa

SEQ ID NO: 354205 - DNA, 1023 bp, Homo sapiens
gcaggctttaaaaagcagcagaagcaagcgacgtgtctagccagacccgtcaagcaccagtcacttacctaacgtgagcagtcccaagagccgagcatatatgtgtaagtctggcaggactaatccccttcgtgctccaccactggatcagtgctgatgacgaaataacttatattcccatatatagcttgtagctcagatggcttatggagccagtttcctatctttcttgggtgggatcagatggggtttgtgctctaccagaaggtagtccagccaaaccagactaccttaatgtagctagcagtgcagctcctctgtgtgcttttcatggtttgcctgtcctgtatttctgaaagacttagtgaagccatagtcacagataactaagtgggtatgggagtacgcattccaccttgaactttgttctcggtaccacattatcccaactggtttaaagccctgaggatagtagtcactttatgggccacttttaactactaaagtgattatctttcgctcaggcccgtggcgccgacaggatgggcaagtgtcgtggacttcgtactgctaggaagctccgtagtcaccgacgagaccagaagtggcatgataaacagtataagaaagctcatttgggcacagccctaaaggccaacccttttggaggtgcttctcatgcaaaaggaatcgtgctggaaaaagtaggagttgaagccaaacagccaaattctgccattaggaagtgtgtaagggtccagctgatcaagaatggcaagaaaatcacagcctttgtacccaatgacggttgcttgaactttattgaggaaaatgatgaagttctggttgctggatttggtcgcaaaggtcatgctgttggtgatattcctggagtccgctttaaggttgtcaaagtagccaatgtttctcttttggccctatacaaaggcaagaaggaaagaccaagatcataaatattaatggtgaaaacactgtagtaataaattttcatatgccaaaaaa

SEQ ID NO: 354206 - DNA, 578 bp, Homo sapiens
  misc_feature (43)..(43): n is a, c, g, or t
  misc_feature (58)..(58): n is a, c, g, or t
  misc_feature (64)..(64): n is a, c, g, or t
ctgctgccccttacgcgcctgctgccccttacgcgcctgctgncccttacgcgctgcnggcccntactctttcgctcaggcccgtggcgccgacaggatgggcaagtgtcgtggacttcgtactgctaggaagctccgtagtcaccgacgagaccagaagtggcatgataaacagtataagaaagctcatttgggcacagccctaaaggccaacccttttggaggtgcttctcatgcaaaaggaatcgtgctggaaaaagtaggagttgaagccaaacagccaaattctgccattaggaagtgtgtaagggtccagctgatcaagaatggcaagaaaatcacagcctttgtacccaatgacggttgcttgaactttattgaggaaaatgatgaagttctggttgctggatttggtcgcaaaggtcatgctgttggtgatattcctggagtccgctttaaggttgtcaaagtagccaatgtttctcttttggccctatacaaaggcaagaaggaaagaccaagatcataaatattaatggtgaaaacactgtagtaataaattttcatatgccaaaaaa

SEQ ID NO: 354207 - DNA, 3307 bp, Homo sapiens
ccttggctgggcggggcttgctcgcggtggcttgtggctccttcctgcggtgcttctctctttcgctcaggcccgtggcgccgacaggatgggcaagtgtcgtggacttcgtactgctaggaagctccgtagtcaccgacgagaccagaagtggcatgataaacagtataagaaagctcatttgggcacagccctaaaggccaacccttttggaggtgcttctcatgcaaaaggaatcgtgctggaaaaagtaggagttgaagccaaacagccaaattctgccattaggaagtgtgtaagggtccagctgatcaagaatggcaagaaaatcacagcctttgtacccaatgacggttgcttgaactttattgaggaaaatgatgaagttctggttgctggatttggtcgcaaaggtcatgctgttggtgatattcctggagtccgctttaaggttgtcaaagtagccaatgtttctcttttggccctatacaaaggcaagaaggaaagaccaagatcataaatattaatggtgaaaacactgtagtaataaattttcatatgccaaaaaatgtttgtatcttactgtcccctgttctcaccatgaagatcatgttcattaccaccaccacccccccttattttttttatcctaaaccagcaaacgcaggacctgtaccaattttaggagacaataagacagggttgtttcaggattctctagagttaataacatttgtaacctggcacagtttccctcatcctgtggaataagaaaatgagatagatctggaataaatgtgcagtattgtagtattactttaagaactttaagggaacttcaaaaactcactgaaattctagtgagatactttcttttttattcttggtattttccatatcgggtgcaacacttcagttaccaaatttcattgcacatagattatcttaggtacccttggaaatgcacattcttgtatccatcttacaggggcccaagatgataaatagtaaactcaaaattgctccccactctgtttattatttaaaggtgtcaggatctgtgttgtaatgtgtctacattaatgtgtttaggagaatacaggcattggatcatttagttgatggaagtatatgccaggcaagggagataaggtatacgacaagactgatgttttcagtacttctcatgaggttgtcagagaccttcatgtcttcaaagactagtcagcaaatgaagtggtttagtgtagagacaagattggttgtgttttgataatttaagctaggtattgagtacatgtggattttgctgtccacaaatacttgtttcagagttttcatggatacagtggcatggttgaaatgaagctgtgagccttctgctttaaatctgatgtaagaaactcctgttaacaaatagtaagtatgggttaattagccctttgatcaaagcctagctttacattgtttaggatctttggaaaacaattggtttggttgcccactttccgtagatcaagagcagaacctttcacatggcacagaagaacccaggttgcgcttcatacctgcatattccagccttagcctgccatttctctccttggcactttgtgctccagcaacactggtctcagttggtcatcctcaaacttgggttccatatccagcctcaggacctctgttcctgttactatggttccttgcatgtcgcctgctcttactaaagagctcgtgtgttttccagcacacttcggtttatctcttgatgatgatgctagtctctccctccgcaagggcggaaaggctgcctgttggtttgtaccagtgtttcctaacgtgtagctgcagtcagtatttggctaagctgttcccaggggctcaacagatgctttcggatgagccttaactgacccaatcctttgtgatgcgggagagattgctaggcctcgctcacctggccagaaccagggaaagaggccgcggttgcagcgcgattccaggccctgggcgtcaggcgcggggtgggcagctctccccgggcggtggggcccttgtgaccgcgaggcggggcgcaccaggaagggagtgggacagcgcgggcgcccagggatgtggcctggttacctgccttctctgatacgtcaagacaccttcaacaatggcttgcagctgtaccctgttggctgcacccaggacgcccttttcactgctaagcagtcctacctgaggcccaggggctgccagattgacccataaataatctccggcgcctcagatccagaagctgctgagcctgatcttagtgccttctcctttctctgtgtggccccccagcccctttccccactgccttgtgtccaaggccctttccttcatgtatccatggaggagagacaaaaatacacatcaataaaataagatagggaatccataaatagacattcagaagtatggccaacggatttatcttaaaaccaatggaggaagaagagtttcaataaatgttgtggacttccatttgtcaaagaccaaaacaaaggaaccccaaccttacatgtaatacaaacttaactcaaaatggatcatatatctaaatgtaaaatggaaagctataaaactgaaaacagactatctttacaacctaggcgtaggtatagtttttagacattacaccaaaagcacatgccgtaaaagaaaaaatagataaattggtggatttcattaaaattaaaaaactttttctctctgaaaaatcctgttaagctgggcgctgtggttcatgcctgtaatcccagcactttgggaggctgagttgggaagaaattaatagcttgaggccaggagttcaagatcatcctgggcagcaaagtcatacactcttgagggaagagagagaccttctcatattgttttatattgttttatactcagtacctgttttaagaaaaaaacaaggaagtgaaatcaaagacaggcagcccggcaccaggcctgaaaccagccctgggcctgcctggcctaaacctagtagttaaaaatcaacttacgacttagaacctgatgttatccgtagattccaagcattgtataaaaaaattgtgaaactccctgttgtgttctgtaccagtgcatgaaacccctgtcacatatcccctagattgctcaatcaatcacgaccctttcatgtgaaatctttagtgttgtgagcccttaaaagggacagaaattgtgcacttgaggagctcagattttaaggctgtagcttgccgatgctcccagctgaataaagcccttccttctacaa

SEQ ID NO: 354208 - DNA, 3201 bp, Homo sapiens
ccttggctgggcggggcttgctcgcggtggcttgtggctccttcctgcggtgcttctctctttcgctcaggcccgtggcgccgacaggatgggcaagtgtcgtggacttcgtactgctaggaagctccgtagtcaccgacgagaccagaagtggcatgataaacagtataagaaagctcatttgggcacagccctaaaggccaacccttttggaggtgcttctcatgcaaaaggaatcgtgctggaaaaagtaggagttgaagccaaacagccaaattctgccattaggaagtgtgtaagggtccagctgatcaagaatggcaagaaaatcacagcctttgtacccaatgacggttgcttgaactttattgaggaaaatgatgaagttctggttgctggatttggtcgcaaaggtcatgctgttggtgatattcctggagtccgctttaaggttgtcaaagtagccaatgtttctcttttggccctatacaaaggcaagaaggaaagaccaagatcataaatattaatggtgaaaacactgtagtaataaattttcatatgccaaaaaatgtttgtatcttactgtcccctgttctcaccatgaagatcatgttcattaccaccaccacccccccttattttttttatcctaaaccagcaaacgcaggacctgtaccaattttaggagacaataagacagggttgtttcaggattctctagagttaataacatttgtaacctggcacagtttccctcatcctgtggaataagaaaatgagatagatctggaataaatgtgcagtattgtagtattactttaagaactttaagggaacttcaaaaactcactgaaattctagtgagatactttcttttttattcttggtattttccatatcgggtgcaacacttcagttaccaaatttcattgcacatagattatcttaggtacccttggaaatgcacattcttgtatccatcttacaggggcccaagatgataaatagtaaactcaaaattgctccccactctgtttattatttaaaggtgtcaggatctgtgttgtaatgtgtctacattaatgtgtttaggagaatacaggcattggatcatttagttgatggaagtatatgccaggcaagggagataaggtatacgacaagactgatgttttcagtacttctcatgaggttgtcagagaccttcatgtcttcaaagactagtcagcaaatgaagtggtttagtgtagagacaagattggttgtgttttgataatttaagctaggtattgagtacatgtggattttgctgtccacaaatacttgtttcagagttttcatggatacagtggcatggttgaaatgaagctgtgagccttctgctttaaatctgatgtaagaaactcctgttaacaaatagtaagtatgggttaattagccctttgatcaaagcctagctttacattgtttaggatctttggaaaacaattggtttggttgcccactttccgtagatcaagagcagaacctttcacatggcacagaagaacccaggttgcgcttcatacctgcatattccagccttagcctgccatttctctccttggcactttgtgctccagcaacactggtctcagttggtcatcctcaaacttgggttccatatccagcctcaggacctctgttcctgttactatggttccttgcatgtcgcctgctcttactaaagagctcgtgtgttttccagcacacttcggtttatctcttgatgatgatgctagtctctccctccgcaagggcggaaaggctgcctgttggtttgtaccagtgtttcctaacgtgtagctgcagtcagtatttggctaagctgttcccaggggctcaacagatgctttcggatgagccttaactgacccaatcctttgtgatgcgggagagattgctaggcctcgctcacctggccagaaccagggaaagaggccgcggttgcagcgcgattcccagggatgtggcctggttacctgccttctctgatacgtcaagacaccttcaacaatggcttgcagctgtaccctgttggctgcacccaggacgcccttttcactgctaagcagtcctacctgaggcccaggggctgccagattgacccataaataatctccggcgcctcagatccagaagctgctgagcctgatcttagtgccttctcctttctctgtgtggccccccagcccctttccccactgccttgtgtccaaggccctttccttcatgtatccatggaggagagacaaaaatacacatcaataaaataagatagggaatccataaatagacattcagaagtatggccaacggatttatcttaaaaccaatggaggaagaagagtttcaataaatgttgtggacttccatttgtcaaagaccaaaacaaaggaaccccaaccttacatgtaatacaaacttaactcaaaatggatcatatatctaaatgtaaaatggaaagctataaaactgaaaacagactatctttacaacctaggcgtaggtatagtttttagacattacaccaaaagcacatgccgtaaaagaaaaaatagataaattggtggatttcattaaaattaaaaaactttttctctctgaaaaatcctgttaagctgggcgctgtggttcatgcctgtaatcccagcactttgggaggctgagttgggaagaaattaatagcttgaggccaggagttcaagatcatcctgggcagcaaagtcatacactcttgagggaagagagagaccttctcatattgttttatattgttttatactcagtacctgttttaagaaaaaaacaaggaagtgaaatcaaagacaggcagcccggcaccaggcctgaaaccagccctgggcctgcctggcctaaacctagtagttaaaaatcaacttacgacttagaacctgatgttatccgtagattccaagcattgtataaaaaaattgtgaaactccctgttgtgttctgtaccagtgcatgaaacccctgtcacatatcccctagattgctcaatcaatcacgaccctttcatgtgaaatctttagtgttgtgagcccttaaaagggacagaaattgtgcacttgaggagctcagattttaaggctgtagcttgccgatgctcccagctgaataaagcccttccttctacaa

SEQ ID NO: 354209 - DNA, 689 bp, Homo sapiens
gtggaggccgccgaggtcggggtaccgagggacgcagggaggccagcgcttcctcccgggcattcgagcggggcctcgtccttcgggagaacacattctccggagccctcttcgaacgtttattagtcggttcagggcaacttgaaggccaaatgtttggcccacaggccaataaatagtacgagagccaatcggcttaagggtttattccggcaagtgtcgtggacttcgtactgctaggaagctccgtagtcaccgacgagaccagaagtggcatgataaacagtataagaaagctcatttgggcacagccctaaaggccaacccttttggaggtgcttctcatgcaaaaggaatcgtgctggaaaaagtaggagttgaagccaaacagccaaattctgccattaggaagtgtgtaagggtccagctgatcaagaatggcaagaaaatcacagcctttgtacccaatgacggttgcttgaactttattgaggaaaatgatgaagttctggttgctggatttggtcgcaaaggtcatgctgttggtgatattcctggagtccgctttaaggttgtcaaagtagccaatgtttctcttttggccctatacaaaggcaagaaggaaagaccaagatcataaatattaatggtgaaaacactgtagtaataaattttcatatgccaaaaaa

SEQ ID NO: 354210 - DNA, 852 bp, Homo sapiens
ccttggctgggcggggcttgctcgcggtggcttgtggctccttcctgcggtgcttctctctttcgctcaggcccgtggcgccgacaggatgggcaagtgtcgtggacttcgtactgctaggaagctccgtagtcaccgacgagaccagaagtggcatgataaacagtataagaaagctcatttgggcacagccctaaaggccaacccttttggaggtgcttctcatgcaaaaggaatcgtgctggaaaaagtaggagttgaagccaaacagccaaattctgccattaggaagtgtgtaagggtccagctgatcaagaatggcaagaaaatcacagcctttgtacccaatgacggttgcttgaactttattgaggaaaatgatgaagttctggttgctggatttggtcgcaaaggtcatgctgttggtgatattcctggagtccgctttaaggttgtcaaagtagccaatgtttctcttttggccctatacaaaggcaagaaggaaagaccaagatcataaatattaatggtgaaaacactgtagtaataaattttcatatgccaaaaaaaaaaaaaaaaaaaaaaaaaaaaaaaaaaaaaaaaaaaaaaaaaaaaaaaaaacaaaaaaaatgcccgtgggctcagaagtgagatttgcattattcttctgttggattcctgatgaaaaaaggactttcactgtataagtggatggactgaaccaattagaattgatcccagtgaaatttttatattggctaccaatgggtacccaggagtcgctgaaacctcttttaaatttagaggggcaggctttacattaaggccttttttttaggatttggcttccct

SEQ ID NO: 354211 - DNA, 812 bp, Homo sapiens
ccttggctgggcggggcttgctcgcggtggcttgtggctccttcctgcggtgcttctctctttcgctcaggcccgtggcgccgacaggatgggcaagtgtcgtggacttcgtactgctaggaagctccgtagtcaccgacgagaccagaagtggcatgataaacagtataagaaagctcatttgggcacagccctaaaggccaacccttttggaggtgcttctcatgcaaaaggaatcgtgctggaaaaagtaggagttgaagccaaacagccaaattctgccattaggaagtgtgtaagggtccagctgatcaagaatggcaagaaaatcacagcctttgtacccaatgacggttgcttgaactttattgaggaaaatgatgaagttctggttgctggatttggtcgcaaaggtcatgctgttggtgatattcctggagtccgctttaaggttgtcaaagtagccaatgtttctcttttggccctatacaaaggcaagaaggaaagaccaagatcataaatattaatggtgaaaacactgtagtaataaattttcatatgccaaaaaaaaaaaaaaaaaaaaaaaaaaaaaaaaaaaaaaaaaacaaaaaaaaacactgcggggggcttttttgtgtgcgggggggggaaccaaaaggttttagtaagggcacaggtgttataaatgtttttcttgagaacaccatttttttttacagaaggggggataacatggcggcgcccccaaaaaggggggcgaaaaaattcggcaagacccgggtttccgctaatgtttcgttgtgcaaaaagat

SEQ ID NO: 354212 - DNA, 1081 bp, Homo sapiens
  misc_feature (625)..(625): n is a, c, g, or t
  misc_feature (637)..(637): n is a, c, g, or t
  misc_feature (1081)..(1081): n is a, c, g, or t
ccttggctgggcggggcttgctcgcggtggcttgtggctccttcctgcggtgcttctctctttcgctcaggcccgtggcgccgacaggatgggcaagtgtcgtggacttcgtactgctaggaagctccgtagtcaccgacgagaccagaagtggcatgataaacagtataagaaagctcatttgggcacagccctaaaggccaacccttttggaggtgcttctcatgcaaaaggaatcgtgctggaaaaagtaggagttgaagccaaacagccaaattctgccattaggaagtgtgtaagggtccagctgatcaagaatggcaagaaaatcacagcctttgtacccaatgacggttgcttgaactttattgaggaaaatgatgaagttctggttgctggatttggtcgcaaaggtcatgctgttggtgatattcctggagtccgctttaaggttgtcaaagtagccaatgtttctcttttggccctatacaaaggcaagaaggaaagaccaagatcataaatattaatggtgaaaacactgtagtaataaattttcatatgccaaaaaaaaaaaaaaaaaaaaaaaaaaaaaaaaaaaaaaaaaaaaaaaaaaaaaaaaacaaanaaaaaaaaaaanaaccaaataaaaagaaaaaaaaaaggggggggggcccactataaaaattaaacgcccgcgagaggggacagcaaattcaaatcccccacgcccattgtgtctgaagcagaaaaaggcgacgaccaccaaagcgaggcagcacttaaaaaaaagacccagcggggagcgaccagtcacaaaaaaaagccggctgcagcgcagaaaaaacacccacgaggcggccaacatattgtgcggagaggcacaccaccctacccgcggcggaggggcacaacaaagtgctgcagacacacacccccagcggcaacatcaacactgccgccgggaacacacacccgcgcggggtccagtcgggacacacaccacagcgaactaagcagcgcggtgacgcgcaagaatagcggctcgcggcgagacggaatcgaacaaaaaacaaaacgacgn

SEQ ID NO: 354213 - DNA, 991 bp, Homo sapiens
ccttggctgggcggggcttgctcgcggtggcttgtggctccttcctgcggtgcttctctctttcgctcaggcccgtggcgccgacaggatgggcaagtgtcgtggacttcgtactgctaggaagctccgtagtcaccgacgagaccagaagtggcatgataaacagtataagaaagctcatttgggcacagccctaaaggccaacccttttggaggtgcttctcatgcaaaaggaatcgtgctggaaaaagtaggagttgaagccaaacagccaaattctgccattaggaagtgtgtaagggtccagctgatcaagaatggcaagaaaatcacagcctttgtacccaatgacggttgcttgaactttattgaggaaaatgatgaagttctggttgctggatttggtcgcaaaggtcatgctgttggtgatattcctggagtccgctttaaggttgtcaaagtagccaatgtttctcttttggccctatacaaaggcaagaaggaaagaccaagatcataaatattaatggtgaaaacactgtagtaataaattttcatatgccaaaaaaaaaaaaaaaaaaaaaaaaaaaaaaaaaaaaaaaaaaaaaaatggggggggcccccaaaaaattaacccccgggggggcgccccatttgcgcgtcccccccgtttttttggaaaaggggggcccccaaaggggggggataaaaaaaggggggccggggcgcgcggggtataaaaccaagcggctcggaggggggagaaacggtgccacggggagcatttttgggagagagcagagcccctactatcttcgtggggcggggcgaccacatatgggggcaaaacttccctaaggagaagtattaaaaacggcctagaggggcaaattatcacatttcacgggttatagtgggtgtgcaccaacgcgggatatgtgcttcggggataaaactttccgcaccgggagtattattcgaacatttttcg

SEQ ID NO: 354214 - DNA, 2534 bp, Homo sapiens
ccttggctgggcggggcttgctcgcggtggcttgtggctccttcctgcggtgcttctctctttcgctcaggcccgtggcgccgacaggatgggcaagtgtcgtggacttcgtactgctaggaagctccgtagtcaccgacgagaccagaagtggcatgataaacagtataagaaagctcatttgggcacagccctaaaggccaacccttttggaggtgcttctcatgcaaaaggaatcgtgctggaaaaagtaggagttgaagccaaacagccaaattctgccattaggaagtgtgtaagggtccagctgatcaagaatggcaagaaaatcacagcctttgtacccaatgacggttgcttgaactttattgaggaaaatgatgaagttctggttgctggatttggtcgcaaaggtcatgctgttggtgatattcctggagtccgctttaaggttgtcaaagtagccaatgtttctcttttggccctatacaaaggcaagaaggaaagaccaagatcataaatattaatggtgaaaacactgtagtaataaattttcatatgccaaaaaatgtttgtatcttactgtcccctgttctcaccatgaagatcatgttcattaccaccaccacccccccttattttttttatcctaaaccagcaaacgcaggacctgtaccaattttaggagacaataagacagggttgtttcaggattctctagagttaataacatttgtaacctggcacagtttccctcatcctgtggaataagaaaatgagatagatctggaataaatgtgcagtattgtagtattactttaagaactttaagggaacttcaaaaactcactgaaattctagtgagatactttcttttttattcttggtattttccatatcgggtgcaacacttcagttaccaaatttcattgcacatagattatcttaggtacccttggaaatgcacattcttgtatccatcttacaggggcccaagatgataaatagtaaactcaaaattgctccccactctgtttattatttaaaggtgtcaggatctgtgttgtaatgtgtctacattaatgtgtttaggagaatacaggcattggatcatttagttgatggaagtatatgccaggcaagggagataaggtatacgacaagactgatgttttcagtacttctcatgaggttgtcagagaccttcatgtcttcaaagactagtcagcaaatgaagtggtttagtgtagagacaagattggttgtgttttgataatttaagctaggtattgagtacatgtggattttgctgtccacaaatacttgtttcagagttttcatggatacagtggcatggttgaaatgaagctgtgagccttctgctttaaatctgatgtaagaaactcctgttaacaaatagtaagtatgggttaattagccctttgatcaaagcctagctttacattgtttaggatctttggaaaacaattggtttggttgcccactttccgtagatcaagagcagaacctttcacatggcacagaagaacccaggttgcgcttcatacctgcatattccagccttagcctgccatttctctccttggcactttgtgctccagcaacactggtctcagttggtcatcctcaaacttgggttccatatccagcctcaggacctctgttcctgttactatggttccttgcatgtcgcctgctcttactaaagagctcgtgtgttttccagcacacttcggtttatctcttgatgatgatgctagtctctccctccgcaagggcggaaaggctgcctgttggtttgtaccagtgtttcctaacgtgtagctgcagtcagtatttggctaagctgttcccaggggctcaacagatgctttcggatgagccttaactgacccaatcctttgtgatgcgggagagattgctaggcctcgctcacctggccagaaccagggaaagaggccgcggttgcagcgcgattccaggccctgggcgtcaggcgcggggtgggcagctctccccgggcggtggggcccttgtgaccgcgaggcggggcgcaccaggaagggagtgggacagcgcgggcgcccagggatgtggcctggttacctgccttctctgatacgtcaagacaccttcaacaatggcttgcagctgtaccctgttggctgcacccaggacgcccttttcactgctaagcagtcctacctgaggcccaggggctgccagattgacccataaataatctccggcgcctcagatccagaagctgctgagcctgatcttagtgccttctcctttctctgtgtggccccccagcccctttccccactgccttgtgtccaaggccctttccttcatgtatcccggggagaaacaattcccttatcattagaaggaacccactgacttcgaagtggccgggttctttcacccggggcggaaattctcatggtggtcctgtcaacacacgaccacttgttaaacgcaggataactcggagcatgcacacggtc

SEQ ID NO: 354215 - DNA, 1159 bp, Homo sapiens
  misc_feature (589)..(589): n is a, c, g, or t
  misc_feature (601)..(601): n is a, c, g, or t
  misc_feature (1158)..(1159): n is a, c, g, or t
ccttggctgggcggggcttgctcgcggtggcttgtggctccttcctgcggtgcttctctctttcgctcaggcccgtggcgccgacaggatgggcaagtgtcgtggacttcgtactgctaggaagctccgtagtcaccgacgagaccagaagtggcatgataaacagtataagaaagctcatttgggcacagccctaaaggccaacccttttggaggtgcttctcatgcaaaaggaatcgtgctggaaaaagtaggagttgaagccaaacagccaaattctgccattaggaagtgtgtaagggtccagctgatcaagaatggcaagaaaatcacagcctttgtacccaatgacggttgcttgaactttattgaggaaaatgatgaagttctggttgctggatttggtcgcaaaggtcatgctgttggtgatattcctggagtccgctttaaggttgtcaaagtagccaatgtttctcttttggccctatacaaaggcaagaaggaaagaccaagatcataaatattaatggtgaaaacactgtagtaataaattttcatatgccaaaaaaaaaaaaaaaaaaaaacaaanaaaaaaaaaaanaacccgggggtcttatagtgggggggggggaaaaaaggggttaggaaggggctgggtaaaggggtgttcctgtggccccgtttttggtgtaaaaggggggaaattggggggggcccccaaaggggggggggggaaaaatgaaaaaggcgggggttacccgttcttttatggatcgccgcaaaccgcccgagaaaaaacaccgccaaaaaaaagcggacaacgggaaacaaaagaaaacaaggaaacctataagcgagagaaacagggagagtacgacagagagacacccacaaaaagaggaagctaagcacgaagagacaaaaaagtcaaacgaagatgagacacagaaacaaaaaaaaagcgcatcagcaaaacagcaggatcactaatcgagacaagataaaacaagcaagaaggacagagaaagagtgaaacctagtcagtcgaaccatacagagtacttagcgaaagaggaagagacagaactggacattacatcaaacataggcagaacgaaataggaagatagctcactccccccactctactcctgcctnn

SEQ ID NO: 354216 - DNA, 1121 bp, Homo sapiens
ccttggctgggcggggcttgctcgcggtggcttgtggctccttcctgcggtgcttctctctttcgctcaggcccgtggcgccgacaggatgggcaagtgtcgtggacttcgtactgctaggaagctccgtagtcaccgacgagaccagaagtggcatgataaacagtataagaaagctcatttgggcacagccctaaaggccaacccttttggaggtgcttctcatgcaaaaggaatcgtgctggaaaaagtaggagttgaagccaaacagccaaattctgccattaggaagtgtgtaagggtccagctgatcaagaatggcaagaaaatcacagcctttgtacccaatgacggttgcttgaactttattgaggaaaatgatgaagttctggttgctggatttggtcgcaaaggtcatgctgttggtgatattcctggagtccgctttaaggttgtcaaagtagccaatgtttctcttttggccctatacaaaggcaagaaggaaagaccaagatcataaatattaatggtgaaaacactgtagtaataaattttcatatgccaaaaaaaaaaaaccacaaaacaaaaaaaacaaaacactgttgttgggcgcgcgccctgggcccccggaaaagatttcgagaacaccatgcggcttggggccgcgcgcgcggccccagtgggtaagtggggaaccggggccacaaaaaggggaccaggggaaacacccgcgggcaggaactggggcctgggttctccccacaataaaaaagggcccggggggaacaacaggaggttgttttcaaccacaaaatccagagagggggggggtacgaggaggagacaaaaaggcggggccgctctactacaacagggggggctccaaaaggagagcgaccgagcaatcaaaaatataccccgcgccgtgagggagaagaaagaaagaaagaaatacaaacaaacaaaagacagcgaaaagagaaagacgagacacgaagaaaacaaagaaaaagaaacaacagacacagcaagagaaagcagacaacgaaagaaaaaagacaacgagaaagcgagaaaaaaaagaagcaaaacagacaacaaaaaacaagaaaaaaacaaat

SEQ ID NO: 354217 - DNA, 1067 bp, Homo sapiens
ccttggctgggcggggcttgctcgcggtggcttgtggctccttcctgcggtgcttctctctttcgctcaggcccgtggcgccgacaggatgggcaagtgtcgtggacttcgtactgctaggaagctccgtagtcaccgacgagaccagaagtggcatgataaacagtataagaaagctcatttgggcacagccctaaaggccaacccttttggaggtgcttctcatgcaaaaggaatcgtgctggaaaaagtaggagttgaagccaaacagccaaattctgccattaggaagtgtgtaagggtccagctgatcaagaatggcaagaaaatcacagcctttgtacccaatgacggttgcttgaactttattgaggaaaatgatgaagttctggttgctggatttggtcgcaaaggtcatgctgttggtgatattcctggagtccgctttaaggttgtcaaagtagccaatgtttctcttttggccctatacaaaggcaagaaggaaagaccaagatcataaatattaatggtgaaaacactgtagtaataaattttcatatgccaaaaaaaaaaaaaaaaacttcagattagtctctctttctcccgaagggaaagagggccaggggaacagcaggggggcccgggccccagttgctcgtgaaaaaagcgaggaggctaaaaagggggggaacccccgtgctcggagaaaagggcctaagaactcgggccttgggacgggacatcagcccaaaaagagacctcaacccgtttggcggcaaaggccccggaataaatcagcgtcgagcggaaagagccagcctctataaggggctgaaggtgcctcgtggaataaccacgtcaccaggcccggaccggcaaagagctacacagcgtgtaaagggggccccaaaagctaaggccagaagacaaggaggaaaaaggcgagcatgggggcccgggcgaaaaaacaggggggtgcaaagggggcactcccagaagagaccccggcctcggagcagagataaccccgtacacctggggggacacagaagcgcaggtgggcgaag

SEQ ID NO: 354218 - DNA, 1020 bp, Homo sapiens
ccttggctgggcggggcttgctcgcggtggcttgtggctccttcctgcggtgcttctctctttcgctcaggcccgtggcgccgacaggatgggcaagtgtcgtggacttcgtactgctaggaagctccgtagtcaccgacgagaccagaagtggcatgataaacagtataagaaagctcatttgggcacagccctaaaggccaacccttttggaggtgcttctcatgcaaaaggaatcgtgctggaaaaagtaggagttgaagccaaacagccaaattctgccattaggaagtgtgtaagggtccagctgatcaagaatggcaagaaaatcacagcctttgtacccaatgacggttgcttgaactttattgaggaaaatgatgaagttctggttgctggatttggtcgcaaaggtcatgctgttggtgatattcctggagtccgctttaaggttgtcaaagtagccaatgtttctcttttggccctatacaaaggcaagaaggaaagaccaagatcataaatattaatggtgaaaacactgtagtaataaattttcatatgccaaaaaaaaaaaaaaaaacaacaaaaaaaaaaacaaaaaaaaacaaacaaaagaaaacaaaagagacaacaaagagaacaaaaaaacagagaaaaagaaaaacacaacaacaagaagaatcagacacacacacacaagaagaaaacagagagacccagcccgacagtcaactagggagagagaatccgcgacgagagacgacagagtacaagagggcacacacagaggtgagaaaaaaagaaagggagggaggacaataaacacaaagagagaaaacacaaacagggagaacactagagaggagaacaaaagaaagggagaaagaaacgagaaacaagcacacgaggcgaacccgcagccgcgaaaaacgaggagagcgtgagcaggcaacagaatagcgcgggaaagaagagagacgggaggcgccaaaaggggcgaggagagaagaagaaaggggg

SEQ ID NO: 354219 - DNA, 3305 bp, Homo sapiens
  misc_feature (421)..(421): n is a, c, g, or t
  misc_feature (423)..(423): n is a, c, g, or t
  misc_feature (427)..(427): n is a, c, g, or t
  misc_feature (433)..(433): n is a, c, g, or t
  misc_feature (440)..(440): n is a, c, g, or t
  misc_feature (442)..(442): n is a, c, g, or t
  misc_feature (444)..(444): n is a, c, g, or t
  misc_feature (446)..(447): n is a, c, g, or t
  misc_feature (450)..(450): n is a, c, g, or t
  misc_feature (457)..(457): n is a, c, g, or t
  misc_feature (459)..(459): n is a, c, g, or t
  misc_feature (461)..(461): n is a, c, g, or t
  misc_feature (465)..(465): n is a, c, g, or t
  misc_feature (468)..(468): n is a, c, g, or t
  misc_feature (472)..(473): n is a, c, g, or t
  misc_feature (476)..(476): n is a, c, g, or t
  misc_feature (479)..(479): n is a, c, g, or t
  misc_feature (484)..(484): n is a, c, g, or t
  misc_feature (488)..(489): n is a, c, g, or t
ccttggctgggcggggcttgctcgcggtggcttgtggctccttcctgcggtgcttctctctttcgctcaggcccgtggcgccgacaggatgggcaagtgtcgtggacttcgtactgctaggaagctccgtagtcaccgacgagaccagaagtggcatgataaacagtataagaaagctcatttgggcacagccctaaaggccaacccttttggaggtgcttctcatgcaaaaggaatcgtgctggaaaaagtaggagttgaagccaaacagccaaattctgccattaggaagtgtgtaagggtccagctgatcaagaatggcaagaaaatcacagcctttgtacccaatgacggttgcttgaactttattgaggaaaatgatgaagttctggttgctggatttggtcgcaaaggtatgctntngggngatatncctgagncncntnntanggttgtnanantagncantgtnnctnttntggcnctanncaggcaagaaggaaagaccaagatcataaatattaatggtgaaaacactgtagtaataaattttcatatgccaaaaaatgtttgtatcttactgtcccctgttctcaccatgaagatcatgttcattaccaccaccacccccccttattttttttatcctaaaccagcaaacgcaggacctgtaccaattttaggagacaataagacagggttgtttcaggattctctagagttaataacatttgtaacctggcacagtttccctcatcctgtggaataagaaaatgagatagatctggaataaatgtgcagtattgtagtattactttaagaactttaagggaacttcaaaaactcactgaaattctagtgagatactttcttttttattcttggtattttccatatcgggtgcaacacttcagttaccaaatttcattgcacatagattatcttaggtacccttggaaatgcacattcttgtatccatcttacaggggcccaagatgataaatagtaaactcaaaattgctccccactctgtttattatttaaaggtgtcaggatctgtgttgtaatgtgtctacattaatgtgtttaggagaatacaggcattggatcatttagttgatggaagtatatgccaggcaagggagataaggtatacgacaagactgatgttttcagtacttctcatgaggttgtcagagaccttcatgtcttcaaagactagtcagcaaatgaagtggtttagtgtagagacaagattggttgtgttttgataatttaagctaggtattgagtacatgtggattttgctgtccacaaatacttgtttcagagttttcatggatacagtggcatggttgaaatgaagctgtgagccttctgctttaaatctgatgtaagaaactcctgttaacaaatagtaagtatgggttaattagccctttgatcaaagcctagctttacattgtttaggatctttggaaaacaattggtttggttgcccactttccgtagatcaagagcagaacctttcacatggcacagaagaacccaggttgcgcttcatacctgcatattccagccttagcctgccatttctctccttggcactttgtgctccagcaacactggtctcagttggtcatcctcaaacttgggttccatatccagcctcaggacctctgttcctgttactatggttccttgcatgtcgcctgctcttactaaagagctcgtgtgttttccagcacacttcggtttatctcttgatgatgatgctagtctctccctccgcaagggcggaaaggctgcctgttggtttgtaccagtgtttcctaacgtgtagctgcagtcagtatttggctaagctgttcccaggggctcaacagatgctttcggatgagccttaactgacccaatcctttgtgatgcgggagagattgctaggcctcgctcacctggccagaaccagggaaagaggccgcggttgcagcgcgattccaggccctgggcgtcaggcgcggggtgggcagctctccccgggcggtggggcccttgtgaccgcgaggcggggcgcaccaggaagggagtgggacagcgcgggcgcccagggatgtggcctggttacctgccttctctgatacgtcaagacaccttcaacaatggcttgcagctgtaccctgttggctgcacccaggacgcccttttcactgctaagcagtcctacctgaggcccaggggctgccagattgacccataaataatctccggcgcctcagatccagaagctgctgagcctgatcttagtgccttctcctttctctgtgtggccccccagcccctttccccactgccttgtgtccaaggccctttccttcatgtatccatggaggagagacaaaaatacacatcaataaaataagatagggaatccataaatagacattcagaagtatggccaacggatttatcttaaaaccaatggaggaagaagagtttcaataaatgttgtggacttccatttgtcaaagaccaaaacaaaggaaccccaaccttacatgtaatacaaacttaactcaaaatggatcatatatctaaatgtaaaatggaaagctataaaactgaaaacagactatctttacaacctaggcgtaggtatagtttttagacattacaccaaaagcacatgccgtaaaagaaaaaatagataaattggtggatttcattaaaattaaaaaactttttctctctgaaaaatcctgttaagctgggcgctgtggttcatgcctgtaatcccagcactttgggaggctgagttgggaagaaattaatagcttgaggccaggagttcaagatcatcctgggcagcaaagtcatacactcttgagggaagagagagaccttctcatattgttttatattgttttatactcagtacctgttttaagaaaaaaacaaggaagtgaaatcaaagacaggcagcccggcaccaggcctgaaaccagccctgggcctgcctggcctaaacctagtagttaaaaatcaacttacgacttagaacctgatgttatccgtagattccaagcattgtataaaaaaattgtgaaactccctgttgtgttctgtaccagtgcatgaaacccctgtcacatatcccctagattgctcaatcaatcacgaccctttcatgtgaaatctttagtgttgtgagcccttaaaagggacagaaattgtgcacttgaggagctcagattttaaggctgtagcttgccgatgctcccagctgaataaagcccttccttctacaa

SEQ ID NO: 354220 - DNA, 3449 bp, Homo sapiens
ccttggctgggcggggcttgctcgcggtggcttgtggctccttcctgcggtgcttctctctttcgctcaggcccgtggcgccgacaggatgggcaagtgtcgtggacttcgtactgctaggaagctccgtagtcaccgacgagaccagaagtggcatgataaacagtataagaaagctcatttgggcacagccctaaaggccaacccttttggaggtgcttctcatgcaaaaggaatcgtgctggaaaaagtaggagttgaagccaaacagccaaattctgccattaggaagtgtgtaagggtccagctgatcaagaatggcaagaaaatcacagcctttgtacccaatgacggttgcttgaactttattgaggtgagtatttcaactctatcgtaccttctgttgttggggtggcctccctcacatttttatctgatgcaagggagtttcctcacatgaaagtatttttgtgatcgccaccaacaccagaaataaacttcttattttattccaggaaaatgatgaagttctggttgctggatttggtcgcaaaggtcatgctgttggtgatattcctggagtccgctttaaggttgtcaaagtagccaatgtttctcttttggccctatacaaaggcaagaaggaaagaccaagatcataaatattaatggtgaaaacactgtagtaataaattttcatatgccaaaaaatgtttgtatcttactgtcccctgttctcaccatgaagatcatgttcattaccaccaccacccccccttattttttttatcctaaaccagcaaacgcaggacctgtaccaattttaggagacaataagacagggttgtttcaggattctctagagttaataacatttgtaacctggcacagtttccctcatcctgtggaataagaaaatgagatagatctggaataaatgtgcagtattgtagtattactttaagaactttaagggaacttcaaaaactcactgaaattctagtgagatactttcttttttattcttggtattttccatatcgggtgcaacacttcagttaccaaatttcattgcacatagattatcttaggtacccttggaaatgcacattcttgtatccatcttacaggggcccaagatgataaatagtaaactcaaaattgctccccactctgtttattatttaaaggtgtcaggatctgtgttgtaatgtgtctacattaatgtgtttaggagaatacaggcattggatcatttagttgatggaagtatatgccaggcaagggagataaggtatacgacaagactgatgttttcagtacttctcatgaggttgtcagagaccttcatgtcttcaaagactagtcagcaaatgaagtggtttagtgtagagacaagattggttgtgttttgataatttaagctaggtattgagtacatgtggattttgctgtccacaaatacttgtttcagagttttcatggatacagtggcatggttgaaatgaagctgtgagccttctgctttaaatctgatgtaagaaactcctgttaacaaatagtaagtatgggttaattagccctttgatcaaagcctagctttacattgtttaggatctttggaaaacaattggtttggttgcccactttccgtagatcaagagcagaacctttcacatggcacagaagaacccaggttgcgcttcatacctgcatattccagccttagcctgccatttctctccttggcactttgtgctccagcaacactggtctcagttggtcatcctcaaacttgggttccatatccagcctcaggacctctgttcctgttactatggttccttgcatgtcgcctgctcttactaaagagctcgtgtgttttccagcacacttcggtttatctcttgatgatgatgctagtctctccctccgcaagggcggaaaggctgcctgttggtttgtaccagtgtttcctaacgtgtagctgcagtcagtatttggctaagctgttcccaggggctcaacagatgctttcggatgagccttaactgacccaatcctttgtgatgcgggagagattgctaggcctcgctcacctggccagaaccagggaaagaggccgcggttgcagcgcgattccaggccctgggcgtcaggcgcggggtgggcagctctccccgggcggtggggcccttgtgaccgcgaggcggggcgcaccaggaagggagtgggacagcgcgggcgcccagggatgtggcctggttacctgccttctctgatacgtcaagacaccttcaacaatggcttgcagctgtaccctgttggctgcacccaggacgcccttttcactgctaagcagtcctacctgaggcccaggggctgccagattgacccataaataatctccggcgcctcagatccagaagctgctgagcctgatcttagtgccttctcctttctctgtgtggccccccagcccctttccccactgccttgtgtccaaggccctttccttcatgtatccatggaggagagacaaaaatacacatcaataaaataagatagggaatccataaatagacattcagaagtatggccaacggatttatcttaaaaccaatggaggaagaagagtttcaataaatgttgtggacttccatttgtcaaagaccaaaacaaaggaaccccaaccttacatgtaatacaaacttaactcaaaatggatcatatatctaaatgtaaaatggaaagctataaaactgaaaacagactatctttacaacctaggcgtaggtatagtttttagacattacaccaaaagcacatgccgtaaaagaaaaaatagataaattggtggatttcattaaaattaaaaaactttttctctctgaaaaatcctgttaagctgggcgctgtggttcatgcctgtaatcccagcactttgggaggctgagttgggaagaaattaatagcttgaggccaggagttcaagatcatcctgggcagcaaagtcatacactcttgagggaagagagagaccttctcatattgttttatattgttttatactcagtacctgttttaagaaaaaaacaaggaagtgaaatcaaagacaggcagcccggcaccaggcctgaaaccagccctgggcctgcctggcctaaacctagtagttaaaaatcaacttacgacttagaacctgatgttatccgtagattccaagcattgtataaaaaaattgtgaaactccctgttgtgttctgtaccagtgcatgaaacccctgtcacatatcccctagattgctcaatcaatcacgaccctttcatgtgaaatctttagtgttgtgagcccttaaaagggacagaaattgtgcacttgaggagctcagattttaaggctgtagcttgccgatgctcccagctgaataaagcccttccttctacaa

SEQ ID NO: 354221 - DNA, 555 bp, Homo sapiens
  misc_feature (498)..(498): n is a, c, g, or t
  misc_feature (500)..(500): n is a, c, g, or t
ccttggctgggcggggcttgctcgcggtggcttgtggctccttcctgcggtgcttctctctttcgctcaggcccgtggcgccgacaggatgggcaagtgtcgtggacttcgtactgctaggaagctccgtagtcaccgacgagaccagaagtggcatgataaacagtataagaaagctcatttgggcacagccctaaaggccaacccttttggaggtgcttctcatgcaaaaggaatcgtgctggaaaaagtaggagttgaagccaaacagccaaattctgccattaggaagtgtgtaagggtccagctgatcaagaatggcaagaaaatcacagcctttgtacccaatgacggttgcttgaactttattgaggaaaatgatgaagttctggttgctggatttggtcgcaaaggtcatgctgttggtgatattcctggagtccgctttaaggttgtcaaagtagccaatgtttctcttttggccctatacaaagtagntnagagagccttgccgctagccccctctcccccttcccgatgtatatctgcgtcccc

SEQ ID NO: 354222 - DNA, 3406 bp, Homo sapiens
ttagtcacactgggaaagctgaacaattgtgttttcgtcacaggagttctttgtaatgcttgtacagttgatgtcgatgctcactgcttctgctttttctttctttttattttaatatctgaaggttctggtaacctgtggtgtatttttattttcctgtgactgtttttgttttgtttttttcctttttcctcccctttgaccctattcatgtctctacccacttcgtgggcagcgctgcccacgaagtgtgtaagggtccagctgatcaagaatggcaagaaaatcacagcctttgtacccaatgacggttgcttgaactttattgaggtgagtatttcaactctatcgtaccttctgttgttggggtggcctccctcacatttttatctgatgcaagggagtttcctcacatgaaagtatttttgtgatcgccaccaacaccagaaataaacttcttattttattccaggaaaatgatgaagttctggttgctggatttggtcgcaaaggtcatgctgttggtgatattcctggagtccgctttaaggttgtcaaagtagccaatgtttctcttttggccctatacaaaggcaagaaggaaagaccaagatcataaatattaatggtgaaaacactgtagtaataaattttcatatgccaaaaaatgtttgtatcttactgtcccctgttctcaccatgaagatcatgttcattaccaccaccacccccccttattttttttatcctaaaccagcaaacgcaggacctgtaccaattttaggagacaataagacagggttgtttcaggattctctagagttaataacatttgtaacctggcacagtttccctcatcctgtggaataagaaaatgagatagatctggaataaatgtgcagtattgtagtattactttaagaactttaagggaacttcaaaaactcactgaaattctagtgagatactttcttttttattcttggtattttccatatcgggtgcaacacttcagttaccaaatttcattgcacatagattatcttaggtacccttggaaatgcacattcttgtatccatcttacaggggcccaagatgataaatagtaaactcaaaattgctccccactctgtttattatttaaaggtgtcaggatctgtgttgtaatgtgtctacattaatgtgtttaggagaatacaggcattggatcatttagttgatggaagtatatgccaggcaagggagataaggtatacgacaagactgatgttttcagtacttctcatgaggttgtcagagaccttcatgtcttcaaagactagtcagcaaatgaagtggtttagtgtagagacaagattggttgtgttttgataatttaagctaggtattgagtacatgtggattttgctgtccacaaatacttgtttcagagttttcatggatacagtggcatggttgaaatgaagctgtgagccttctgctttaaatctgatgtaagaaactcctgttaacaaatagtaagtatgggttaattagccctttgatcaaagcctagctttacattgtttaggatctttggaaaacaattggtttggttgcccactttccgtagatcaagagcagaacctttcacatggcacagaagaacccaggttgcgcttcatacctgcatattccagccttagcctgccatttctctccttggcactttgtgctccagcaacactggtctcagttggtcatcctcaaacttgggttccatatccagcctcaggacctctgttcctgttactatggttccttgcatgtcgcctgctcttactaaagagctcgtgtgttttccagcacacttcggtttatctcttgatgatgatgctagtctctccctccgcaagggcggaaaggctgcctgttggtttgtaccagtgtttcctaacgtgtagctgcagtcagtatttggctaagctgttcccaggggctcaacagatgctttcggatgagccttaactgacccaatcctttgtgatgcgggagagattgctaggcctcgctcacctggccagaaccagggaaagaggccgcggttgcagcgcgattccaggccctgggcgtcaggcgcggggtgggcagctctccccgggcggtggggcccttgtgaccgcgaggcggggcgcaccaggaagggagtgggacagcgcgggcgcccagggatgtggcctggttacctgccttctctgatacgtcaagacaccttcaacaatggcttgcagctgtaccctgttggctgcacccaggacgcccttttcactgctaagcagtcctacctgaggcccaggggctgccagattgacccataaataatctccggcgcctcagatccagaagctgctgagcctgatcttagtgccttctcctttctctgtgtggccccccagcccctttccccactgccttgtgtccaaggccctttccttcatgtatccatggaggagagacaaaaatacacatcaataaaataagatagggaatccataaatagacattcagaagtatggccaacggatttatcttaaaaccaatggaggaagaagagtttcaataaatgttgtggacttccatttgtcaaagaccaaaacaaaggaaccccaaccttacatgtaatacaaacttaactcaaaatggatcatatatctaaatgtaaaatggaaagctataaaactgaaaacagactatctttacaacctaggcgtaggtatagtttttagacattacaccaaaagcacatgccgtaaaagaaaaaatagataaattggtggatttcattaaaattaaaaaactttttctctctgaaaaatcctgttaagctgggcgctgtggttcatgcctgtaatcccagcactttgggaggctgagttgggaagaaattaatagcttgaggccaggagttcaagatcatcctgggcagcaaagtcatacactcttgagggaagagagagaccttctcatattgttttatattgttttatactcagtacctgttttaagaaaaaaacaaggaagtgaaatcaaagacaggcagcccggcaccaggcctgaaaccagccctgggcctgcctggcctaaacctagtagttaaaaatcaacttacgacttagaacctgatgttatccgtagattccaagcattgtataaaaaaattgtgaaactccctgttgtgttctgtaccagtgcatgaaacccctgtcacatatcccctagattgctcaatcaatcacgaccctttcatgtgaaatctttagtgttgtgagcccttaaaagggacagaaattgtgcacttgaggagctcagattttaaggctgtagcttgccgatgctcccagctgaataaagcccttccttctacaa

SEQ ID NO: 354223 - DNA, 674 bp, Homo sapiens
  misc_feature (43)..(43): n is a, c, g, or t
  misc_feature (58)..(58): n is a, c, g, or t
  misc_feature (64)..(64): n is a, c, g, or t
ctgctgccccttacgcgcctgctgccccttacgcgcctgctgncccttacgcgctgcnggcccntactctttcgctcaggcccgtggcgccgacaggatgggcaagtgtcgtggacttcgtactgctaggaagctccgtagtcaccgacgagaccagaagtggcatgataaacagtataagaaagctcatttgggcacagccctaaaggccaacccttttggaggtgcttctcatgcaaaaggaatcgtgctggaaaaagttctagctctgtcacccaggctggtgtgcagtagcgcaagactccctgcaaccttagcctcccaggttcaagcatttctcctgcctcagcctcccagaggagttgaagccaaacagccaaattctgccattaggaagtgtgtaagggtccagctgatcaagaatggcaagaaaatcacagcctttgtacccaatgacggttgcttgaactttattgaggaaaatgatgaagttctggttgctggatttggtcgcaaaggtcatgctgttggtgatattcctggagtccgctttaaggttgtcaaagtagccaatgtttctcttttggccctatacaaaggcaagaaggaaagaccaagatcataaatattaatggtgaaaacactgtagtaataaattttcatatgccaaaaaa

SEQ ID NO: 354224 - DNA, 478 bp, Homo sapiens
ccttggctgggcggggcttgctcgcggtggcttgtggctccttcctgcggtgcttctctctttcgctcaggcccgtggcgccgacaggatgggcaagtgtcgtggacttcgtactgctaggaagctccgtagtcaccgacgagaccagaagtggcatgataaacagtataagaaagctcatttgggcacagccctaaaggccaacccttttggaggtgcttctcatgcaaaaggaatcgtgctggaaaaagtaggagttgaagccaaacagccaaattctgccattaggaagtgtgtaagggtccagctgatcaagaatggcaagaaaatcacagcctttgtacccaatgacggttgcttgaactttattgaggaaaatgatgaagttctggttgctggatttggtcgcaaaggtcatgcgttggggatatccggggcccccttaagggtgtaaggggccacgttgctgcttgggcct

SEQ ID NO: 354225 - DNA, 340 bp, Homo sapiens
  misc_feature (43)..(43): n is a, c, g, or t
  misc_feature (58)..(58): n is a, c, g, or t
  misc_feature (64)..(64): n is a, c, g, or t
ctgctgccccttacgcgcctgctgccccttacgcgcctgctgncccttacgcgctgcnggcccntactctttcgctcaggcccgtggcgccgacaggatgggcaagtgtcgtggacttcgtactgctaggaagctccgtagtcaccgacgagaccagaagtggcatgataaacagtataagaaagctcatttgggcacagccctaaaggccaacccttttggaggtgcttctcatgcaaaaggaatcgtgctggaaaaagtgagctggagattggatcacagccgaaggagtaaaggtgctgcaatgatgttagctgtggccagccaatggtcctgcggt

SEQ ID NO: 354226 - DNA, 532 bp, Homo sapiens
  misc_feature (43)..(43): n is a, c, g, or t
  misc_feature (58)..(58): n is a, c, g, or t
  misc_feature (64)..(64): n is a, c, g, or t
  misc_feature (305)..(305): n is a, c, g, or t
  misc_feature (321)..(321): n is a, c, g, or t
  misc_feature (326)..(326): n is a, c, g, or t
  misc_feature (345)..(345): n is a, c, g, or t
ctgctgccccttacgcgcctgctgccccttacgcgcctgctgncccttacgcgctgcnggcccntactctttcgctcaggcccgtggcgccgacaggatgggcaagtgtcgtggacttcgtactgctaggaagctccgtagtcaccgacgagaccagaagtggcatgataaacagtataagaaagctcatttgggcacagccctaaaggccaacccttttggaggtgcttctcatgcaaaaggaatcgtgctggaaaaagtaggagttgaagcaacagccaaatctgcattaggagtgtgtaggntcagctgatcaagatngcagnaaatacagcctttgtaccnatgacgtttgcttgactttttgaggaaataatgaggtctggtgctggattggcgcaaggcatgctgttggtatattccagggcgcttagggtgcaagagcaattttctttttgcctaccaaggcagaggaacccaggccatattttatggtaaacctttgtatatttcattcaaaaaaaaaaccctg

SEQ ID NO: 354227 - DNA, 465 bp, Homo sapiens
  misc_feature (238)..(238): n is a, c, g, or t
  misc_feature (254)..(254): n is a, c, g, or t
  misc_feature (259)..(259): n is a, c, g, or t
  misc_feature (278)..(278): n is a, c, g, or t
gagctcgcgcgcctgcaggtgcgccgacagatgggcaagtgtcgtggacttcgtactgctaggaagctccgtagtcaccgacgagaccagaagtggcatgataaacagtataagaaagctcatttgggcacagccctaaaggccaacccttttggaggtgcttctcatgcaaaaggaatcgtgctggaaaaagtaggagttgaagcaacagccaaatctgcattaggagtgtgtaggntcagctgatcaagatngcagnaaatacagcctttgtaccnatgacgtttgcttgactttttgaggaaataatgaggtctggtgctggattggcgcaaggcatgctgttggtatattccagggcgcttagggtgcaagagcaattttctttttgcctaccaaggcagaggaacccaggccatattttatggtaaacctttgtatatttcattcaaaaaaaaaaccctg

SEQ ID NO: 354228 - DNA, 3254 bp, Homo sapiens
ccttggctgggcggggcttgctcgcggtggcttgtggctccttcctgcggtgcttctctctttcgctcaggcccgtggcgccgacaggatgggcaagtgtcgtggacttcgtactgctaggaagctccgtagtcaccgacgagaccagaagtggcatgataaacagtataagaaagctcatttgggcacagccctaaaggccaacccttttggaggtgcttctcatgcaaaaggaatcgtgctggaaaaagtaggagttgaagccaaacagccaaattctgccattaggaagtgtgtaagggtccagctgatcaagaatggcaagaaaatcacagcctttgtacccaatgacggttgcttgaactttattgaggaaaatgatgaagttctggttgctggatttggtcgcaaaggtcatgctgttggtgatattcctggagtccgctttaaggttgtcaaagtagccaatgtttctcttttggccctatacaaaggcaagaaggaaagaccaagatcataaatattaatggtgaaaacactgtagtaataaattttcatatgccaaaaaatgtttgtatcttactgtcccctgttctcaccatgaagatcatgttcattaccaccaccacccccccttattttttttatcctaaaccagcaaacgcaggacctgtaccaattttaggagacaataagacagggttgtttcaggattctctagagttaataacatttgtaacctggcacagtttccctcatcctgtggaataagaaaatgagatagatctggaataaatgtgcagtattgtagtattactttaagaactttaagggaacttcaaaaactcactgaaattctagtgagatactttcttttttattcttggtattttccatatcgggtgcaacacttcagttaccaaatttcattgcacatagattatcttaggtacccttggaaatgcacattcttgtatccatcttacaggggcccaagatgataaatagtaaactcaaaattgctccccactctgtttattatttaaaggtgtcaggatctgtgttgtaatgtgtctacattaatgtgtttaggagaatacaggcattggatcatttagttgatggaagtatatgccaggcaagggagataaggtatacgacaagactgatgttttcagtacttctcatgaggttgtcagagaccttcatgtcttcaaagactagtcagcaaatgaagtggtttagtgtagagacaagattggttgtgttttgataatttaagctaggtattgagtacatgtggattttgctgtccacaaatacttgtttcagagttttcatggatacagtggcatggttgaaatgaagctgtgagccttctgctttaaatctgatgtaagaaactcctgttaacaaatagtaagtatgggttaattagccctttgatcaaagcctagctttacattgtttaggatctttggcatggcacagaagaacccaggttgcgcttcatacctgcatattccagccttagcctgccatttctctccttggcactttgtgctccagcaacactggtctcagttggtcatcctcaaacttgggttccatatccagcctcaggacctctgttcctgttactatggttccttgcatgtcgcctgctcttactaaagagctcgtgtgttttccagcacacttcggtttatctcttgatgatgatgctagtctctccctccgcaagggcggaaaggctgcctgttggtttgtaccagtgtttcctaacgtgtagctgcagtcagtatttggctaagctgttcccaggggctcaacagatgctttcggatgagccttaactgacccaatcctttgtgatgcgggagagattgctaggcctcgctcacctggccagaaccagggaaagaggccgcggttgcagcgcgattccaggccctgggcgtcaggcgcggggtgggcagctctccccgggcggtggggcccttgtgaccgcgaggcggggcgcaccaggaagggagtgggacagcgcgggcgcccagggatgtggcctggttacctgccttctctgatacgtcaagacaccttcaacaatggcttgcagctgtaccctgttggctgcacccaggacgcccttttcactgctaagcagtcctacctgaggcccaggggctgccagattgacccataaataatctccggcgcctcagatccagaagctgctgagcctgatcttagtgccttctcctttctctgtgtggccccccagcccctttccccactgccttgtgtccaaggccctttccttcatgtatccatggaggagagacaaaaatacacatcaataaaataagatagggaatccataaatagacattcagaagtatggccaacggatttatcttaaaaccaatggaggaagaagagtttcaataaatgttgtggacttccatttgtcaaagaccaaaacaaaggaaccccaaccttacatgtaatacaaacttaactcaaaatggatcatatatctaaatgtaaaatggaaagctataaaactgaaaacagactatctttacaacctaggcgtaggtatagtttttagacattacaccaaaagcacatgccgtaaaagaaaaaatagataaattggtggatttcattaaaattaaaaaactttttctctctgaaaaatcctgttaagctgggcgctgtggttcatgcctgtaatcccagcactttgggaggctgagttgggaagaaattaatagcttgaggccaggagttcaagatcatcctgggcagcaaagtcatacactcttgagggaagagagagaccttctcatattgttttatattgttttatactcagtacctgttttaagaaaaaaacaaggaagtgaaatcaaagacaggcagcccggcaccaggcctgaaaccagccctgggcctgcctggcctaaacctagtagttaaaaatcaacttacgacttagaacctgatgttatccgtagattccaagcattgtataaaaaaattgtgaaactccctgttgtgttctgtaccagtgcatgaaacccctgtcacatatcccctagattgctcaatcaatcacgaccctttcatgtgaaatctttagtgttgtgagcccttaaaagggacagaaattgtgcacttgaggagctcagattttaaggctgtagcttgccgatgctcccagctgaataaagcccttccttctacaa

SEQ ID NO: 354229 - DNA, 3142 bp, Homo sapiens
ccttggctgggcggggcttgctcgcggtggcttgtggctccttcctgcggtgcttctctctttcgctcaggcccgtggcgccgacaggatgggcaagtgtcgtggacttcgtactgctaggaagctccgtagtcaccgacgagaccagaagtggcatgataaacagtataagaaagctcatttgggcacagccctaaaggccaacccttttggaggtgcttctcatgcaaaaggaatcgtgctggaaaaagtaggagttgaagccaaacagccaaattctgccattaggaagtgtgtaagggtccagctgatcaagaatggcaagaaaatcacagcctttgtacccaatgacggttgcttgaactttattgaggaaaatgatgaagttctggttgctggatttggtcgcaaaggtcatgctgttggtgatattcctggagtccgctttaaggttgtcaaagtagccaatgtttctcttttggccctatacaaaggcaagaaggaaagaccaagatcataaatattaatggtgaaaacactgtagtaataaattttcatatgccaaaaaatgtttgtatcttactgtcccctgttctcaccatgaagatcatgttcattaccaccaccacccccccttattttttttatcctaaaccagcaaacgcaggacctgtaccaattttaggagacaataagacagggttgtttcaggattctctagagttaataacatttgtaacctggcacagtttccctcatcctgtggaataagaaaatgagatagatctggaataaatgtgcagtattgtagtattactttaagaactttaagggaacttcaaaaactcactgaaattctagtgagatactttcttttttattcttggtattttccatatcgggtgcaacacttcagttaccaaatttcattgcacatagattatcttaggtacccttggaaatgcacattcttgtatccatcttacaggggcccaagatgataaatagtaaactcaaaattgctccccactctgtttattatttaaaggtgtcaggatctgtgttgtaatgtgtctacattaatgtgtttaggagaatacaggcattggatcatttagttgatggaagtatatgccaggcaagggagataaggtatacgacaagactgatgttttcagtacttctcatgaggttgtcagagaccttcatgtcttcaaagactagtcagcaaatgaagtggtttagtgtagagacaagattggttgtgttttgataatttaagctaggtattgagtacatgtggattttgctgtccacaaatacttgtttcagagttttcatggatacagtggcatggttgaaatgaagctgtgagccttctgctttaaatctgatgtaagaaactcctgttaacaaatagtaagtatgggttaattagccctttgatcaaagcctagctttacattgtttaggatctttggaaaacaattggtttggttgcccactttccgtagatcaagagcagaacctttcacatggcacagaagaacccaggttgcgcttcatacctgcatattccagccttagcctgccatttctctccttggcactttgtgctccagcaacactggtctcagttggtcatcctcaaacttgggttccatatccagcctcaggacctctgttcctgttactatggttccttgcatgtcgcctgctcttactaaagagctcgtgtgttttccagcacacttcggtttatctcttgatgatgatgctaggcctcgctcacctggccagaaccagggaaagaggccgcggttgcagcgcgattccaggccctgggcgtcaggcgcggggtgggcagctctccccgggcggtggggcccttgtgaccgcgaggcggggcgcaccaggaagggagtgggacagcgcgggcgcccagggatgtggcctggttacctgccttctctgatacgtcaagacaccttcaacaatggcttgcagctgtaccctgttggctgcacccaggacgcccttttcactgctaagcagtcctacctgaggcccaggggctgccagattgacccataaataatctccggcgcctcagatccagaagctgctgagcctgatcttagtgccttctcctttctctgtgtggccccccagcccctttccccactgccttgtgtccaaggccctttccttcatgtatccatggaggagagacaaaaatacacatcaataaaataagatagggaatccataaatagacattcagaagtatggccaacggatttatcttaaaaccaatggaggaagaagagtttcaataaatgttgtggacttccatttgtcaaagaccaaaacaaaggaaccccaaccttacatgtaatacaaacttaactcaaaatggatcatatatctaaatgtaaaatggaaagctataaaactgaaaacagactatctttacaacctaggcgtaggtatagtttttagacattacaccaaaagcacatgccgtaaaagaaaaaatagataaattggtggatttcattaaaattaaaaaactttttctctctgaaaaatcctgttaagctgggcgctgtggttcatgcctgtaatcccagcactttgggaggctgagttgggaagaaattaatagcttgaggccaggagttcaagatcatcctgggcagcaaagtcatacactcttgagggaagagagagaccttctcatattgttttatattgttttatactcagtacctgttttaagaaaaaaacaaggaagtgaaatcaaagacaggcagcccggcaccaggcctgaaaccagccctgggcctgcctggcctaaacctagtagttaaaaatcaacttacgacttagaacctgatgttatccgtagattccaagcattgtataaaaaaattgtgaaactccctgttgtgttctgtaccagtgcatgaaacccctgtcacatatcccctagattgctcaatcaatcacgaccctttcatgtgaaatctttagtgttgtgagcccttaaaagggacagaaattgtgcacttgaggagctcagattttaaggctgtagcttgccgatgctcccagctgaataaagcccttccttctacaa

SEQ ID NO: 354230 - DNA, 3499 bp, Homo sapiens
ccttggctgggcggggcttgctcgcggtggcttgtggctccttcctgcggtgcttctctctttcgctcaggcccgtggcgccgacaggatgggcaagtgtcgtggacttcgtactgctaggaagctccgtagtcaccgacgagaccagaagtggcatgataaacagtataagaaagctcatttgggcacagccctaaaggccaacccttttggaggtgcttctcatgcaaaaggaatcgtgctggaaaaagtaggagttgaagccaaacagccaaattctgccattaggaagtgtgtaagggtccagctgatcaagaatggcaagaaaatcacagcctttgtacccaatgacggttgcttgaactttattgaggaaaatgatgaagttctggttgctggatttggtcgcaaaggtcatgctgttggtgatattcctggagtccgctttaaggttgtcaaagtagccaatgtttctcttttggccctatacaaaggcaagaaggaaagaccaagatcataaatattaatggtgaaaacactgtagtaataaattttcatatgccaaaaaatgtttgtatcttactgtcccctgttctcaccatgaagatcatgttcattaccaccaccacccccccttattttttttatcctaaaccagcaaacgcaggacctgtaccaattttaggagacaataagacagggttgtttcaggattctctagagttaataacatttgtaacctggcacagtttccctcatcctgtggaataagaaaatgagatagatctggaataaatgtgcagtattgtagtattactttaagaactttaagggaacttcaaaaactcactgaaattctagtgagatactttcttttttattcttggtattttccatatcgggtgcaacacttcagttaccaaatttcattgcacatagattatcttaggtacccttggaaatgcacattcttgtatccatcttacaggggcccaagatgataaatagtaaactcaaaattgctccccactctgtttattatttaaaggtgtcaggatctgtgttgtaatgtgtctacattaatgtgtttaggagaatacaggcattggatcatttagttgatggaagtatatgccaggcaagggagataaggtatacgacaagactgatgttttcagtacttctcatgaggttgtcagagaccttcatgtcttcaaagactagtcagcaaatgaagtggtttagtgtagagacaagattggttgtgttttgataatttaagctaggtattgagtacatgtggattttgctgtccacaaatacttgtttcagagttttcatggatacagtggcatggttgaaatgaagctgtgagccttctgctttaaatctgatgtaagaaactcctgttaacaaatagtaagtatgggttaattagccctttgatcaaagcctagctttacattgtttaggatctttggaaaacaattggtttggttgcccactttccgtagatcaagagcagaacctttcacatggcacagaagaacccaggttgcgcttcatacctgcatattccagccttagcctgccatttctctccttggcactttgtgctccagcaacactggtctcagttggtcatcctcaaacttgggttccatatccagcctcaggacctctgttcctgttactatggttccttgcatgtcgcctgctcttactaaagagctcgtgtgttttccagcacacttcggtttatctcttgatgatgatgctagtctctccctccgcaagggcggaaaggctgcctgttggtttgtaccagtgtttcctaacgtgtagctgcagtcagtatttggctaagctgttcccaggggctcaacagatgctttcggatgagccttaactgacccaatcctttgtgatgcgggagagattgctaggcctcgctcacctggccagaaccagggaaagaggccgcggttgcagcgcgattccaggccctgggcgtcaggcgcggggtgggcagctctccccgggcggtggggcccttgtgaccgcgaggcggggcgcaccaggaagggagtgggacagcgcgggcgcccagggatgtggcctggttacctgccttctctgatacgtcaagacaccttcaacaatggcttgcagctgtaccctgttggctgcacccaggacgcccttttcactgctaagcagtcctacctgaggcccaggggctgccagattgacccataaataatctccggcgcctcagatccagaagctgctgagcctgatcttagtgccttctcctttctctgtgtggccccccagcccctttccccactgccttgtgtccaaggccctttccttcatgtatccatggaggagagacaaaaatacacatcaataaaataagatagggaatccataaatagacattcagaagtatggccaacggatttatcttaaaaccaatggaggaagaagagtttcaataaatgttgtggacttccatttgtcaaagaccaaaacaaaggaaccccaaccttacatgtaatacaaacttaactcaaaatggatcatatatctaaatgtaaaatggaaagctataaaactgaaaacagactatctttacaacctaggcgtaggtatagtttttagacattacaccaaaagcacatgccgtaaaagaaaaaatagataaattggtggatttcattaaaattaaaaaactttttctctctgaaaaatcctgttaagctgggattacaggcgtgagccaccgcgcccggcccatagtgtatatgcatatcttgagcctgtgtttaccttggttaaaaaattatttttcatttatttttccctatttggtaggcattaaatgatatttgttcacattaattccaaagtaatttctttaaagaggagatggaatttcgctcttgtggcccaggctatagtgcaatgtcgcgatctctgctcacggcaaacctccgcctcccagatacaagcaataggcctctagcctcctgaatagctgggattcacaggcatgggtggaacatagcctgtagaccagctacatgggagagctgagacaggagaatgacttcgaaaccggcaggcggaggtgccagcgagccgagttcacgccaacatgcataacagtcagagcgaagagcacagaatcgtctcacaaaaaaagaaaaacaaaaacaactcacgccggagcgcatacacagggcccataaacaaaaaccaggacacgccacaagaaagcaatagaaatgcaagcggaaaaacacagacagccacacaacacgaatacgaacatgaacacccaaagaacagaacgagcaaaaaaggaagaataagacgcgccagacaacaacaaccgatccgagccaaagcaaacgcgagacactcaagaagagagacgagaagagagaaaaaatacgagagaaacacacgaaagacaagatagccaacaaga

SEQ ID NO: 354231 - DNA, 824 bp, Homo sapiens
  misc_feature (664)..(664): n is a, c, g, or t
ccttggctgggcggggcttgctcgcggtggcttgtggctccttcctgcggtgcttctctctttcgctcaggcccgtggcgccgacaggatgggcaagtgtcgtggacttcgtactgctaggaagctccgtagtcaccgacgagaccagaagtggcatgataaacagtataagaaagctcatttgggcacagccctaaaggccaacccttttggaggtgcttctcatgcaaaaggaatcgtgctggaaaaagtaggagttgaagccaaacagccaaattctgccattaggaagtgtgtaagggtccagctgatcaagaatggcaagaaaatcacagcctttgtacccaatgacggttgcttgaactttattgaggaaaatgatgaagttctggttgctggatttggtcgcaaaggtcatgctgttggtgatattcctggagtccgctttaaggttgtcaaagtagccaatgtttctcttttggccctatacaaaggcaagaaggaaagaccaagatcataaatattaatggtgaaaacactgtagtaataaattttcatatgccaaaaaaaaaaaaaaaaaaaaaaaaaaaaaaaaaaaaaaaaaatttttggggggcttgggcctgagaaaaaagttttcaaaacctatgggtggggggggggnccaagtagagaacgagacaaacagtgcaaaaaaacgaacccaagagaaaaccgaggtcgagagacagacgcagagaatatacaaccaataaaaaaagagccggggagaccacgaggtttaggacaatccaaagagaatagagagccaagagggacaagca

SEQ ID NO: 354232 - DNA, 1077 bp, Homo sapiens
ccttggctgggcggggcttgctcgcggtggcttgtggctccttcctgcggtgcttctctctttcgctcaggcccgtggcgccgacaggatgggcaagtgtcgtggacttcgtactgctaggaagctccgtagtcaccgacgagaccagaagtggcatgataaacagtataagaaagctcatttgggcacagccctaaaggccaacccttttggaggtgcttctcatgcaaaaggaatcgtgctggaaaaagtaggagttgaagccaaacagccaaattctgccattaggaagtgtgtaagggtccagctgatcaagaatggcaagaaaatcacagcctttgtacccaatgacggttgcttgaactttattgaggaaaatgatgaagttctggttgctggatttggtcgcaaaggtcatgctgttggtgatattcctggagtccgctttaaggttgtcaaagtagccaatgtttctcttttggccctatacaaaggcaagaaggaaagaccaagatcataaatattaatggtgaaaacactgtagtaataaattttcatatgccaaaaaaaaaaaaaaaaaaaaaaaaaaaaaaaaaaaaaaaaaacttgggggttttttttgggggggggaaaaagagggtttgaagtgggcatgggtcatggtggtttccggacccgtttttttgtcaagggggaaaaattgggagggccccaataagggaggcggggtataaattgcgaacaaaccgccgggttaaccctggtagtagttgttcgggcagcgagaaattcaggaaacaagaagacggaaccgaagacggaggacagaacgagacggcgaagcaaagcaaggacacacgacacccacgaccgaaagaaaacagcaacgcagaacagcaagaaaagacgcggaacaggggacacacagaacagaaagagaacacatggggcaacaaaaagaagacaacacaagccgaacgacagcacgacacaggccaacaagaacagacgcaacaaaaggcaagacgaagcaagacgagaagagcaaaacaagaacacaactaagagcgaaacagg

SEQ ID NO: 354233 - DNA, 1776 bp, Homo sapiens
  misc_feature (1775)..(1775): n is a, c, g, or t
ccttggctgggcggggcttgctcgcggtggcttgtggctccttcctgcggtgcttctctctttcgctcaggcccgtggcgccgacaggatgggcaagtgtcgtggacttcgtactgctaggaagctccgtagtcaccgacgagaccagaagtggcatgataaacagtataagaaagctcatttgggcacagccctaaaggccaacccttttggaggtgcttctcatgcaaaaggaatcgtgctggaaaaagtaggagttgaagccaaacagccaaattctgccattaggaagtgtgtaagggtccagctgatcaagaatggcaagaaaatcacagcctttgtacccaatgacggttgcttgaactttattgaggaaaatgatgaagttctggttgctggatttggtcgcaaaggtcatgctgttggtgatattcctggagtccgctttaaggttgtcaaagtagccaatgtttctcttttggccctatacaaaggcaagaaggaaagaccaagatcataaatattaatggtgaaaacactgtagtaataaattttcatatgccaaaaaatgtttgtatcttactgtcccctgttctcaccatgaagatcatgttcattaccaccaccacccccccttattttttttatcctaaaccagcaaacgcaggacctgtaccaattttaggagacaataagacagggttgtttcaggattctctagagttaataacatttgtaacctggcacagtttccctcatcctgtggaataagaaaatgagatagatctggaataaatgtgcagtattgtagtattactttaagaactttaagggaacttcaaaaactcactgaaattctagtgagatactttcttttttattcttggtattttccatatcgggtgcaacacttcagttaccaaatttcattgcacatagattatcttaggtacccttggaaatgcacattcttgtatccatcttacaggggcccaagatgataaatagtaaactcaaaattgctccccactctgtttattatttaaaggtgtcaggatctgtgttgtaatgtgtctacattaatgtgtttaggagaatacaggcattggatcatttagttgatggaagtatatgccaggcaagggagataaggtatacgacaagactgatgttttcagtacttctcatgaggttgtcagagaccttcatgtcttcaaagactagtcagcaaatgaagtggtttagtgtagagacaagattggttgtgttttgataatttaagctaggtattgagtacatgtggattttgctgtccacaaatacttgtttcagagttttcatggatacagtggcatggttgaaatgaagctgtgagccttctgctttaaatctgatgtaagaaactcctgttaattagccttttgatcaaaagctagatttacatgttaggatcttgggaaaaaatggttggtgccactttcgtagggacaagagcagaaccttaaatggacagaagaaccaggtgggcttctactgctattcagcttagctgcattctctcttggcattgtgtcaagacactgatcagtgggctctcaactggtacattcagctcggctgccgtacaggtctgatggcacggctacaaagacggaaaagggacagatattataaagaatatctcagggagcgtcgggccatgaaagttacattgagacagaaagagagaacaggaaaagacagaagagcacatcggaggatctcctctcttttcng

SEQ ID NO: 354234 - DNA, 880 bp, Homo sapiens
ccttggctgggcggggcttgctcgcggtggcttgtggctccttcctgcggtgcttctctctttcgctcaggcccgtggcgccgacaggatgggcaagtgtcgtggacttcgtactgctaggaagctccgtagtcaccgacgagaccagaagtggcatgataaacagtataagaaagctcatttgggcacagccctaaaggccaacccttttggaggtgcttctcatgcaaaaggaatcgtgctggaaaaagtaggagttgaagccaaacagccaaattctgccattaggaagtgtgtaagggtccagctgatcaagaatggcaagaaaatcacagcctttgtacccaatgacggttgcttgaactttattgaggaaaatgatgaagttctggttgctggatttggtcgcaaaggtcatgctgttggtgatattcctggagtccgctttaaggttgtcaaagtagccaatgtttctcttttggccctatacaaaggcaagaaggaaagaccaagatcataaatattaatggtgaaaacactgtagtaataaattttcatatgccaaaaaaaaaaaaaaaaacacaaaaaaaaaaaaaaaaaaaaaagggggggggggtaaaaatttccccgggggggccacaattagggtaaccccgtttttttgttaaaaggggggctacattgaggggggcatattataataaaaggacgagggcgggctaaaacaagggggcggggaaaacggtagtggggaatttgggggagaacccttctggggggggcgccaatgggcaacatccgagaaataagacggggaaaataaacttaagctgttatgggtaacaggttagtggggaaaatggtgcgcttcttggacata

SEQ ID NO: 354235 - DNA, 862 bp, Homo sapiens
ccttggctgggcggggcttgctcgcggtggcttgtggctccttcctgcggtgcttctctctttcgctcaggcccgtggcgccgacaggatgggcaagtgtcgtggacttcgtactgctaggaagctccgtagtcaccgacgagaccagaagtggcatgataaacagtataagaaagctcatttgggcacagccctaaaggccaacccttttggaggtgcttctcatgcaaaaggaatcgtgctggaaaaagtaggagttgaagccaaacagccaaattctgccattaggaagtgtgtaagggtccagctgatcaagaatggcaagaaaatcacagcctttgtacccaatgacggttgcttgaactttattgaggaaaatgatgaagttctggttgctggatttggtcgcaaaggtcatgctgttggtgatattcctggagtccgctttaaggttgtcaaagtagccaatgtttctcttttggccctatacaaaggcaagaaggaaagaccaagatcataaatattaatggtgaaaacactgtagtaataaattttcatatgccaaaaaaggtaccaattggcccggagccgtttacacatacctggccgggcgtttaacgcgctcgggacggggaaacccggggtacccagttaatgcctgtagagatcccctttgccaggggtaaatcaagacccgcgattgcttcaagagtcacgcatgtacgtgcaatccgaattaggaacgccatagtagcacatttacacaggacgagaccctacaaagcccggcgtgccgccaccatgatcacggacatagggtaacaatggtgaagtggattgattattctctgtgacagcgatg

SEQ ID NO: 354236 - DNA, 3263 bp, Homo sapiens
ccttggctgggcggggcttgctcgcggtggcttgtggctccttcctgcggtgcttctctctttcgctcaggcccgtggcgccgacaggatgggcaagtgtcgtggacttcgtactgctaggaagctccgtagtcaccgacgagaccagaagtggcatgataaacagtataagaaagctcatttgggcacagccctaaaggccaacccttttggaggtgcttctcatgcaaaaggaatcgtgctggaaaaagtaggagttgaagccaaacagccaaattctgccattaggaagtgtgtaagggtccagctgatcaagaatggcaagaaaatcacagcctttgtacccaatgacggttgcttgaactttattgcatgctgttggtgatattcctggagtccgctttaaggttgtcaaagtagccaatgtttctcttttggccctatacaaaggcaagaaggaaagaccaagatcataaatattaatggtgaaaacactgtagtaataaattttcatatgccaaaaaatgtttgtatcttactgtcccctgttctcaccatgaagatcatgttcattaccaccaccacccccccttattttttttatcctaaaccagcaaacgcaggacctgtaccaattttaggagacaataagacagggttgtttcaggattctctagagttaataacatttgtaacctggcacagtttccctcatcctgtggaataagaaaatgagatagatctggaataaatgtgcagtattgtagtattactttaagaactttaagggaacttcaaaaactcactgaaattctagtgagatactttcttttttattcttggtattttccatatcgggtgcaacacttcagttaccaaatttcattgcacatagattatcttaggtacccttggaaatgcacattcttgtatccatcttacaggggcccaagatgataaatagtaaactcaaaattgctccccactctgtttattatttaaaggtgtcaggatctgtgttgtaatgtgtctacattaatgtgtttaggagaatacaggcattggatcatttagttgatggaagtatatgccaggcaagggagataaggtatacgacaagactgatgttttcagtacttctcatgaggttgtcagagaccttcatgtcttcaaagactagtcagcaaatgaagtggtttagtgtagagacaagattggttgtgttttgataatttaagctaggtattgagtacatgtggattttgctgtccacaaatacttgtttcagagttttcatggatacagtggcatggttgaaatgaagctgtgagccttctgctttaaatctgatgtaagaaactcctgttaacaaatagtaagtatgggttaattagccctttgatcaaagcctagctttacattgtttaggatctttggaaaacaattggtttggttgcccactttccgtagatcaagagcagaacctttcacatggcacagaagaacccaggttgcgcttcatacctgcatattccagccttagcctgccatttctctccttggcactttgtgctccagcaacactggtctcagttggtcatcctcaaacttgggttccatatccagcctcaggacctctgttcctgttactatggttccttgcatgtcgcctgctcttactaaagagctcgtgtgttttccagcacacttcggtttatctcttgatgatgatgctagtctctccctccgcaagggcggaaaggctgcctgttggtttgtaccagtgtttcctaacgtgtagctgcagtcagtatttggctaagctgttcccaggggctcaacagatgctttcggatgagccttaactgacccaatcctttgtgatgcgggagagattgctaggcctcgctcacctggccagaaccagggaaagaggccgcggttgcagcgcgattccaggccctgggcgtcaggcgcggggtgggcagctctccccgggcggtggggcccttgtgaccgcgaggcggggcgcaccaggaagggagtgggacagcgcgggcgcccagggatgtggcctggttacctgccttctctgatacgtcaagacaccttcaacaatggcttgcagctgtaccctgttggctgcacccaggacgcccttttcactgctaagcagtcctacctgaggcccaggggctgccagattgacccataaataatctccggcgcctcagatccagaagctgctgagcctgatcttagtgccttctcctttctctgtgtggccccccagcccctttccccactgccttgtgtccaaggccctttccttcatgtatccatggaggagagacaaaaatacacatcaataaaataagatagggaatccataaatagacattcagaagtatggccaacggatttatcttaaaaccaatggaggaagaagagtttcaataaatgttgtggacttccatttgtcaaagaccaaaacaaaggaaccccaaccttacatgtaatacaaacttaactcaaaatggatcatatatctaaatgtaaaatggaaagctataaaactgaaaacagactatctttacaacctaggcgtaggtatagtttttagacattacaccaaaagcacatgccgtaaaagaaaaaatagataaattggtggatttcattaaaattaaaaaactttttctctctgaaaaatcctgttaagctgggcgctgtggttcatgcctgtaatcccagcactttgggaggctgagttgggaagaaattaatagcttgaggccaggagttcaagatcatcctgggcagcaaagtcatacactcttgagggaagagagagaccttctcatattgttttatattgttttatactcagtacctgttttaagaaaaaaacaaggaagtgaaatcaaagacaggcagcccggcaccaggcctgaaaccagccctgggcctgcctggcctaaacctagtagttaaaaatcaacttacgacttagaacctgatgttatccgtagattccaagcattgtataaaaaaattgtgaaactccctgttgtgttctgtaccagtgcatgaaacccctgtcacatatcccctagattgctcaatcaatcacgaccctttcatgtgaaatctttagtgttgtgagcccttaaaagggacagaaattgtgcacttgaggagctcagattttaaggctgtagcttgccgatgctcccagctgaataaagcccttccttctacaa

SEQ ID NO: 354237 - DNA, 3357 bp, Homo sapiens
ttctgagagcgattcttgttggcgcggggtcgcaggtacgtatacctgaacatgggtcattatcttgtcgtctctacgcacgcatgcgtggcccgatgacgtatgtgctaggagtcctcgaccattagactgcgtcaccgaaggtcacagcaatcagtcgctcgaagcaacatccagagtggatgtatctagaagagtcataaagcaaggactctattcagggagagagtccatagacgagctcgactattcaagagttgagctgcctctcgtcattgaaaaggaatcgtgctggaaaaagtaggagttgaagccaaacagccaaattctgccattaggaagtgtgtaagggtccagctgatcaagaatggcaagaaaatcacagcctttgtacccaatgacggttgcttgaactttattgaggaaaatgatgaagttctggttgctggatttggtcgcaaaggtcatgctgttggtgatattcctggagtccgctttaaggttgtcaaagtagccaatgtttctcttttggccctatacaaaggcaagaaggaaagaccaagatcataaatattaatggtgaaaacactgtagtaataaattttcatatgccaaaaaatgtttgtatcttactgtcccctgttctcaccatgaagatcatgttcattaccaccaccacccccccttattttttttatcctaaaccagcaaacgcaggacctgtaccaattttaggagacaataagacagggttgtttcaggattctctagagttaataacatttgtaacctggcacagtttccctcatcctgtggaataagaaaatgagatagatctggaataaatgtgcagtattgtagtattactttaagaactttaagggaacttcaaaaactcactgaaattctagtgagatactttcttttttattcttggtattttccatatcgggtgcaacacttcagttaccaaatttcattgcacatagattatcttaggtacccttggaaatgcacattcttgtatccatcttacaggggcccaagatgataaatagtaaactcaaaattgctccccactctgtttattatttaaaggtgtcaggatctgtgttgtaatgtgtctacattaatgtgtttaggagaatacaggcattggatcatttagttgatggaagtatatgccaggcaagggagataaggtatacgacaagactgatgttttcagtacttctcatgaggttgtcagagaccttcatgtcttcaaagactagtcagcaaatgaagtggtttagtgtagagacaagattggttgtgttttgataatttaagctaggtattgagtacatgtggattttgctgtccacaaatacttgtttcagagttttcatggatacagtggcatggttgaaatgaagctgtgagccttctgctttaaatctgatgtaagaaactcctgttaacaaatagtaagtatgggttaattagccctttgatcaaagcctagctttacattgtttaggatctttggaaaacaattggtttggttgcccactttccgtagatcaagagcagaacctttcacatggcacagaagaacccaggttgcgcttcatacctgcatattccagccttagcctgccatttctctccttggcactttgtgctccagcaacactggtctcagttggtcatcctcaaacttgggttccatatccagcctcaggacctctgttcctgttactatggttccttgcatgtcgcctgctcttactaaagagctcgtgtgttttccagcacacttcggtttatctcttgatgatgatgctagtctctccctccgcaagggcggaaaggctgcctgttggtttgtaccagtgtttcctaacgtgtagctgcagtcagtatttggctaagctgttcccaggggctcaacagatgctttcggatgagccttaactgacccaatcctttgtgatgcgggagagattgctaggcctcgctcacctggccagaaccagggaaagaggccgcggttgcagcgcgattccaggccctgggcgtcaggcgcggggtgggcagctctccccgggcggtggggcccttgtgaccgcgaggcggggcgcaccaggaagggagtgggacagcgcgggcgcccagggatgtggcctggttacctgccttctctgatacgtcaagacaccttcaacaatggcttgcagctgtaccctgttggctgcacccaggacgcccttttcactgctaagcagtcctacctgaggcccaggggctgccagattgacccataaataatctccggcgcctcagatccagaagctgctgagcctgatcttagtgccttctcctttctctgtgtggccccccagcccctttccccactgccttgtgtccaaggccctttccttcatgtatccatggaggagagacaaaaatacacatcaataaaataagatagggaatccataaatagacattcagaagtatggccaacggatttatcttaaaaccaatggaggaagaagagtttcaataaatgttgtggacttccatttgtcaaagaccaaaacaaaggaaccccaaccttacatgtaatacaaacttaactcaaaatggatcatatatctaaatgtaaaatggaaagctataaaactgaaaacagactatctttacaacctaggcgtaggtatagtttttagacattacaccaaaagcacatgccgtaaaagaaaaaatagataaattggtggatttcattaaaattaaaaaactttttctctctgaaaaatcctgttaagctgggcgctgtggttcatgcctgtaatcccagcactttgggaggctgagttgggaagaaattaatagcttgaggccaggagttcaagatcatcctgggcagcaaagtcatacactcttgagggaagagagagaccttctcatattgttttatattgttttatactcagtacctgttttaagaaaaaaacaaggaagtgaaatcaaagacaggcagcccggcaccaggcctgaaaccagccctgggcctgcctggcctaaacctagtagttaaaaatcaacttacgacttagaacctgatgttatccgtagattccaagcattgtataaaaaaattgtgaaactccctgttgtgttctgtaccagtgcatgaaacccctgtcacatatcccctagattgctcaatcaatcacgaccctttcatgtgaaatctttagtgttgtgagcccttaaaagggacagaaattgtgcacttgaggagctcagattttaaggctgtagcttgccgatgctcccagctgaataaagcccttccttctacaa

SEQ ID NO: 354238 - DNA, 567 bp, Homo sapiens
  misc_feature (421)..(421): n is a, c, g, or t
  misc_feature (423)..(423): n is a, c, g, or t
  misc_feature (427)..(427): n is a, c, g, or t
  misc_feature (433)..(433): n is a, c, g, or t
  misc_feature (440)..(440): n is a, c, g, or t
  misc_feature (442)..(442): n is a, c, g, or t
  misc_feature (444)..(444): n is a, c, g, or t
  misc_feature (446)..(447): n is a, c, g, or t
  misc_feature (450)..(450): n is a, c, g, or t
  misc_feature (457)..(457): n is a, c, g, or t
  misc_feature (459)..(459): n is a, c, g, or t
  misc_feature (461)..(461): n is a, c, g, or t
  misc_feature (465)..(465): n is a, c, g, or t
  misc_feature (468)..(468): n is a, c, g, or t
  misc_feature (472)..(473): n is a, c, g, or t
  misc_feature (476)..(476): n is a, c, g, or t
  misc_feature (479)..(479): n is a, c, g, or t
  misc_feature (484)..(484): n is a, c, g, or t
  misc_feature (488)..(489): n is a, c, g, or t
ccttggctgggcggggcttgctcgcggtggcttgtggctccttcctgcggtgcttctctctttcgctcaggcccgtggcgccgacaggatgggcaagtgtcgtggacttcgtactgctaggaagctccgtagtcaccgacgagaccagaagtggcatgataaacagtataagaaagctcatttgggcacagccctaaaggccaacccttttggaggtgcttctcatgcaaaaggaatcgtgctggaaaaagtaggagttgaagccaaacagccaaattctgccattaggaagtgtgtaagggtccagctgatcaagaatggcaagaaaatcacagcctttgtacccaatgacggttgcttgaactttattgaggaaaatgatgaagttctggttgctggatttggtcgcaaaggtatgctntngggngatatncctgagncncntnntanggttgtnanantagncantgtnnctnttntggcnctanncaggcaagaaggaaagaccaagatcataaatattaatggtgaaaacactgtagtaataaattttcatatgccaaaaaa

SEQ ID NO: 354239 - DNA, 711 bp, Homo sapiens
ccttggctgggcggggcttgctcgcggtggcttgtggctccttcctgcggtgcttctctctttcgctcaggcccgtggcgccgacaggatgggcaagtgtcgtggacttcgtactgctaggaagctccgtagtcaccgacgagaccagaagtggcatgataaacagtataagaaagctcatttgggcacagccctaaaggccaacccttttggaggtgcttctcatgcaaaaggaatcgtgctggaaaaagtaggagttgaagccaaacagccaaattctgccattaggaagtgtgtaagggtccagctgatcaagaatggcaagaaaatcacagcctttgtacccaatgacggttgcttgaactttattgaggtgagtatttcaactctatcgtaccttctgttgttggggtggcctccctcacatttttatctgatgcaagggagtttcctcacatgaaagtatttttgtgatcgccaccaacaccagaaataaacttcttattttattccaggaaaatgatgaagttctggttgctggatttggtcgcaaaggtcatgctgttggtgatattcctggagtccgctttaaggttgtcaaagtagccaatgtttctcttttggccctatacaaaggcaagaaggaaagaccaagatcataaatattaatggtgaaaacactgtagtaataaattttcatatgccaaaaaa

SEQ ID NO: 354240 - DNA, 879 bp, Homo sapiens
gaaggtgatggtttcttgatttattaacaaataattttatatgtttttataatttattataaaatttattttatgactaatctatagatgtttatagtattaatactagggatttttttctacattaagaaaagaaataaccaattattcaattatttccagtggtctttttgtgttctgtgtttccaggcgggcacatgaacgccccccaccccatccacataggatgcacccaaactatggtcatgggcatcatattcatgtgcctcagactatgtcctcacatcctcgacaggctccagagaggtctgcctgggaactgggaattgaagctggagtgactgcagctacttatacacctggtgcattgcatcctcacttggcccattatcacgcacctcctcgacttcatcacttacaattaggagctcttcctttaatggttcctgatatggcaggctatcctcacatccgttacatttcatcaggattggatggaacatcattcagaggtcctttcaggggcaattttgaggtatgtaataaaataaatgaatatgtttgtcacagtatctttaatgcagattgagtatatatatactactatacacaattgtgtaggactgctacagtggctgggaatcacatgtgattttctgatgttgcttctgggagttacagaaatatttgtaagtattattaatcttagggtcaaaagttaccgaaatatttaaagatgagtaaatgaaaatatctaatatagaagaatataaaaatgtattaaatcaatataaatgtcagatatataactataccattaaatgtggtggggaacggaatgtttttgactcagctaaatttttagagaaatcggtagag

SEQ ID NO: 354241 - DNA, 2136 bp, Homo sapiens
acataactccccatgtctgttgataaaaaagagaccctaaggaggattaaactgttctcatcctttcgttagggaactgggaattgaagctggagtgactgcagctacttatacacctggtgcattgcatcctcacttggcccattatcacgcacctcctcgacttcatcacttacaattaggagctcttcctttaatggttcctgatatggcaggctatcctcacatccgttacatttcatcaggattggatggaacatcattcagaggtcctttcaggggcaattttgaggaactgattcatttggaagaaagattaggcaatgtcaatcgtggagcatcccaggggacaattgaaagatgtacatatccacataaatacaaaaagaggaaactgcactgcaaacaagatggggaagaagggactgaggaagacacagaggaaaaatgtactatctgtttgtctattttagaggaaggtgaagatgtgagacgtcttccatgtatgcaccttttccaccaagtgtgtgttgaccaatggttgattaccaataagaagtgccccatatgcagagtggacattgaggcccagctgccaagtgaaagttgacaccatgtttcagaactcttgccctccctctcattcccatccttcctggtactgcagtcaaccaaagatggcatgacttacctgcgcagatttggaagcattgaacttagagtgctggctctgctatatggtacaactaatgctagacctacagtttatgtatacagttgattttgatgtatttataaaagcttttttttctagatttgacatttttctgtatcattttactgtatttttgcatggttccttgtattgcatttctttgcacatattatgggcttgtgaccctaaacttgcaggcaaggttagctgctttagtaagtagaattttgtggtctttttgttttttacatagtaccaagccttgataattatgaattttttatccattactaacctttaatttaatcaatcatgtactttagtttaatgtataaagatcctctagaaaatgataatattgtgtattaagacattccttaattaggacaaaatggctgctgtatatttactatatggagttctgagttaaataccatccttaatactgggaacagaatacaacccatataaatcagatgcaggtggtagtcacatcaccagagtgatcagtataaattttcttggtgtatccttttcctttcaacacagtgcagataagagttgaatattgatatcatacatttagactgctgttctgattgcatttatctttttcctacatcatttagaattttatttccctgattcagtttttgctgctgtgaaacagctctgatgaacactaaatattaatttcaattagctagattgtacatacttgcagatttaacaaaattttagggaaattgaaaaagacatgtagaatttgttgtcttctgctaagcacgaaaagttaagatatctgcttacattgattttgtagacacattaagtcaagatttggaatttaagtcactggcaggtatctgtgcattcatagaacttataaaggtcccaggatcacttttaagggatttttattagtttaaaggtaaataaagtcagctgaatctacatgtctcttgttttatttctctctaaacttgaaaacagtaaatctgcagatactgtgaggcacaaattatactgtcaacctactgttgctatggttatatactcccacttcatacattaccaagagtcgatcactgatttaaaatttttaatttctatagttaagatttactgcataatatagaatataaagttaagttaacatactaacatttctcctttggaggaagttttaatctacttcaggatgcatattattatcaagatactttcatatacaggatagcctaattttatttgtttaaatatgcttaatatgccccagattgcaaatgcatccagtcagtaatatcactgtctgtatgtggaggacatgttcccatggatcatatgtgaagatgtcaataagcttgcattaagccacctgctttgtaagtggattgattaataaataacttatatttcta

SEQ ID NO: 354242 - DNA, 655 bp, Homo sapiens
tccttttctgggagatggtctccttctgttgcccaggctcagggcagcagtctcagctcactgcaacctccacctcctgggctgaagcgatccacctacctcagcctcccaaaatgctgggattacaggcgtaagccactgcactcggctatagcatcttttataaactggttttgtcataaaatttcctctaaactagtaggactattcccttcttgcacctttgttgtttagaaaatgttaatatgttaaccctatattaattttaggcattttctttgtataatcacttaagtaattgttttcttcctgttcttttttttaatgttaacataatgccatatgaaacaggttctatatcatatataacagaaccttgtagtaatattattgccctaatttataaggataactttgtcgtacctcttcagttggctgagaaaaaaattgtctaccatacgacaaataaggttttttgcacactgtatttctaatgaaggtttataaatttggaacttaattgcttttacagtattgacaatactgttcaaggaataattgggatactttttaaggctattattttaacaagatattaggaagtctgaaaagtgtataaaaactcttaacagttgctagaagtagaaatggacac

SEQ ID NO: 354243 - DNA, 2379 bp, Homo sapiens
gaaggtgatggtttcttgatttattaacaaataattttatatgtttttataatttattataaaatttattttatgactaatctatagatgtttatagtattaatactagggatttttttctacattaagaaaagaaataaccaattattcaattatttccagtggtctttttgtgttctgtgtttccaggcgggcacatgaacgccccccaccccatccacataggatgcacccaaactatggtcatgggcatcatattcatgtgcctcagactatgtcctcacatcctcgacaggctccagagaggtctgcctgggaactgggaattgaagctggagtgactgcagctacttatacacctggtgcattgcatcctcacttggcccattatcacgcacctcctcgacttcatcacttacaattaggagctcttcctttaatggttcctgatatggcaggctatcctcacatccgttacatttcatcaggattggatggaacatcattcagaggtcctttcaggggcaattttgaggaactgattcatttggaagaaagattaggcaatgtcaatcgtggagcatcccaggggacaattgaaagatgtacatatccacataaatacaaaaagaggaaactgcactgcaaacaagatggggaagaagggactgaggaagacacagaggaaaaatgtactatctgtttgtctattttagaggaaggtgaagatgtgagacgtcttccatgtatgcaccttttccaccaagtgtgtgttgaccaatggttgattaccaataagaagtgccccatatgcagagtggacattgaggcccagctgccaagtgaaagttgacaccatgtttcagaactcttgccctccctctcattcccatccttcctggtactgcagtcaaccaaagatggcatgacttacctgcgcagatttggaagcattgaacttagagtgctggctctgctatatggtacaactaatgctagacctacagtttatgtatacagttgattttgatgtatttataaaagcttttttttctagatttgacatttttctgtatcattttactgtatttttgcatggttccttgtattgcatttctttgcacatattatgggcttgtgaccctaaacttgcaggcaaggttagctgctttagtaagtagaattttgtggtctttttgttttttacatagtaccaagccttgataattatgaattttttatccattactaacctttaatttaatcaatcatgtactttagtttaatgtataaagatcctctagaaaatgataatattgtgtattaagacattccttaattaggacaaaatggctgctgtatatttactatatggagttctgagttaaataccatccttaatactgggaacagaatacaacccatataaatcagatgcaggtggtagtcacatcaccagagtgatcagtataaattttcttggtgtatccttttcctttcaacacagtgcagataagagttgaatattgatatcatacatttagactgctgttctgattgcatttatctttttcctacatcatttagaattttatttccctgattcagtttttgctgctgtgaaacagctctgatgaacactaaatattaatttcaattagctagattgtacatacttgcagatttaacaaaattttagggaaattgaaaaagacatgtagaatttgttgtcttctgctaagcacgaaaagttaagatatctgcttacattgattttgtagacacattaagtcaagatttggaatttaagtcactggcaggtatctgtgcattcatagaacttataaaggtcccaggatcacttttaagggatttttattagtttaaaggtaaataaagtcagctgaatctacatgtctcttgttttatttctctctaaacttgaaaacagtaaatctgcagatactgtgaggcacaaattatactgtcaacctactgttgctatggttatatactcccacttcatacattaccaagagtcgatcactgatttaaaatttttaatttctatagttaagatttactgcataatatagaatataaagttaagttaacatactaacatttctcctttggaggaagttttaatctacttcaggatgcatattattatcaagatactttcatatacaggatagcctaattttatttgtttaaatatgcttaatatgccccagattgcaaatgcatccagtcagtaatatcactgtctgtatgtggaggacatgttcccatggatcatatgtgaagatgtcaataagcttgcattaagccacctgctttgtaagtggattgattaataaataacttatatttcta

SEQ ID NO: 354244 - DNA, 4153 bp, Homo sapiens
cgcaaaagccagcaggctggcccttcgtatgtgcagaattgtgttaaagaaaaccagggaatattaggactgaggcaacacctagggacaccaagtgatgaagataatgattcctcttttagtgattgtctttcttctccttcatctagtctgcattttggagattctgatactgtgacttcagatgaggataaagaagtctctgtaagacattcccagaccattttgaatgctaaaagtagaagccatagtgcacggtctcataagtggcctcggagctgagacagaatctgtatcgggattgttaatgaaaagaccctgtttacatggcagttcgttacggagacttccatgcagaaagagatttgtaaaaaataattcctcacagaggacacagaaacaaaaagagaggatattaatgcagaggaagaaacgagaagtgttagctcgaagaaaatatgccttgctacctagttctagtagttccagtgagaatgacctcagcagtgaatcctcttctagctcatcaactgaaggagaagaagatttgtttgtttctgccagtgaaaaccaccaaaacaatccagctgttccctcaggaagtattgatgaagatgttgtggtgatagaagcttcctccactccccaggttactgccaatgaagaaattaatgttacctcaactgacagtgaagtggagattgtaacagttggagaaagctatcggtctcgttcaacccttggacactccagatctcattggagccagggttccagttctcatgcaagtcggccacaggagccacggaaccgcagtaggatttctactgttatacagcccttgaggcagaatgcagcagaagttgtggaccttaccgttgatgaagatgaacctactgtagtaccaaccacttctgcaagaatggaatcacaagctactagcgcttccattaacaattcaaatccatctacctctgagcaggcctctgatactgcttcagctgtcaccagtagccaaccttccacagtgtcagagacttcagctactcttacaagcaatagtaccactggcacttctataggagatgactcaaggagaactacatctagtgctgtaacggaaactggccctcctgcaatgccaaggttaccttcctgctgtccccagcactcaccatgtggagggtcgtcacagaaccaccatgcattaggacatcctcatacaagttgctttcagcagcatggtcaccattttcaacatcatcaccaccaccaccatactccccacccagctgtcccagtttctccttcctttagtgatcctgcttgccctgtggaaagacctccacaagtacaagcaccttgtggagcaaatagtagttctggtaccagctatcatgaacagcaggcattgccagtggacctgagcaacagtggtatcagaagtcatggaagtggcagttttcatggagcatctgcatttgacccctgctgccctgtttcttcctcccgagctgcaatctttggccatcaggccgctgctgctgccccaagtcaacctttatcatcaatagatggctatggatcaagcatggttgcgcagccccagccccagccccctccacagccctctctctcatcatgtcgacattacatgccacccccttatgcctctttgacaaggccacttcatcatcaagcttctgcctgcccgcattctcatggaaacccccctcctcagactcagcctccgcctcaagtggattatgttattcctcatcctgtacatgctttccattctcaaatatcttctcatgcaacatctcatcctgtggcacccccaccaccaactcacttagccagtacagctgcaccaatccctcagcatcttcctcctacacaccagccaatttcgcaccatattccagccacagcacctccagcacagagactgcatcctcatgaagtgatgcagaggatggaagttcaaaggaggaggatgatgcagcatccaacgcgggcacatgaacgccccccaccccatccacataggatgcacccaaactatggtcatgggcatcatattcatgtgcctcagactatgtcctcacatcctcgacaggctccagagaggtctgcctgggaactgggaattgaagctggagtgactgcagctacttatacacctggtgcattgcatcctcacttggcccattatcacgcacctcctcgacttcatcacttacaattaggagctcttcctttaatggttcctgatatggcaggctatcctcacatccgttacatttcatcaggattggatggaacatcattcagaggtcctttcaggggcaattttgaggaactgattcatttggaagaaagattaggcaatgtcaatcgtggagcatcccaggggacaattgaaagatgtacatatccacataaatacaaaaagaggaaactgcactgcaaacaagatggggaagaagggactgaggaagacacagaggaaaaatgtactatctgtttgtctattttagaggaaggtgaagatgtgagacgtcttccatgtatgcaccttttccaccaagtgtgtgttgaccaatggttgattaccaataagaagtgccccatatgcagagtggacattgaggcccagctgccaagtgaaagttgacaccatgtttcagaactcttgccctccctctcattcccatccttcctggtactgcagtcaaccaaagatggcatgacttacctgcgcagatttggaagcattgaacttagagtgctggctctgctatatggtacaactaatgctagacctacagtttatgtatacagttgattttgattgtatttttgcatggttccttgtattgcatttctttgcacatattatgggcttgtgaccctaaacttgcaggcaaggttagctgctttagtaagtagaattttgtggtctttttgttttttacatagtaccaagccttgataattatgaattttttatccattactaacctttaatttaatcaatcatgtactttagtttaatgtataaagatcctctagaaaatgataatattgtgtattaagacattccttaattaggacaaaatggctgctgtatatttactatatggagttctgagttaaataccatccttaatactgggaacagaatacaacccatataaatcagatgcaggtggtagtcacatcaccagagtgatcagtataaattttcttggtgtatccttttcctttcaacacagtgcagataagagttgaatattgatatcatacatttagactgctgttctgattgcatttatctttttcctacatcatttagaattttatttccctgattcagtttttgctgctgtgaaacagctctgatgaacactaaatattaatttcaattagctagattgtacatacttgcagatttaacaaaattttagggaaattgaaaaagacatgtagaatttgttgtcttctgctaagcacgaaaagttaagatatctgcttacattgattttgtagacacattaagtcaagatttggaatttaagtcactggcaggtatctgtgcattcatagaacttataaaggtcccaggatcacttttaagggatttttattagtttaaaggtaaataaagtcagctgaatctacatgtctcttgttttatttctctctaaacttgaaaacagtaaatctgcagatactgtgaggcacaaattatactgtcaacctactgttgctatggttatatactcccacttcatacattaccaagagtcgatcactgatttaaaatttttaatttctatagttaagatttactgcataatatagaatataaagttaagttaacatactaacatttctcctttggaggaagttttaatctacttcaggatgcatattattatcaagatactttcatatacaggatagcctaattttatttgtttaaatatgcttaatatgccccagattgcaaatgcatccagtcagtaatatcactgtctgtatgtggaggacatgttcccatggatcatatgtgaagatgtcaataagcttgcattaagccacctgctttgtaagtggattgattaataaataacttatatttcta

SEQ ID NO: 354245 - DNA, 4177 bp, Homo sapiens
cgcaaaagccagcaggctggcccttcgtatgtgcagaattgtgttaaagaaaaccagggaatattaggactgaggcaacacctagggacaccaagtgatgaagataatgattcctcttttagtgattgtctttcttctccttcatctagtctgcattttggagattctgatactgtgacttcagatgaggataaagaagtctctgtaagacattcccagaccattttgaatgctaaaagtagaagccatagtgcacggtctcataagtggcctcggagctgagacagaatctgtatcgggattgttaatgaaaagaccctgtttacatggcagttcgttacggagacttccatgcagaaagagatttgtaaaaaataattcctcacagaggacacagaaacaaaaagagaggatattaatgcagaggaagaaacgagaagtgttagctcgaagaaaatatgccttgctacctagttctagtagttccagtgagaatgacctcagcagtgaatcctcttctagctcatcaactgaaggagaagaagatttgtttgtttctgccagtgaaaaccaccaaaacaatccagctgttccctcaggaagtattgatgaagatgttgtggtgatagaagcttcctccactccccaggttactgccaatgaagaaattaatgttacctcaactgacagtgaagtggagattgtaacagttggagaaagctatcggtctcgttcaacccttggacactccagatctcattggagccagggttccagttctcatgcaagtcggccacaggagccacggaaccgcagtaggatttctactgttatacagcccttgaggcagaatgcagcagaagttgtggaccttaccgttgatgaagatgaacctactgtagtaccaaccacttctgcaagaatggaatcacaagctactagcgcttccattaacaattcaaatccatctacctctgagcaggcctctgatactgcttcagctgtcaccagtagccaaccttccacagtgtcagagacttcagctactcttacaagcaatagtaccactggcacttctataggagatgactcaaggagaactacatctagtgctgtaacggaaactggccctcctgcaatgccaaggttaccttcctgctgtccccagcactcaccatgtggagggtcgtcacagaaccaccatgcattaggacatcctcatacaagttgctttcagcagcatggtcaccattttcaacatcatcaccaccaccaccatactccccacccagctgtcccagtttctccttcctttagtgatcctgcttgccctgtggaaagacctccacaagtacaagcaccttgtggagcaaatagtagttctggtaccagctatcatgaacagcaggcattgccagtggacctgagcaacagtggtatcagaagtcatggaagtggcagttttcatggagcatctgcatttgacccctgctgccctgtttcttcctcccgagctgcaatctttggccatcaggccgctgctgctgccccaagtcaacctttatcatcaatagatggctatggatcaagcatggttgcgcagccccagccccagccccctccacagccctctctctcatcatgtcgacattacatgccacccccttatgcctctttgacaaggccacttcatcatcaagcttctgcctgcccgcattctcatggaaacccccctcctcagactcagcctccgcctcaagtggattatgttattcctcatcctgtacatgctttccattctcaaatatcttctcatgcaacatctcatcctgtggcacccccaccaccaactcacttagccagtacagctgcaccaatccctcagcatcttcctcctacacaccagccaatttcgcaccatattccagccacagcacctccagcacagagactgcatcctcatgaagtgatgcagaggatggaagttcaaaggaggaggatgatgcagcatccaacgcgggcacatgaacgccccccaccccatccacataggatgcacccaaactatggtcatgggcatcatattcatgtgcctcagactatgtcctcacatcctcgacaggctccagagaggtctgcctgggaactgggaattgaagctggagtgactgcagctacttatacacctggtgcattgcatcctcacttggcccattatcacgcacctcctcgacttcatcacttacaattaggagctcttcctttaatggttcctgatatggcaggctatcctcacatccgttacatttcatcaggattggatggaacatcattcagaggtcctttcaggggcaattttgaggaactgattcatttggaagaaagattaggcaatgtcaatcgtggagcatcccaggggacaattgaaagatgtacatatccacataaatacaaaaaggtaacaactgattggttctcacagaggaaactgcactgcaaacaagatggggaagaagggactgaggaagacacagaggaaaaatgtactatctgtttgtctattttagaggaaggtgaagatgtgagacgtcttccatgtatgcaccttttccaccaagtgtgtgttgaccaatggttgattaccaataagaagtgccccatatgcagagtggacattgaggcccagctgccaagtgaaagttgacaccatgtttcagaactcttgccctccctctcattcccatccttcctggtactgcagtcaaccaaagatggcatgacttacctgcgcagatttggaagcattgaacttagagtgctggctctgctatatggtacaactaatgctagacctacagtttatgtatacagttgattttgattgtatttttgcatggttccttgtattgcatttctttgcacatattatgggcttgtgaccctaaacttgcaggcaaggttagctgctttagtaagtagaattttgtggtctttttgttttttacatagtaccaagccttgataattatgaattttttatccattactaacctttaatttaatcaatcatgtactttagtttaatgtataaagatcctctagaaaatgataatattgtgtattaagacattccttaattaggacaaaatggctgctgtatatttactatatggagttctgagttaaataccatccttaatactgggaacagaatacaacccatataaatcagatgcaggtggtagtcacatcaccagagtgatcagtataaattttcttggtgtatccttttcctttcaacacagtgcagataagagttgaatattgatatcatacatttagactgctgttctgattgcatttatctttttcctacatcatttagaattttatttccctgattcagtttttgctgctgtgaaacagctctgatgaacactaaatattaatttcaattagctagattgtacatacttgcagatttaacaaaattttagggaaattgaaaaagacatgtagaatttgttgtcttctgctaagcacgaaaagttaagatatctgcttacattgattttgtagacacattaagtcaagatttggaatttaagtcactggcaggtatctgtgcattcatagaacttataaaggtcccaggatcacttttaagggatttttattagtttaaaggtaaataaagtcagctgaatctacatgtctcttgttttatttctctctaaacttgaaaacagtaaatctgcagatactgtgaggcacaaattatactgtcaacctactgttgctatggttatatactcccacttcatacattaccaagagtcgatcactgatttaaaatttttaatttctatagttaagatttactgcataatatagaatataaagttaagttaacatactaacatttctcctttggaggaagttttaatctacttcaggatgcatattattatcaagatactttcatatacaggatagcctaattttatttgtttaaatatgcttaatatgccccagattgcaaatgcatccagtcagtaatatcactgtctgtatgtggaggacatgttcccatggatcatatgtgaagatgtcaataagcttgcattaagccacctgctttgtaagtggattgattaataaataacttatatttcta

SEQ ID NO: 354246 - DNA, 1574 bp, Homo sapiens
ccccgggctgcaggattcggcacgagcaatggttgattaccaataagaagtgccccatatgcagagtggacattgaggcccagctgccaagtgaaagttgacaccatgtttcagaactcttgccctccctctcattcccatccttcctggtactgcagtcaaccaaagatggcatgacttacctgcgcagatttggaagcattgaacttagagtgctggctctgctatatggtacaactaatgctagacctacagtttatgtatacagttgattttgattgtatttttgcatggttccttgtattgcatttctttgcacatattatgggcttgtgaccctaaacttgcaggcaaggttagctgctttagtaagtagaattttgtggtctttttgttttttacatagtaccaagccttgataattatgaattttttatccattactaacctttaatttaatcaatcatgtactttagtttaatgtataaagatcctctagaaaatgataatattgtgtattaagacattccttaattaggacaaaatggctgctgtatatttactatatggagttctgagttaaataccatccttaatactgggaacagaatacaacccatataaatcagatgcaggtggtagtcacatcaccagagtgatcagtataaattttcttggtgtatccttttcctttcaacacagtgcagataagagttgaatattgatatcatacatttagactgctgttctgattgcatttatctttttcctacatcatttagaattttatttccctgattcagtttttgctgctgtgaaacagctctgatgaacactaaatattaatttcaattagctagattgtacatacttgcagatttaacaaaattttagggaaattgaaaaagacatgtagaatttgttgtcttctgctaagcacgaaaagttaagatatctgcttacattgattttgtagacacattaagtcaagatttggaatttaagtcactggcaggtatctgtgcattcatagaacttataaaggtcccaggatcacttttaagggatttttattagtttaaaggtaaataaagtcagctgaatctacatgtctcttgttttatttctctctaaacttgaaaacagtaaatctgcagatactgtgaggcacaaattatactgtcaacctactgttgctatggttatatactcccacttcatacattaccaagagtcgatcactgatttaaaatttttaatttctatagttaagatttactgcataatatagaatataaagttaagttaacatactaacatttctcctttggaggaagttttaatctacttcaggatgcatattattatcaagatactttcatatacaggatagcctaattttatttgtttaaatatgcttaatatgccccagattgcaaatgcatccagtcagtaatatcactgtctgtatgtggaggacatgttcccatggatcatatgtgaagatgtcaataagcttgcattaagccacctgctttgtaagtggattgattaataaataacttatatttcta

SEQ ID NO: 354247 - DNA, 1774 bp, Homo sapiens
tccttttctgggagatggtctccttctgttgcccaggctcagggcagcagtctcagctcactgcaacctccacctcctgggctgaagcgatccacctacctcagcctcccaaaatgctgggattacaggcacgtcttccatgtatgcaccttttccaccaagtgtgtgttgaccaatggttgattaccaataagaagtgccccatatgcagagtggacattgaggcccagctgccaagtgaaagttgacaccatgtttcagaactcttgccctccctctcattcccatccttcctggtactgcagtcaaccaaagatggcatgacttacctgcgcagatttggaagcattgaacttagagtgctggctctgctatatggtacaactaatgctagacctacagtttatgtatacagttgattttgatgtatttataaaagcttttttttctagatttgacatttttctgtatcattttactgtatttttgcatggttccttgtattgcatttctttgcacatattatgggcttgtgaccctaaacttgcaggcaaggttagctgctttagtaagtagaattttgtggtctttttgttttttacatagtaccaagccttgataattatgaattttttatccattactaacctttaatttaatcaatcatgtactttagtttaatgtataaagatcctctagaaaatgataatattgtgtattaagacattccttaattaggacaaaatggctgctgtatatttactatatggagttctgagttaaataccatccttaatactgggaacagaatacaacccatataaatcagatgcaggtggtagtcacatcaccagagtgatcagtataaattttcttggtgtatccttttcctttcaacacagtgcagataagagttgaatattgatatcatacatttagactgctgttctgattgcatttatctttttcctacatcatttagaattttatttccctgattcagtttttgctgctgtgaaacagctctgatgaacactaaatattaatttcaattagctagattgtacatacttgcagatttaacaaaattttagggaaattgaaaaagacatgtagaatttgttgtcttctgctaagcacgaaaagttaagatatctgcttacattgattttgtagacacattaagtcaagatttggaatttaagtcactggcaggtatctgtgcattcatagaacttataaaggtcccaggatcacttttaagggatttttattagtttaaaggtaaataaagtcagctgaatctacatgtctcttgttttatttctctctaaacttgaaaacagtaaatctgcagatactgtgaggcacaaattatactgtcaacctactgttgctatggttatatactcccacttcatacattaccaagagtcgatcactgatttaaaatttttaatttctatagttaagatttactgcataatatagaatataaagttaagttaacatactaacatttctcctttggaggaagttttaatctacttcaggatgcatattattatcaagatactttcatatacaggatagcctaattttatttgtttaaatatgcttaatatgccccagattgcaaatgcatccagtcagtaatatcactgtctgtatgtggaggacatgttcccatggatcatatgtgaagatgtcaataagcttgcattaagccacctgctttgtaagtggattgattaataaataacttatatttcta

SEQ ID NO: 354248 - DNA, 5200 bp, Homo sapiens
cgcaaaagccagcaggctggcccttcgtatgtgcagaattgtgttaaagaaaaccagggaatattaggactgaggcaacacctagggacaccaagtgatgaagataatgattcctcttttagtgattgtctttcttctccttcatctagtctgcattttggagattctgatactgtgacttcagatgaggataaagaagtctctgtaagacattcccagaccattttgaatgctaaaagtagaagccatagtgcacggtctcataagtggcctcggagctgagacagaatctgtatcgggattgttaatgaaaagaccctgtttacatggcagttcgttacggagacttccatgcagaaagagatttgtaaaaaataattcctcacagaggacacagaaacaaaaagagaggatattaatgcagaggaagaaacgagaagtgttagctcgaagaaaatatgccttgctacctagttctagtagttccagtgagaatgacctcagcagtgaatcctcttctagctcatcaactgaaggagaagaagatttgtttgtttctgccagtgaaaaccaccaaaacaatccagctgttccctcaggaagtattgatgaagatgttgtggtgatagaagcttcctccactccccaggttactgccaatgaagaaattaatgttacctcaactgacagtgaagtggagattgtaacagttggagaaagctatcggtctcgttcaacccttggacactccagatctcattggagccagggttccagttctcatgcaagtcggccacaggagccacggaaccgcagtaggatttctactgttatacagcccttgaggcagaatgcagcagaagttgtggaccttaccgttgatgaagatgaacctactgtagtaccaaccacttctgcaagaatggaatcacaagctactagcgcttccattaacaattcaaatccatctacctctgagcaggcctctgatactgcttcagctgtcaccagtagccaaccttccacagtgtcagagacttcagctactcttacaagcaatagtaccactggcacttctataggagatgactcaaggagaactacatctagtgctgtaacggaaactggccctcctgcaatgccaaggttaccttcctgctgtccccagcactcaccatgtggagggtcgtcacagaaccaccatgcattaggacatcctcatacaagttgctttcagcagcatggtcaccattttcaacatcatcaccaccaccaccatactccccacccagctgtcccagtttctccttcctttagtgatcctgcttgccctgtggaaagacctccacaagtacaagcaccttgtggagcaaatagtagttctggtaccagctatcatgaacagcaggcattgccagtggacctgagcaacagtggtatcagaagtcatggaagtggcagttttcatggagcatctgcatttgacccctgctgccctgtttcttcctcccgagctgcaatctttggccatcaggccgctgctgctgccccaagtcaacctttatcatcaatagatggctatggatcaagcatggttgcgcagccccagccccagccccctccacagccctctctctcatcatgtcgacattacatgccacccccttatgcctctttgacaaggccacttcatcatcaagcttctgcctgcccgcattctcatggaaacccccctcctcagactcagcctccgcctcaagtggattatgttattcctcatcctgtacatgctttccattctcaaatatcttctcatgcaacatctcatcctgtggcacccccaccaccaactcacttagccagtacagctgcaccaatccctcagcatcttcctcctacacaccagccaatttcgcaccatattccagccacagcacctccagcacagagactgcatcctcatgaagtgatgcagaggatggaagttcaaaggaggaggatgatgcagcatccaacgcgggcacatgaacgccccccaccccatccacataggatgcacccaaactatggtcatgggcatcatattcatgtgcctcagactatgtcctcacatcctcgacaggctccagagaggtctgcctgggaactgggaattgaagctggagtgactgcagctacttatacacctggtgcattgcatcctcacttggcccattatcacgcacctcctcgacttcatcacttacaattaggagctcttcctttaatggttcctgatatggcaggctatcctcacatccgttacatttcatcaggattggatggaacatcattcagaggtcctttcaggggcaattttgaggaactgattcatttggaagaaagattaggcaatgtcaatcgtggagcatcccaggggacaattgaaagatgtacatatccacataaatacaaaaagaggaaactgcactgcaaacaagatggggaagaagggactgaggaagacacagaggaaaaatgtactatctgtttgtctattttagaggaaggtgaagatgtgagacgtcttccatgtatgcaccttttccaccaagtgtgtgttgaccaatggttgattaccaataagaagtgccccatatgcagagtggacattgaggcccagctgccaagtgaaagttgacaccatgtttcagaactcttgccctccctctcattcccatccttcctggtactgcagtcaaccaaagatggcatgacttacctgcgcagatttggaagcattgaacttagagtgctggctctgctatatggtacaactaatgctagacctacagtttatgtatacagttgattttgatgtatttataaaagcttttttttctagatttgacatttttctgtatcattttactgtatttttgcatggttccttgtattgcatttctttgcacatattatgggcttgtgaccctaaacttgcaggcaaggttagctgctttagtaagtagaattttgtggtctttttgttttttacatagtaccaagccttgataattatgaattttttatccattactaacctttaatttaatcaatcatgtactttagtttaatgtataaagatcctctagaaaatgataatattgtgtattaagacattccttaattaggacaaaatggctgctgtatatttactatatggagttctgagttaaataccatccttaatactgggaacagaatacaacccatataaatcagatgcaggtggtagtcacatcaccagagtgatcagtataaattttcttggtgtatccttttcctttcaacacagtgcagataagagttgaatattgatatcatacatttagactgctgttctgattgcatttatctttttcctacatcatttagaattttatttccctgattcagtttttgctgctgtgaaacagctctgatgaacactaaatattaatttcaattagctagattgtacatacttgcagatttaacaaaattttagggaaattgaaaaagacatgtagaatttgttgtcttctgctaagcacgaaaagttaagatatctgcttacattgattttgtagacacattaagtcaagatttggaatttaagtcactggcaggtatctgtgcattcatagaacttataaaggtcccaggatcacttttaagggatttttattagtttaaaggtaaataaagtcagctgaatctacatgtctcttgttttatttctctctaaacttgaaaacagtaaatctgcagatactgtgaggcacaaattatactgtcaacctactgttgctatggttatatactcccacttcatacattaccaagagtcgatcactgatttaaaatttttaatttctatagttaagatttactgcataatatagaatataaagttaagttaacatactaacatttctcctttggaggaagttttaatctacttcaggatgcatattattatcaagatactttcatatacaggatagcctaattttatttgtttaaatatgcttaatatgccccagattgcaaatgcatccagtcagtaatatcactgtctgtatgtggaggacatgttcccatggatcatatgtgaagatgtcaataagcttgcattaagccacctgctttgtaagtggattgattaataaataacttatatttctattgtctttgtgtttcataattagtttttataaaaacagtttacattaaacatcttggaattcaacaatagtgatctcactcaaattgacatttgcataatttgacatttatattcattcagttatgactacttgcccttttcttcatattagtaaatgttacactgtagtagttgtcaatgttaacaggcttcaacatagtatgtgtgcagatggacgatggatttaaagagcataccttatgattaaaccgaggttatagaaggtcaggggagagtgaaggagtcagtgacctatgtctgccatcttactggggaaaagagcaagtagcctgtcttcctttaagtaagtagcctgtaatggatgtactactttgccactggaataccccgggtctgtgccaagggactgaagaagtgtaagatggggagaactgtatgtcatggagtcctcttgacgttcccccagatacaagtaaagcacaggtggatttctctatttttgaatactacatcagatttagatgcacgactacctgttgacttgttttataattgctactgatttttttaatgtaggcaaagctttgttactttgaaatttatttaataaaagtatttgtgacataaacctgaattgttaatataggagcttattaagctactgccattagttatcgaaaaatgtgataagtaatgaagaaagtaaggaagaaaatgactttgaacattttgactttttgtgctttgttttggtgtcttccatatcctgctgcatcttatatgtcaaaatgaacatttcagtggtagctgtccaaatacataaaaactaaaattcttttgttagcaagtccttatttttattgttgttaacatgcaagtgataaactgataatttgaaacatttttcttactctggtgactttcttttagctgctagcacacttcagcatttgaaccataacagttgtgataaactgatcgtttgaaacgttt

SEQ ID NO: 354249 - DNA, 1578 bp, Homo sapiens
ccccgggctgcaggattcggcacgagcaatggttgattaccaataagaagtgccccatatgcagagtggacattgaggcccagctgccaagtgaaagttgacaccatgtttcagaactcttgccctccctctcattcccatccttcctggtactgcagtcaaccaaagatggcatgacttacctgcgcagatttggaagcattgaacttagagtgctggctctgctatatggtacaactaatgctagacctacagtttatgtatacagttgattttgatgtatttataaaagcttttttttctagatttgacatttttctgtatcattttactgtatttttgcatggttccttgtattgcatttctttgcacatattatgggcttgtgaccctaaacttgcaggcaaggttagctgctttagtaagtagaattttgtggtctttttgttttttacatagtaccaagccttgataattatgaattttttatccattactaacctttaatttaatcaatcatgtactttagtttaatgtataaagatcctctagaaaatgataatattgtgtattaagacattccttaattaggacaaaatatactgggaacagaatacaacccatataaatcagatgcaggtggtagtcacatcaccagagtgatcagtataaattttcttggtgtatccttttcctttcaacacagtgcagataagagttgaatattgatatcatacatttagactgctgttctgattgcatttatctttttcctacatcatttagaattttatttccctgattcagtttttgctgctgtgaaacagctctgatgaacactaaatattaatttcaattagctagattgtacatacttgcagatttaacaaaattttagggaaattgaaaaagacatgtagaatttgttgtcttctgctaagcacgaaaagttaagatatctgcttacattgattttgtagacacattaagtcaagatttggaatttaagtcactggcaggtatctgtgcattcatagaacttataaaggtcccaggatcacttttaagggatttttattagtttaaaggtaaataaagtcagctgaatctacatgtctcttgttttatttctctctaaacttgaaaacagtaaatctgcagatactgtgaggcacaaattatactgtcaacctactgttgctatggttatatactcccacttcatacattaccaagagtcgatcactgatttaaaatttttaatttctatagttaagatttactgcataatatagaatataaagttaagttaacatactaacatttctcctttggaggaagttttaatctacttcaggatgcatattattatcaagatactttcatatacaggatagcctaattttatttgtttaaatatgcttaatatgccccagattgcaaatgcatccagtcagtaatatcactgtctgtatgtggaggacatgttcccatggatcatatgtgaagatgtcaataagcttgcattaagccacctgctttgtaagtggattgattaataaataacttatatttcta

SEQ ID NO: 354250 - DNA, 1580 bp, Homo sapiens
ccccgggctgcaggattcggcacgagcaatggttgattaccaataagaagtgccccatatgcagagtggacattgaggcccagctgccaagtgaaagttgacaccatgtttcagaactcttgccctccctctcattcccatccttcctggtactgcagtcaaccaaagatggcatgacttacctgcgcagatttggaagcattgaacttagagtgctggctctgctatatggtacaactaatgctagacctacagtttatgtatacagttgattttgatgtatttataaaagcttttttttctagatttgacatttttctgtatcattttactgtatttttgcatggttccttgtattgcatttctttgcacatattatgggcttgtgaccctaaacttgcaggcaaggttagctgctttagtaagtagaattttgtggtctttttgttttttacatagtaccaagccttgataattatgaattttttatccattactaacctttaatttaatcaatcatgtactttagtttaatgtataaagatcctctagggctgctgtatatttactatatggagttctgagttaaataccatccttaatactgggaacagaatacaacccatataaatcagatgcaggtggtagtcacatcaccagagtgatcagtataaattttcttggtgtatccttttcctttcaacacagtgcagataagagttgaatattgatatcatacatttagactgctgttctgattgcatttatctttttcctacatcatttagaattttatttccctgattcagtttttgctgctgtgaaacagctctgatgaacactaaatattaatttcaattagctagattgtacatacttgcagatttaacaaaattttagggaaattgaaaaagacatgtagaatttgttgtcttctgctaagcacgaaaagttaagatatctgcttacattgattttgtagacacattaagtcaagatttggaatttaagtcactggcaggtatctgtgcattcatagaacttataaaggtcccaggatcacttttaagggatttttattagtttaaaggtaaataaagtcagctgaatctacatgtctcttgttttatttctctctaaacttgaaaacagtaaatctgcagatactgtgaggcacaaattatactgtcaacctactgttgctatggttatatactcccacttcatacattaccaagagtcgatcactgatttaaaatttttaatttctatagttaagatttactgcataatatagaatataaagttaagttaacatactaacatttctcctttggaggaagttttaatctacttcaggatgcatattattatcaagatactttcatatacaggatagcctaattttatttgtttaaatatgcttaatatgccccagattgcaaatgcatccagtcagtaatatcactgtctgtatgtggaggacatgttcccatggatcatatgtgaagatgtcaataagcttgcattaagccacctgctttgtaagtggattgattaataaataacttatatttcta

SEQ ID NO: 354251 - DNA, 1545 bp, Homo sapiens
cgcaaaagccagcaggctggcccttcgtatgtgcagaattgtgttaaagaaaaccagggaatattaggactgaggcaacacctagggacaccaagtgatgaagataatgattcctcttttagtgattgtctttcttctccttcatctagtctgcattttggagattctgatactgtgacttcagatgaggataaagaagtctctgtaagacattcccagaccattttgaatgctaaaagtagaagccatagtgcacggtctcataagtggcctcggagctgagacagaatctgtatcgggattgttaatgaaaagaccctgtttacatggcagttcgttacggagacttccatgcagaaagagatttgtaaaaaataattcctcacagaggacacagaaacaaaaagagaggatattaatgcagaggaagaaacgagaagtgttagctcgaagaaaatatgccttgctacctagttctagtagttccagtgagaatgacctcagcagtgaatcctcttctagctcatcaactgaaggagaagaagatttgtttgtttctgccagtgaaaaccaccaaaacaatccagctgttccctcaggaagtattgatgaagatgttgtggtgatagaagcttcctccactccccaggttactgccaatgaagaaattaatgttacctcaactgacagtgaagtggagattgtaacagttggagaaagctatcggtctcgttcaacccttggacactccagatctcattggagccagggttccagttctcatgcaagtcggccacaggagccacggaaccgcagtaggatttctactgttatacagcccttgaggcagaatgcagcagaagttgtggaccttaccgttgatgaagatgaacctactgtagtaccaaccacttctgcaagaatggaatcacaagctactagcgcttccattaacaattcaaatccatctacctctgagcaggcctctgatactgcttcagctgtcaccagtagccaaccttccacagtgtcagagacttcagctactcttacaagcaatagtaccactggcacttctataggagatgactcaaggagaactacatctagtgctgtaacggaaactggccctcctgcaatgccaaggttaccttcctgctgtccccagcactcaccatgtggagggtcgtcacagaaccaccatgcattaggacatcctcatacaagttgctttcagcagcatggtcaccattttcaacatcatcaccaccacaacttctaaggttaagcttaaccttagaagttgtggctttcacataggatgcttttgaggattaaataaagcatacgtacattttttgttaattttttattgaggtccaatgtacaaatgcaatactaattctgataggttttaacagtctatatacttttataggtaagattgctgtgagtaaccaaccccacgccaggggaaattgagtcacggaaaaattgcttttcaaattcttatttccagccccacttctaggtgtaagggggtcc

SEQ ID NO: 354252 - DNA, 416 bp, Homo sapiens
tctttggagaaatcttgtatgaaaaacttaacatttagtaagaaaggcttatgggtttttgtggtgactaaaaattctttatttatatttactaacttaatattgatgtcatttaaggtctcgttcaacccttggacactccagatctcattggagccagggttccagttctcatgcaagtcggccacaggagccacggaaccgcagtaggatttctactgttatacagcccttgaggcagaatgcagcagaagttgtggaccttaccgttgatgaagatggtaaattgaagtagtaacagtagaaaattatgaaaggagtttgataaaaggaaatctcttaatatgctagaaactcctcctgcttactggtaatatattattaaactacagggaaattgtcagattttttaatct

SEQ ID NO: 354253 - DNA, 640 bp, Homo sapiens
cgcaaaagccagcaggctggcccttcgtatgtgcagaattgtgttaaagaaaaccagggaatattaggactgaggcaacacctagggacaccaagtgatgaagataatgattcctcttttagtgattgtctttcttctccttcatctagtctgcattttggagattctgatactgtgacttcagatgaggataaagaagtctctgtaagacattcccagaccattttgaatgctaaaagtagaagccatagtgcacggtctcataagtggcctcggagctgagacagaatctgtatcgggattgttaatgaaaagaccctgtttacatggcagttcgttacggagacttccatgcagaaagagatttgtaaaaaataattcctcacagaggacacagaaacaaaaagagaggatattaatgcagaggaagaaacgagaagtgttagctcgaagaaaatatgccttgctacctagttctagtagttccagtgagaatgacctcagcagtgaatcctcttctagctcatcaactgaaggagaagaagatttgtttgtttctgccagtgaaaaccaccaaaacaatccagctgttccctcaggtaaaaatgtttaagctgagtaaaacatggaacctattgca

SEQ ID NO: 354254 - DNA, 4206 bp, Homo sapiens
cgcaaaagccagcaggctggcccttcgtatgtgcagaattgtgttaaagaaaaccagggaatattaggactgaggcaacacctagggacaccaagtgatgaagataatgattcctcttttagtgattgtctttcttctccttcatctagtctgcattttggagattctgatactgtgacttcagatgaggataaagaagtctctgtaagacattcccagaccattttgaatgctaaaagtagaagccatagtgcacggtctcataagtggcctcggagctgagacagaatctgtatcgggattgttaatgaaaagaccctgtttacatggcagttcgttacggagacttccatgcagaaagagatttgtaaaaaataattcctcacagaggacacagaaacaaaaagagaggatattaatgcagaggaagaaacgagaagtgttagctcgaagaaaatatgccttgctacctagttctagtagttccagtgagaatgacctcagcagtgaatcctcttctagctcatcaactgaaggagaagaagatttgtttgtttctgccagtgaaaaccaccaaaacaatccagctgttccctcaggaagtattgatgaagatgttgtggtgatagaagcttcctccactccccaggttactgccaatgaagaaattaatgttacctcaactgacagtgaagtggagattgtaacagttggagaaagctatcggtctcgttcaacccttggacactccagatctcattggagccagggttccagttctcatgcaagtcggccacaggagccacggaaccgcagtaggatttctactgttatacagcccttgaggcagaatgcagcagaagttgtggaccttaccgttgatgaagatgaacctactgtagtaccaaccacttctgcaagaatggaatcacaagctactagcgcttccattaacaattcaaatccatctacctctgagcaggcctctgatactgcttcagctgtcaccagtagccaaccttccacagtgtcagagacttcagctactcttacaagcaatagtaccactggcacttctataggagatgactcaaggagaactacatctagtgctgtaacggaaactggccctcctgcaatgccaaggttaccttcctgctgtccccagcactcaccatgtggagggtcgtcacagaaccaccatgcattaggacatcctcatacaagttgctttcagcagcatggtcaccattttcaacatcatcaccaccaccaccatactccccacccagctgtcccagtttctccttcctttagtgatcctgcttgccctgtggaaagacctccacaagtacaagcaccttgtggagcaaatagtagttctggtaccagctatcatgaacagcaggcattgccagtggacctgagcaacagtggtatcagaagtcatggaagtggcagttttcatggagcatctgcatttgacccctgctgccctgtttcttcctcccgagctgcaatctttggccatcaggccgctgctgctgccccaagtcaacctttatcatcaatagatggctatggatcaagcatggttgcgcagccccagccccagccccctccacagccctctctctcatcatgtcgacattacatgccacccccttatgcctctttgacaaggccacttcatcatcaagcttctgcctgcccgcattctcatggaaacccccctcctcagactcagcctccgcctcaagtggattatgttattcctcatcctgtacatgctttccattctcaaatatcttctcatgcaacatctcatcctgtggcacccccaccaccaactcacttagccagtacagctgcaccaatccctcagcatcttcctcctacacaccagccaatttcgcaccatattccagccacagcacctccagcacagagactgcatcctcatgaagtgatgcagaggatggaagttcaaaggaggaggatgatgcagcatccaacgcgggcacatgaacgccccccaccccatccacataggatgcacccaaactatggtcatgggcatcatattcatgtgcctcagactatgtcctcacatcctcgacaggctccagagaggtctgcctgggaactgggaattgaagctggagtgactgcagctacttatacacctggtgcattgcatcctcacttggcccattatcacgcacctcctcgacttcatcacttacaattaggagctcttcctttaatggttcctgatatggcaggctatcctcacatccgttacatttcatcaggattggatggaacatcattcagaggtcctttcaggggcaattttgaggaactgattcatttggaagaaagattaggcaatgtcaatcgtggagcatcccaggggacaattgaaagatgtacatatccacataaatacaaaaagaggaaactgcactgcaaacaagatggggaagaagggactgaggaagacacagaggaaaaatgtactatctgtttgtctattttagaggaaggtgaagatgtgagacgtcttccatgtatgcaccttttccaccaagtgtgtgttgaccaatggttgattaccaataagaagtgccccatatgcagagtggacattgaggcccagctgccaagtgaaagttgacaccatgtttcagaactcttgccctccctctcattcccatccttcctggtactgcagtcaaccaaagatggcatgacttacctgcgcagatttggaagcattgaacttagagtgctggctctgctatatggtacaactaatgctagacctacagtttatgtatacagttgattttgatgtatttataaaagcttttttttctagatttgacatttttctgtatcattttactgtatttttgcatggttccttgtattgcatttctttgcacatattatgggcttgtgaccctaaacttgcaggcaaggttagctgctttagtaagtagaattttgtggtctttttgttttttacatagtaccaagccttgataattatgaattttttatccattactaacctttaatttaatcaatcatgtactttagtttaatgtataaagatcctctagaaaatgataatattgtgtattaagacattccttaattaggacaaaatggctgctgtatatttactatatggagttctgagttaaataccatccttaatactgggaacagaatacaacccatataaatcagatgcaggtggtagtcacatcaccagagtgatcagtataaattttcttggtgtatccttttcctttcaacacagtgcagataagagttgaatattgatatcatacatttagactgctgttctgattgcatttatctttttcctacatcatttagaattttatttccctgattcagtttttgctgctgtgaaacagctctgatgaacactaaatattaatttcaattagctagattgtacatacttgcagatttaacaaaattttagggaaattgaaaaagacatgtagaatttgttgtcttctgctaagcacgaaaagttaagatatctgcttacattgattttgtagacacattaagtcaagatttggaatttaagtcactggcaggtatctgtgcattcatagaacttataaaggtcccaggatcacttttaagggatttttattagtttaaaggtaaataaagtcagctgaatctacatgtctcttgttttatttctctctaaacttgaaaacagtaaatctgcagatactgtgaggcacaaattatactgtcaacctactgttgctatggttatatactcccacttcatacattaccaagagtcgatcactgatttaaaatttttaatttctatagttaagatttactgcataatatagaatataaagttaagttaacatactaacatttctcctttggaggaagttttaatctacttcaggatgcatattattatcaagatactttcatatacaggatagcctaattttatttgtttaaatatgcttaatatgccccagattgcaaatgcatccagtcagtaatatcactgtctgtatgtggaggacatgttcccatggatcatatgtgaagatgtcaataagcttgcattaagccacctgctttgtaagtggattgattaataaataacttatatttcta

SEQ ID NO: 354255 - DNA, 4230 bp, Homo sapiens
cgcaaaagccagcaggctggcccttcgtatgtgcagaattgtgttaaagaaaaccagggaatattaggactgaggcaacacctagggacaccaagtgatgaagataatgattcctcttttagtgattgtctttcttctccttcatctagtctgcattttggagattctgatactgtgacttcagatgaggataaagaagtctctgtaagacattcccagaccattttgaatgctaaaagtagaagccatagtgcacggtctcataagtggcctcggagctgagacagaatctgtatcgggattgttaatgaaaagaccctgtttacatggcagttcgttacggagacttccatgcagaaagagatttgtaaaaaataattcctcacagaggacacagaaacaaaaagagaggatattaatgcagaggaagaaacgagaagtgttagctcgaagaaaatatgccttgctacctagttctagtagttccagtgagaatgacctcagcagtgaatcctcttctagctcatcaactgaaggagaagaagatttgtttgtttctgccagtgaaaaccaccaaaacaatccagctgttccctcaggaagtattgatgaagatgttgtggtgatagaagcttcctccactccccaggttactgccaatgaagaaattaatgttacctcaactgacagtgaagtggagattgtaacagttggagaaagctatcggtctcgttcaacccttggacactccagatctcattggagccagggttccagttctcatgcaagtcggccacaggagccacggaaccgcagtaggatttctactgttatacagcccttgaggcagaatgcagcagaagttgtggaccttaccgttgatgaagatgaacctactgtagtaccaaccacttctgcaagaatggaatcacaagctactagcgcttccattaacaattcaaatccatctacctctgagcaggcctctgatactgcttcagctgtcaccagtagccaaccttccacagtgtcagagacttcagctactcttacaagcaatagtaccactggcacttctataggagatgactcaaggagaactacatctagtgctgtaacggaaactggccctcctgcaatgccaaggttaccttcctgctgtccccagcactcaccatgtggagggtcgtcacagaaccaccatgcattaggacatcctcatacaagttgctttcagcagcatggtcaccattttcaacatcatcaccaccaccaccatactccccacccagctgtcccagtttctccttcctttagtgatcctgcttgccctgtggaaagacctccacaagtacaagcaccttgtggagcaaatagtagttctggtaccagctatcatgaacagcaggcattgccagtggacctgagcaacagtggtatcagaagtcatggaagtggcagttttcatggagcatctgcatttgacccctgctgccctgtttcttcctcccgagctgcaatctttggccatcaggccgctgctgctgccccaagtcaacctttatcatcaatagatggctatggatcaagcatggttgcgcagccccagccccagccccctccacagccctctctctcatcatgtcgacattacatgccacccccttatgcctctttgacaaggccacttcatcatcaagcttctgcctgcccgcattctcatggaaacccccctcctcagactcagcctccgcctcaagtggattatgttattcctcatcctgtacatgctttccattctcaaatatcttctcatgcaacatctcatcctgtggcacccccaccaccaactcacttagccagtacagctgcaccaatccctcagcatcttcctcctacacaccagccaatttcgcaccatattccagccacagcacctccagcacagagactgcatcctcatgaagtgatgcagaggatggaagttcaaaggaggaggatgatgcagcatccaacgcgggcacatgaacgccccccaccccatccacataggatgcacccaaactatggtcatgggcatcatattcatgtgcctcagactatgtcctcacatcctcgacaggctccagagaggtctgcctgggaactgggaattgaagctggagtgactgcagctacttatacacctggtgcattgcatcctcacttggcccattatcacgcacctcctcgacttcatcacttacaattaggagctcttcctttaatggttcctgatatggcaggctatcctcacatccgttacatttcatcaggattggatggaacatcattcagaggtcctttcaggggcaattttgaggaactgattcatttggaagaaagattaggcaatgtcaatcgtggagcatcccaggggacaattgaaagatgtacatatccacataaatacaaaaaggtaacaactgattggttctcacagaggaaactgcactgcaaacaagatggggaagaagggactgaggaagacacagaggaaaaatgtactatctgtttgtctattttagaggaaggtgaagatgtgagacgtcttccatgtatgcaccttttccaccaagtgtgtgttgaccaatggttgattaccaataagaagtgccccatatgcagagtggacattgaggcccagctgccaagtgaaagttgacaccatgtttcagaactcttgccctccctctcattcccatccttcctggtactgcagtcaaccaaagatggcatgacttacctgcgcagatttggaagcattgaacttagagtgctggctctgctatatggtacaactaatgctagacctacagtttatgtatacagttgattttgatgtatttataaaagcttttttttctagatttgacatttttctgtatcattttactgtatttttgcatggttccttgtattgcatttctttgcacatattatgggcttgtgaccctaaacttgcaggcaaggttagctgctttagtaagtagaattttgtggtctttttgttttttacatagtaccaagccttgataattatgaattttttatccattactaacctttaatttaatcaatcatgtactttagtttaatgtataaagatcctctagaaaatgataatattgtgtattaagacattccttaattaggacaaaatggctgctgtatatttactatatggagttctgagttaaataccatccttaatactgggaacagaatacaacccatataaatcagatgcaggtggtagtcacatcaccagagtgatcagtataaattttcttggtgtatccttttcctttcaacacagtgcagataagagttgaatattgatatcatacatttagactgctgttctgattgcatttatctttttcctacatcatttagaattttatttccctgattcagtttttgctgctgtgaaacagctctgatgaacactaaatattaatttcaattagctagattgtacatacttgcagatttaacaaaattttagggaaattgaaaaagacatgtagaatttgttgtcttctgctaagcacgaaaagttaagatatctgcttacattgattttgtagacacattaagtcaagatttggaatttaagtcactggcaggtatctgtgcattcatagaacttataaaggtcccaggatcacttttaagggatttttattagtttaaaggtaaataaagtcagctgaatctacatgtctcttgttttatttctctctaaacttgaaaacagtaaatctgcagatactgtgaggcacaaattatactgtcaacctactgttgctatggttatatactcccacttcatacattaccaagagtcgatcactgatttaaaatttttaatttctatagttaagatttactgcataatatagaatataaagttaagttaacatactaacatttctcctttggaggaagttttaatctacttcaggatgcatattattatcaagatactttcatatacaggatagcctaattttatttgtttaaatatgcttaatatgccccagattgcaaatgcatccagtcagtaatatcactgtctgtatgtggaggacatgttcccatggatcatatgtgaagatgtcaataagcttgcattaagccacctgctttgtaagtggattgattaataaataacttatatttcta

SEQ ID NO: 354256 - DNA, 2275 bp, Homo sapiens
ctgccgtctgcatggggaaataagaaatgttcttgatctcaccaatcttcctcctcttggagtcactctctttaatcaccaaccaaacagcttcccaaactagaaactgcagaattatggtaagtgattctagctccacactgctttctgaaccctggcctagggcaggttcagaaaggtctgcctgggaactgggaattgaagctggagtgactgcagctacttatacacctggtgcattgcatcctcacttggcccattatcacgcacctcctcgacttcatcacttacaattaggagctcttcctttaatggttcctgatatggcaggctatcctcacatccgttacatttcatcaggattggatggaacatcattcagaggtcctttcaggggcaattttgaggaactgattcatttggaagaaagattaggcaatgtcaatcgtggagcatcccaggggacaattgaaagatgtacatatccacataaatacaaaaaggtaacaactgattggttctcacagaggaaactgcactgcaaacaagatggggaagaagggactgaggaagacacagaggaaaaatgtactatctgtttgtctattttagaggaaggtgaagatgtgagacgtcttccatgtatgcaccttttccaccaagtgtgtgttgaccaatggttgattaccaataagaagtgccccatatgcagagtggacattgaggcccagctgccaagtgaaagttgacaccatgtttcagaactcttgccctccctctcattcccatccttcctggtactgcagtcaaccaaagatggcatgacttacctgcgcagatttggaagcattgaacttagagtgctggctctgctatatggtacaactaatgctagacctacagtttatgtatacagttgattttgatgtatttataaaagcttttttttctagatttgacatttttctgtatcattttactgtatttttgcatggttccttgtattgcatttctttgcacatattatgggcttgtgaccctaaacttgcaggcaaggttagctgctttagtaagtagaattttgtggtctttttgttttttacatagtaccaagccttgataattatgaattttttatccattactaacctttaatttaatcaatcatgtactttagtttaatgtataaagatcctctagaaaatgataatattgtgtattaagacattccttaattaggacaaaatggctgctgtatatttactatatggagttctgagttaaataccatccttaatactgggaacagaatacaacccatataaatcagatgcaggtggtagtcacatcaccagagtgatcagtataaattttcttggtgtatccttttcctttcaacacagtgcagataagagttgaatattgatatcatacatttagactgctgttctgattgcatttatctttttcctacatcatttagaattttatttccctgattcagtttttgctgctgtgaaacagctctgatgaacactaaatattaatttcaattagctagattgtacatacttgcagatttaacaaaattttagggaaattgaaaaagacatgtagaatttgttgtcttctgctaagcacgaaaagttaagatatctgcttacattgattttgtagacacattaagtcaagatttggaatttaagtcactggcaggtatctgtgcattcatagaacttataaaggtcccaggatcacttttaagggatttttattagtttaaaggtaaataaagtcagctgaatctacatgtctcttgttttatttctctctaaacttgaaaacagtaaatctgcagatactgtgaggcacaaattatactgtcaacctactgttgctatggttatatactcccacttcatacattaccaagagtcgatcactgatttaaaatttttaatttctatagttaagatttactgcataatatagaatataaagttaagttaacatactaacatttctcctttggaggaagttttaatctacttcaggatgcatattattatcaagatactttcatatacaggatagcctaattttatttgtttaaatatgcttaatatgccccagattgcaaatgcatccagtcagtaatatcactgtctgtatgtggaggacatgttcccatggatcatatgtgaagatgtcaataagcttgcattaagccacctgctttgtaagtggattgattaataaataacttatatttcta

SEQ ID NO: 354257 - DNA, 2706 bp, Homo sapiens
cgcaaaagccagcaggctggcccttcgtatgtgcagaattgtgttaaagaaaaccagggaatattaggactgaggcaacacctagggacaccaagtgatgaagataatgattcctcttttagtgattgtctttcttctccttcatctagtctgcattttggagattctgatactgtgacttcagatgaggataaagaagtctctgtaagacattcccagaccattttgaatgctaaaagtagaagccatagtgcacggtctcataagtggcctcggagctgagacagaatctgtatcgggattgttaatgaaaagaccctgtttacatggcagttcgttacggagacttccatgcagaaagagatttgtaaaaaataattcctcacagaggacacagaaacaaaaagagaggatattaatgcagaggaagaaacgagaagtgttagctcgaagaaaatatgccttgctacctagttctagtagttccagtgagaatgacctcagcagtgaatcctcttctagctcatcaactgaaggagaagaagatttgtttgtttctgccagtgaaaaccaccaaaacaatccagctgttccctcaggaagtattgatgaagatgttgtggtgatagaagcttcctccactccccaggttactgccaatgaagaaattaatgttacctcaactgacagtgaagtggagattgtaacagttggagaaagctatcggtctcgttcaacccttggacactccagatctcattggagccagggttccagttctcatgcaagtcggccacaggagccacggaaccgcagtaggatttctactgttatacagcccttgaggcagaatgcagcagaagttgtggaccttaccgttgatgaagatgaacctactgtagtaccaaccacttctgcaagaatggaatcacaagctactagcgcttccattaacaattcaaatccatctacctctgagcaggcctctgatactgcttcagctgtcaccagtagccaaccttccacagtgtcagagacttcagctactcttacaagcaatagtaccactggcacttctataggagatgactcaaggagaactacatctagtgctgtaacggaaactggccctcctgcaatgccaaggttaccttcctgctgtccccagcactcaccatgtggagggtcgtcacagaaccaccatgcattaggacatcctcatacaagttgctttcagcagcatggtcaccattttcaacatcatcaccaccaccaccatactccccacccagctgtcccagtttctccttcctttagtgatcctgcttgccctgtggaaagacctccacaagtacaagcaccttgtggagcaaatagtagttctggtaccagctatcatgaacagcaggcattgccagtggacctgagcaacagtggtatcagaagtcatggaagtggcagttttcatggagcatctgcatttgacccctgctgccctgtttcttcctcccgagctgcaatctttggccatcaggccgctgctgctgccccaagtcaacctttatcatcaatagatggctatggatcaagcatggttgcgcagccccagccccagccccctccacagccctctctctcatcatgtcgacattacatgccacccccttatgcctctttgacaaggccacttcatcatcaagcttctgcctgcccgcattctcatggaaacccccctcctcagactcagcctccgcctcaagtggattatgttattcctcatcctgtacatgctttccattctcaaatatcttctcatgcaacatctcatcctgtggcacccccaccaccaactcacttagccagtacagctgcaccaatccctcagcatcttcctcctacacaccagccaatttcgcaccatattccagccacagcacctccagcacagagactgcatcctcatgaagtgatgcagaggatggaagttcaaaggaggaggatgatgcagcatccaacgcgggcacatgaacgccccccaccccatccacataggatgcacccaaactatggtcatgggcatcatattcatgtgcctcagactatgtcctcacatcctcgacaggctccagagaggtctgcctgggaactgggaattgaagctggagtgactgcagctacttatacacctggtgcattgcatcctcacttggcccattatcacgcacctcctcgacttcatcacttacaattaggagctcttcctttaatggttcctgatatggcaggctatcctcacatccgttacatttcatcaggattggatggaacatcattcagaggtcctttcaggggcaattttgaggtatgtaataaaataaatgaatatgtttgtcacagtatctttaatgcagattgagtatatatatactactatacacaattgtgtaggactgctacagtggctgggaatcacatgtgattttctgatgttgcttctgggagttacagaaatatttgtaagtattattaatcttagggtcaaaagttaccgaaatatttaaagatgagtaaatgaaaatatctaatatagaagaatataaaaatgtattaaatcaatataaatgtcagatatataactataccattaaatgtggtggggaacggaatgtttttgactcagctaaatttttagagaaatcggtagag

SEQ ID NO: 354258 - DNA, 991 bp, Homo sapiens
cgcaaaagccagcaggctggcccttcgtatgtgcagaattgtgttaaagaaaaccagggaatattaggactgaggcaacacctagggacaccaagtgatgaagataatgattcctcttttagtgattgtctttcttctccttcatctagtctgcattttggagattctgatactgtgacttcagatgaggataaagaagtctctgtaagacattcccagaccattttgaatgctaaaagtagaagccatagtgcacggtctcataagtggcctcggagctgagacagaatctgtatcgggattgttaatgaaaagaccctgtttacatggcagttcgttacggagacttccatgcagaaagagatttgtaaaaaataattcctcacagaggacacagaaacaaaaagagaggatattaatgcagaggaagaaacgagaagtgttagctcgaagaaaatatgccttgctacctagttctagtagttccagtgagaatgacctcagcagtgaatcctcttctagctcatcaactgaaggagaagaagatttgtttgtttctgccagtgaaaaccaccaaaacaatccagctgttccctcaggaagtattgatgaagatgttgtggtgatagaagcttcctccactccccaggttactgccaatgaagaaattaatgttacctcaactgacagtgaagtggagattgtaacagttggagaaagctatcggtctcgttcaacccttggacactccagatctcattggagccagggttccagttctcatgcaagtcggccacaggagccacggaaccgcagtaggatttctactgttatacagcccttgaggcagaatgcagcagaagttgtggaccttaccgttgatgaagatggtaaattgaagtagtaacagtagaaaattatgaaaggagtttgataaaaggaaatctcttaatatgctagaaactcctcctgcttactggtaatatattat

SEQ ID NO: 354259 - DNA, 332 bp, Homo sapiens
actattggaaagactcatgttttgttgtacagtcaagaacaagacaagatcaaatgtaattttcatttctaatctgggaaataagtccaagaagacataaatttaacagtgatgacttttataactaatacttgggcacacattttttattcttagaattgtgtaacagaagtttagttttattactcggagtatatatgatatactcttctctgtaagcatttcctcacatttaacatataattcatgagggaaatcaagtccttaaaatgtacccagtgttcctcataagtgggagttgaacaatgagaacacatggacacagagagggg

SEQ ID NO: 354260 - DNA, 1146 bp, Homo sapiens
ggtggggggtggggcaggcgacggtggggaagatggcgtaccagagcttgcggctggagtacctgcagatcccaccggtcagccgcgcctacaccactgcctgcgtcctcaccaccgccgccgtgcagttggaattgatcacaccttttcagttgtacttcaatcctgaattaatctttaaacactttcaaatatggagattaatcaccaacttcttattttttgggccagttggattcaattttttatttaacatgatttttctatatcgttactgtcgaatgctagaagaaggctctttccgaggtcggacagcagactttgtatttatgttcctttttggtggattcttaatgaccctttttggtctgtttgtgagcttagttttcttgggccaggcctttacaataatgctcgtctatgtgtggagccgaaggaacccctatgtccgcatgaacttcttcggccttctcaacttccaggccccctttctgccctgggtgctcatgggattttccttgttgttggggaactcaatcattgtggaccttttgggtattgcagttggacacatatattttttcttggaagatgtatttcccaatcaacctggtggaataagaattctgaaaacaccatctattttgaaagctatttttgatacaccagatgaggatccaaattacaatccactacctgaggaacggccaggaggcttcgcctggggtgagggccagcggcttggaggttaaagcagcagtgccaataatgagacccagctgggaaggactcggtgatacccactgggatcttttatcctttgttgcaaaagtgtggacacttttgacagcttggcagattttaactccagaagcactttatgaaatggtacactgactaatccagaagacatttccaacagtttgccagtggttcctcactacactggtactgaaagtgtaatttcttagagccaaaaaactggagaaacaaatatcctgccacctctaacaagtacatgagtacttgatttttatggtataaggcagagccttttcttcctcttcttgatagatgaggccatggtgtaaatggaagtttcagagaggacaaaataaaacggaattccatttttctctcactgta

SEQ ID NO: 354261 - DNA, 863 bp, Homo sapiens
ggtggggggtggggcaggcgacggtggggaagatggcgtaccagagcttgcggctggagtacctgcagatcccaccggtcagccgcgcctacaccactgcctgcgtcctcaccaccgccgccgtgcagttggaattgatcacaccttttcagttgtacttcaatcctgaattaatctttaaacactttcaaatatggagattaatcaccaacttcttattttttgggccagttggattcaattttttatttaacatgatttttctatatcgttactgtcgaatgctagaagaaggctctttccgaggtcggacagcagactttgtatttatgttcctttttggtggattcttaatgaccgtatccttcaacaaacaacacgggaaaatgttgaagaacaccctggctcttcctaaagcttgtcatctgtctcccacagttctctagatcttagcttcagggcactatcatttattttacagcacattttctgtgacaagtttccaaacctagcagtcggacaggatgagcaagtcaaaggaacttttaacccaggtgggttactgttaagcaactcagttatatcattactgcttggcgtacttcacttttaaactaagttggtaagacatttacttggtggctaccaaaaccaataaattattttttcagaaaaagaattttcatctatacaatagacttagatatggtacggtctgacaagatggttttgttccagctagctttattcatctctgtaaaggtgctaatcgtgagcaagctttaatataattattgactgaagaattaacacattttccaaagaggcaagaacttcacgaaagcagagtatttgtttgaagt

SEQ ID NO: 354262 - DNA, 804 bp, Homo sapiens
ggtggggggtggggcaggcgacggtggggaagatggcgtaccagagcttgcggctggagtacctgcagatcccaccggtcagccgcgcctacaccactgcctgcgtcctcaccaccgccgccgtgcagttggaattgatcacaccttttcagttgtacttcaatcctgaattaatctttaaacactttcaaatatggagattaatcaccaacttcttattttttgggccagttggattcaattttttatttaacatgatttttctgtatcctttattaaatggggtcagcatcaaaactttttcttaggaagtaaaaaattaagttgaaacttttcatcctgttacttgtttttggtaccatcttagctatgatttctgggtcagtggtacataaagtagttgcttaggtagtaatgttttgaaaatgtctgtaggtcactttgttcaaatgggaggttttaaccataaaaagatagcacttctgctcttttgttacttacaaatctgatcaagggaggggagaattgatttaactgaggcatacctccacagtaaccaacaggttcgaagccgtaaaacaacctgaatgcaatggtaattcagcagaatttgggcataagttttggaatgggttcatgaggagtgggaacctgagatctccttgggtcctggttgctggaactactggctgaaagacagtggttgtgtctgctgggcttgtcaagttccggtttgttgaaaggaaaaccccagctctgatccaatggtaattggggccacagagcagggcattcctcttccac

SEQ ID NO: 354263 - DNA, 1223 bp, Homo sapiens
gcgtgtgtgggacgcgagggtgcaggaagatggcttaccatagttttaggttggagcttactgacatattgcatccgtgactagctgcgtccgtattatcctaccatcgcacatgacagtacacatcgacccagcgcggcgaacgcggacacggttgcgtagaatatcgaatactacccaacgcatttgtgtacgatgttctgtaagcgtttcatattacacttgggaaattctaattccatatctagagaacgatctctatcacagaatatggagattaatcaccaacttcttattttttgggccagttggattcaattttttatttaacatgatttttctatatcgttactgtcgaatgctagaagaaggctctttccgaggtcggacagcagactttgtatttatgttcctttttggtggattcttaatgaccctttttggtctgtttgtgagcttagttttcttgggccaggcctttacaataatgctcgtctatgtgtggagccgaaggaacccctatgtccgcatgaacttcttcggccttctcaacttccaggccccctttctgccctgggtgctcatgggattttccttgttgttggggaactcaatcattgtggaccttttgggtattgcagttggacacatatattttttcttggaagatgtatttcccaatcaacctggtggaataagaattctgaaaacaccatctattttgaaagctatttttgatacaccagatgaggatccaaattacaatccactacctgaggaacggccaggaggcttcgcctggggtgagggccagcggcttggaggttaaagcagcagtgccaataatgagacccagctgggaaggactcggtgatacccactgggatcttttatcctttgttgcaaaagtgtggacacttttgacagcttggcagattttaactccagaagcactttatgaaatggtacactgactaatccagaagacatttccaacagtttgccagtggttcctcactacactggtactgaaagtgtaatttcttagagccaaaaaactggagaaacaaatatcctgccacctctaacaagtacatgagtacttgatttttatggtataaggcagagccttttcttcctcttcttgatagatgaggccatggtgtaaatggaagtttcagagaggacaaaataaaacggaattccatttttctctcactgta

SEQ ID NO: 354264 - DNA, 1052 bp, Homo sapiens
ggtggggggtggggcaggcgacggtggggaagatggcgtaccagagcttgcggctggagtacctgcagatcccaccggtcagccgcgcctacaccactgcctgcgtcctcaccaccgccgccgtgcagttggaattgatcacaccttttcagttgtacttcaatcctgaattaatctttaaacactttcaaatatggagattaatcaccaacttcttattttttgggccagttggattcaattttttatttaacatgatttttctctttttggtctgtttgtgagcttagttttcttgggccaggcctttacaataatgctcgtctatgtgtggagccgaaggaacccctatgtccgcatgaacttcttcggccttctcaacttccaggccccctttctgccctgggtgctcatgggattttccttgttgttggggaactcaatcattgtggaccttttgggtattgcagttggacacatatattttttcttggaagatgtatttcccaatcaacctggtggaataagaattctgaaaacaccatctattttgaaagctatttttgatacaccagatgaggatccaaattacaatccactacctgaggaacggccaggaggcttcgcctggggtgagggccagcggcttggaggttaaagcagcagtgccaataatgagacccagctgggaaggactcggtgatacccactgggatcttttatcctttgttgcaaaagtgtggacacttttgacagcttggcagattttaactccagaagcactttatgaaatggtacactgactaatccagaagacatttccaacagtttgccagtggttcctcactacactggtactgaaagtgtaatttcttagagccaaaaaactggagaaacaaatatcctgccacctctaacaagtacatgagtacttgatttttatggtataaggcagagccttttcttcctcttcttgatagatgaggccatggtgtaaatggaagtttcagagaggacaaaataaaacggaattccatttttctctcactgta

SEQ ID NO: 354265 - DNA, 1607 bp, Homo sapiens
tgggatcttcaggtcggaggccggggtgaggccgacccacaggccgccttgctccctcgcgaagacgcttatgccagtctcgcccgtccccgctcctcctcagagaaaatgctgccccgcagcacttaccggagcgaccatgagggtgacgatttgaagcacacacaggcttcccgccacctcctttaaaccgccgctggcttgccagggacagacggcgcggttggctccccaaaattccgactgatacgcgcctcggcgagcgaaagcaaacgcgggatactctcgcgttcctgattggctggttgtggacacctcaattatgacagaaaggggccgggcgggaaagttagctgtggccggcggggattggcagaaggaacctgtacttactcgtttttcccggacgttggctggtggagaagagaggcagttggaattgatcacaccttttcagttgtacttcaatcctgaattaatctttaaacactttcaaatatggagattaatcaccaacttcttattttttgggccagttggattcaattttttatttaacatgatttttctatatcgttactgtcgaatgctagaagaaggctctttccgaggtcggacagcagactttgtatttatgttcctttttggtggattcttaatgaccgtatccttcaacaaacaacacgggaaaatgttgaagaacaccctggctcttcctaaagcttgtcatctgtctcccacagttctctagatcttagcttcagggcactatcatttattttacagcacattttctgtgacaagtttccaaacctagcagtcggacaggatgagcaagtcaaaggaacttttaacccaggcctttacaataatgctcgtctatgtgtggagccgaaggaacccctatgtccgcatgaacttcttcggccttctcaacttccaggccccctttctgccctgggtgctcatgggattttccttgttgttggggaactcaatcattgtggaccttttgggtattgcagttggacacatatattttttcttggaagatgtatttcccaatcaacctggtggaataagaattctgaaaacaccatctattttgaaagctatttttgatacaccagatgaggatccaaattacaatccactacctgaggaacggccaggaggcttcgcctggggtgagggccagcggcttggaggttaaagcagcagtgccaataatgagacccagctgggaaggactcggtgatacccactgggatcttttatcctttgttgcaaaagtgtggacacttttgacagcttggcagattttaactccagaagcactttatgaaatggtacactgactaatccagaagacatttccaacagtttgccagtggttcctcactacactggtactgaaagtgtaatttcttagagccaaaaaactggagaaacaaatatcctgccacctctaacaagtacatgagtacttgatttttatggtataaggcagagccttttcttcctcttcttgatagatgaggccatggtgtaaatggaagtttcagagaggacaaaataaaacggaattccatttttctctcactgta

SEQ ID NO: 354266 - DNA, 1290 bp, Homo sapiens
ggtggggggtggggcaggcgacggtggggaagatggcgtaccagagcttgcggctggagtacctgcagatcccaccggtcagccgcgcctacaccactgcctgcgtcctcaccaccgccgccgtgcagttggaattgatcacaccttttcagttgtacttcaatcctgaattaatctttaaacactttcaaatatggagattaatcaccaacttcttattttttgggccagttggattcaattttttatttaacatgatttttctatatcgttactgtcgaatgctagaagaaggctctttccgaggtcggacagcagactttgtatttatgttcctttttggtggattcttaatgaccctttttggtctgtttgtgagcttagttttcttgggccaggcctttacaataatgctcgtctatgtgtggagccgaaggaacccctatgtccgcatgaacttcttcggccttctcaacttccaggccccctttctgccctgggtgctcatgggattttccttgttgttggggaactcaatcattgtggaccttttgggtattgcagttggacacatatattttttcttggaagatgtatttcccaatcaacctggtggaataagaattctgaaaacaccatctatttttcctagaatcagctgtttcttcaaggagccctggttcctttaaagtggagaatggtatttagaagcaagatctgggtgctagatgtgctcattgctattggagtgttgctattcccagatcctctcagtgaacagagcaatggagaaagctatttttgatacaccagatgaggatccaaattacaatccactacctgaggaacggccaggaggcttcgcctggggtgagggccagcggcttggaggttaaagcagcagtgccaataatgagacccagctgggaaggactcggtgatacccactgggatcttttatcctttgttgcaaaagtgtggacacttttgacagcttggcagattttaactccagaagcactttatgaaatggtacactgactaatccagaagacatttccaacagtttgccagtggttcctcactacactggtactgaaagtgtaatttcttagagccaaaaaactggagaaacaaatatcctgccacctctaacaagtacatgagtacttgatttttatggtataaggcagagccttttcttcctcttcttgatagatgaggccatggtgtaaatggaagtttcagagaggacaaaataaaacggaattccatttttctctcactgta

SEQ ID NO: 354267 - DNA, 1446 bp, Homo sapiens
ggtggggggtggggcaggcgacggtggggaagatggcgtaccagagcttgcggctggagtacctgcagatcccaccggtcagccgcgcctacaccactgcctgcgtcctcaccaccgccgccgtgcagttggaattgatcacaccttttcagttgtacttcaatcctgaattaatctttaaacactttcaaatatggagattaatcaccaacttcttattttttgggccagttggattcaattttttatttaacatgatttttctatatcgttactgtcgaatgctagaagaaggctctttccgaggtcggacagcagactttgtatttatgttcctttttggtggattcttaatgaccgtatccttcaacaaacaacacgggaaaatgttgaagaacaccctggctcttcctaaagcttgtcatctgtctcccacagttctctagatcttagcttcagggcactatcatttattttacagcacattttctgtgacaagtttccaaacctagcagtcggacaggatgagcaagtcaaaggaacttttaacccaggcctttacaataatgctcgtctatgtgtggagccgaaggaacccctatgtccgcatgaacttcttcggccttctcaacttccaggccccctttctgccctgggtgctcatgggattttccttgttgttggggaactcaatcattgtggaccttttgggtattgcagttggacacatatattttttcttggaagatgtatttcccaatcaacctggtggaataagaattctgaaaacaccatctatttttcctagaatcagctgtttcttcaaggagccctggttcctttaaagtggagaatggtatttagaagcaagatctgggtgctagatgtgctcattgctattggagtgttgctattcccagatcctctcagtgaacagagcaatggagaaagctatttttgatacaccagatgaggatccaaattacaatccactacctgaggaacggccaggaggcttcgcctggggtgagggccagcggcttggaggttaaagcagcagtgccaataatgagacccagctgggaaggactcggtgatacccactgggatcttttatcctttgttgcaaaagtgtggacacttttgacagcttggcagattttaactccagaagcactttatgaaatggtacactgactaatccagaagacatttccaacagtttgccagtggttcctcactacactggtactgaaagtgtaatttcttagagccaaaaaactggagaaacaaatatcctgccacctctaacaagtacatgagtacttgatttttatggtataaggcagagccttttcttcctcttcttgatagatgaggccatggtgtaaatggaagtttcagagaggacaaaataaaacggaattccatttttctctcactgta

SEQ ID NO: 354268 - DNA, 493 bp, Homo sapiens
gtgggttgaccgtggcttgtgggttgaccgtggcttgtgggttgaccgtggcttgtgggttgaccgtggcttgtgggttgaccgcggcttggaggttaaagcagcagtgccaataatgagacccagctgggaaggactcggtgatacccactgggatcttttatcctttgttgcaaaagtgtggacacttttgacagcttggcagattttaactccagaagcactttatgaaatggtacactgactaatccagaagacatttccaacagtttgccagtggttcctcactacactggtactgaaagtgtaatttcttagagccaaaaaactggagaaacaaatatcctgccacctctaacaagtacatgagtacttgatttttatggtataaggcagagccttttcttcctcttcttgatagatgaggccatggtgtaaatggaagtttcagagaggacaaaataaaacggaattccatttttctctcactgta

SEQ ID NO: 354269 - DNA, 1451 bp, Homo sapiens
tgggatcttcaggtcggaggccggggtgaggccgacccacaggccgccttgctccctcgcgaagacgcttatgccagtctcgcccgtccccgctcctcctcagagaaaatgctgccccgcagcacttaccggagcgaccatgagggtgacgatttgaagcacacacaggcttcccgccacctcctttaaaccgccgctggcttgccagggacagacggcgcggttggctccccaaaattccgactgatacgcgcctcggcgagcgaaagcaaacgcgggatactctcgcgttcctgattggctggttgtggacacctcaattatgacagaaaggggccgggcgggaaagttagctgtggccggcggggattggcagaaggaacctgtacttactcgtttttcccggacgttggctggtggagaagagaggcagttggaattgatcacaccttttcagttgtacttcaatcctgaattaatctttaaacactttcaaatatggagattaatcaccaacttcttattttttgggccagttggattcaattttttatttaacatgatttttctatatcgttactgtcgaatgctagaagaaggctctttccgaggtcggacagcagactttgtatttatgttcctttttggtggattcttaatgaccctttttggtctgtttgtgagcttagttttcttgggccaggcctttacaataatgctcgtctatgtgtggagccgaaggaacccctatgtccgcatgaacttcttcggccttctcaacttccaggccccctttctgccctgggtgctcatgggattttccttgttgttggggaactcaatcattgtggaccttttgggtattgcagttggacacatatattttttcttggaagatgtatttcccaatcaacctggtggaataagaattctgaaaacaccatctattttgaaagctatttttgatacaccagatgaggatccaaattacaatccactacctgaggaacggccaggaggcttcgcctggggtgagggccagcggcttggaggttaaagcagcagtgccaataatgagacccagctgggaaggactcggtgatacccactgggatcttttatcctttgttgcaaaagtgtggacacttttgacagcttggcagattttaactccagaagcactttatgaaatggtacactgactaatccagaagacatttccaacagtttgccagtggttcctcactacactggtactgaaagtgtaatttcttagagccaaaaaactggagaaacaaatatcctgccacctctaacaagtacatgagtacttgatttttatggtataaggcagagccttttcttcctcttcttgatagatgaggccatggtgtaaatggaagtttcagagaggacaaaataaaacggaattccatttttctctcactgta

SEQ ID NO: 354270 - DNA, 1258 bp, Homo sapiens
ggtggggggtggggcaggcgacggtggggaagatggcgtaccagagcttgcggctggagtacctgcagatcccaccggtcagccgcgcctacaccactgcctgcgtcctcaccaccgccgccgtggtgagcagctgcagtgccaccttctcattatctgggctggatatgactgggtcttcaggaaactggggtttgggcctcggggaggcccagaggggctggtcccggggatgggtggaggcgtacagggattactctggggttcgagttggcgccaagaatgcttatccagtgacgcgagaagggagtgctgcttcatggggggtcagcagttggaattgatcacaccttttcagttgtacttcaatcctgaattaatctttaaacactttcaaatatggagattaatcaccaacttcttattttttgggccagttggattcaattttttatttaacatgatttttctctttttggtctgtttgtgagcttagttttcttgggccaggcctttacaataatgctcgtctatgtgtggagccgaaggaacccctatgtccgcatgaacttcttcggccttctcaacttccaggccccctttctgccctgggtgctcatgggattttccttgttgttggggaactcaatcattgtggaccttttgggtattgcagttggacacatatattttttcttggaagatgtatttcccaatcaacctggtggaataagaattctgaaaacaccatctattttgaaagctatttttgatacaccagatgaggatccaaattacaatccactacctgaggaacggccaggaggcttcgcctggggtgagggccagcggcttggaggttaaagcagcagtgccaataatgagacccagctgggaaggactcggtgatacccactgggatcttttatcctttgttgcaaaagtgtggacacttttgacagcttggcagattttaactccagaagcactttatgaaatggtacactgactaatccagaagacatttccaacagtttgccagtggttcctcactacactggtactgaaagtgtaatttcttagagccaaaaaactggagaaacaaatatcctgccacctctaacaagtacatgagtacttgatttttatggtataaggcagagccttttcttcctcttcttgatagatgaggccatggtgtaaatggaagtttcagagaggacaaaataaaacggaattccatttttctctcactgta

SEQ ID NO: 354271 - DNA, 1855 bp, Homo sapiens
ggtggggggtggggcaggcgacggtggggaagatggcgtaccagagcttgcggctggagtacctgcagatcccaccggtcagccgcgcctacaccactgcctgcgtcctcaccaccgccgccgtgcagttggaattgatcacaccttttcagttgtacttcaatcctgaattaatctttaaacactttcaaatatggagattaatcaccaacttcttattttttgggccagttggattcaattttttatttaacatgatttttctatatcgttactgtcgaatgctagaagaaggctctttccgaggtcggacagcagactttgtatttatgttcctttttggtggattcttaatgaccctttttggtctgtttgtgagcttagttttcttgggccaggcctttacaataatgctcgtctatgtgtggagccgaaggaacccctatgtccgcatgaacttcttcggccttctcaacttccaggccccctttctgccctgggtgctcatgggattttccttgttgttggggaactcaatcattgtggaccttttgggtattgcagttggacacatatattttttcttggaagatgtatttcccaatcaacctggtggaataagaattctgaaaacaccatctattttgaaagctatttttgatacaccagatgaggatccaaattacaatccactacctgaggaacggccaggaggcttcgcctggggtgagggccagcggcttggaggttaaagcagcagtgccaataatgagacccagctgggaaggactcggtgatacccactgggatcttttatcctttgttgcaaaagtgtggacacttttgacagcttggcagattttaactccagaagcactttatgaaatggtacactgactaatccagaagacatttccaacagtttgccagtggttcctcactacactggtactgaaagtgtaatttcttagagccaaaaaactggagaaacaaatatcctgccacctctaacaagtacatgagtacttgatttttatggtataaggcagagccttttcttcctcttcttgatagatgaggccatggtgtaaatggaagtttcagagaggacaaaataaaacggaattccatttttctctcactgtaaaaaaaaaaaaaaaaaaaaaaaaaaaaaaaaaacccgcgggggcctcttgtgtcggggggcgggaaaaagaggaggttttgtgaaagagggccccgtgtggtccttggcgtgtgtttcccgtggccccacggtttcttttgttccaaagggggaagaactctcttcgcgcgggctcctcccccatacataaggggagccggataaaaaattttccgagaataagcccccgggtttaacccccgcggattaattttaatttctgcgggaaaaaaatgccaacgacgagatctaacaaccacaccacattaatagaaagcagcagacagatcaagagaggacaacacaaagaggaaaatcacgacgaagaagaaacaacacactattgatccaagcagaacagaaaataaccgagaggacgggccgaaaagacacaaaaaaaaacacacaagcgaagtagcacaacagaggatgaaatgaaattgcgacaagaagcacaagaggaaccaccgcaactttatatccccagcaagaaaaatggcgcacaagcaaaaaaacgcaaaatccagacagaacaatgggacatcaaataaaaacgcagagataggccacgacaacttaagaaactgataaagacagagaacaaaacaacgacgataaaacgtgaaaaaaaggtaagcacagaaacaaacaggtcaaggagacaccaaa

SEQ ID NO: 354272 - DNA, 1145 bp, Homo sapiens
ggtggggggtggggcaggcgacggtggggaagatggcgtaccagagcttgcggctggagtacctgcagatcccaccggtcagccgcgcctacaccactgcctgcgtcctcaccaccgccgccgtgcagttggaattgatcacaccttttcagttgtacttcaatcctgaattaatctttaaacactttcaaatatggagattaatcaccaacttcttattttttgggccagttggattcaattttttatttaacatgatttttctatatcgttactgtcgaatgctagaagaaggctctttccgaggtcggacagcagactttgtatttatgttcctttttggtggattcttaatgaccgtatccttcaacaaacaacacgggaaaatgttgaagaacaccctggctcttcctaaagcttgtcatctgtctcccacagttctctagatcttagcttcagggcactatcatttattttacagcacattttctgtgacaagtttccaaacctagcagtcggacaggatgagcaagtcaaaggaacttttaacccaggtattgcagttggacacatatattttttcttggaagatgtatttcccaatcaacctggtggaataagaattctgaaaacaccatctattttgaaagctatttttgatacaccagatgaggatccaaattacaatccactacctgaggaacggccaggaggcttcgcctggggtgagggccagcggcttggaggttaaagcagcagtgccaataatgagacccagctgggaaggactcggtgatacccactgggatcttttatcctttgttgcaaaagtgtggacacttttgacagcttggcagattttaactccagaagcactttatgaaatggtacactgactaatccagaagacatttccaacagtttgccagtggttcctcactacactggtactgaaagtgtaatttcttagagccaaaaaactggagaaacaaatatcctgccacctctaacaagtacatgagtacttgatttttatggtataaggcagagccttttcttcctcttcttgatagatgaggccatggtgtaaatggaagtttcagagaggacaaaataaaacggaattccatttttctctcactgta

SEQ ID NO: 354273 - DNA, 1091 bp, Homo sapiens
ggtggggggtggggcaggcgacggtggggaagatggcgtaccagagcttgcggctggagtacctgcagatcccaccggtcagccgcgcctacaccactgcctgcgtcctcaccaccgccgccgtgcagttggaattgatcacaccttttcagttgtacttcaatcctgaattaatctttaaacactttcaaatatggagattaatcaccaacttcttattttttgggccagttggattcaattttttatttaacatgatttttctatatcgttactgtcgaatgctagaagaaggctctttccgaggtcggacagcagactttgtatttatgttcctttttggtggattcttaatgaccctttttggtctgtttgtgagcttagttttcttgggccaggcctttacaataatgctcgtctatgtgtggagccgaaggaacccctatgtccgcatgaacttcttcggccttctcaacttccaggccccctttctgccctgggtgctcatgggattttccttgttgttggggaactcaatcattgtggaccttttgggtattgcagttggacacatatattttttcttggaagatgtatttcccaatcaacctggtggaataagaattctgaaaacaccatctattttgaaagctatttttgatacaccagatgaggatccaaattacaatccactacctgaggaacggccaggaggcttcgcctggggtgagggccagcggcttggaggttaaagcagcagtgccaataatgagacccagctgggaaggactcggtgatacccactgggatcttttatcctttgttgcaaaagtgtggacacttttgacagcttggcagattttaactccagaagcactttatgaaatggtacactgactaatccagaagacatttccaacagtttgccagtggttcctcactacactggtactgaaagtgtaatttcttagagccaatttatggtataaggcagagccttttcttcctcttcttgatagatgaggccatggtgtaaatggaagtttcagagaggacaaaataaaacggaattccatttttctctcactgta

SEQ ID NO: 354274 - DNA, 1209 bp, Homo sapiens
ggtggggggtggggcaggcgacggtggggaagatggcgtaccagagcttgcggctggagtacctgcagatcccaccggtcagccgcgcctacaccactgcctgcgtcctcaccaccgccgccgtgcagttggaattgatcacaccttttcagttgtacttcaatcctgaattaatctttaaacactttcaaatatggagattaatcaccaacttcttattttttgggccagttggattcaattttttatttaacatgatttttctatatcgttactgtcgaatgctagaagaaggctctttccgaggtcggacagcagactttgtatttatgttcctttttggtggattcttaatgacccagtcggacaggatgagcaagtcaaaggaacttttaacccaggccccctttctgccctgggtgctcatgggattttccttgttgttggggaactcaatcattgtggaccttttgggtattgcagttggacacatatattttttcttggaagatgtatttcccaatcaacctggtggaataagaattctgaaaacaccatctatttttcctagaatcagctgtttcttcaaggagccctggttcctttaaagtggagaatggtatttagaagcaagatctgggtgctagatgtgctcattgctattggagtgttgctattcccagatcctctcagtgaacagagcaatggagaaagctatttttgatacaccagatgaggatccaaattacaatccactacctgaggaacggccaggaggcttcgcctggggtgagggccagcggcttggaggttaaagcagcagtgccaataatgagacccagctgggaaggactcggtgatacccactgggatcttttatcctttgttgcaaaagtgtggacacttttgacagcttggcagattttaactccagaagcactttatgaaatggtacactgactaatccagaagacatttccaacagtttgccagtggttcctcactacactggtactgaaagtgtaatttcttagagccaaaaaactggagaaacaaatatcctgccacctctaacaagtacatgagtacttgatttttatggtataaggcagagccttttcttcctcttcttgatagatgaggccatggtgtaaatggaagtttcagagaggacaaaataaaacggaattccatttttctctcactgta

SEQ ID NO: 354275 - DNA, 792 bp, Homo sapiens
gcggcggcactgttcgagccgccctgcagcggtgtggagactccgaccagttggggcaggcggctcaggtcgcggccagccaggggttgggaaactagtttccatggccaaacctagcccaccgtctgttttgtttcctgttcttcccaacctgcgctatggacttcatcagatttcagcatcagagagaatatggaaggacatcgaccctaacttcatccagtgaggatttccacacaccatacactctctgagagttcttttggctttgtgtgcacacctccagtgacagggagctcgctatgtcatgaggcagcctgctcccttgtggctatcactgaaccaactattaagccttcttatacaaacagtccctgacttactgttagacttacaactttttgattttacagtggtgcaaaagcaatatgcattccatagaaactgtatttcaaattttgaattttgatcttttccaggctagcaacatatgaagaccaaccttctatttttaaaataggctttgtgttagatgcttttgcccaactataggttaatgtaaatgttctgagaatatttgaggaaggctaggctaaactgtgatctttgggagcttagatatgttaagtgcattttcaacttacaatattttcaacttacgatgagtttattgggatgaagcccgttgtaagtaaaggagcatctgcattaagctaaaatccatgtctataacttcctcagtaatatcaagtttgttccttggagccagagaataaactgaatccttttcca

SEQ ID NO: 354276 - DNA, 854 bp, Homo sapiens
gcggcggcactgttcgagccgccctgcagcggtgtggagactccgaccagttggggcaggcggctcaggtcgcggccagccaggggttgggaaactagtttccatggccaaacctagcccaccgtctgttttggtgtccatggattggcggggacagctctgcttaaggatgtagtagctctgcaggttggctagtttcctgttcttcccaacctgcgctatggacttcatcagatttcagcatcagagagaatatggaaggacatcgaccctaacttcatccagtgaggatttccacacaccatacactctctgagagttcttttggctttgtgtgcacacctccagtgacagggagctcgctatgtcatgaggcagcctgctcccttgtggctatcactgaaccaactattaagccttcttatacaaacagtccctgacttactgttagacttacaactttttgattttacagtggtgcaaaagcaatatgcattccatagaaactgtatttcaaattttgaattttgatcttttccaggctagcaacatatgaagaccaaccttctatttttaaaataggctttgtgttagatgcttttgcccaactataggttaatgtaaatgttctgagaatatttgaggaaggctaggctaaactgtgatctttgggagcttagatatgttaagtgcattttcaacttacaatattttcaacttacgatgagtttattgggatgaagcccgttgtaagtaaaggagcatctgcattaagctaaaatccatgtctataacttcctcagtaatatcaagtttgttccttggagccagagaataaactgaatccttttcca

SEQ ID NO: 354277 - DNA, 571 bp, Homo sapiens
aaataaactgcgtgtcaggatgctattaccatctatattttgttctgagtgctcaactatacttgttctcatgacccgaagtgggtctgcttcctcctctcacccctttatcccaacctgtacacaggtgccatggcactgggtccaggccctgctcagtgactttggtcatccatttccagcaacatctatacccaagacaggatatgtctacagtctgttgggataggttatttgcctcaagtgctgctttctcagatcctagaaaggccaacagaagcctggcaactgccttcaattgctgtatcttaaaattgttggaatatcccataactaattgctaattagttattgccataataatgctgcttagcaaataacgaccaaattgaagtgccatacaataataaagcatgtatttctctctcaggtgtccatggattggcggggacagctctgcttaaggatgtagtagctctgcaggttggctaggttagtctatggcatgtgtctctatttcttctgtgatgcccaccaagggcatgtttttcacatggcacaagatgggtga

SEQ ID NO: 354278 - DNA, 389 bp, Homo sapiens
tttttttttacatagttgttatcttaaggtgatttccaatttttttttccatttacatttttccacaagcattgtccactttattctgtaaccttttcaactaccattttgaaatttgcttttatccatgtggttgtttgtgatgaactacaggttgctgactttcttccccttctgtaaataaagttttcttcctagtatgtcctgtatctcaagaggatctcatcagtggaatcattagatcaaaggatatgactgttgctcagctctctgtgtgtatgtaaattaataggctgtttatttgagcagttgtaggcttacaaaaatattgagtcaaaagtatagaattcccatatattctcctcttctcccttctgtcgtcttctcgc

SEQ ID NO: 354279 - DNA, 312 bp, Homo sapiens
tcctttgagcagtaagagaaaaataagaattattattgtaccatattaaactcttctgcagtggccatttaccagaatgttctaaatttaaaaactgaaagaaagttgaggctatagtggagcagaaaaggatttcatatgtaaagttaaaattccctagattttgctacaacttggcacttttaagtgcgttcttgctgattaaatgttcaactctcactcaatcagcccgctttcaaagcctggtatttcttttacttgcatgtaaggaaaatgcagtcatccaataaaaattctggagacatttccttg

SEQ ID NO: 354280 - DNA, 2737 bp, Homo sapiens
atgcgccccgcgcgccccgcactgacatggccgtcgcccgggtccgcgcgtccgccgcgcgccggccgttaataggcttgctccctgagcgccccgcaccgacatggcggccgtcttcgctgtggtgactttaactctcggttttcggttatagccggccggcgctcacttgtcttcaggaagctcggagcctttggtggagccggggagaggaagggtgggtgcaagagtgaaaggcgagaggggactgcaagcatccgggtcggctcctggccggagcaagatggctgagggcgagcggcagccgccgccagattcttcagaggaggcccctccagccactcagaacttcatcattccaaaaaaggagatccacacagttccagacatgggcaaatggaagcgttctcaggcatacgctgactacatcggattcatccttaccctcaacgaaggtgtgaaggggaagaagctgaccttcgagtacagagtctccgaggccattgagaaactagtcgctcttctcaacacgctggacaggtggattgatgagactcctccagtggaccagccctctcggtttgggaataaggcatacaggacctggtatgccaaacttgatgaggaagcagaaaacttggtggccacagtggtccctacccatctggcagctgctgtgcctgaggtggctgtttacctaaaggagtcagtggggaactccacgcgcattgactacggcacagggcatgaggcagccttcgctgctttcctctgctgtctctgcaagattggggtgctccgggtggatgaccaaatagctattgtcttcaaggtgttcaatcggtaccttgaggttatgcggaaactccagaaaacatacaggatggagccagccggcagccagggagtgtggggtctggatgacttccagtttctgcccttcatctggggcagttcgcagctgatagaccacccatacctggagcccagacactttgtggatgagaaggccgtgaatgagaaccacaaggactacatgttcctggagtgtatcctgtttattaccgagatgaagactggcccatttgcagagcactccaaccagctgtggaacatcagcgccgtcccttcctggtccaaagtgaaccagggtctcatccgcatgtataaggccgagtgcctggagaagttccctgtgatccagcacttcaagttcgggagcctgctgcccatccatcctgtcacgtcgggctaggaggggccaagccgaagagccacccaggccacagttcctgtgcctgccttccccaccccagcagtggcccctccccatcccctccctctgttcgtcccgtttgatgagaggctgtttactggggtggggtggcgagatgggcttgagggggctcagagcataaggcttcagggcccaagttgggagaagtgaccaaagtgtagccagttttctgagttcccgtgtgctagactggccagaagagagggtctggggcctggtcactcggccactctctcctgtttctggcctcttctcccttcactcccgtccagtctggttttgagagcaggggctgttctgcagcacctcagggaagggaggagagatacctgctgcttccattgcttttcccttcctggagtcgatgcctttctaagggttggagctgctccttgcaggggcgggtcagtttcccaggccatgccggggtggccatctatgctagggctggaagctgaggctggccgccagctgtgggctggggtggggtgggtggggtcgggtggtggagaggccttagctgtcctggctggtgcccctcccaggctccttttcaccctgccccctgggcctgaggccccctgtgtccaagcctccccctggctcttcagttctctagcccttggctttgctgggtttcctgactgtagccacatctctcccgctccctaagggtaacctagccaatggaagctgccctttgggtaggtgctgggctcctgggagggcccagatgatggggtgaggcatgtctttccagaactttccctggcagggaggggatggcagaaactcagggaggggcttggggcccattgtatctggagagcctggattcctcttggcagtcttaggcccagccacttctgctacctttgcgctgctgtgagcctcaccctgggcccctgggccctgcttctctgctcccctgggtgatgggtgggcccagaaggtggcagtcccacaccttgtcctcccacctccctgaactgtccattgcttttatagggtgaggtaagtgacagcctcccaagcccaggctttggcactcagaatgggcccagtgggggctgggcaggcccattgagggccaccgccgaggtttctcctagggctgttcctgggcctggctcttacaggctcgtcccccaggcctgcccttctccactgccccctcctgtgtctgggtccacacacccttcaggaagggggagcactgagaagcacagcacaggggctcagcctgggatccggtgatggtctgggcagaggctgggtcaggagtcccaaaggtcagtgacagtttctcagaagaggcccagcgtccacctctctcccagggccagacaccccttcctggctcccccatccccctatgggctcccagccccttgcaccctcattgctgttcagattaaagcctctgttttgcacctgtca

SEQ ID NO: 354281 - DNA, 2660 bp, Homo sapiens
ggcacgaggggaggaaggaggaggtcaccgtccagctgtctctcccctgtccccacatgtcttctaagctgttggagccggccggcgctcacttgtcttcaggaagctcggagcctttggtggagccggggagaggaagggtgggtgcaagagtgaaaggcgagaggggactgcaagcatccgggtcggctcctggccggagcaagatggctgagggcgagcggcagccgccgccagattcttcagaggaggcccctccagccactcagaacttcatcattccaaaaaaggagatccacacagttccagacatgggcaaatggaagcgttctcaggcatacgctgactacatcggattcatccttaccctcaacgaaggtgtgaaggggaagaagctgaccttcgagtacagagtctccgaggccattgagaaactagtcgctcttctcaacacgctggacaggtggattgatgagactcctccagtggaccagccctctcggtttgggaataaggcatacaggacctggtatgccaaacttgatgaggaagcagaaaacttggtggccacagtggtccctacccatctggcagctgctgtgcctgaggtggctgtttacctaaaggagtcagtggggaactccacgcgcattgactacggcacagggcatgaggcagccttcgctgctttcctctgctgtctctgcaagattggggtgctccgggtggatgaccaaatagctattgtcttcaaggtgttcaatcggtaccttgaggttatgcggaaactccagaaaacatacaggatggagccagccggcagccagggagtgtggggtctggatgacttccagtttctgcccttcatctggggcagttcgcagctgatagaccacccatacctggagcccagacactttgtggatgagaaggccgtgaatgagaaccacaaggactacatgttcctggagtgtatcctgtttattaccgagatgaagactggcccatttgcagagcactccaaccagctgtggaacatcagcgccgtcccttcctggtccaaagtgaaccagggtctcatccgcatgtataaggccgagtgcctggagaagttccctgtgatccagcacttcaagttcgggagcctgctgcccatccatcctgtcacgtcgggctaggaggggccaagccgaagagccacccaggccacagttcctgtgcctgccttccccaccccagcagtggcccctccccatcccctccctctgttcgtcccgtttgatgagaggctgtttactggggtggggtggcgagatgggcttgagggggctcagagcataaggcttcagggcccaagttgggagaagtgaccaaagtgtagccagttttctgagttcccgtgtgctagactggccagaagagagggtctggggcctggtcactcggccactctctcctgtttctggcctcttctcccttcactcccgtccagtctggttttgagagcaggggctgttctgcagcacctcagggaagggaggagagatacctgctgcttccattgcttttcccttcctggagtcgatgcctttctaagggttggagctgctccttgcaggggcgggtcagtttcccaggccatgccggggtggccatctatgctagggctggaagctgaggctggccgccagctgtgggctggggtggggtgggtggggtcgggtggtggagaggccttagctgtcctggctggtgcccctcccaggctccttttcaccctgccccctgggcctgaggccccctgtgtccaagcctccccctggctcttcagttctctagcccttggctttgctgggtttcctgactgtagccacatctctcccgctccctaagggtaacctagccaatggaagctgccctttgggtaggtgctgggctcctgggagggcccagatgatggggtgaggcatgtctttccagaactttccctggcagggaggggatggcagaaactcagggaggggcttggggcccattgtatctggagagcctggattcctcttggcagtcttaggcccagccacttctgctacctttgcgctgctgtgagcctcaccctgggcccctgggccctgcttctctgctcccctgggtgatgggtgggcccagaaggtggcagtcccacaccttgtcctcccacctccctgaactgtccattgcttttatagggtgaggtaagtgacagcctcccaagcccaggctttggcactcagaatgggcccagtgggggctgggcaggcccattgagggccaccgccgaggtttctcctagggctgttcctgggcctggctcttacaggctcgtcccccaggcctgcccttctccactgccccctcctgtgtctgggtccacacacccttcaggaagggggagcactgagaagcacagcacaggggctcagcctgggatccggtgatggtctgggcagaggctgggtcaggagtcccaaaggtcagtgacagtttctcagaagaggcccagcgtccacctctctcccagggccagacaccccttcctggctcccccatccccctatgggctcccagccccttgcaccctcattgctgttcagattaaagcctctgttttgcacctgtca

SEQ ID NO: 354282 - DNA, 475 bp, Homo sapiens
gctcccaagcccaggctttggaggctgtctcttacctcaccctataaaagcaatggacagcctcccaagcccaggctttggcactcagaatgggcccagtgggggctgggcaggcccattgagggccaccgccgaggtttctcctagggctgttcctgggcctggctcttacaggctcgtcccccaggcctgcccttctccactgccccctcctgtgtctgggtccacacacccttcaggaagggggagcactgagaagcacagcacaggggctcagcctgggatccggtgatggtctgggcagaggctgggtcaggagtcccaaaggtcagtgacagtttctcagaagaggcccagcgtccacctctctcccagggccagacaccccttcctggctcccccatccccctatgggctcccagccccttgcaccctcattgctgttcagattaaagcctctgttttgcacctgtca

SEQ ID NO: 354283 - DNA, 2625 bp, Homo sapiens
ctggtacgccccggattacgggatctcggttttcggttatagccggccggcgctcacttgtcttcaggaagctcggagcctttggtggagccggggagaggaagggtgggtgcaagagtgaaaggcgagaggggactgcaagcatccgggtcggctcctggccggagcaagatggctgagggcgagcggcagccgccgccagattcttcagaggaggcccctccagccactcagaacttcatcattccaaaaaaggagatccacacagttccagacatgggcaaatggaagcgttctcaggcatacgctgactacatcggattcatccttaccctcaacgaaggtgtgaaggggaagaagctgaccttcgagtacagagtctccgaggccattgagaaactagtcgctcttctcaacacgctggacaggtggattgatgagactcctccagtggaccagccctctcggtttgggaataaggcatacaggacctggtatgccaaacttgatgaggaagcagaaaacttggtggccacagtggtccctacccatctggcagctgctgtgcctgaggtggctgtttacctaaaggagtcagtggggaactccacgcgcattgactacggcacagggcatgaggcagccttcgctgctttcctctgctgtctctgcaagattggggtgctccgggtggatgaccaaatagctattgtcttcaaggtgttcaatcggtaccttgaggttatgcggaaactccagaaaacatacaggatggagccagccggcagccagggagtgtggggtctggatgacttccagtttctgcccttcatctggggcagttcgcagctgatagaccacccatacctggagcccagacactttgtggatgagaaggccgtgaatgagaaccacaaggactacatgttcctggagtgtatcctgtttattaccgagatgaagactggcccatttgcagagcactccaaccagctgtggaacatcagcgccgtcccttcctggtccaaagtgaaccagggtctcatccgcatgtataaggccgagtgcctggagaagttccctgtgatccagcacttcaagttcgggagcctgctgcccatccatcctgtcacgtcgggctaggaggggccaagccgaagagccacccaggccacagttcctgtgcctgccttccccaccccagcagtggcccctccccatcccctccctctgttcgtcccgtttgatgagaggctgtttactggggtggggtggcgagatgggcttgagggggctcagagcataaggcttcagggcccaagttgggagaagtgaccaaagtgtagccagttttctgagttcccgtgtgctagactggccagaagagagggtctggggcctggtcactcggccactctctcctgtttctggcctcttctcccttcactcccgtccagtctggttttgagagcaggggctgttctgcagcacctcagggaagggaggagagatacctgctgcttccattgcttttcccttcctggagtcgatgcctttctaagggttggagctgctccttgcaggggcgggtcagtttcccaggccatgccggggtggccatctatgctagggctggaagctgaggctggccgccagctgtgggctggggtggggtgggtggggtcgggtggtggagaggccttagctgtcctggctggtgcccctcccaggctccttttcaccctgccccctgggcctgaggccccctgtgtccaagcctccccctggctcttcagttctctagcccttggctttgctgggtttcctgactgtagccacatctctcccgctccctaagggtaacctagccaatggaagctgccctttgggtaggtgctgggctcctgggagggcccagatgatggggtgaggcatgtctttccagaactttccctggcagggaggggatggcagaaactcagggaggggcttggggcccattgtatctggagagcctggattcctcttggcagtcttaggcccagccacttctgctacctttgcgctgctgtgagcctcaccctgggcccctgggccctgcttctctgctcccctgggtgatgggtgggcccagaaggtggcagtcccacaccttgtcctcccacctccctgaactgtccattgcttttatagggtgaggtaagtgacagcctcccaagcccaggctttggcactcagaatgggcccagtgggggctgggcaggcccattgagggccaccgccgaggtttctcctagggctgttcctgggcctggctcttacaggctcgtcccccaggcctgcccttctccactgccccctcctgtgtctgggtccacacacccttcaggaagggggagcactgagaagcacagcacaggggctcagcctgggatccggtgatggtctgggcagaggctgggtcaggagtcccaaaggtcagtgacagtttctcagaagaggcccagcgtccacctctctcccagggccagacaccccttcctggctcccccatccccctatgggctcccagccccttgcaccctcattgctgttcagattaaagcctctgttttgcacctgtca

SEQ ID NO: 354284 - DNA, 2842 bp, Homo sapiens
atgcgccccgcgcgccccgcactgacatggccgtcgcccgggtccgcgcgtccgccgcgcgccggccgttaataggcttgctccctgagcgccccgcaccgacatggcggccgtcttcgctgtggtgactttaactctcggttttcggttatagccggccggcgctcacttgtcttcaggaagctcggagcctttggtggagccggggagaggaagggtgggtgcaagagtgaaaggcgagaggggactgcaagcatccgggtcggctcctggccggagcaagatggctgagggcgagcggcagccgccgccagattcttcagaggaggcccctccagccactcagaacttcatcattccaaaaaaggagatccacacagttccagacatgggcaaatggaagcgttctcaggcatacgctgactacatcggattcatccttaccctcaacgaaggtgtgaaggggaagaagctgaccttcgagtacagagtctccgagatgtggaatgaggttcatgaggaaaaggagcaggctgcaaagcagagtgtgtcctgcgatgaatgcataccattaccccgcgccgggcactgtgcaccttcggaggccattgagaaactagtcgctcttctcaacacgctggacaggtggattgatgagactcctccagtggaccagccctctcggtttgggaataaggcatacaggacctggtatgccaaacttgatgaggaagcagaaaacttggtggccacagtggtccctacccatctggcagctgctgtgcctgaggtggctgtttacctaaaggagtcagtggggaactccacgcgcattgactacggcacagggcatgaggcagccttcgctgctttcctctgctgtctctgcaagattggggtgctccgggtggatgaccaaatagctattgtcttcaaggtgttcaatcggtaccttgaggttatgcggaaactccagaaaacatacaggatggagccagccggcagccagggagtgtggggtctggatgacttccagtttctgcccttcatctggggcagttcgcagctgatagaccacccatacctggagcccagacactttgtggatgagaaggccgtgaatgagaaccacaaggactacatgttcctggagtgtatcctgtttattaccgagatgaagactggcccatttgcagagcactccaaccagctgtggaacatcagcgccgtcccttcctggtccaaagtgaaccagggtctcatccgcatgtataaggccgagtgcctggagaagttccctgtgatccagcacttcaagttcgggagcctgctgcccatccatcctgtcacgtcgggctaggaggggccaagccgaagagccacccaggccacagttcctgtgcctgccttccccaccccagcagtggcccctccccatcccctccctctgttcgtcccgtttgatgagaggctgtttactggggtggggtggcgagatgggcttgagggggctcagagcataaggcttcagggcccaagttgggagaagtgaccaaagtgtagccagttttctgagttcccgtgtgctagactggccagaagagagggtctggggcctggtcactcggccactctctcctgtttctggcctcttctcccttcactcccgtccagtctggttttgagagcaggggctgttctgcagcacctcagggaagggaggagagatacctgctgcttccattgcttttcccttcctggagtcgatgcctttctaagggttggagctgctccttgcaggggcgggtcagtttcccaggccatgccggggtggccatctatgctagggctggaagctgaggctggccgccagctgtgggctggggtggggtgggtggggtcgggtggtggagaggccttagctgtcctggctggtgcccctcccaggctccttttcaccctgccccctgggcctgaggccccctgtgtccaagcctccccctggctcttcagttctctagcccttggctttgctgggtttcctgactgtagccacatctctcccgctccctaagggtaacctagccaatggaagctgccctttgggtaggtgctgggctcctgggagggcccagatgatggggtgaggcatgtctttccagaactttccctggcagggaggggatggcagaaactcagggaggggcttggggcccattgtatctggagagcctggattcctcttggcagtcttaggcccagccacttctgctacctttgcgctgctgtgagcctcaccctgggcccctgggccctgcttctctgctcccctgggtgatgggtgggcccagaaggtggcagtcccacaccttgtcctcccacctccctgaactgtccattgcttttatagggtgaggtaagtgacagcctcccaagcccaggctttggcactcagaatgggcccagtgggggctgggcaggcccattgagggccaccgccgaggtttctcctagggctgttcctgggcctggctcttacaggctcgtcccccaggcctgcccttctccactgccccctcctgtgtctgggtccacacacccttcaggaagggggagcactgagaagcacagcacaggggctcagcctgggatccggtgatggtctgggcagaggctgggtcaggagtcccaaaggtcagtgacagtttctcagaagaggcccagcgtccacctctctcccagggccagacaccccttcctggctcccccatccccctatgggctcccagccccttgcaccctcattgctgttcagattaaagcctctgttttgcacctgtca

SEQ ID NO: 354285 - DNA, 1936 bp, Homo sapiens
gaaggaacagggaggggagggcgtgcctagagttgttggctgttccgcaccttctccacaggtccgggttttcactttgggtctaggctcttgggcatggtgttcaacagtagaccctaggaggagtgtgcccaggagccggggtggctgcagcaagggcccatcttgccacgtggccgctggttgcagcacacgttgtgttggttctccagagcgcccaccctcttccacctcggagcagtgagcagcattttgcagtccctagttgatgaagactggcccatttgcagagcactccaaccagctgtggaacatcagcgccgtcccttcctggtccaaagtgaaccagggtctcatccgcatgtataaggccgagtgcctggagaagttccctgtgatccagcacttcaagttcgggagcctgctgcccatccatcctgtcacgtcgggctaggaggggccaagccgaagagccacccaggccacagttcctgtgcctgccttccccaccccagcagtggcccctccccatcccctccctctgttcgtcccgtttgatgagaggctgtttactggggtggggtggcgagatgggcttgagggggctcagagcataaggcttcagggcccaagttgggagaagtgaccaaagtgtagccagttttctgagttcccgtgtgctagactggccagaagagagggtctggggcctggtcactcggccactctctcctgtttctggcctcttctcccttcactcccgtccagtctggttttgagagcaggggctgttctgcagcacctcagggaagggaggagagatacctgctgcttccattgcttttcccttcctggagtcgatgcctttctaagggttggagctgctccttgcaggggcgggtcagtttcccaggccatgccggggtggccatctatgctagggctggaagctgaggctggccgccagctgtgggctggggtggggtgggtggggtcgggtggtggagaggccttagctgtcctggctggtgcccctcccaggctccttttcaccctgccccctgggcctgaggccccctgtgtccaagcctccccctggctcttcagttctctagcccttggctttgctgggtttcctgactgtagccacatctctcccgctccctaagggtaacctagccaatggaagctgccctttgggtaggtgctgggctcctgggagggcccagatgatggggtgaggcatgtctttccagaactttccctggcagggaggggatggcagaaactcagggaggggcttggggcccattgtatctggagagcctggattcctcttggcagtcttaggcccagccacttctgctacctttgcgctgctgtgagcctcaccctgggcccctgggccctgcttctctgctcccctgggtgatgggtgggcccagaaggtggcagtcccacaccttgtcctcccacctccctgaactgtccattgcttttatagggtgaggtaagtgacagcctcccaagcccaggctttggcactcagaatgggcccagtgggggctgggcaggcccattgagggccaccgccgaggtttctcctagggctgttcctgggcctggctcttacaggctcgtcccccaggcctgcccttctccactgccccctcctgtgtctgggtccacacacccttcaggaagggggagcactgagaagcacagcacaggggctcagcctgggatccggtgatggtctgggcagaggctgggtcaggagtcccaaaggtcagtgacagtttctcagaagaggcccagcgtccacctctctcccagggccagacaccccttcctggctcccccatccccctatgggctcccagccccttgcaccctcattgctgttcagattaaagcctctgttttgcacctgtca

SEQ ID NO: 354286 - DNA, 1946 bp, Homo sapiens
aaaaaaaaaaaaaaaaaaaaaaaaaaaaaaaaaaaaaaaaaaaattcaatcggtaccttgaggttatgcggaaactccagaaaacatacaggatggagccagccggcagccagggagtgtggggtctggatgacttccagtttctgcccttcatctggggcagttcgcagctgatagaccacccatacctggagcccagacactttgtggatgagaaggccgtgaatgagaaccacaaggactacatgttcctggagtgtatcctgtttattaccgagatgaagactggcccatttgcagagcactccaaccagctgtggaacatcagcgccgtcccttcctggtccaaagtgaaccagggtctcatccgcatgtataaggccgagtgcctggagaagttccctgtgatccagcacttcaagttcgggagcctgctgcccatccatcctgtcacgtcgggctaggaggggccaagccgaagagccacccaggccacagttcctgtgcctgccttccccaccccagcagtggcccctccccatcccctccctctgttcgtcccgtttgatgagaggctgtttactggggtggggtggcgagatgggcttgagggggctcagagcataaggcttcagggcccaagttgggagaagtgaccaaagtgtagccagttttctgagttcccgtgtgctagactggccagaagagagggtctggggcctggtcactcggccactctctcctgtttctggcctcttctcccttcactcccgtccagtctggttttgagagcaggggctgttctgcagcacctcagggaagggaggagagatacctgctgcttccattgcttttcccttcctggagtcgatgcctttctaagggttggagctgctccttgcaggggcgggtcagtttcccaggccatgccggggtggccatctatgctagggctggaagctgaggctggccgccagctgtgggctggggtggggtgggtggggtcgggtggtggagaggccttagctgtcctggctggtgcccctcccaggctccttttcaccctgccccctgggcctgaggccccctgtgtccaagcctccccctggctcttcagttctctagcccttggctttgctgggtttcctgactgtagccacatctctcccgctccctaagggtaacctagccaatggaagctgccctttgggtaggtgctgggctcctgggagggcccagatgatggggtgaggcatgtctttccagaactttccctggcagggaggggatggcagaaactcagggaggggcttggggcccattgtatctggagagcctggattcctcttggcagtcttaggcccagccacttctgctacctttgcgctgctgtgagcctcaccctgggcccctgggccctgcttctctgctcccctgggtgatgggtgggcccagaaggtggcagtcccacaccttgtcctcccacctccctgaactgtccattgcttttatagggtgaggtaagtgacagcctcccaagcccaggctttggcactcagaatgggcccagtgggggctgggcaggcccattgagggccaccgccgaggtttctcctagggctgttcctgggcctggctcttacaggctcgtcccccaggcctgcccttctccactgccccctcctgtgtctgggtccacacacccttcaggaagggggagcactgagaagcacagcacaggggctcagcctgggatccggtgatggtctgggcagaggctgggtcaggagtcccaaaggtcagtgacagtttctcagaagaggcccagcgtccacctctctcccagggccagacaccccttcctggctcccccatccccctatgggctcccagccccttgcaccctcattgctgttcagattaaagcctctgttttgcacctgtca

SEQ ID NO: 354287 - DNA, 2931 bp, Homo sapiens
atgcgccccgcgcgccccgcactgacatggccgtcgcccgggtccgcgcgtccgccgcgcgccggccgttaataggcttgctccctgagcgccccgcaccgacatggcggccgtcttcgctgtggtgactttaactctcggttttcggttatagccggccggcgctcacttgtcttcaggaagctcggagcctttggtggagccggggagaggaagggtgggtgcaagagtgaaaggcgagaggggactgcaagcatccgggtcggctcctggccggagcaagatggctgagggcgagcggcagccgccgccagattcttcagaggaggcccctccagccactcagaacttcatcattccaaaaaaggagatccacacagttccagacatgggcaaatggaagcgttctcaggcatacgctgactacatcggattcatccttaccctcaacgaaggtgtgaaggggaagaagctgaccttcgagtacagagtctccgaggccattgagaaactagtcgctcttctcaacacgctggacaggtggattgatgagactcctccagtggaccagccctctcggtttgggaataaggcatacaggacctggtatgccaaacttgatgaggaagcagaaaacttggtggccacagtggtccctacccatctggcagctgctgtgcctgaggtggctgtttacctaaaggagtcagtggggaactccacgcgcattgactacggcacagggcatgaggcagccttcgctgctttcctctgctgtctctgcaagattggggtgctccgggtggatgaccaaatagctattgtcttcaaggtgttcaatcggtaccttgaggttatgcggaaactccagaaaacatacaggatggagccagccggcagccagggagtgtggggtctggatgacttccagtttctgcccttcatctggggcagttcgcagctgatagaccacccatacctggagcccagacactttgtggatgagaaggccgtgaatgagaaccacaaggactacatgttcctggagtgtatcctgtttattaccgagatgaagactggcccatttgcagagcactccaaccagctgtggaacatcagcgccgtcccttcctggtccaaagtgaaccagggtctcatccgcatgtataaggccgagtgcctggagaagttccctgtgatccagcacttcaagttcgggagcctgctgcccatccatcctgtcacgtcgggctaggaggggccaagccgaagagccacccaggccacagttcctgtgcctgccttccccaccccagcagtggcccctccccatcccctccctctgttcgtcccgtttgatgagaggctgtttactggggtggggtggcgagatgggcttgagggggctcagagcataaggcttcagggcccaagttgggagaagtgaccaaagtgtagccagttttctgagttcccgtgtgctagactggccagaagagagggtctggggcctggtcactcggccactctctcctgtttctggcctcttctcccttcactcccgtccagtctggttttgagagcaggggctgttctgcagcacctcagggaagggaggagagatacctgctgcttccattgcttttcccttcctggagtcgatgcctttctaagggttggagctgctccttgcaggggcgggtcagtttcccaggccatgccggggtggccatctatgctagggctggaagctgaggctggccgccagctgtgggctggggtggggtgggtggggtcgggtggtggagaggccttagctgtcctggctggtgcccctcccaggctccttttcaccctgccccctgggcctgaggccccctgtgtccaagcctccccctggctcttcagttctctagcccttggctttgctgggtttcctgactgtagccacatctctcccgctccctaagggtaacctagccaatggaagctgccctttgggtaggtgctgggctcctgggagggcccagatgatggggtgaggcatgtctttccagaactttccctggcagggaggggatggcagaaactcagggaggggcttggggcccattgtatctggagagcctggattcctcttggcagtcttaggcccagccacttctgctacctttgcgctgctgtgagcctcaccctgggcccctgggccctgcttctctgctcccctgggtgatgggtgggcccagaaggtggcagtcccacaccttgtcctcccacctccctgaactgtccattgcttttatagggtgaggtaagtgacagcctcccaagcccaggctttggcactcagaatgggcccagtgggggctgggcaggcccattgagggccaccgccgaggtttctcctagggctgttcctgggcctggctcttacaggctcgtcccccaggcctgcccttctccactgccccctcctgtgtctgggtccacacacccttcaggaagggggagcactgagaagcacagcacaggggctcagcctgggatccggtgatggtctgggcagaggctgggtcaggagtcccaaaggtcagtgacagtttctcagaagaggcccagcgtccacctctctcccagggccagacaccccttcctggctcccccatccccctatgggctcccagccccttgcaccctcattgctgttcagattaaagcctctgttttgcacctgtcaaaaaaacacaacccacacagtccgcaggatccaccgctcgctgtcggcggcacaaagcgggtcaatggaaacgcggccgccagggccaacaagcctgtcgccgtgaaccccagccctgtctacaacggcgaacaacccggacggtaccacctataggcacacggaaacatcgcaaccgcacgtacccccctaga

SEQ ID NO: 354288 - DNA, 1943 bp, Homo sapiens
gtcctggagggtcagactctttggcaagagggaggaccaggaatggagccgtccttgtgcctgcctctttcagctgctgtggcggccaccccttccccacctcctggccaggccaggctggctgctgcttcaggcacccctgcctcccatcggccctctcttccctgcctgcatggcaggcagagggctgtcggatacctgggtttggtcatacccaccttggtcctcttgcaaattgaccctttcctcatctcttctagctctgctggtggcagatgaagactggcccatttgcagagcactccaaccagctgtggaacatcagcgccgtcccttcctggtccaaagtgaaccagggtctcatccgcatgtataaggccgagtgcctggagaagttccctgtgatccagcacttcaagttcgggagcctgctgcccatccatcctgtcacgtcgggctaggaggggccaagccgaagagccacccaggccacagttcctgtgcctgccttccccaccccagcagtggcccctccccatcccctccctctgttcgtcccgtttgatgagaggctgtttactggggtggggtggcgagatgggcttgagggggctcagagcataaggcttcagggcccaagttgggagaagtgaccaaagtgtagccagttttctgagttcccgtgtgctagactggccagaagagagggtctggggcctggtcactcggccactctctcctgtttctggcctcttctcccttcactcccgtccagtctggttttgagagcaggggctgttctgcagcacctcagggaagggaggagagatacctgctgcttccattgcttttcccttcctggagtcgatgcctttctaagggttggagctgctccttgcaggggcgggtcagtttcccaggccatgccggggtggccatctatgctagggctggaagctgaggctggccgccagctgtgggctggggtggggtgggtggggtcgggtggtggagaggccttagctgtcctggctggtgcccctcccaggctccttttcaccctgccccctgggcctgaggccccctgtgtccaagcctccccctggctcttcagttctctagcccttggctttgctgggtttcctgactgtagccacatctctcccgctccctaagggtaacctagccaatggaagctgccctttgggtaggtgctgggctcctgggagggcccagatgatggggtgaggcatgtctttccagaactttccctggcagggaggggatggcagaaactcagggaggggcttggggcccattgtatctggagagcctggattcctcttggcagtcttaggcccagccacttctgctacctttgcgctgctgtgagcctcaccctgggcccctgggccctgcttctctgctcccctgggtgatgggtgggcccagaaggtggcagtcccacaccttgtcctcccacctccctgaactgtccattgcttttatagggtgaggtaagtgacagcctcccaagcccaggctttggcactcagaatgggcccagtgggggctgggcaggcccattgagggccaccgccgaggtttctcctagggctgttcctgggcctggctcttacaggctcgtcccccaggcctgcccttctccactgccccctcctgtgtctgggtccacacacccttcaggaagggggagcactgagaagcacagcacaggggctcagcctgggatccggtgatggtctgggcagaggctgggtcaggagtcccaaaggtcagtgacagtttctcagaagaggcccagcgtccacctctctcccagggccagacaccccttcctggctcccccatccccctatgggctcccagccccttgcaccctcattgctgttcagattaaagcctctgttttgcacctgtca

SEQ ID NO: 354289 - DNA, 1812 bp, Homo sapiens
gcgctctgaggctcctggggagtcggtgggaacgacaccagaagctcaggtggagatcttatcttcctgaggctgctggatttggtgggcgataggaatcaggccccctttttttggctgtgggagaaagaggggtgactgcggatgaagactggcccatttgcagagcactccaaccagctgtggaacatcagcgccgtcccttcctggtccaaagtgaaccagggtctcatccgcatgtataaggccgagtgcctggagaagttccctgtgatccagcacttcaagttcgggagcctgctgcccatccatcctgtcacgtcgggctaggaggggccaagccgaagagccacccaggccacagttcctgtgcctgccttccccaccccagcagtggcccctccccatcccctccctctgttcgtcccgtttgatgagaggctgtttactggggtggggtggcgagatgggcttgagggggctcagagcataaggcttcagggcccaagttgggagaagtgaccaaagtgtagccagttttctgagttcccgtgtgctagactggccagaagagagggtctggggcctggtcactcggccactctctcctgtttctggcctcttctcccttcactcccgtccagtctggttttgagagcaggggctgttctgcagcacctcagggaagggaggagagatacctgctgcttccattgcttttcccttcctggagtcgatgcctttctaagggttggagctgctccttgcaggggcgggtcagtttcccaggccatgccggggtggccatctatgctagggctggaagctgaggctggccgccagctgtgggctggggtggggtgggtggggtcgggtggtggagaggccttagctgtcctggctggtgcccctcccaggctccttttcaccctgccccctgggcctgaggccccctgtgtccaagcctccccctggctcttcagttctctagcccttggctttgctgggtttcctgactgtagccacatctctcccgctccctaagggtaacctagccaatggaagctgccctttgggtaggtgctgggctcctgggagggcccagatgatggggtgaggcatgtctttccagaactttccctggcagggaggggatggcagaaactcagggaggggcttggggcccattgtatctggagagcctggattcctcttggcagtcttaggcccagccacttctgctacctttgcgctgctgtgagcctcaccctgggcccctgggccctgcttctctgctcccctgggtgatgggtgggcccagaaggtggcagtcccacaccttgtcctcccacctccctgaactgtccattgcttttatagggtgaggtaagtgacagcctcccaagcccaggctttggcactcagaatgggcccagtgggggctgggcaggcccattgagggccaccgccgaggtttctcctagggctgttcctgggcctggctcttacaggctcgtcccccaggcctgcccttctccactgccccctcctgtgtctgggtccacacacccttcaggaagggggagcactgagaagcacagcacaggggctcagcctgggatccggtgatggtctgggcagaggctgggtcaggagtcccaaaggtcagtgacagtttctcagaagaggcccagcgtccacctctctcccagggccagacaccccttcctggctcccccatccccctatgggctcccagccccttgcaccctcattgctgttcagattaaagcctctgttttgcacctgtca

SEQ ID NO: 354290 - DNA, 3234 bp, Homo sapiens
  misc_feature (2942)..(2942): n is a, c, g, or t
atgcgccccgcgcgccccgcactgacatggccgtcgcccgggtccgcgcgtccgccgcgcgccggccgttaataggcttgctccctgagcgccccgcaccgacatggcggccgtcttcgctgtggtgactttaactctcggttttcggttatagccggccggcgctcacttgtcttcaggaagctcggagcctttggtggagccggggagaggaagggtgggtgcaagagtgaaaggcgagaggggactgcaagcatccgggtcggctcctggccggagcaagatggctgagggcgagcggcagccgccgccagattcttcagaggaggcccctccagccactcagaacttcatcattccaaaaaaggagatccacacagttccagacatgggcaaatggaagcgttctcaggcatacgctgactacatcggattcatccttaccctcaacgaaggtgtgaaggggaagaagctgaccttcgagtacagagtctccgaggccattgagaaactagtcgctcttctcaacacgctggacaggtggattgatgagactcctccagtggaccagccctctcggtttgggaataaggcatacaggacctggtatgccaaacttgatgaggaagcagaaaacttggtggccacagtggtccctacccatctggcagctgctgtgcctgaggtggctgtttacctaaaggagtcagtggggaactccacgcgcattgactacggcacagggcatgaggcagccttcgctgctttcctctgctgtctctgcaagattggggtgctccgggtggatgaccaaatagctattgtcttcaaggtgttcaatcggtaccttgaggttatgcggaaactccagaaaacatacaggatggagccagccggcagccagggagtgtggggtctggatgacttccagtttctgcccttcatctggggcagttcgcagctgatagaccacccatacctggagcccagacactttgtggatgagaaggccgtgaatgagaaccacaaggactacatgttcctggagtgtatcctgtttattaccgagatgaagactggcccatttgcagagcactccaaccagctgtggaacatcagcgccgtcccttcctggtccaaagtgaaccagggtctcatccgcatgtataaggccgagtgcctggagaagttccctgtgatccagcacttcaagttcgggagcctgctgcccatccatcctgtcacgtcgggctaggaggggccaagccgaagagccacccaggccacagttcctgtgcctgccttccccaccccagcagtggcccctccccatcccctccctctgttcgtcccgtttgatgagaggctgtttactggggtggggtggcgagatgggcttgagggggctcagagcataaggcttcagggcccaagttgggagaagtgaccaaagtgtagccagttttctgagttcccgtgtgctagactggccagaagagagggtctggggcctggtcactcggccactctctcctgtttctggcctcttctcccttcactcccgtccagtctggttttgagagcaggggctgttctgcagcacctcagggaagggaggagagatacctgctgcttccattgcttttcccttcctggagtcgatgcctttctaagggttggagctgctccttgcaggggcgggtcagtttcccaggccatgccggggtggccatctatgctagggctggaagctgaggctggccgccagctgtgggctggggtggggtgggtggggtcgggtggtggagaggccttagctgtcctggctggtgcccctcccaggctccttttcaccctgccccctgggcctgaggccccctgtgtccaagcctccccctggctcttcagttctctagcccttggctttgctgggtttcctgactgtagccacatctctcccgctccctaagggtaacctagccaatggaagctgccctttgggtaggtgctgggctcctgggagggcccagatgatggggtgaggcatgtctttccagaactttccctggcagggaggggatggcagaaactcagggaggggcttggggcccattgtatctggagagcctggattcctcttggcagtcttaggcccagccacttctgctacctttgcgctgctgtgagcctcaccctgggcccctgggccctgcttctctgctcccctgggtgatgggtgggcccagaaggtggcagtcccacaccttgtcctcccacctccctgaactgtccattgcttttatagggtgaggtaagtgacagcctcccaagcccaggctttggcactcagaatgggcccagtgggggctgggcaggcccattgagggccaccgccgaggtttctcctagggctgttcctgggcctggctcttacaggctcgtcccccaggcctgcccttctccactgccccctcctgtgtctgggtccacacacccttcaggaagggggagcactgagaagcacagcacaggggctcagcctgggatccggtgatggtctgggcagaggctgggtcaggagtcccaaaggtcagtgacagtttctcagaagaggcccagcgtccacctctctcccagggccagacaccccttcctggctcccccatccccctatgggctcccagccccttgcaccctcattgctgttcagattaaagcctctgttttgcacctgtcataaaaaaaaaaaaaaaaccaccacacaaaaaaaatttgtggggggctggggcctcggaaaagtttttttaaaccactttgtgttggggggcgggggccccatgtggtgtatggtgaacactgtggcacagggggtcccaagaggaaatcggggcctgaacataggggttgggttccctcacccaataaaaaaagcgcgcggcggncaccggcgcgtttgtgaaacaaactcgagatggccgatgggccgagactgggcgcacaccaagaggcccggcggggcgatagataaccggccccgcggcgagtggggcacaacagaaacgaaagagcagcacagaacagacaaaaacgaggaagaccgtacaaaagagaaaaaagacacaccacgaagaagacagagacgacaaacaagacgaaaagaacacaaggaccgagacacgacaaggagcagaggacaacaaaacagaacaaaaaaaagccgaaaagagacgaggt

SEQ ID NO: 354291 - DNA, 2816 bp, Homo sapiens
atgcgccccgcgcgccccgcactgacatggccgtcgcccgggtccgcgcgtccgccgcgcgccggccgttaataggcttgctccctgagcgccccgcaccgacatggcggccgtcttcgctgtggtgactttaactctcggttttcggttatagccggccggcgctcacttgtcttcaggaagctcggagcctttggtggagccggggagaggaagggtgggtgcaagagtgaaaggcgagaggggactgcaagcatccgggtcggctcctggccggagcaagatggctgagggcgagcggcagccgccgccagattcttcagaggaggcccctccagccactcagaacttcatcattccaaaaaaggagatccacacagttccagacatgggcaaatggaagcgttctcaggcatacgctgactacatcggattcatccttaccctcaacgaaggtgtgaaggggaagaagctgaccttcgagtacagagtctccgaggccattgagaaactagtcgctcttctcaacacgctggacaggtggattgatgagactcctccagtggaccagccctctcggtttgggaataaggcatacaggacctggtatgccaaacttgatgaggaagcagaaaacttggtggccacagtggtccctacccatctggcagctgctgtgcctgaggtggctgtttacctaaaggagtcagtggggaactccacgcgcattgactacggcacagggcatgaggcagccttcgctgctttcctctgctgtctctgcaagattggggtgctccgggtggatgaccaaatagctattgtcttcaaggtgttcaatcggtaccttgaggttatgcggaaactccagaaaacatacaggatggagccagccggcagccagggagtgtggggtctggatgacttccagtttctgcccttcatctggggcagttcgcagctgatagaccacccatacctggagcccagacactttgtggatgagaaggccgtgaatgagaaccacaaggactacatgttcctggagtgtatcctgtttattaccgagatgaagactggcccatttgcagagcactccaaccagctgtggaacatcagcgccgtcccttcctggtccaaagtgaaccagggtctcatccgcatgtataaggccgagtgcctggagaagttccctgtgatccagcacttcaagttcgggagcctgctgcccatccatcctgtcacgtcgggctaggaggggccaagccgaagagccacccaggccacagttcctgtgcctgccttccccaccccagcagtggcccctccccatcccctccctctgttcgtcccgtttgatgagaggctgtttactggggtggggtggcgagatgggcttgagggggctcagagcataaggcttcagggcccaagttgggagaagtgaccaaagtgtagccagttttctgagttcccgtgtgctagactggccagaagagagggtctggggcctggtcactcggccactctctcctgtttctggcctcttctcccttcactcccgtccagtctggttttgagagcaggggctgttctgcagcacctcagggaagggaggagagatacctgctgcttccattgcttttcccttcctggagtcgatgcctttctaagggttggagctgctccttgcaggggcgggtcagtttcccaggccatgccggggtggccatctatgctagggctggaagctgaggctggccgccagctgtgggctggggtggggtgggtggggtcgggtggtggagaggccttagctcgtctctcgtgtctggtgtcctggcatggagtaccttgattctactccctgtaggctctcggagatcgtgcagtgagctccactgttggtccacgaaggcccatcgcgccccttgggtctccacttcgagattccatacattagaacaccccttgtgtttgtctggcttggggcttctcgccatgacttgtagcccacatctcatcccgggtgcgccttaagggtaagccgtaggccgaaatagagaaggctgccctttgggtaggtgctgggctcctgggagggcccagatgatggggtgaggcatgtctttccagaactttccctggcagggaggggatggcagaaactcagggaggggcttggggcccattgtatctggagagcctggattcctcttggcagtcttaggcccagccacttctgctacctttgcgctgctgtgagcctcaccctgggcccctgggccctgcttctctgctcccctgggtgatgggtgggcccagaaggtggcagtcccacaccttgtcctcccacctccctgaactgtccattgcttttatagggtgaggtaagtgacagcctcccaagcccaggctttggcactcagaatgggcccagtgggggctgggcaggcccattgagggccaccgccgaggtttctcctagggctgttcctgggcctggctcttacaggctcgtcccccaggcctgcccttctccactgccccctcctgtgtctgggtccacacacccttcaggaagggggagcactgagaagcacagcacaggggctcagcctgggatccggtgatggtctgggcagaggctgggtcaggagtcccaaaggtcagtgacagtttctcagaagaggcccagcgtccacctctctcccagggccagacaccccttcctggctcccccatccccctatgggctcccagccccttgcaccctcattgctgttcagattaaagcctctgttttgcacctgtca

SEQ ID NO: 354292 - DNA, 1823 bp, Homo sapiens
gaaggaacagggaggggagggcgtgcctagagttgttggctgttccgcaccttctccacaggtccgggttttcactttgggtctaggctcttgggcatggtgttcaacagtagaccctaggaggagtgtgcccaggagccggggtggctgcagcaagggcccatcttgccacgtggccgctggttgcagcacacgttgtgttggttctccagagcgcccaccctcttccacctcggagcagtgagcagcattttgcagtccctagttgatgaagactggcccatttgcagagcactccaaccagctgtggaacatcagcgccgtcccttcctggtccaaagtgaaccagggtctcatccgcatgtataaggccgagtgcctggagaagttccctgtgatccagcacttcaagttcgggagcctgctgcccatccatcccgtttgatgagaggctgtttactggggtggggtggcgagatgggcttgagggggctcagagcataaggcttcagggcccaagttgggagaagtgaccaaagtgtagccagttttctgagttcccgtgtgctagactggccagaagagagggtctggggcctggtcactcggccactctctcctgtttctggcctcttctcccttcactcccgtccagtctggttttgagagcaggggctgttctgcagcacctcagggaagggaggagagatacctgctgcttccattgcttttcccttcctggagtcgatgcctttctaagggttggagctgctccttgcaggggcgggtcagtttcccaggccatgccggggtggccatctatgctagggctggaagctgaggctggccgccagctgtgggctggggtggggtgggtggggtcgggtggtggagaggccttagctgtcctggctggtgcccctcccaggctccttttcaccctgccccctgggcctgaggccccctgtgtccaagcctccccctggctcttcagttctctagcccttggctttgctgggtttcctgactgtagccacatctctcccgctccctaagggtaacctagccaatggaagctgccctttgggtaggtgctgggctcctgggagggcccagatgatggggtgaggcatgtctttccagaactttccctggcagggaggggatggcagaaactcagggaggggcttggggcccattgtatctggagagcctggattcctcttggcagtcttaggcccagccacttctgctacctttgcgctgctgtgagcctcaccctgggcccctgggccctgcttctctgctcccctgggtgatgggtgggcccagaaggtggcagtcccacaccttgtcctcccacctccctgaactgtccattgcttttatagggtgaggtaagtgacagcctcccaagcccaggctttggcactcagaatgggcccagtgggggctgggcaggcccattgagggccaccgccgaggtttctcctagggctgttcctgggcctggctcttacaggctcgtcccccaggcctgcccttctccactgccccctcctgtgtctgggtccacacacccttcaggaagggggagcactgagaagcacagcacaggggctcagcctgggatccggtgatggtctgggcagaggctgggtcaggagtcccaaaggtcagtgacagtttctcagaagaggcccagcgtccacctctctcccagggccagacaccccttcctggctcccccatccccctatgggctcccagccccttgcaccctcattgctgttcagattaaagcctctgttttgcacctgtca

SEQ ID NO: 354293 - DNA, 2635 bp, Homo sapiens
atgcgccccgcgcgccccgcactgacatggccgtcgcccgggtccgcgcgtccgccgcgcgccggccgttaataggcttgctccctgagcgccccgcaccgacatggcggccgtcttcgctgtggtgactttaactctcggttttcggttatagccggccggcgctcacttgtcttcaggaagctcggagcctttggtggagccggggagaggaagggtgggtgcaagagtgaaaggcgagaggggactgcaagcatccgggtcggctcctggccggagcaagatggctgagggcgagcggcagccgccgccagattcttcagaggaggcccctccagccactcagaacttcatcattccaaaaaaggagatccacacagttccagacatgggcaaatggaagcgttctcaggcatacgctgactacatcggattcatccttaccctcaacgaaggtgtgaaggggaagaagctgaccttcgagtacagagtctccgaggccattgagaaactagtcgctcttctcaacacgctggacaggtggattgatgagactcctccagtggaccagccctctcggtttgggaataaggcatacaggacctggtatgccaaacttgatgaggaagcagaaaacttggtggccacagtggtccctacccatctggcagctgctgtgcctgaggtggctgtttacctaaaggagtcagtggggaactccacgcgcattgactacggcacagggcatgaggcagccttcgctgctttcctctgctgtctctgcaagattggggtgctccgggtggatgaccaaatagctattgtcttcaaggtgttcaatcggtaccttgaggttatgcggaaactccagaaaacatacaggatggagccagccggcagccagggagtgtggggtctggatgacttccagtttctgcccttcatctggggcagttcgcagctgatagaccacccatacctggagcccagacactttgtggatgagaaggccgtgaatgagaaccacaaggactacatgttcctggagtgtatcctgtttattaccgagatgaagactggcccatttgcagagcactccaaccagctgtggaacatcagcgccgtcccttcctggtccaaagtgaaccagggtctcatccgcatgtataaggccgagtgcctggagaagttccctgtgatccagcacttcaagttcgggagcctgctgcccatccatcctgtcacgtcgggctaggaggggccaagccgaagagccacccaggccacagttcctgtgcctgccttccccaccccagcagtggcccctccccatcccctccctctgttcgtcccgtttgatgagaggctgtttactggggtggggtggcgagatgggcttgagggggctcagagcataaggcttcagggcccaagttgggagaagtgaccaaagtgtagccagttttctgagttcccgtgtgctagactggccagaagagagggtctggggcctggtcactcggccactctctcctgtttctggcctcttctcccttcactcccgtccagtctggttttgagagcaggggctgttctgcagcacctcagggaagggaggagagatacctgctgcttccattgcttttcccttcctggagtcgatgcctttctaagggttggagctgctccttgcaggggcgggtcagtttcccaggccatgccggggtggccatctatgctagggctggaagctgaggctggccgccagctgtgggctggggtggggtgggtggggtcgggtggtggagaggccttagctgtcctggctggtgcccctcccaggctccttttcaccctgccccctgggcctgaggccccctgtgtccaagcctccccctggctcttcagttctctagcccttggctttgctgggtttcctgactgtagccacatctctcccgctccctaagggtaacctagccaatggaagctgccctttgggtaggtgctgggctcctgggagggcccagatgatggggtgaggcatgtctttccagaactttccctggcagggaggggatggcagaaactcagggaggggcttggggcccattgtatctggagagcctggattcctcttggcagtcttaggcccagccacttctgctacctttgcgctgctgtgagcctcaccctgggcccctgggccctgcttctctgctcccctgggtgatgggtgggcccagaaggtggcagtcccacaccttgtcctcccacctccctgaactgtccattgcttttatagggtgaggtaagtgacagcctcccaagcccaggctttggcactcagaatgggcccagtgggggctgggcaggcccattgagggccaccgccgaggtttctcctctgtgctgtcacagcacagaggaggacactaccccaagaaagaccctgcgcctccagaggtcctccgtagggtctttcttgggatagtgttctgctcctgcttttctgtcctgggcatgggtccagggcctgacaccccctcagaggagccagtgtaccacagcattgtgtaaaaacgagtaaggcaaataataagaaatccgccagcccctccctcctctgtgctgt

SEQ ID NO: 354294 - DNA, 1609 bp, Homo sapiens
atgcgccccgcgcgccccgcactgacatggccgtcgcccgggtccgcgcgtccgccgcgcgccggccgttaataggcttgctccctgagcgccccgcaccgacatggcggccgtcttcgctgtggtgactttaactctcggttttcggttatagccggccggcgctcacttgtcttcaggaagctcggagcctttggtggagccggggagaggaagggtgggtgcaagagtgaaaggcgagaggggactgcaagcatccgggtcggctcctggccggagcaagatggctgagggcgagcggcagccgccgccagattcttcagaggaggcccctccagccactcagaacttcatcattccaaaaaaggagatccacacagttccagacatgggcaaatggaagcgttctcaggcatacgctgactacatcggattcatccttaccctcaacgaaggtgtgaaggggaagaagctgaccttcgagtacagagtctccgaggccattgagaaactagtcgctcttctcaacacgctggacaggtggattgatgagactcctccagtggaccagccctctcggtttgggaataaggcatacaggacctggtatgccaaacttgatgaggaagcagaaaacttggtggccacagtggtccctacccatctggcagctgctgtgcctgaggtggctgtttacctaaaggagtcagtggggaactccacgcgcattgactacggcacagggcatgaggcagccttcgctgctttcctctgctgtctctgcaagattggggtgctccgggtggatgaccaaatagctattgtcttcaaggtgttcaatcggtaccttgaggttatgcggaaactccagaaaacatacaggatggagccagccggcagccagggagtgtggggtctggatgacttccagtttctgcccttcatctggggcagttcgcagctgatagaccacccatacctggagcccagacactttgtggatgagaaggccgtgaatgagaaccacaaggactacatgttcctggagtgtatcctgtttattaccgagatgaagactggcccatttgcagagcactccaaccagctgtggaacatcagcgccgtcccttcctggtccaaagtgaaccagggtctcatccgcatgtataaggccgaggtgagtgggggctggccagtgtgcccgtccctgctgccgcacttggtcctgggctggggacaaagcaaaagatgtggaacctggggctcctgcttcctcctaccccactgttttgctctgaatcttaggccagcccctctgacacttggggcctcggaatctcccatctggggcatgggcagtcagagaagcaccagccaccccagccccgaaaagctgcagtccagctctgtcctgatgagcttggaggctgaggcaaggacctgctgcatggggagtgggggcgatgggggcctcccttctcctttatcaagtggccaaaggctcctcaaagctcgggcagtctgagtctggctctcccatggcatacctgggaagggtcttaccctttggaggcatctccaaagtgctgccttcaaatgttagtgtgta

SEQ ID NO: 354295 - DNA, 624 bp, Homo sapiens
atgcgccccgcgcgccccgcactgacatggccgtcgcccgggtccgcgcgtccgccgcgcgccggccgttaataggcttgctccctgagcgccccgcaccgacatggcggccgtcttcgctgtggtgactttaactctcggttttcggttatagccggccggcgctcacttgtcttcaggaagctcggagcctttggtggagccggggagaggaagggtgggtgcaagagtgaaaggcgagaggggactgcaagcatccgggtcggctcctggccggagcaagatggctgagggcgagcggcagccgccgccagattcttcagaggaggcccctccagccactcagaacttcatcattccaaaaaaggagatccacacagttccagacatgggcaaatggaagcgttctcaggcatacgctgactacatcggattcatccttaccctcaacgaaggtgtgaaggggaagaagctgaccttcgagtacagagtctccgaggccattgagaaactagtcgctcttctcaacacgctggacaggtggattgatgagactcctccagtggaccagccccttgcaccctcattgctgttcagattaaagcctctgttttgcacctgtca

SEQ ID NO: 354296 - DNA, 261 bp, Homo sapiens
gactcgtagaggatccccattcgtgctggtgctagcactgagaagcacagcacaggggctcagcctgggatccggtgatggtctgggcagaggctgggtcaggagtcccaaaggtcagtgacagtttctcagaagaggcccagcgtccacctctctcccagggccagacaccccttcctggctcccccatccccctatgggctcccagccccttgcaccctcattgctgttcagattaaagcctctgttttgcacctgtca

SEQ ID NO: 354297 - DNA, 308 bp, Homo sapiens
ccatagcattgtgtatgaaataggtagtgaaacaggtggaaataacccaaacatttaacagtgaggaattaaattaattataatgcagtggcacgatgaaatgttattcacttagtaaaagttgtcataagattatgtttatatgtagatgtggaatgaggttcatgaggaaaaggagcaggctgcaaagcagagtgtgtcctgcgatgaatgcataccattaccccgcgccgggcactgtgcaccttcggaggtatttatcatcagccccattttttagacgaagaaactgagaggctcagagttag

SEQ ID NO: 354298 - DNA, 1545 bp, Homo sapiens
  misc_feature (56)..(56): n is a, c, g, or t
  misc_feature (527)..(527): n is a, c, g, or t
  misc_feature (594)..(594): n is a, c, g, or t
tctcctattttcactgtggggcgtttttttctctctgctagcctcctgatgtaggngcgcacaatcattctttgttgttcttcaccggcggctgcttccccctataaaagtgaggttaaataccctcttggtctcccatcctggggagaatagccgtgctgcccccctctttcggcggttatatagggcttgcccttggagggcctttcactctatggggggaagggggggccccccacataaatttggaataattgtggggcttttgaatgagatccatcatcgtttcctctttctttcacgcagcgggaaaacacttcttgtgttctccccccttcgcggcctctacagtggagataaagaccgtgggggtaatttcgcgccctaggaaatataaaatcctttccatcaagggcggaaaatgagggggggccctctttttggggggggggccccccacactatgtgggttaatatcttggcgcagggtgagcccctccctcgcgggaatatgttgccgcctctcntgtttggggcccaccactttctttttaatgggcgcccccggccgccgcaccaccacttttgtctggnccataaaacaccttctttggtgcccgctcttggtgtctcttgttggaagaggccgccttgcacaacaccccttcgggggggcccccaccttggggggcgcccctccggcgttgtttcttatctttgacttttcccccaccttcgggggtatgatattagcggtgtttggggggcgccccacacgagaaaacttgttggtgcggccacaagttgtcgcaacacaccaccacacctcttgtgtgcttcgtctcgccaacactcttcgtcccccgttgagaccctcggtgcccacatatcgcgtcttataatataaagggcgtgtgaaagggtataatagagagacacacacgcgctctcccacaaggccccacagagccttttggggcgacacatacacaggagaaatcggggcgccccacagctctgggggcgtctttgggcgcacagggcgccactctgggagagggcgcacccccgccctgagaggtgttttctccctctataggggcgtctgtgttctctctggcgcctctggcgttctgtacaccagggtgttctgttccccctcacgggcgctctgccctcttcttccacacttgcgcccccttctctcttgttgttcttgggtgcacacacaacacacacctctctcacaggagaagggggagagcacactcgagagagaagcaccacagcaacacgggggtctctcacagcctcgggaattcccggtggatggttctgggcacagaaggctgggttacaggagagtccccacaaaggtcacagtagacacgttgttctcaagaaagaaggcccacgcgtgccacacctcttcttcccacagggccacagaacaaccccttcctggctcccccatccccctatgggctcccagccccttgcaccctcattgctgttcagattaaagcctctgttttgcacctgtca

SEQ ID NO: 354299 - DNA, 1815 bp, Homo sapiens
atcagatttcagctggaagggaaggagctgacaggaaggcgctgtgcagagcctccccacccccgcccatccccccagttactgacagaggagccatttacaaaaggccgattctctggggagtggagaggcaggaacgcagcgtctatgaagactggcccatttgcagagcactccaaccagctgtggaacatcagcgccgtcccttcctggtccaaagtgaaccagggtctcatccgcatgtataaggccgagtgcctggagaagttccctgtgatccagcacttcaagttcgggagcctgctgcccatccatcctgtcacgtcgggctaggaggggccaagccgaagagccacccaggccacagttcctgtgcctgccttccccaccccagcagtggcccctccccatcccctccctctgttcgtcccgtttgatgagaggctgtttactggggtggggtggcgagatgggcttgagggggctcagagcataaggcttcagggcccaagttgggagaagtgaccaaagtgtagccagttttctgagttcccgtgtgctagactggccagaagagagggtctggggcctggtcactcggccactctctcctgtttctggcctcttctcccttcactcccgtccagtctggttttgagagcaggggctgttctgcagcacctcagggaagggaggagagatacctgctgcttccattgcttttcccttcctggagtcgatgcctttctaagggttggagctgctccttgcaggggcgggtcagtttcccaggccatgccggggtggccatctatgctagggctggaagctgaggctggccgccagctgtgggctggggtggggtgggtggggtcgggtggtggagaggccttagctgtcctggctggtgcccctcccaggctccttttcaccctgccccctgggcctgaggccccctgtgtccaagcctccccctggctcttcagttctctagcccttggctttgctgggtttcctgactgtagccacatctctcccgctccctaagggtaacctagccaatggaagctgccctttgggtaggtgctgggctcctgggagggcccagatgatggggtgaggcatgtctttccagaactttccctggcagggaggggatggcagaaactcagggaggggcttggggcccattgtatctggagagcctggattcctcttggcagtcttaggcccagccacttctgctacctttgcgctgctgtgagcctcaccctgggcccctgggccctgcttctctgctcccctgggtgatgggtgggcccagaaggtggcagtcccacaccttgtcctcccacctccctgaactgtccattgcttttatagggtgaggtaagtgacagcctcccaagcccaggctttggcactcagaatgggcccagtgggggctgggcaggcccattgagggccaccgccgaggtttctcctagggctgttcctgggcctggctcttacaggctcgtcccccaggcctgcccttctccactgccccctcctgtgtctgggtccacacacccttcaggaagggggagcactgagaagcacagcacaggggctcagcctgggatccggtgatggtctgggcagaggctgggtcaggagtcccaaaggtcagtgacagtttctcagaagaggcccagcgtccacctctctcccagggccagacaccccttcctggctcccccatccccctatgggctcccagccccttgcaccctcattgctgttcagattaaagcctctgttttgcacctgtca

SEQ ID NO: 354300 - DNA, 2744 bp, Homo sapiens
atgcgccccgcgcgccccgcactgacatggccgtcgcccgggtccgcgcgtccgccgcgcgccggccgttaataggcttgctccctgagcgccccgcaccgacatggcggccgtcttcgctgtggtgactttaactctcggttttcggttatagccggccggcgctcacttgtcttcaggaagctcggagcctttggtggagccggggagaggaagggtgggtgcaagagtgaaaggcgagaggggactgcaagcatccgggtcggctcctggccggagcaagatggctgagggcgagcggcagccgccgccaggcatacgctgactacatcggattcatccttaccctcaacgaaggtgtgaaggggaagaagctgaccttcgagtacagagtctccgagatgtggaatgaggttcatgaggaaaaggagcaggctgcaaagcagagtgtgtcctgcgatgaatgcataccattaccccgcgccgggcactgtgcaccttcggaggccattgagaaactagtcgctcttctcaacacgctggacaggtggattgatgagactcctccagtggaccagccctctcggtttgggaataaggcatacaggacctggtatgccaaacttgatgaggaagcagaaaacttggtggccacagtggtccctacccatctggcagctgctgtgcctgaggtggctgtttacctaaaggagtcagtggggaactccacgcgcattgactacggcacagggcatgaggcagccttcgctgctttcctctgctgtctctgcaagattggggtgctccgggtggatgaccaaatagctattgtcttcaaggtgttcaatcggtaccttgaggttatgcggaaactccagaaaacatacaggatggagccagccggcagccagggagtgtggggtctggatgacttccagtttctgcccttcatctggggcagttcgcagctgatagaccacccatacctggagcccagacactttgtggatgagaaggccgtgaatgagaaccacaaggactacatgttcctggagtgtatcctgtttattaccgagatgaagactggcccatttgcagagcactccaaccagctgtggaacatcagcgccgtcccttcctggtccaaagtgaaccagggtctcatccgcatgtataaggccgagtgcctggagaagttccctgtgatccagcacttcaagttcgggagcctgctgcccatccatcctgtcacgtcgggctaggaggggccaagccgaagagccacccaggccacagttcctgtgcctgccttccccaccccagcagtggcccctccccatcccctccctctgttcgtcccgtttgatgagaggctgtttactggggtggggtggcgagatgggcttgagggggctcagagcataaggcttcagggcccaagttgggagaagtgaccaaagtgtagccagttttctgagttcccgtgtgctagactggccagaagagagggtctggggcctggtcactcggccactctctcctgtttctggcctcttctcccttcactcccgtccagtctggttttgagagcaggggctgttctgcagcacctcagggaagggaggagagatacctgctgcttccattgcttttcccttcctggagtcgatgcctttctaagggttggagctgctccttgcaggggcgggtcagtttcccaggccatgccggggtggccatctatgctagggctggaagctgaggctggccgccagctgtgggctggggtggggtgggtggggtcgggtggtggagaggccttagctgtcctggctggtgcccctcccaggctccttttcaccctgccccctgggcctgaggccccctgtgtccaagcctccccctggctcttcagttctctagcccttggctttgctgggtttcctgactgtagccacatctctcccgctccctaagggtaacctagccaatggaagctgccctttgggtaggtgctgggctcctgggagggcccagatgatggggtgaggcatgtctttccagaactttccctggcagggaggggatggcagaaactcagggaggggcttggggcccattgtatctggagagcctggattcctcttggcagtcttaggcccagccacttctgctacctttgcgctgctgtgagcctcaccctgggcccctgggccctgcttctctgctcccctgggtgatgggtgggcccagaaggtggcagtcccacaccttgtcctcccacctccctgaactgtccattgcttttatagggtgaggtaagtgacagcctcccaagcccaggctttggcactcagaatgggcccagtgggggctgggcaggcccattgagggccaccgccgaggtttctcctagggctgttcctgggcctggctcttacaggctcgtcccccaggcctgcccttctccactgccccctcctgtgtctgggtccacacacccttcaggaagggggagcactgagaagcacagcacaggggctcagcctgggatccggtgatggtctgggcagaggctgggtcaggagtcccaaaggtcagtgacagtttctcagaagaggcccagcgtccacctctctcccagggccagacaccccttcctggctcccccatccccctatgggctcccagccccttgcaccctcattgctgttcagattaaagcctctgttttgcacctgtca

SEQ ID NO: 354301 - DNA, 1717 bp, Homo sapiens
gcgctctgaggctcctggggagtcggtgggaacgacaccagaagctcagatgaagactggcccatttgcagagcactccaaccagctgtggaacatcagcgccgtcccttcctggtccaaagtgaaccagggtctcatccgcatgtataaggccgagtgcctggagaagttccctgtgatccagcacttcaagttcgggagcctgctgcccatccatcctgtcacgtcgggctaggaggggccaagccgaagagccacccaggccacagttcctgtgcctgccttccccaccccagcagtggcccctccccatcccctccctctgttcgtcccgtttgatgagaggctgtttactggggtggggtggcgagatgggcttgagggggctcagagcataaggcttcagggcccaagttgggagaagtgaccaaagtgtagccagttttctgagttcccgtgtgctagactggccagaagagagggtctggggcctggtcactcggccactctctcctgtttctggcctcttctcccttcactcccgtccagtctggttttgagagcaggggctgttctgcagcacctcagggaagggaggagagatacctgctgcttccattgcttttcccttcctggagtcgatgcctttctaagggttggagctgctccttgcaggggcgggtcagtttcccaggccatgccggggtggccatctatgctagggctggaagctgaggctggccgccagctgtgggctggggtggggtgggtggggtcgggtggtggagaggccttagctgtcctggctggtgcccctcccaggctccttttcaccctgccccctgggcctgaggccccctgtgtccaagcctccccctggctcttcagttctctagcccttggctttgctgggtttcctgactgtagccacatctctcccgctccctaagggtaacctagccaatggaagctgccctttgggtaggtgctgggctcctgggagggcccagatgatggggtgaggcatgtctttccagaactttccctggcagggaggggatggcagaaactcagggaggggcttggggcccattgtatctggagagcctggattcctcttggcagtcttaggcccagccacttctgctacctttgcgctgctgtgagcctcaccctgggcccctgggccctgcttctctgctcccctgggtgatgggtgggcccagaaggtggcagtcccacaccttgtcctcccacctccctgaactgtccattgcttttatagggtgaggtaagtgacagcctcccaagcccaggctttggcactcagaatgggcccagtgggggctgggcaggcccattgagggccaccgccgaggtttctcctagggctgttcctgggcctggctcttacaggctcgtcccccaggcctgcccttctccactgccccctcctgtgtctgggtccacacacccttcaggaagggggagcactgagaagcacagcacaggggctcagcctgggatccggtgatggtctgggcagaggctgggtcaggagtcccaaaggtcagtgacagtttctcagaagaggcccagcgtccacctctctcccagggccagacaccccttcctggctcccccatccccctatgggctcccagccccttgcaccctcattgctgttcagattaaagcctctgttttgcacctgtca

SEQ ID NO: 354302 - DNA, 2499 bp, Homo sapiens
ggaggttaagatcacagccacagagtgaggctcttactctctctgaggccataagtcttgttccaccccagccaggaggtgcctaacatactctgttttctgtggccaaaggtgtgggaggaggccctggtcagtcttggcagatccaaccctcgcatgcccagaacggctcctgtgagagctagtgtccaggtgtggcaggcatgggggtgctgttgcgggagctgcagctggaagctggggttggctgcctgtgggccaggccagcttctgtgataggccctgtcacttgctctccagctctgctcctctgctaggagcccgggctgggctgggctcagggagtcgggcctcccccgtgctcagccattcccctgttcagcgctctttttcccctgccccccacacaggctgctgggaattgcccaggggtggggggaactcagtgtcagctggttcttattgtctcgctctgaagtgccaagatgcctttttcagtccagagaactgaaagctggagaaaacaggctttgggacccggcctcagcctcttaggcttacgttcaaatgtccccacgtctcttctctagaactgggacctgggctgggggtccccagtgatcaggagggttctttccacctcaggttcccaacttccctctctgggccaagtgatggcacctggctgcctctcttctcggtttctaccttgtaggtttgggctgccttttctctttctctctctcgtgggtctcgttgtggagtgggtgtctttggatagaaggagtgaggaactgggggaggaaggcctgggggatcccctggcggggctacttcctgggcccgggatggacacctgggagctgctgcggttgttggggtcctggcaggggtgtggtgtggccctcaccactctgctcacctgctccttcctcacagtgcctggagaagttccctgtgatccagcacttcaagttcgggagcctgctgcccatccatcctgtcacgtcgggctaggaggggccaagccgaagagccacccaggccacagttcctgtgcctgccttccccaccccagcagtggcccctccccatcccctccctctgttcgtcccgtttgatgagaggctgtttactggggtggggtggcgagatgggcttgagggggctcagagcataaggcttcagggcccaagttgggagaagtgaccaaagtgtagccagttttctgagttcccgtgtgctagactggccagaagagagggtctggggcctggtcactcggccactctctcctgtttctggcctcttctcccttcactcccgtccagtctggttttgagagcaggggctgttctgcagcacctcagggaagggaggagagatacctgctgcttccattgcttttcccttcctggagtcgatgcctttctaagggttggagctgctccttgcaggggcgggtcagtttcccaggccatgccggggtggccatctatgctagggctggaagctgaggctggccgccagctgtgggctggggtggggtgggtggggtcgggtggtggagaggccttagctgtcctggctggtgcccctcccaggctccttttcaccctgccccctgggcctgaggccccctgtgtccaagcctccccctggctcttcagttctctagcccttggctttgctgggtttcctgactgtagccacatctctcccgctccctaagggtaacctagccaatggaagctgccctttgggtaggtgctgggctcctgggagggcccagatgatggggtgaggcatgtctttccagaactttccctggcagggaggggatggcagaaactcagggaggggcttggggcccattgtatctggagagcctggattcctcttggcagtcttaggcccagccacttctgctacctttgcgctgctgtgagcctcaccctgggcccctgggccctgcttctctgctcccctgggtgatgggtgggcccagaaggtggcagtcccacaccttgtcctcccacctccctgaactgtccattgcttttatagggtgaggtaagtgacagcctcccaagcccaggctttggcactcagaatgggcccagtgggggctgggcaggcccattgagggccaccgccgaggtttctcctagggctgttcctgggcctggctcttacaggctcgtcccccaggcctgcccttctccactgccccctcctgtgtctgggtccacacacccttcaggaagggggagcactgagaagcacagcacaggggctcagcctgggatccggtgatggtctgggcagaggctgggtcaggagtcccaaaggtcagtgacagtttctcagaagaggcccagcgtccacctctctcccagggccagacaccccttcctggctcccccatccccctatgggctcccagccccttgcaccctcattgctgttcagattaaagcctctgttttgcacctgtca

SEQ ID NO: 354303 - DNA, 2739 bp, Homo sapiens
atgcgccccgcgcgccccgcactgacatggccgtcgcccgggtccgcgcgtccgccgcgcgccggccgttaataggcttgctccctgagcgccccgcaccgacatggcggccgtcttcgctgtggtgactttaactctcggttttcggttatagccggccggcgctcacttgtcttcaggaagctcggagcctttggtggagccggggagaggaagggtgggtgcaagagtgaaaggcgagaggggactgcaagcatccgggtcggctcctggccggagcaagatggctgagggcgagcggcagccgccgccagattcttcagaggaggcccctccagccactcagaacttcatcattccaaaaaaggagatccacacagttccagacatgggcaaatggaagcgttctcaggcatacgctgactacatcggattcatccttaccctcaacgaaggtgtgaaggggaagaagctgaccttcgagtacagagtctccgaggccattgagaaactagtcgctcttctcaacacgctggacaggtggattgatgagactcctccagtggaccagccctctcggtttgggaataaggcatacaggacctggtatgccaaacttgatgaggaagcagaaaacttggtggccacagtggtccctacccatctggcagctgctgtgcctgaggtggctgtttacctaaaggagtcagtggggaactccacgcgcattgactacggcacagggcatgaggcagccttcgctgctttcctctgctgtctctgcaagattggggtgctccgggtggatgaccaaatagctattgtcttcaaggtgttcaatcggtaccttgaggttatgcggaaactccagaaaacatacaggatggagccagccggcagccagggagtgtggggtctggatgacttccagtttctgcccttcatctggggcagttcgcagctgatagaccacccatacctggagcccagacactttgtggatgagaaggccgtgaatgagaaccacaaggactacatgttcctggagtgtatcctgtttattaccgagatgaagactggcccatttgcagagcactccaaccagctgtggaacatcagcgccgtcccttcctggtccaaagtgaaccagggtctcatccgcatgtataaggccgagtgcctggagaagttccctgtgatccagcacttcaagttcgggagcctgctgcccatccatcctgtcacgtcgggctaggaggggccaagccgaagagccacccaggccacagttcctgtgcctgccttccccaccccagcagtggcccctccccatcccctccctctgttcgtcccgtttgatgagaggctgtttactggggtggggtggcgagatgggcttgagggggctcagagcataaggcttcagggcccaagttgggagaagtgaccaaagtgtagccagttttctgagttcccgtgtgctagactggccagaagagagggtctggggcctggtcactcggccactctctcctgtttctggcctcttctcccttcactcccgtccagtctggttttgagagcaggggctgttctgcagcacctcagggaagggaggagagatacctgctgcttccattgcttttcccttcctggagtcgatgcctttctaagggttggagctgctccttgcaggggcgggtcagtttcccaggccatgccggggtggccatctatgctagggctggaagctgaggctggccgccagctgtgggctggggtggggtgggtggggtcgggtggtggagaggccttagctgtcctggctggtgcccctcccaggctccttttcaccctgccccctgggcctgaggccccctgtgtccaagcctccccctggctcttcagttctctagcccttggctttgctgggtttcctgactgtagccacatctctcccgctccctaagggtaacctagccaatggaagctgccctttgggtaggtgctgggctcctgggagggcccagatgatggggtgaggcatgtctttccagaactttccctggcagggaggggatggcagaaactcagggaggggcttggggcccattgtatctggagagcctggattcctcttggcagtcttaggcccagccacttctgctacctttgcgctgctgtgagcctcaccctgggcccctgggccctgcttctctgctcccctgggtgatgggtgggcccagaaggtggcagtcccacaccttgtcctcccacctccctgaactgtccattgcttttatagggtgaggtaagtgacagcctcccaagcccaggctttggcactcagaatgggcccagtgggggctgggcaggcccattgagggccaccgccgaggtttctcctagggctgttcctgggcctggctcttacaggctcgtcccccaggcctgcccttctccactgccccctcctgtgtctgggtccacacacccttcaggaagggggagcactgagaagcacagcacaggggctcagcctgggatccggtgatggtctgggcagaggctgggtcaggagtcccaaaggtcagtgacagtttctcagaagaggcccagcgtccacctctctcccagggccagacaccccttcctggctcccccatccccctatgggctcccagcccctgcactataacttccgttggcgtgttcaagttaccctgggtttcgccccct

SEQ ID NO: 354304 - DNA, 2308 bp, Homo sapiens
atgcgccccgcgcgccccgcactgacatggccgtcgcccgggtccgcgcgtccgccgcgcgccggccgttaataggcttgctccctgagcgccccgcaccgacatggcggccgtcttcgctgtggtgactttaactctcggttttcggttatagccggccggcgctcacttgtcttcaggaagctcggagcctttggtggagccggggagaggaagggtgggtgcaagagtgaaaggcgagaggggactgcaagcatccgggtcggctcctggccggagcaagatggctgagggcgagcggcagccgccgccagattcttcagaggaggcccctccagccactcagaacttcatcattccaaaaaaggagatccacacagttccagacatgggcaaatggaagcgttctcaggcatacgctgactacatcggattcatccttaccctcaacgaaggtgtgaaggggaagaagctgaccttcgagtacagagtctccgaggccattgagaaactagtcgctcttctcaacacgctggacaggtggattgatgagactcctccagtggaccagccctctcggtttgggaataaggcatacaggacctggtatgccaaacttgatgaggaagcagaaaacttggtggccacagtggtccctacccatctggcagctgctgtgcctgaggtggctgtttacctaaaggagtcagtggggaactccacgcgcattgactacggcacagggcatgaggcagccttcgctgctttcctctgctgtctctgcaagattggggtgctccgggtggatgaccaaatagctattgtcttcaaggtgttcaatcggtaccttgaggttatgcggaaactccagaaaacatacaggatggagccagccggcagccagggagtgtggggtctggatgacttccagtttctgcccttcatctggggcagttcgcagctgatagaccacccatacctggagcccagacactttgtggatgagaaggccgtgaatgagaaccacaaggactacatgttcctggagtgtatcctgtttattaccgagatgaagactggcccatttgcagagcactccaaccagctgtggaacatcagcgccgtcccttcctggtccaaagtgaaccagggtctcatccgcatgtataaggccgagtgcctggagaagttccctgtgatccagcacttcaagttcgggagcctgctgcccatccatcctgtcacgtcgggctaggaggggccaagccgaagagccacccaggccacagttcctgtgcctgccttccccaccccagcagtggcccctccccatcccctccctctgttcgtcccgtttgatgagaggctgtttactggggtggggtggcgagatgggcttgagggggctcagagcataaggcttcagggcccaagttgggagaagtgaccaaagtgtagccagttttctgagttcccgtgtgctagactggccagaagagagggtctggggcctggtcactcggccactctctcctgtttctggcctcttctcccttcactcccgtccagtctggttttgagagcaggggctgttctgcagcacctcagggaagggaggagagatacctgctgcttccattgcttttcccttcctggagtcgatgcctttctaagggttggagctgctccttgcaggggcgggtcagtttcccaggccatgccggggtggccatctatgctagggctggaagctgaggctggccgccagctgtgggctggggtggggtgggtggggtcgggtggtggagaggccttagctgtcctggctggtgcccctcccaggctccttttcaccctgccccctgggcctgaggccccctgtgtccaagcctccccctggctcttcagttctctagcccttggctttgctgggtttcctgactgtagccacatctctcccgctccctaagggtaacctagccaatggaagctgccctttgggtaggtgctgggctcctgggagggcccagatgatggggtgaggcatgtctttccagaactttccctggcagggaggggatggcagaaactcagggaggggcttggggcccattgtatccggtgatggtctgggcagaggctgggtcaggagtcccaaaggtcagtgacagtttctcagaagaggcccagcgtccacctctctcccagggccagacaccccttcctggctcccccatccccctatgggctcccagccccttgcaccctcattgctgttcagattaaagcctctgttttgcacctgtca

SEQ ID NO: 354305 - DNA, 414 bp, Homo sapiens
gggagagtgaagtcagatgaaagtgggttctacccaggtttcagaaggcaaaataaaacaaaataaagtgggttgaagattgaaaggatataaaggtagaagagacaactcatgtgtctgcccttggataggtgcagaataatgggagagtgattggaaaggaatgtgggatagagaaaaattttaaagaacatgtttatataatgataaaaaataatccagtattgaaagagcaatagatggtgcgtgaaagagaggagagaacaaggagaacataacttgagctggcaaaaagaattgagatctagatctctgaaaaattagttacccttcccaaggacctagtgtttaatatcataacgcctccccagcatcccacttctgatctttctgtaggggaaagaaaatgcatca

SEQ ID NO: 354306 - DNA, 479 bp, Homo sapiens
atgagaagttatttcagctgctgaggtaacagactttgacggcagtaactccagtgtggggaggtcagcaagctgctttatgtagcagctaccacacttcagcatagccattgcccttgtgtagggtccgaacgttggttgcagacccaggactcctgcatctggtctgtaatgatttcctactctctagatgatctgaattgatttctgattactcctggactctaggctcccccacccctctctgccatcagctttgttccaggaagccccatttataccctaactttcacttcccactcctcttccaagaggaaccatgtccctattaggaaaagattttgtccttgcaccaggggttaagagaattgagagtaggagaggtgatgtctgtaccatgtcttttagttggtctcagtttttaaaaaggtctagtgaatgctcagttggattagactgtgtggtaagtgaaaaaagaa

SEQ ID NO: 354307 - DNA, 3115 bp, Homo sapiens
cgggcttgcggcggttgtgccgcatctagagagtcggggagccgcccccgcacccaggccttctcgcgctgcctggtcgctggtgaagcccgcggcgcgcgcctctcccggaccctgcaggatttttcttcctggcctggttcccttgccttctccatttgcttcattcgcttggattttcaagaagctttgaagctggataggagtctccagtcttcctcttgatccatatgtttcaggtaaaagaatgtcacatgtcagcatttgtacctgaagtcagcatgcaaagttcagggtacctggatgaatgccaacttttgcatttcccatgtgtatcctgtgaccattctatctgggaacatccttcaaagagttcatgcatcttactgaggacacctgaccttttgaagcttcataattcacatctagatgtcaccggtctttcccatgttaacagttctgaccatgttttattatatatgccttcggcgccgagccaggacagctacaagaggagaaatgatgaacacccatagagctatagaatcaaacagccagacttcccctctcaatgcagaggtagtccagtatgccaaagaagtagtggatttcagttcccattatggaagtgagaatagtatgtcctatactatgtggaatttggctggtgtaccaaatgtattcccaagttctggtgactttactcagacagctgtgtttcgaacttatgggacatggtgggatcagtgtcctagtgcttccttgccattcaagaggacgccacctaattttcagagccaggactatgtggaacttacttttgaacaacaggtgtatcctacagctgtacatgttctagaaacctatcatcccggagcagtcattagaattctcgcttgttctgcaaatccttattccccaaatccaccagctgaagtaagatgggagattctttggtcagagagacctacgaaggtgaatgcttcccaagctcgccagtttaaaccttgtattaagcagataaatttccccacaaatcttatacgactggaagtaaatagttctcttctggaatattacactgaattagatgcagttgtgctacatggtgtgaaggacaagccagtgctttctctcaagacttcacttattgacatgaatgatatagaagatgatgcctatgcagaaaaggatggttgtggaatggacagtcttaacaaaaagtttagcagtgctgtcctcggggaagggccaaataatgggtattttgataaactaccttatgagcttattcagctgattctgaatcatcttacactaccagacctgtgtagattagcacagacttgcaaactactgagccagcattgctgtgatcctctgcaatacatccacctcaatctgcaaccatactgggcaaaactagatgacacttctctggaatttctacagtctcgctgcactcttgtccagtggcttaatttatcttggactggcaatagaggcttcatctctgttgcaggatttagcaggtttctgaaggtttgtggatccgaattagtacgccttgaattgtcttgcagccactttcttaatgaaacttgcttagaagttatttctgagatgtgtccaaatctacaggccttaaatctctcctcctgtgataagctaccacctcaagctttcaaccacattgccaagttatgcagccttaaacgacttgttctctatcgaacaaaagtagagcaaacagcactgctcagcattttgaacttctgttcagagcttcagcacctcagtttaggcagttgtgtcatgattgaagactatgatgtgatagctagcatgataggagccaagtgtaaaaaactccggaccctggatctgtggagatgtaagaatattactgagaatggaatagcagaactggcttctgggtgtccactactggaggagcttgaccttggctggtgcccaactctgcagagcagcaccgggtgcttcaccagactggcacaccagctcccaaacttgcaaaaactctttcttacagctaatagatctgtgtgtgacacagacattgatgaattggcatgtaattgtaccaggttacagcagctggacatattaggaacaagaatggtaagtccggcatccttaagaaaactcctggaatcttgtaaagatctttctttacttgatgtgtccttctgttcgcagattgataacagagctgtgctagaactgaatgcaagctttccaaaagtgttcataaaaaagagctttactcagtgacttaatatatgttctgtattaaaattaatgtgctttgttggggtttaattttgggattggttttgggttttgtttttagttgttttaatggtaagaattaagacatttgtagattttaaagaaaaatatgaaattgtccattaaatcaagtaaaaatgtgcacaaatgttttcataaaatactgcaagcacttctcttcaagaatatgagtggatattatttttaccttatgttaatcagtgatatgctttagtcaataatatgattgataaaagaataacatggaatcatgctaacttattttcaaaggaacactgagcaataaagtatcgtggcatttatgcaaaaaaaaaagttaattttttacaccttcatgtaaggatgtcttattaagcctgtgacctggcaagtgttttgtttggtatgtacaaaatggtcagagctagttggagaatgagacatgcttttccagctgtttggttatttctctggattaactgttcaactggaaaatttttagtttttctagccaggtgtggtggcacacacttgtagtcctagcgacacgggaggtggaggcaggaggattacttgagatgggattttgagactctagtgtacttatgattgcacctgtgagcagccactgcactccaacctgggcaatatagcgagtccctttctcttaaaaaaaattgtagtgtttccacttttcttctgatatttttgtctatttcactactggataatgccaatataaaaatttgggtataatcaagaataagaggtaaactactaaataaaaaaagctttccaactg

SEQ ID NO: 354308 - DNA, 3969 bp, Homo sapiens
cgggcttgcggcggttgtgccgcatctagagagtcggggagccgcccccgcacccaggccttctcgcgctgcctggtcgctggtgaagcccgcggcgcgcgcctctcccggaccctgcagggtaaaagaatgtcacatgtcagcatttgtacctgaagtcagcatgcaaagttcagggtacctggatgaatgccaacttttgcatttcccatgtgtatcctgtgaccattctatctgggaacatccttcaaagagttcatgcatcttactgaggacacctgaccttttgaagcttcataattcacatctagatgtcaccggtctttcccatgttaacagttctgaccatgttttattatatatgccttcggcgccgagccaggacagctacaagaggagaaatgatgaacacccatagagctatagaatcaaacagccagacttcccctctcaatgcagaggtagtccagtatgccaaagaagtagtggatttcagttcccattatggaagtgagaatagtatgtcctatactatgtggaatttggctggtgtaccaaatgtattcccaagttctggtgactttactcagacagctgtgtttcgaacttatgggacatggtgggatcagtgtcctagtgcttccttgccattcaagaggacgccacctaattttcagagccaggactatgtggaacttacttttgaacaacaggtgtatcctacagctgtacatgttctagaaacctatcatcccggagcagtcattagaattctcgcttgttctgcaaatccttattccccaaatccaccagctgaagtaagatgggagattctttggtcagagagacctacgaaggtgaatgcttcccaagctcgccagtttaaaccttgtattaagcagataaatttccccacaaatcttatacgactggaagtaaatagttctcttctggaatattacactgaattagatgcagttgtgctacatggtgtgaaggacaagccagtgctttctctcaagacttcacttattgacatgaatgatatagaagatgatgcctatgcagaaaaggatggttgtggaatggacagtcttaacaaaaagtttagcagtgctgtcctcggggaagggccaaataatgggtattttgataaactaccttatgagcttattcagctgattctgaatcatcttacactaccagacctgtgtagattagcacagacttgcaaactactgagccagcattgctgtgatcctctgcaatacatccacctcaatctgcaaccatactgggcaaaactagatgacacttctctggaatttctacagtctcgctgcactcttgtccagtggcttaatttatcttggactggcaatagaggcttcatctctgttgcaggatttagcaggtttctgaaggtttgtggatccgaattagtacgccttgaattgtcttgcagccactttcttaatgaaacttgcttagaagttatttctgagatgtgtccaaatctacaggccttaaatctctcctcctgtgataagctaccacctcaagctttcaaccacattgccaagttatgcagccttaaacgacttgttctctatcgaacaaaagtagagcaaacagcactgctcagcattttgaacttctgttcagagcttcagcacctcagtttaggcagttgtgtcatgattgaagactatgatgtgatagctagcatgataggagccaagtgtaaaaaactccggaccctggatctgtggagatgtaagaatattactgagaatggaatagcagaactggcttctgggtgtccactactggaggagcttgaccttggctggtgcccaactctgcagagcagcaccgggtgcttcaccagactggcacaccagctcccaaacttgcaaaaactctttcttacagctaatagatctgtgtgtgacacagacattgatgaattggcatgtaattgtaccaggttacagcagctggacatattaggtaaggttacaatatataaatttgttttaaatgtctgtttccttgacagaaaagccaatctcagactttttgttaggaaaaagaaaatttttggatacaataaaaattttatcctgataagatggcttggtttgataggaaatgcaagatagatcagttaatatagggaataattatatatgtactttaataaaatagtgaggacaataacaattttatagttgaaactgtaaaaaactataaccattaattcttggtctacttgtaagagtgagaatttacagtgctgcgctctctatttttattaaggagagaagaaattaattcatttgtataatgaattcaagctagttttttttaagtttcttaattaaaattcttgattaaggaatatcgtgaaatctttatccctgataattctagcgtttaggaatagttctaccccaggcagatctattgaaaatcttttccagctctgggatttcttgaatccttgctgcattcatcagaaaggaaccctgtgtaattttgttgcttcttacttttagccaggggtgctagcagtgtcacagtagttatcattgtccacacaattgatactttgtgaagtcatatcgcacttgcacattttacatcaaatgcatggtgaaaaccattttgaactggggtgacagaaataggaaagtctggaggagctgatttgaaggggtaggaggtaggaatgaagatagtgggtaggatattggcaagattcaggtcctagatgctaaattggctggaaaattcaacttttacttttttaacagaaccatttcaatatgaagtcatgtttgaaaaaatgattttaatttgtaaagggttattttaagttcattacaaacaataaatcatggatggattcattgttagcacattatataaatgttatacttaaggtgttttgttttgttttgttttgtttcccttaaataggaacaagaatggtaagtccggcatccttaagaaaactcctggaatcttgtaaagatctttctttacttgatgtgtccttctgttcgcagattgataacagagctgtgctagaactgaatgcaagctttccaaaagtgttcataaaaaagagctttactcagtgacttaatatatgttctgtattaaaattaatgtgctttgttggggtttaattttgggattggttttgggttttgtttttagttgttttaatggtaagaattaagacatttgtagattttaaagaaaaatatgaaattgtccattaaatcaagtaaaaatgtgcacaaatgttttcataaaatactgcaagcacttctcttcaagaatatgagtggatattatttttaccttatgttaatcagtgatatgctttagtcaataatatgattgataaaagaataacatggaatcatgctaacttattttcaaaggaacactgagcaataaagtatcgtggcatttatgcaaaaaaaaaagttaattttttacaccttcatgtaaggatgtcttattaagcctgtgacctggcaagtgttttgtttggtatgtacaaaatggtcagagctagttggagaatgagacatgcttttccagctgtttggttatttctctggattaactgttcaactggaaaatttttagtttttctagccaggtgtggtggcacacacttgtagtcctagcgacacgggaggtggaggcaggaggattacttgagatgggattttgagactctagtgtacttatgattgcacctgtgagcagccactgcactccaacctgggcaatatagcgagtccctttctcttaaaaaaaattgtagtgtttccacttttcttctgatatttttgtctatttcactactggataatgccaatataaaaatttgggtataatcaagaataagaggtaaactactaaataaaaaaagctttccaactg

SEQ ID NO: 354309 - DNA, 3290 bp, Homo sapiens
cttgggaacaatacttatattggattctatttattttgatgactttgtttcacactgtgacatattgggcatgggtctataaccttaagggaccagtagatctcattctaaactgtattatagggaagtttctttttttggcagatgggagattctttggtcagagagacctacgaaggtgaatgcttcccaagctcgccagtttaaaccttgtattaagcagataaatttccccacaaatcttatacgactggaagtaaatagttctcttctggaatattacactgaattagatgcagttgtgctacatggtgtgaaggacaagccagtgctttctctcaagacttcacttattgacatgaatgatatagaagatgatgcctatgcagaaaaggatggttgtggaatggacagtcttaacaaaaagtttagcagtgctgtcctcggggaagggccaaataatgggtattttgataaactaccttatgagcttattcagctgattctgaatcatcttacactaccagacctgtgtagattagcacagacttgcaaactactgagccagcattgctgtgatcctctgcaatacatccacctcaatctgcaaccatactgggcaaaactagatgacacttctctggaatttctacagtctcgctgcactcttgtccagtggcttaatttatcttggactggcaatagaggcttcatctctgttgcaggatttagcaggtttctgaaggtttgtggatccgaattagtacgccttgaattgtcttgcagccactttcttaatgaaacttgcttagaagttatttctgagatgtgtccaaatctacaggccttaaatctctcctcctgtgataagctaccacctcaagctttcaaccacattgccaagttatgcagccttaaacgacttgttctctatcgaacaaaagtagagcaaacagcactgctcagcattttgaacttctgttcagagcttcagcacctcagtttaggcagttgtgtcatgattgaagactatgatgtgatagctagcatgataggagccaagtgtaaaaaactccggaccctggatctgtggagatgtaagaatattactgagaatggaatagcagaactggcttctgggtgtccactactggaggagcttgaccttggctggtgcccaactctgcagagcagcaccgggtgcttcaccagactggcacaccagctcccaaacttgcaaaaactctttcttacagctaatagatctgtgtgtgacacagacattgatgaattggcatgtaattgtaccaggttacagcagctggacatattaggtaaggttacaatatataaatttgttttaaatgtctgtttccttgacagaaaagccaatctcagactttttgttaggaaaaagaaaatttttggatacaataaaaattttatcctgataagatggcttggtttgataggaaatgcaagatagatcagttaatatagggaataattatatatgtactttaataaaatagtgaggacaataacaattttatagttgaaactgtaaaaaactataaccattaattcttggtctacttgtaagagtgagaatttacagtgctgcgctctctatttttattaaggagagaagaaattaattcatttgtataatgaattcaagctagttttttttaagtttcttaattaaaattcttgattaaggaatatcgtgaaatctttatccctgataattctagcgtttaggaatagttctaccccaggcagatctattgaaaatcttttccagctctgggatttcttgaatccttgctgcattcatcagaaaggaaccctgtgtaattttgttgcttcttacttttagccaggggtgctagcagtgtcacagtagttatcattgtccacacaattgatactttgtgaagtcatatcgcacttgcacattttacatcaaatgcatggtgaaaaccattttgaactggggtgacagaaataggaaagtctggaggagctgatttgaaggggtaggaggtaggaatgaagatagtgggtaggatattggcaagattcaggtcctagatgctaaattggctggaaaattcaacttttacttttttaacagaaccatttcaatatgaagtcatgtttgaaaaaatgattttaatttgtaaagggttattttaagttcattacaaacaataaatcatggatggattcattgttagcacattatataaatgttatacttaaggtgttttgttttgttttgttttgtttcccttaaataggaacaagaatggtaagtccggcatccttaagaaaactcctggaatcttgtaaagatctttctttacttgatgtgtccttctgttcgcagattgataacagagctgtgctagaactgaatgcaagctttccaaaagtgttcataaaaaagagctttactcagtgacttaatatatgttctgtattaaaattaatgtgctttgttggggtttaattttgggattggttttgggttttgtttttagttgttttaatggtaagaattaagacatttgtagattttaaagaaaaatatgaaattgtccattaaatcaagtaaaaatgtgcacaaatgttttcataaaatactgcaagcacttctcttcaagaatatgagtggatattatttttaccttatgttaatcagtgatatgctttagtcaataatatgattgataaaagaataacatggaatcatgctaacttattttcaaaggaacactgagcaataaagtatcgtggcatttatgcaaaaaaaaaagttaattttttacaccttcatgtaaggatgtcttattaagcctgtgacctggcaagtgttttgtttggtatgtacaaaatggtcagagctagttggagaatgagacatgcttttccagctgtttggttatttctctggattaactgttcaactggaaaatttttagtttttctagccaggtgtggtggcacacacttgtagtcctagcgacacgggaggtggaggcaggaggattacttgagatgggattttgagactctagtgtacttatgattgcacctgtgagcagccactgcactccaacctgggcaatatagcgagtccctttctcttaaaaaaaattgtagtgtttccacttttcttctgatatttttgtctatttcactactggataatgccaatataaaaatttgggtataatcaagaataagaggtaaactactaaataaaaaaagctttccaactg

SEQ ID NO: 354310 - DNA, 1212 bp, Homo sapiens
  misc_feature (1102)..(1102): n is a, c, g, or t
  misc_feature (1109)..(1109): n is a, c, g, or t
  misc_feature (1113)..(1113): n is a, c, g, or t
  misc_feature (1116)..(1116): n is a, c, g, or t
  misc_feature (1120)..(1120): n is a, c, g, or t
  misc_feature (1126)..(1126): n is a, c, g, or t
  misc_feature (1128)..(1128): n is a, c, g, or t
gagacagggtctcgctctgttgccccaggctggagtgcagtggcatgatctcagcttactgcagcctcagtctcccaggctcaagcgatcctcccacctcggcctcccgagtacctgggactacagacaccaccacacctggctaatttttttattttttatagagacacagtctttccatgttgcctatgttggtcttgaactcctgggctcaaataattttcccaccttggcctcctgtagtgctgggattacgggcataagccactgtgtcaggccccatgtatgttaatagtgaatgtttggcttttcatttgttactttcagctattaaaggatacctattacagacacaggaatttacattttcaaagtcatttttgacacatcagtgctgcatctacttttctccttttagcacatttgatattgatacttcagagaaacttttttaactacccttaaaatcttgtcaatgaccattaactgccaatcatcacctcatttgctttttttgacaacatactactagaaacctaggctgtgagtgtaaaaccataactgttagaatcattttttggcaatagctcacattctgttaagagtcatttgctttaatcaaagatcatgatttattatatattttttataagtagggatggggccaagattattcctttggcacagcagtaagtgtgctcaagatctttgcctgtaagcttgaatatttggcttaaattttgtgcatatgaatactgttaaaggtatatttgactacattttgaaaggaaaaaggtagtcctgctaaaattgacatttagggatattttaatctatgtatttggtaaagtaattagtgaagtattagttataaaaattttaaggaaaacatttaaaagcaaaatagtcgtatcagataaatagagtagaatacactaaagataaaacaagtctctgttacaaatgaagttgtctgtacagacgactgagatattttaattttatttacataaaaatgctgttcaatatctaatgatttctgttgtttgtattctgtactttagagtaataatagttggttctccaaaaaaaaaaaaaaaantgtgggngcgnccnaaantttaancnttggcggccaaaaaatcatcggcaacggggtggggtcccaaacgggcgtgacacattgtgtcccatccccgccggaggaggaga

SEQ ID NO: 354311 - DNA, 1093 bp, Homo sapiens
gagacagggtctcgctctgttgccccaggctggagtgcagtggcatgatctcagcttactgcagcctcagtctcccaggctcaagcgatcctcccacctcggcctcccgagtacctgggactacagacaccaccacacctggctaatttttttattttttatagagacacagtctttccatgttgcctatgttggtcttgaactcctgggctcaaataattttcccaccttggcctcctgtagtgctgggattacgggcataagccactgtgtcaggccccatgtatgttaatagtgaatgtttggcttttcatttgttactttcagctattaaaggatacctattacagacacaggaatttacattttcaaagtcatttttgacacatcagtgctgcatctacttttctccttttagcacatttgatattgatacttcagagaaacttttttaactacccttaaaatcttgtcaatgaccattaactgccaatcatcacctcatttgctttttttgacaacatactactagaaacctaggctgtgagtgtaaaaccataactgttagaatcattttttggcaatagctcacattctgttaagagtcatttgctttaatcaaagatcatgatttattatatattttttataagtagggatggggccaagattattcctttggcacagcagtaagtgtgctcaagatctttgcctgtaagcttgaatatttggcttaaattttgtgcatatgaatactgttaaaggtatatttgactacattttgaaaggaaaaaggtagtcctgctaaaattgacatttagggatattttaatctatgtatttggtaaagtaattagtgaagtattagttataaaaattttaaggaaaacatttaaaagcaaaatagtcgtatcagataaatagagtagaatacactaaagataaaacaagtctctgttacaaatgaagttgtctgtacagacgactgagatattttaattttatttacataaaaatgctgttcaatatctaatgatttctgttgtttgtattctgtactttagagtaataaaataagtttgagtatctcatt

SEQ ID NO: 354312 - DNA, 1470 bp, Homo sapiens
  misc_feature (1360)..(1360): n is a, c, g, or t
  misc_feature (1367)..(1367): n is a, c, g, or t
  misc_feature (1371)..(1371): n is a, c, g, or t
  misc_feature (1374)..(1374): n is a, c, g, or t
  misc_feature (1378)..(1378): n is a, c, g, or t
  misc_feature (1384)..(1384): n is a, c, g, or t
  misc_feature (1386)..(1386): n is a, c, g, or t
cgggcttgcggcggttgtgccgcatctagagagtcggggagccgcccccgcacccaggccttctcgcgctgcctggtcgctggtgaagcccgcggcgcgcgcctctcccggaccctgcaggatttttcttcctggcctggttcccttgccttctccatttgcttcattcgcttggattttcaagaagctttgaagctggataggagtctccagtcttcctcttgatccatatgtttcaggtaaaagaatgtcacatgtcagcatttgtacctgaagtcagcatgcaaagttcagggtacctggatgaatgccaacttttgcatttcccatgtgtatcctgtgaccattctatctgggaacatccttcaaagagttcatgcatcttactgaggacacctggctaatttttttattttttatagagacacagtctttccatgttgcctatgttggtcttgaactcctgggctcaaataattttcccaccttggcctcctgtagtgctgggattacgggcataagccactgtgtcaggccccatgtatgttaatagtgaatgtttggcttttcatttgttactttcagctattaaaggatacctattacagacacaggaatttacattttcaaagtcatttttgacacatcagtgctgcatctacttttctccttttagcacatttgatattgatacttcagagaaacttttttaactacccttaaaatcttgtcaatgaccattaactgccaatcatcacctcatttgctttttttgacaacatactactagaaacctaggctgtgagtgtaaaaccataactgttagaatcattttttggcaatagctcacattctgttaagagtcatttgctttaatcaaagatcatgatttattatatattttttataagtagggatggggccaagattattcctttggcacagcagtaagtgtgctcaagatctttgcctgtaagcttgaatatttggcttaaattttgtgcatatgaatactgttaaaggtatatttgactacattttgaaaggaaaaaggtagtcctgctaaaattgacatttagggatattttaatctatgtatttggtaaagtaattagtgaagtattagttataaaaattttaaggaaaacatttaaaagcaaaatagtcgtatcagataaatagagtagaatacactaaagataaaacaagtctctgttacaaatgaagttgtctgtacagacgactgagatattttaattttatttacataaaaatgctgttcaatatctaatgatttctgttgtttgtattctgtactttagagtaataatagttggttctccaaaaaaaaaaaaaaaantgtgggngcgnccnaaantttaancnttggcggccaaaaaatcatcggcaacggggtggggtcccaaacgggcgtgacacattgtgtcccatccccgccggaggaggaga

SEQ ID NO: 354313 - DNA, 2997 bp, Homo sapiens
cgggcttgcggcggttgtgccgcatctagagagtcggggagccgcccccgcacccaggccttctcgcgctgcctggtcgctggtgaagcccgcggcgcgcgcctctcccggaccctgcagggtaaaagaatgtcacatgtcagcatttgtacctgaagtcagcatgcaaagttcagggtacctggatgaatgccaacttttgcatttcccatgtgtatcctgtgaccattctatctgggaacatccttcaaagagttcatgcatcttactgaggacacctgaccttttgaagcttcataattcacatctagatgtcaccggtctttcccatgttaacagttctgaccatgttttattatatatgccttcggcgccgagccaggacagctacaagaggagaaatgatgaacacccatagagctatagaatcaaacagccagacttcccctctcaatgcagaggtagtccagtatgccaaagaagtagtggatttcagttcccattatggaagtgagaatagtatgtcctatactatgtggaatttggctggtgtaccaaatgtattcccaagttctggtgactttactcagacagctgtgtttcgaacttatgggacatggtgggatcagtgtcctagtgcttccttgccattcaagaggacgccacctaattttcagagccaggactatgtggaacttacttttgaacaacaggtgtatcctacagctgtacatgttctagaaacctatcatcccggagcagtcattagaattctcgcttgttctgcaaatccttattccccaaatccaccagctgaagtaagatgggagattctttggtcagagagacctacgaaggtgaatgcttcccaagctcgccagtttaaaccttgtattaagcagataaatttccccacaaatcttatacgactggaagtaaatagttctcttctggaatattacactgaattagatgcagttgtgctacatggtgtgaaggacaagccagtgctttctctcaagacttcacttattgacatgaatgatatagaagatgatgcctatgcagaaaaggatggttgtggaatggacagtcttaacaaaaagtttagcagtgctgtcctcggggaagggccaaataatgggtattttgataaactaccttatgagcttattcagctgattctgaatcatcttacactaccagacctgtgtagattagcacagacttgcaaactactgagccagcattgctgtgatcctctgcaatacatccacctcaatctgcaaccatactgggcaaaactagatgacacttctctggaatttctacagtctcgctgcactcttgtccagtggcttaatttatcttggactggcaatagaggcttcatctctgttgcaggatttagcaggtttctgaaggtttgtggatccgaattagtacgccttgaattgtcttgcagccactttcttaatgaaacttgcttagaagttatttctgagatgtgtccaaatctacaggccttaaatctctcctcctgtgataagctaccacctcaagctttcaaccacattgccaagttatgcagccttaaacgacttgttctctatcgaacaaaagtagagcaaacagcactgctcagcattttgaacttctgttcagagcttcagcacctcagtttaggcagttgtgtcatgattgaagactatgatgtgatagctagcatgataggagccaagtgtaaaaaactccggaccctggatctgtggagatgtaagaatattactgagaatggaatagcagaactggcttctgggtgtccactactggaggagcttgaccttggctggtgcccaactctgcagagcagcaccgggtgcttcaccagactggcacaccagctcccaaacttgcaaaaactctttcttacagctaatagatctgtgtgtgacacagacattgatgaattggcatgtaattgtaccaggttacagcagctggacatattaggaacaagaatggtaagtccggcatccttaagaaaactcctggaatcttgtaaagatctttctttacttgatgtgtccttctgttcgcagattgataacagagctgtgctagaactgaatgcaagctttccaaaagtgttcataaaaaagagctttactcagtgacttaatatatgttctgtattaaaattaatgtgctttgttggggtttaattttgggattggttttgggttttgtttttagttgttttaatggtaagaattaagacatttgtagattttaaagaaaaatatgaaattgtccattaaatcaagtaaaaatgtgcacaaatgttttcataaaatactgcaagcacttctcttcaagaatatgagtggatattatttttaccttatgttaatcagtgatatgctttagtcaataatatgattgataaaagaataacatggaatcatgctaacttattttcaaaggaacactgagcaataaagtatcgtggcatttatgcaaaaaaaaaagttaattttttacaccttcatgtaaggatgtcttattaagcctgtgacctggcaagtgttttgtttggtatgtacaaaatggtcagagctagttggagaatgagacatgcttttccagctgtttggttatttctctggattaactgttcaactggaaaatttttagtttttctagccaggtgtggtggcacacacttgtagtcctagcgacacgggaggtggaggcaggaggattacttgagatgggattttgagactctagtgtacttatgattgcacctgtgagcagccactgcactccaacctgggcaatatagcgagtccctttctcttaaaaaaaattgtagtgtttccacttttcttctgatatttttgtctatttcactactggataatgccaatataaaaatttgggtataatcaagaataagaggtaaactactaaataaaaaaagctttccaactg

SEQ ID NO: 354314 - DNA, 3623 bp, Homo sapiens
cgggcttgcggcggttgtgccgcatctagagagtcggggagccgcccccgcacccaggccttctcgcgctgcctggtcgctggtgaagcccgcggcgcgcgcctctcccggaccctgcagggtaaaagaatgtcacatgtcagcatttgtacctgaagtcagcatgcaaagttcagggtacctggatgaatgccaacttttgcatttcccatgtgtatcctgtgaccattctatctgggaacatccttcaaagagttcatgcatcttactgaggacacctgaccttttgaagcttcataattcacatctagatgtcaccggtctttcccatgttaacagttctgaccatgttttattatatatgccttcggcgccgagccaggacagctacaagaggagaaatgatgaacacccatagagctatagaatcaaacagccagacttcccctctcaatgcagaggtagtccagtatgccaaagaagtagtggatttcagttcccattatggaagtgagaatagtatgtcctatactatgtggaatttggctggtgtaccaaatgtattcccaagttctggtgactttactcagacagctgtgtttcgaacttatgggacatggtgggatcagtgtcctagtgcttccttgccattcaagaggacgccacctaattttcagagccaggactatgtggaacttacttttgaacaacaggtgtatcctacagctgtacatgttctagaaacctatcatcccggagcagtcattagaattctcgcttgttctgcaaatccttattccccaaatccaccagctgaagtaagcttattcagctgattctgaatcatcttacactaccagacctgtgtagattagcacagacttgcaaactactgagccagcattgctgtgatcctctgcaatacatccacctcaatctgcaaccatactgggcaaaactagatgacacttctctggaatttctacagtctcgctgcactcttgtccagtggcttaatttatcttggactggcaatagaggcttcatctctgttgcaggatttagcaggtttctgaaggtttgtggatccgaattagtacgccttgaattgtcttgcagccactttcttaatgaaacttgcttagaagttatttctgagatgtgtccaaatctacaggccttaaatctctcctcctgtgataagctaccacctcaagctttcaaccacattgccaagttatgcagccttaaacgacttgttctctatcgaacaaaagtagagcaaacagcactgctcagcattttgaacttctgttcagagcttcagcacctcagtttaggcagttgtgtcatgattgaagactatgatgtgatagctagcatgataggagccaagtgtaaaaaactccggaccctggatctgtggagatgtaagaatattactgagaatggaatagcagaactggcttctgggtgtccactactggaggagcttgaccttggctggtgcccaactctgcagagcagcaccgggtgcttcaccagactggcacaccagctcccaaacttgcaaaaactctttcttacagctaatagatctgtgtgtgacacagacattgatgaattggcatgtaattgtaccaggttacagcagctggacatattaggtaaggttacaatatataaatttgttttaaatgtctgtttccttgacagaaaagccaatctcagactttttgttaggaaaaagaaaatttttggatacaataaaaattttatcctgataagatggcttggtttgataggaaatgcaagatagatcagttaatatagggaataattatatatgtactttaataaaatagtgaggacaataacaattttatagttgaaactgtaaaaaactataaccattaattcttggtctacttgtaagagtgagaatttacagtgctgcgctctctatttttattaaggagagaagaaattaattcatttgtataatgaattcaagctagttttttttaagtttcttaattaaaattcttgattaaggaatatcgtgaaatctttatccctgataattctagcgtttaggaatagttctaccccaggcagatctattgaaaatcttttccagctctgggatttcttgaatccttgctgcattcatcagaaaggaaccctgtgtaattttgttgcttcttacttttagccaggggtgctagcagtgtcacagtagttatcattgtccacacaattgatactttgtgaagtcatatcgcacttgcacattttacatcaaatgcatggtgaaaaccattttgaactggggtgacagaaataggaaagtctggaggagctgatttgaaggggtaggaggtaggaatgaagatagtgggtaggatattggcaagattcaggtcctagatgctaaattggctggaaaattcaacttttacttttttaacagaaccatttcaatatgaagtcatgtttgaaaaaatgattttaatttgtaaagggttattttaagttcattacaaacaataaatcatggatggattcattgttagcacattatataaatgttatacttaaggtgttttgttttgttttgttttgtttcccttaaataggaacaagaatggtaagtccggcatccttaagaaaactcctggaatcttgtaaagatctttctttacttgatgtgtccttctgttcgcagattgataacagagctgtgctagaactgaatgcaagctttccaaaagtgttcataaaaaagagctttactcagtgacttaatatatgttctgtattaaaattaatgtgctttgttggggtttaattttgggattggttttgggttttgtttttagttgttttaatggtaagaattaagacatttgtagattttaaagaaaaatatgaaattgtccattaaatcaagtaaaaatgtgcacaaatgttttcataaaatactgcaagcacttctcttcaagaatatgagtggatattatttttaccttatgttaatcagtgatatgctttagtcaataatatgattgataaaagaataacatggaatcatgctaacttattttcaaaggaacactgagcaataaagtatcgtggcatttatgcaaaaaaaaaagttaattttttacaccttcatgtaaggatgtcttattaagcctgtgacctggcaagtgttttgtttggtatgtacaaaatggtcagagctagttggagaatgagacatgcttttccagctgtttggttatttctctggattaactgttcaactggaaaatttttagtttttctagccaggtgtggtggcacacacttgtagtcctagcgacacgggaggtggaggcaggaggattacttgagatgggattttgagactctagtgtacttatgattgcacctgtgagcagccactgcactccaacctgggcaatatagcgagtccctttctcttaaaaaaaattgtagtgtttccacttttcttctgatatttttgtctatttcactactggataatgccaatataaaaatttgggtataatcaagaataagaggtaaactactaaataaaaaaagctttccaactg

SEQ ID NO: 354315 - DNA, 1044 bp, Homo sapiens
cgggcttgcggcggttgtgccgcatctagagagtcggggagccgcccccgcacccaggccttctcgcgctgcctggtcgctggtgaagcccgcggcgcgcgcctctcccggaccctgcagggtaaaagaatgtcacatgtcagcatttgtacctgaagtcagcatgcaaagttcagggtacctggatgaatgccaacttttgcatttcccatgtgtatcctgtgaccattctatctgggaacatccttcaaagagttcatgcatcttactgaggacacctgaccttttgaagcttcataattcacatctagatgtcaccggtctttcccatgttaacagttctgaccatgttttattatatatgccttcggcgccgagccaggacagctacaagaggagaaatgatgaacacccatagagctatagaatcaaacagccagacttcccctctcaatgcagaggtagtccagtatgccaaagaagtagtggatttcagttcccattatggaagtgagaatagtatgtcctatactatgtggaatttggctggtgtaccaaatgtattcccaagttctggtgactttactcagacagctgtgtttcgaacttatgggacatggtgggatcagtgtcctagtgcttccttgccattcaagaggacgccacctaattttcagagccaggactatgtggaacttacttttgaacaacaggtgtatcctacagctgtacatgttctagaaacctatcatcccggagcagtcattagaattctcgcttgttctgcaaatccttattccccaaatccaccagctgaagtaaggtaagactaattttttaatgacctaagttatatggtagaaaggttttggttgttaatattggagatcttttttattgcaagcattcttttaagtaacttaattgaatttgattttgaaaattttccttagttttctgatggggaagagagatcactcatataaagatttaatgcaggctttatacctgtaatacctcatacggtaatattctatgctgctg

SEQ ID NO: 354316 - DNA, 2896 bp, Homo sapiens
gctttcctctcctttctccctcccccttgtctgcgccacagcccccttctctccccgccccccgggtgtgtcagatttttcagttaataatatcccccgagcttcaaagcgcaggctgtgacagtcatctgtctggacgcgctgggtggatgcggggggctcctgggaactgtgttggagccgagcaagcgctagccaggcgcaagcgcgcacagactgtagccatccgaggacacccccgcccccccggcccacccggagacacccgcgcagaatcgcctccggatcccctgcagtcggcgggagtgttggaggtcggcgccggcccccgccttccgcgccccccacgggaaggaagcacccccggtattaaaacgaacggggcggaaagaagccctcagtcgccggccgggaggcgagccgatgccgagctgctccacgtccaccatgccgggcatgatctgcaagaacccagacctcgagtttgactcgctacagccctgcttctacccggacgaagatgacttctacttcggcggccccgactcgacccccccgggggaggacatctggaagaagtttgagctgctgcccacgcccccgctgtcgcccagccgtggcttcgcggagcacagctccgagcccccgagctgggtcacggagatgctgcttgagaacgagctgtggggcagcccggccgaggaggacgcgttcggcctggggggactgggtggcctcacccccaacccggtcatcctccaggactgcatgtggagcggcttctccgcccgcgagaagctggagcgcgccgtgagcgagaagctgcagcacggccgcgggccgccaaccgccggttccaccgcccagtccccgggagccggcgccgccagccctgcgggtcgcgggcacggcggggctgcgggagccggccgcgccggggccgccctgcccgccgagctcgcccacccggccgccgagtgcgtggatcccgccgtggtcttcccctttcccgtgaacaagcgcgagccagcgcccgtgcccgcagccccggccagtgccccggcggcgggccctgcggtcgcctcgggggcgggtattgccgccccagccggggccccgggggtcgcccctccgcgcccaggcggccgccagaccagcggcggcgaccacaaggccctcagtacctccggagaggacaccctgagcgattcagatgatgaagatgatgaagaggaagatgaagaggaagaaatcgacgtggtcactgtggagaagcggcgttcctcctccaacaccaaggctgtcaccacattcaccatcactgtgcgtcccaagaacgcagccctgggtcccgggagggctcagtccagcgagctgatcctcaaacgatgccttcccatccaccagcagcacaactatgccgccccctctccctacgtggagagtgaggatgcacccccacagaagaagataaagagcgaggcgtccccacgtccgctcaagagtgtcatccccccaaaggctaagagcttgagcccccgaaactctgactcggaggacagtgagcgtcgcagaaaccacaacatcctggagcgccagcgccgcaacgaccttcggtccagctttctcacgctcagggaccacgtgccggagttggtaaagaatgagaaggccgccaaggtggtcattttgaaaaaggccactgagtatgtccactccctccaggccgaggagcaccagcttttgctggaaaaggaaaaattgcaggcaagacagcagcagttgctaaagaaaattgaacacgctcggacttgctagacgcttctcaaaactggacagtcactgccactttgcacattttgattttttttttaaacaaacattgtgttgacattaagaatgttggtttactttcaaatcggtcccctgtcgagttcggctctgggtgggcagtaggaccaccagtgtggggttctgctgggaccttggagagcctgcatcccaggatgctgggtggccctgcagcctcctccacctcacctccatgacagcgctaaacgttggtgacggttgggagcctctggggctgttgaagtcaccttgtgtgttccaagtttccaaacaacagaaagtcattccttctttttaaaatggtgcttaagttccagcagatgccacataaggggtttgccatttgatacccctggggaacatttctgtaaataccattgacacatccgccttttgtatacatcctgggtaatgagaggtggcttttgcggccagtattagactggaagttcatacctaagtactgtaataatacctcaatgtttgaggagcatgttttgtatacaaatatattgttaatctctgttatgtactgtactaattcttacactgcctgtatactttagtatgacgctgatacataactaaatttgatacttatattttcgtatgaaaatgagttgtgaaagttttgagtagatattactttatcactttttgaactaagaaacttttgtaaagaaatttactatatatatatgcctttttcctagcctgtttcttcctgttaatgtatttgttcatgtttggtgcatagaactgggtaaatgcaaagttctgtgtttaatttcttcaaaatgtatatatttagtgctgcatcttatagcactttgaaatacctcatgtttatgaaaataaatagcttaaaattaacaaacaaaaaaaaaaaaaaaaaagagcaaaaaaaaaaaactgggagaaatttcccacccgcgggaggggggggccacaaaggggaggggggggcaccgccggaaaaaacaccaccgcagtgtgttaaacgctcgccgggccggccaatggccgtccgaaaaaacgagcgact

SEQ ID NO: 354317 - DNA, 3982 bp, Homo sapiens
  misc_feature (929)..(929): n is a, c, g, or t
gctttcctctcctttctccctcccccttgtctgcgccacagcccccttctctccccgccccccgggtgtgtcagatttttcagttaataatatcccccgagcttcaaagcgcaggctgtgacagtcatctgtctggacgcgctgggtggatgcggggggctcctgggaactgtgttggagccgagcaagcgctagccaggcgcaagcgcgcacagactgtagccatccgaggacacccccgcccccccggcccacccggagacacccgcgcagaatcgcctccggatcccctgcagtcggcgggaggtaaggagcagggcttgcaaaccgcccggcgcccagggaagcgacgagcgccggggcaaggcaagccctggacgggattgcgacgtgcgcaccgggcgccctaatatgcccgggggactgtttctgcttccgaaacaaaaccatctctgggttttcccagaaaagccagttccagccccgaaggcatcctggctagaggagacccgccctaatccttttgcagcccttaccggggggagtaatggcttctgcgaaaagaaattccctcggctctagaagatctgtctgtgtttgagctgtcggagagccggtgcgtccccaccccaggctggggttcttctccaaagggtgcccctggaggaagaagagggggggattaggcagggcgaggccgccgcggtcgcaatctgggtcacggctgctccagcttggaggagaggcggctctcccggcgacctcctcgcgcgggcgcccctgccattcccgggaacaggggctcagcctctccctccctggaagaggacgttgtcgtggtttggaagagcaggggtgggcttagagcttccaattaagctattggcaggagtatccctgcagcgggtgaatgccgaggggcgtttgcncaaatttggggaggggaaggatttgtggatatgggtgtctgttgttggtctctgtctagagaaaggcttttttttatttgcaaagttttctaaatcccctgctatcatttgcactcctgaggttgcatttttacaaagggggtagaaggtactccaaataccattcccggtagctgggtcggagagcctgggcttcccctgagcagccggccccacaccgctgcgagtgcggttgtctgcgtgctcgtgagagctagaattctgcagccaggaacagccccctcccccaggcagtgccttgtgtgaatgaaatggcagtttccaaagttgcggagcctcgccaccaccccctgcatctgcatgccccctcccaccccctgtcgtagacagcttgtacacaaaaggagggcgggagggagggagcgagaggcacaacttcctccaccttcgggagcagtgggcagagtggggggcttggagggaagattggggaacctggttagagggggcgcccattgcctatcccctcggtctgccccgtttgcccaccctctccggtgtgtctgtcggttgcagtgttggaggtcggcgccggcccccgccttccgcgccccccacgggaaggaagcacccccggtattaaaacgaacggggcggaaagaagccctcagtcgccggccgggaggcgagccgatgccgagctgctccacgtccaccatgccgggcatgatctgcaagaacccagacctcgagtttgactcgctacagccctgcttctacccggacgaagatgacttctacttcggcggccccgactcgacccccccgggggaggacatctggaagaagtttgagctgctgcccacgcccccgctgtcgcccagccgtggcttcgcggagcacagctccgagcccccgagctgggtcacggagatgctgcttgagaacgagctgtggggcagcccggccgaggaggacgcgttcggcctggggggactgggtggcctcacccccaacccggtcatcctccaggactgcatgtggagcggcttctccgcccgcgagaagctggagcgcgccgtgagcgagaagctgcagcacggccgcgggccgccaaccgccgccggccgccgagtgcgtggatcccgccgtggtcttcccctttcccgtgaacaagcgcgagccagcgcccgtgcccgcagccccggccagtgccccggcggcgggccctgcggtcgcctcgggggcgggtattgccgccccagccggggccccgggggtcgcccctccgcgcccaggcggccgccagaccagcggcggcgaccacaaggccctcagtacctccggagaggacaccctgagcgattcagatgatgaagatgatgaagaggaagatgaagaggaagaaatcgacgtggtcactgtggagaagcggcgttcctcctccaacaccaaggctgtcaccacattcaccatcactgtgcgtcccaagaacgcagccctgggtcccgggagggctcagtccagcgagctgatcctcaaacgatgccttcccatccaccagcagcacaactatgccgccccctctccctacgtggagagtgaggatgcacccccacagaagaagataaagagcgaggcgtccccacgtccgctcaagagtgtcatccccccaaaggctaagagcttgagcccccgaaactctgactcggaggacagtgagcgtcgcagaaaccacaacatcctggagcgccagcgccgcaacgaccttcggtccagctttctcacgctcagggaccacgtgccggagttggtaaagaatgagaaggccgccaaggtggtcattttgaaaaaggccactgagtatgtccactccctccaggccgaggagcaccagcttttgctggaaaaggaaaaattgcaggcaagacagcagcagttgctaaagaaaattgaacacgctcggacttgctagacgcttctcaaaactggacagtcactgccactttgcacattttgattttttttttaaacaaacattgtgttgacattaagaatgttggtttactttcaaatcggtcccctgtcgagttcggctctgggtgggcagtaggaccaccagtgtggggttctgctgggaccttggagagcctgcatcccaggatgctgggtggccctgcagcctcctccacctcacctccatgacagcgctaaacgttggtgacggttgggagcctctggggctgttgaagtcaccttgtgtgttccaagtttccaaacaacagaaagtcattccttctttttaaaatggtgcttaagttccagcagatgccacataaggggtttgccatttgatacccctggggaacatttctgtaaataccattgacacatccgccttttgtatacatcctgggtaatgagaggtggcttttgcggccagtattagactggaagttcatacctaagtactgtaataatacctcaatgtttgaggagcatgttttgtatacaaatatattgttaatctctgttatgtactgtactaattcttacactgcctgtatactttagtatgacgctgatacataactaaatttgatacttatattttcgtatgaaaatgagttgtgaaagttttgagtagatattactttatcactttttgaactaagaaacttttgtaaagaaatttactatatatatatgcctttttcctagcctgtttcttcctgttaatgtatttgttcatgtttggtgcatagaactgggtaaatgcaaagttctgtgtttaatttcttcaaaatgtatatatttagtgctgcatcttatagcactttgaaatacctcatgtttatgaaaataaatagcttaaaattaacaaacaaaaaaaaaaaaaaaaaagagcaaaaaaaaaaaactgggagaaatttcccacccgcgggaggggggggccacaaaggggaggggggggcaccgccggaaaaaacaccaccgcagtgtgttaaacgctcgccgggccggccaatggccgtccgaaaaaacgagcgact

SEQ ID NO: 354318 - DNA, 1989 bp, Homo sapiens
gctttcctctcctttctccctcccccttgtctgcgccacagcccccttctctccccgccccccgggtgtgtcagatttttcagttaataatatcccccgagcttcaaagcgcaggctgtgacagtcatctgtctggacgcgctgggtggatgcggggggctcctgggaactgtgttggagccgagcaagcgctagccaggcgcaagcgcgcacagactgtagccatccgaggacacccccgcccccccggcccacccggagacacccgcgcagaatcgcctccggatcccctgcagtcggcgggagatgatgaagatgatgaagaggaagatgaagaggaagaaatcgacgtggtcactgtggagaagcggcgttcctcctccaacaccaaggctgtcaccacattcaccatcactgtgcgtcccaagaacgcagccctgggtcccgggagggctcagtccagcgagctgatcctcaaacgatgccttcccatccaccagcagcacaactatgccgccccctctccctacgtggagagtgaggatgcacccccacagaagaagataaagagcgaggcgtccccacgtccgctcaagagtgtcatccccccaaaggctaagagcttgagcccccgaaactctgactcggaggacagtgagcgtcgcagaaaccacaacatcctggagcgccagcgccgcaacgaccttcggtccagctttctcacgctcagggaccacgtgccggagttggtaaagaatgagaaggccgccaaggtggtcattttgaaaaaggccactgagtatgtccactccctccaggccgaggagcaccagcttttgctggaaaaggaaaaattgcaggcaagacagcagcagttgctaaagaaaattgaacacgctcggacttgctagacgcttctcaaaactggacagtcactgccactttgcacattttgattttttttttaaacaaacattgtgttgacattaagaatgttggtttactttcaaatcggtcccctgtcgagttcggctctgggtgggcagtaggaccaccagtgtggggttctgctgggaccttggagagcctgcatcccaggatgctgggtggccctgcagcctcctccacctcacctccatgacagcgctaaacgttggtgacggttgggagcctctggggctgttgaagtcaccttgtgtgttccaagtttccaaacaacagaaagtcattccttctttttaaaatggtgcttaagttccagcagatgccacataaggggtttgccatttgatacccctggggaacatttctgtaaataccattgacacatccgccttttgtatacatcctgggtaatgagaggtggcttttgcggccagtattagactggaagttcatacctaagtactgtaataatacctcaatgtttgaggagcatgttttgtatacaaatatattgttaatctctgttatgtactgtactaattcttacactgcctgtatactttagtatgacgctgatacataactaaatttgatacttatattttcgtatgaaaatgagttgtgaaagttttgagtagatattactttatcactttttgaactaagaaacttttgtaaagaaatttactatatatatatgcctttttcctagcctgtttcttcctgttaatgtatttgttcatgtttggtgcatagaactgggtaaatgcaaagttctgtgtttaatttcttcaaaatgtatatatttagtgctgcatcttatagcactttgaaatacctcatgtttatgaaaataaatagcttaaaattaacaaacaaaaaaaaaaaaaaaaaagagcaaaaaaaaaaaactgggagaaatttcccacccgcgggaggggggggccacaaaggggaggggggggcaccgccggaaaaaacaccaccgcagtgtgttaaacgctcgccgggccggccaatggccgtccgaaaaaacgagcgact

SEQ ID NO: 354319 - DNA, 4095 bp, Homo sapiens
  misc_feature (929)..(929): n is a, c, g, or t
gctttcctctcctttctccctcccccttgtctgcgccacagcccccttctctccccgccccccgggtgtgtcagatttttcagttaataatatcccccgagcttcaaagcgcaggctgtgacagtcatctgtctggacgcgctgggtggatgcggggggctcctgggaactgtgttggagccgagcaagcgctagccaggcgcaagcgcgcacagactgtagccatccgaggacacccccgcccccccggcccacccggagacacccgcgcagaatcgcctccggatcccctgcagtcggcgggaggtaaggagcagggcttgcaaaccgcccggcgcccagggaagcgacgagcgccggggcaaggcaagccctggacgggattgcgacgtgcgcaccgggcgccctaatatgcccgggggactgtttctgcttccgaaacaaaaccatctctgggttttcccagaaaagccagttccagccccgaaggcatcctggctagaggagacccgccctaatccttttgcagcccttaccggggggagtaatggcttctgcgaaaagaaattccctcggctctagaagatctgtctgtgtttgagctgtcggagagccggtgcgtccccaccccaggctggggttcttctccaaagggtgcccctggaggaagaagagggggggattaggcagggcgaggccgccgcggtcgcaatctgggtcacggctgctccagcttggaggagaggcggctctcccggcgacctcctcgcgcgggcgcccctgccattcccgggaacaggggctcagcctctccctccctggaagaggacgttgtcgtggtttggaagagcaggggtgggcttagagcttccaattaagctattggcaggagtatccctgcagcgggtgaatgccgaggggcgtttgcncaaatttggggaggggaaggatttgtggatatgggtgtctgttgttggtctctgtctagagaaaggcttttttttatttgcaaagttttctaaatcccctgctatcatttgcactcctgaggttgcatttttacaaagggggtagaaggtactccaaataccattcccggtagctgggtcggagagcctgggcttcccctgagcagccggccccacaccgctgcgagtgcggttgtctgcgtgctcgtgagagctagaattctgcagccaggaacagccccctcccccaggcagtgccttgtgtgaatgaaatggcagtttccaaagttgcggagcctcgccaccaccccctgcatctgcatgccccctcccaccccctgtcgtagacagcttgtacacaaaaggagggcgggagggagggagcgagaggcacaacttcctccaccttcgggagcagtgggcagagtggggggcttggagggaagattggggaacctggttagagggggcgcccattgcctatcccctcggtctgccccgtttgcccaccctctccggtgtgtctgtcggttgcagtgttggaggtcggcgccggcccccgccttccgcgccccccacgggaaggaagcacccccggtattaaaacgaacggggcggaaagaagccctcagtcgccggccgggaggcgagccgatgccgagctgctccacgtccaccatgccgggcatgatctgcaagaacccagacctcgagtttgactcgctacagccctgcttctacccggacgaagatgacttctacttcggcggccccgactcgacccccccgggggaggacatctggaagaagtttgagctgctgcccacgcccccgctgtcgcccagccgtggcttcgcggagcacagctccgagcccccgagctgggtcacggagatgctgcttgagaacgagctgtggggcagcccggccgaggaggacgcgttcggcctggggggactgggtggcctcacccccaacccggtcatcctccaggactgcatgtggagcggcttctccgcccgcgagaagctggagcgcgccgtgagcgagaagctgcagcacggccgcgggccgccaaccgccggttccaccgcccagtccccgggagccggcgccgccagccctgcgggtcgcgggcacggcggggctgcgggagccggccgcgccggggccgccctgcccgccgagctcgcccacccggccgccgagtgcgtggatcccgccgtggtcttcccctttcccgtgaacaagcgcgagccagcgcccgtgcccgcagccccggccagtgccccggcggcgggccctgcggtcgcctcgggggcgggtattgccgccccagccggggccccgggggtcgcccctccgcgcccaggcggccgccagaccagcggcggcgaccacaaggccctcagtacctccggagaggacaccctgagcgattcagatgatgaagatgatgaagaggaagatgaagaggaagaaatcgacgtggtcactgtggagaagcggcgttcctcctccaacaccaaggctgtcaccacattcaccatcactgtgcgtcccaagaacgcagccctgggtcccgggagggctcagtccagcgagctgatcctcaaacgatgccttcccatccaccagcagcacaactatgccgccccctctccctacgtggagagtgaggatgcacccccacagaagaagataaagagcgaggcgtccccacgtccgctcaagagtgtcatccccccaaaggctaagagcttgagcccccgaaactctgactcggaggacagtgagcgtcgcagaaaccacaacatcctggagcgccagcgccgcaacgaccttcggtccagctttctcacgctcagggaccacgtgccggagttggtaaagaatgagaaggccgccaaggtggtcattttgaaaaaggccactgagtatgtccactccctccaggccgaggagcaccagcttttgctggaaaaggaaaaattgcaggcaagacagcagcagttgctaaagaaaattgaacacgctcggacttgctagacgcttctcaaaactggacagtcactgccactttgcacattttgattttttttttaaacaaacattgtgttgacattaagaatgttggtttactttcaaatcggtcccctgtcgagttcggctctgggtgggcagtaggaccaccagtgtggggttctgctgggaccttggagagcctgcatcccaggatgctgggtggccctgcagcctcctccacctcacctccatgacagcgctaaacgttggtgacggttgggagcctctggggctgttgaagtcaccttgtgtgttccaagtttccaaacaacagaaagtcattccttctttttaaaatggtgcttaagttccagcagatgccacataaggggtttgccatttgatacccctggggaacatttctgtaaataccattgacacatccgccttttgtatacatcctgggtaatgagaggtggcttttgcggccagtattagactggaagttcatacctaagtactgtaataatacctcaatgtttgaggagcatgttttgtatacaaatatattgttaatctctgttatgtactgtactaattcttacactgcctgtatactttagtatgacgctgatacataactaaatttgatacttatattttcgtatgaaaatgagttgtgaaagttttgagtagatattactttatcactttttgaactaagaaacttttgtaaagaaatttactatatatatatgcctttttcctagcctgtttcttcctgttaatgtatttgttcatgtttggtgcatagaactgggtaaatgcaaagttctgtgtttaatttcttcaaaatgtatatatttagtgctgcatcttatagcactttgaaatacctcatgtttatgaaaataaatagcttaaaattaacaaacaaaaaaaaaaaaaaaaaagagcaaaaaaaaaaaactgggagaaatttcccacccgcgggaggggggggccacaaaggggaggggggggcaccgccggaaaaaacaccaccgcagtgtgttaaacgctcgccgggccggccaatggccgtccgaaaaaacgagcgact

SEQ ID NO: 354320 - DNA, 3206 bp, Homo sapiens
gctttcctctcctttctccctcccccttgtctgcgccacagcccccttctctccccgccccccgggtgtgtcagatttttcagttaataatatcccccgagcttcaaagcgcaggctgtgacagtcatctgtctggacgcgctgggtggatgcggggggctcctgggaactgtgttggagccgagcaagcgctagccaggcgcaagcgcgcacagactgtagccatccgaggacacccccgcccccccggcccacccggagacacccgcgcagaatcgcctccggatcccctgcagtcggcgggaggtaaggagcagggcttgcaaaccgcccggcgcccagggaagcgacgagcgccggggcaaggcaagccctggacgggattgcgacgtgcgcaccgggcgccctaatatgcccgggggactgtttctgcttccgaaacaaaaccatctctgggttttcccagaaaagccagttccagccccgaaggcatcctggctagaggagacccgccctaatccttttgcagcccttaccggggggagtaatggcttctgcgaaaagaaattccctcggctctagaagatctgtctgtgtttgagctgtcggagagccgtgttggaggtcggcgccggcccccgccttccgcgccccccacgggaaggaagcacccccggtattaaaacgaacggggcggaaagaagccctcagtcgccggccgggaggcgagccgatgccgagctgctccacgtccaccatgccgggcatgatctgcaagaacccagacctcgagtttgactcgctacagccctgcttctacccggacgaagatgacttctacttcggcggccccgactcgacccccccgggggaggacatctggaagaagtttgagctgctgcccacgcccccgctgtcgcccagccgtggcttcgcggagcacagctccgagcccccgagctgggtcacggagatgctgcttgagaacgagctgtggggcagcccggccgaggaggacgcgttcggcctggggggactgggtggcctcacccccaacccggtcatcctccaggactgcatgtggagcggcttctccgcccgcgagaagctggagcgcgccgtgagcgagaagctgcagcacggccgcgggccgccaaccgccggttccaccgcccagtccccgggagccggcgccgccagccctgcgggtcgcgggcacggcggggctgcgggagccggccgcgccggggccgccctgcccgccgagctcgcccacccggccgccgagtgcgtggatcccgccgtggtcttcccctttcccgtgaacaagcgcgagccagcgcccgtgcccgcagccccggccagtgccccggcggcgggccctgcggtcgcctcgggggcgggtattgccgccccagccggggccccgggggtcgcccctccgcgcccaggcggccgccagaccagcggcggcgaccacaaggccctcagtacctccggagaggacaccctgagcgattcagatgatgaagatgatgaagaggaagatgaagaggaagaaatcgacgtggtcactgtggagaagcggcgttcctcctccaacaccaaggctgtcaccacattcaccatcactgtgcgtcccaagaacgcagccctgggtcccgggagggctcagtccagcgagctgatcctcaaacgatgccttcccatccaccagcagcacaactatgccgccccctctccctacgtggagagtgaggatgcacccccacagaagaagataaagagcgaggcgtccccacgtccgctcaagagtgtcatccccccaaaggctaagagcttgagcccccgaaactctgactcggaggacagtgagcgtcgcagaaaccacaacatcctggagcgccagcgccgcaacgaccttcggtccagctttctcacgctcagggaccacgtgccggagttggtaaagaatgagaaggccgccaaggtggtcattttgaaaaaggccactgagtatgtccactccctccaggccgaggagcaccagcttttgctggaaaaggaaaaattgcaggcaagacagcagcagttgctaaagaaaattgaacacgctcggacttgctagacgcttctcaaaactggacagtcactgccactttgcacattttgattttttttttaaacaaacattgtgttgacattaagaatgttggtttactttcaaatcggtcccctgtcgagttcggctctgggtgggcagtaggaccaccagtgtggggttctgctgggaccttggagagcctgcatcccaggatgctgggtggccctgcagcctcctccacctcacctccatgacagcgctaaacgttggtgacggttgggagcctctggggctgttgaagtcaccttgtgtgttccaagtttccaaacaacagaaagtcattccttctttttaaaatggtgcttaagttccagcagatgccacataaggggtttgccatttgatacccctggggaacatttctgtaaataccattgacacatccgccttttgtatacatcctgggtaatgagaggtggcttttgcggccagtattagactggaagttcatacctaagtactgtaataatacctcaatgtttgaggagcatgttttgtatacaaatatattgttaatctctgttatgtactgtactaattcttacactgcctgtatactttagtatgacgctgatacataactaaatttgatacttatattttcgtatgaaaatgagttgtgaaagttttgagtagatattactttatcactttttgaactaagaaacttttgtaaagaaatttactatatatatatgcctttttcctagcctgtttcttcctgttaatgtatttgttcatgtttggtgcatagaactgggtaaatgcaaagttctgtgtttaatttcttcaaaatgtatatatttagtgctgcatcttatagcactttgaaatacctcatgtttatgaaaataaatagcttaaaattaacaaacaaaaaaaaaaaaaaaaaagagcaaaaaaaaaaaactgggagaaatttcccacccgcgggaggggggggccacaaaggggaggggggggcaccgccggaaaaaacaccaccgcagtgtgttaaacgctcgccgggccggccaatggccgtccgaaaaaacgagcgact

SEQ ID NO: 354321 - DNA, 2894 bp, Homo sapiens
  misc_feature (929)..(929): n is a, c, g, or t
gctttcctctcctttctccctcccccttgtctgcgccacagcccccttctctccccgccccccgggtgtgtcagatttttcagttaataatatcccccgagcttcaaagcgcaggctgtgacagtcatctgtctggacgcgctgggtggatgcggggggctcctgggaactgtgttggagccgagcaagcgctagccaggcgcaagcgcgcacagactgtagccatccgaggacacccccgcccccccggcccacccggagacacccgcgcagaatcgcctccggatcccctgcagtcggcgggaggtaaggagcagggcttgcaaaccgcccggcgcccagggaagcgacgagcgccggggcaaggcaagccctggacgggattgcgacgtgcgcaccgggcgccctaatatgcccgggggactgtttctgcttccgaaacaaaaccatctctgggttttcccagaaaagccagttccagccccgaaggcatcctggctagaggagacccgccctaatccttttgcagcccttaccggggggagtaatggcttctgcgaaaagaaattccctcggctctagaagatctgtctgtgtttgagctgtcggagagccggtgcgtccccaccccaggctggggttcttctccaaagggtgcccctggaggaagaagagggggggattaggcagggcgaggccgccgcggtcgcaatctgggtcacggctgctccagcttggaggagaggcggctctcccggcgacctcctcgcgcgggcgcccctgccattcccgggaacaggggctcagcctctccctccctggaagaggacgttgtcgtggtttggaagagcaggggtgggcttagagcttccaattaagctattggcaggagtatccctgcagcgggtgaatgccgaggggcgtttgcncaaatttggggaggggaaggatttgtggatatgggtgtctgttgttggtctctgtctagagaaaggcttttttttatttgcaaagttttctaaatcccctgctatcatttgcactcctgaggttgcatttttacaaagggggtagaaggtactccaaataccattcccggtagctgggtcggagagcctgggcttcccctgagcagccggccccacaccgctgcgagtgcggttgtctgcgtgctcgtgagagctagaattctgcagccaggaacagccccctcccccaggcagtgccttgtgtgaatgaaatggcagtttccaaagttgcggagcctcgccaccaccccctgcatctgcatgccccctcccaccccctgtcgtagacagcttgtacacaaaaggagggcgggagggagggagcgagaggcacaacttcctccaccttcgggagcagtgggcagagtggggggcttggagggaagattggggaacctggttagagggggcgcccattgcctatcccctcggtctgccccgtttgcccaccctctccggtgtgtctgtcggttgcagtgttggaggtcggcgccggcccccgccttccgcgccccccacgggaaggaagcacccccggtattaaaacgaacggggcggaaagaagccctcagtcgccggccgggaggcgagccgatgccgagctgctccacgtccaccatgccgggcatgatctgcaagaacccagacctcgagtttgactcgctacagccctgcttctacccggacgaagatgacttctacttcggcggccccgactcgacccccccgggggaggacatctggaagaagtttgagctgctgcccacgcccccgctgtcgcccagccgtggcttcgcggagcacagctccgagcccccgagctgggtcacggagatgctgcttgagaacgagctgtggggcagcccggccgaggaggacgcgttcggcctggggggactgggtggcctcacccccaacccggtcatcctccaggactgcatgtggagcggcttctccgcccgcgagaagctggagcgcgccgtgagcgagaagctgcagcacggccgcgggccgccaaccgccggttccaccgcccagtccccgggagccggcgccgccagccctgcgggtcgcgggcacggcggggctgcgggagccggccgcgccggggccgccctgcccgccgagctcgcccacccggccgccgagtgcgtggatcccgccgtggtcttcccctttcccgtgaacaagcgcgagccagcgcccgtgcccgcagccccggccagtgccccggcggcgggccctgcggtcgcctcgggggcgggtattgccgccccagccggggccccgggggtcgcccctccgcgcccaggcggccgccagaccagcggcggcgaccacaaggccctcagtacctccggagaggacaccctgagcgattcaggtaaagaccgaactcgggtccggctgcctccctggggcactggaccccgggtcgcgtcccctttgttagtgctcgtatgtcttggcctggggagcattttggaggcagtgctaggggcagagaggtcctgtttcccccaagtctctcctcggggtaaagagaaggggctgagagaatgccgttgcaaaaggggtgctctccaattctcgccttcactaaagttccttccaccctctcctggggagccctcctctaggccatcacgggccctcacccggtcccccacctctcttttgcagcgcagtctgaggaataaaattggagaaagttggtggctaaaccgggtgggggtttagggggttgctgggtgcactgcctggacagaaacctgttagcgcaggggtgaaagggactctctggcccaggtcaggggagggaaagacatcccgagaagattcaagggctgtgcaaagccctgttta

SEQ ID NO: 354322 - DNA, 585 bp, Homo sapiens
agacgctggttcccctcgaccccatagtcatctcatcatgtggcatcttgaccagttcccctccatattcatttcctggaccatgtgaaagtcatcatagttcctactggttgtcctaagttcttcctggatacttgtgcgtgtgtgtacacttaccatattatatacatgtgtctctgggatatatatgtgtgtttgcctgcttatttcctatgttgtgaagcaatggccaacttatgtggggcaggccaaaattaagctcacgtgatagtcaaatttggtccagatgatgctcaaaatgatattcagacaaagcatgtcttgattctgatccttggatataaattttgtgcaacaggagctagagttgtaaaaaccacaagacaaaaccagctatgatttgatggtgtatttccaaaaacaaagtgctggtgtaacattctccatttaaggtagcccacttccagtggcttgttgcttcaccatataagggagtatgtgaaaagttttaacaattgcttgctgagaacatccggttctcattttgaaaggttaaaaaagaggggggaaaaggaaaaaaagaaa

SEQ ID NO: 354323 - DNA, 1850 bp, Homo sapiens
gggctccttctgcatctgctgggctgagcctgctggggtggggtgcagggatggagaggtaaaggagtggggctgcctctgaggatttagaatctctcaaggactagggctgtctgcgcgccttggagttctcgcttccactcacctccagaggacgatgcccctcaccccacacccacgttcatccaagcatggtctctgctcccttttctggtcctgggctgggcagcctgggccgggagtgctcctggcttctctgggatggctggagcccaccacaagccccagccctggcccgtgctgtcctcctgctgggaggagttgcttagtgcagcagacagagcagaggctctgagtggtcctgccactcactagctgtgtggccttgggcaagtggatgaacctttctgaggtccagcgttcccgtctgtaaaacagaattcccagcaggacctaccttgtgagtttcagaggcttaacggagatagtccatgagagagctgtgtgctccagggcagccgttctgtcccactctggccggtcctgcctttggcatggcctgtcctccgtggccttgtagagacgcaggagtctcaaaggcagtggaagacagaggccccagggtgggcccgcctgtagccccacttcccccacgtcaggaggaaagggaagagggagagtcccccagtctctctcagttggcagaggctctgcacccctttacagaggatcctgccgcctcaggacagccaggagggggctggagggagaggaggtggcccctgccctcagtccctggacgggcactattcatggccccctgttctgtcccacaatccagtgtgtccttgtgaccgtgccctccctgaggctggtggtgatggtggcctgtgtgtgcatccaagctcctgtgtgtgtgtttcaaggggcacaaagctgcatgaagcttcctaagagagtgctgagggagcacttcctataggaggaaggctggaaggcttcctggaggcagcagcctggagccctgtgcatgaggatgcgggactctgatagccaacctgctatttagtagggaaagtcgccttccaagccacaggatggccgtgacaagaggcccaaaggctcgcaggagtgctgcagcagagggcaggggtgtgggcagctagagggacctgtggctgggcagggctgaggtagcccgtgtgctgtgccggatcctttagacttgaccctgttggctacacagcatcagccctgggtattactcatccctgcgccctggccagaatgaaggaagcctctggggtggggggagggcacagccccatgtgcccacctcactgccacatgcccccaggccctgcgggtgaatggcctggagcaactgtgcaacaacctcgccagcgagcgcctacagctcttctccagccagatgctgctggcccaggaggaggaggagtgtcggcgggagttgctgtcctgggtgcctgtccctcagcctccgagggagtcctgcctagacctcctggtagatcagccccacagcctcctgagtatcctggacgcccagacatggctgtcccagacggagtttggttcttgttgcccaggctggagtgcaatggtgcggtctcggctcactgcaacctccacctcccaggccacggaccacaccttcctccagaagagccactatcaccatggtgaccaccccagctgtacctcacccgtctcagaatggggtccagggagaatttggttagggagaggtgctagggaggcctgagcagagggcaccctccgagtggggtcccagccttgagacagctgctgtgagggacagtactgaa

SEQ ID NO: 354324 - DNA, 228 bp, Homo sapiens
aattcaagcttctaacgatgtacggggacatgcggtgggaccaccctgctgtccgtctcctgtggctgcccctctgcccgctcctgatggctcgccttgtctctccagcaagactgtgcactccttgcaggcaggggctgggctggatgctgctcttgtgtcccacgtggtacttagttcaaggctgccccagcagatgcttaataaacagctcttcactttcctggc

SEQ ID NO: 354325 - DNA, 8165 bp, Homo sapiens
  misc_feature (2926)..(2926): n is a, c, g, or t
gggctccttctgcatctgctgggctgagcctgctggggtggggtgcagggatggagaggtaaaggagtggggctgcctctgaggatttagaatctctcaaggactagggctgtctgcgcgccttggagttctcgcttccactcacctccagaggacgatgcccctcaccccacacccacgttcatccaagcatggtctctgctcccttttctggtcctgggctgggcagcctgggccgggagtgctcctggcttctctgggatggctggagcccaccacaagccccagccctggcccgtgctgtcctcctgctgggaggagttgcttagtgcagcagacagagcagaggctctgagtggtcctgccactcactagctgtgtggccttgggcaagtggatgaacctttctgaggtccagcgttcccgtctgtaaaacagaattcccagcaggacctaccttgtgagtttcagaggcttaacggagatagtccatgagagagctgtgtgctccagggcagccgttctgtcccactctggccggtcctgcctttggcatggcctgtcctccgtggccttgtagagacgcaggagtctcaaaggcagtggaagacagaggccccagggtgggcccgcctgtagccccacttcccccacgtcaggaggaaagggaagagggagagtcccccagtctctctcagttggcagaggctctgcacccctttacagaggatcctgccgcctcaggacagccaggagggggctggagggagaggaggtggcccctgccctcagtccctggacgggcactattcatggccccctgttctgtcccacaatccagtgtgtccttgtgaccgtgccctccctgaggctggtggtgatggtggcctgtgtgtgcatccaagctcctgtgtgtgtgtttcaaggggcacaaagctgcatgaagcttcctaagagagtgctgagggagcacttcctataggaggaaggctggaaggcttcctggaggcagcagcctggagccctgtgcatgaggatgcgggactctgatagccaacctgctatttagtagggaaagtcgccttccaagccacaggatggccgtgacaagaggcccaaaggctcgcaggagtgctgcagcagagggcaggggtgtgggcagctagagggacctgtggctgggcagggctgaggtagcccgtgtgctgtgccggatcctttagacttgaccctgttggctacacagcatcagccctgggtattactcatccctgcgccctggccagaatgaaggaagcctctggggtggggggagggcacagccccatgtgcccacctcactgccacatgcccccaggccctgcgggtgaatggcctggagcaactgtgcaacaacctcgccagcgagcgcctacagctcttctccagccagatgctgctggcccaggaggaggaggagtgtcggcgggagttgctgtcctgggtgcctgtccctcagcctccgagggagtcctgcctagacctcctggtagatcagccccacagcctcctgagtatcctggacgcccagacatggctgtcccaggctggagtgcaatggtgcggtctcggctcactgcaacctccacctcccaggccacggaccacaccttcctccagaagagccactatcaccatggtgaccaccccagctatgccaagccccggctgcccctgcccgtgttcaccgtgcgacattatgcagggactgtcacctaccaggttcacaagtttttaaacagaaaccgggatcagctggaccctgctgtggtggagatgcttggccagagccagctccagctggtgggcagcctgttccaggaggcagagccccagtccaggggagggcgaggcagacccacgctggcctctcgcttccagcaggccctggaggacctcatagcccggctgggcaggagccatgtctatttcatccagtgcctcacccctaaccctggaaagcttccaggcctctttgacgtgggacatgtgacagagcaactgcaccaggcagccatactggaggccgtgggcacccgcagtgccaacttccccgtgcgtgtgccctttgaggccttcctggccagcttccaggccctggggtcagaagggcaggaagacctctctgaccgggagaagtgtggtgccgtcctgagccaggtgctgggggccgaatcacctctctatcaccttggagccaccaaggtcctgctgcaggagcagggctggcagcggctggaggagctccgggaccagcagcgctcccaggccctggtcgacctgcaccgcagcttccacacctgcatctcccgccagcgcgtcctgccccggatgcaggctcgcatgcgtgggttccaggccaggaagcggtacctccggcggcgggcagctttgggacagctgaacaccatcctgctggtggcccagcccctgctccagaggcggcagagactgcagcttgggcgttggcagggctggcatagcagcgaaagggccttggagagagtgccaagcatggagctggggcgcttggagatcccggctgagctggccgtcatgctgaagacggcggaaagccatcgggacgccctggctgggagcatcaccgagtgcctgccgcctgaggttcctgcccggcccagcctgactctcccagcagacattgacctgttccctttctccagcttcgtcgccatcggctttcaggaaccgtccctgcccaggccagggcagccactggcgaagcccctaacccagctggatggagacaaccctcagcgtgccctggacatcaacaaagtgatgctgcggctcctgggggacggatccctggagtcctggcagaggcagatcatgggcgcatacctggtgcggcaggggcagtgcnggccagggctgcggaatgagctctttagccagctggtggcccagctatggcagaacccagatgaacagcagagccagcgtggctgggccctcatggctgttttgctcagcgcctttcccccactgcctgtcctacagaagccactgctcaagttcgtgtctgaccaggcccccaggggcatggcagcgctgtgccagcacaagctgctgggggccttggagcagtcgcagctggcctcgggggccactcgggcccaccccccgacccagctggagtggctggccggatggcggcggggccgcatggcgctggatgtgttcaccttcagcgaggagtgctactcggccgaggtggagtcttggaccaccggggagcagctggctgggtggatcctgcagagcagaggcctggaggcgcctccccggggctggtctgtgtcactgcactccagggacgcatggcaggacttggctggctgcgactttgtgctggacctgatcagccagactgaggacctgggggacccagctcgcccccgcagctaccccatcactcctcttggctcagccgaggccattccccttgcccctggcattcaggccccctcactgcccccaggaccccctccaggtccagccccaacgctgcccagcagggaccacacaggggaggtccagaggtcagggagcctggacggcttcctggaccagatcttccagccagtgatatcctccggcctcagcgatctggaacaaagctgggctctgagcagccgcatgaagggagggggcgccattgggcccacacagcagggctaccccatggtgtacccaggaatgattcagatgcctgcataccagccaggcatggtccctgcacccatgcccatgatgccagcaatgggcacagtccctgccatgccagccatggtggtgccgccgcagccaccgcttcccagcctggatgcagggcagctggccgtccagcagcagaactttatccagcagcaggcgctaatcctggcccagcagatgacagcccaggccatgtccctgtccctggagcagcagatgcagcagcggcagcagcaggctcgggcctccgaggctgcgtcccaggcctcaccctcagccgtcacctccaagcccaggaagccccccacacccccggagaagccacagcgtgacctgggatcagagggtggctgcctgagggagacctccgaggaggctgaagacaggccctatcagcccaagagcttccagcagaaacggaactatttccagaggatggggcagccacagatcacagtgaggacgatgaagcccccggccaaggtccacatcccccagggggaagcgcaggaggaggaggaggaggaggaggaggaggaggagcaggaggagcaagaagtggaaacaagagcagtgccgtcccctcctcctccccccatcgtgaagaagccattgaagcaaggtggggccaaagctccaaaagaggctgaggctgagccagccaaggagacagcggccaaggccatggccaagggccagcccaaggcagggggactgtggtgcgcagctcagactccaagcccaagcggccacaacccagcagggaaattggcaacatcatccgcatgtaccagagccgcccgggccccgtgcctgtgcccgtgcagccatccaggcctcccaaagctttcctgaggaaaatcgaccccaaggacgaggctctggccaagctgggtatcaacggtgcccactcgtccccgccgatgctgtcccccagcccaggaaagggccccccgccagctgtggctcctcgacccaaggccccgctacagcttgggccctctagctccatcaaggaaaagcaggggccccttctggacctgtttggccagaagctgcctattgcccacacacccccacctccaccagcgccaccactgcctctgcccgaggacccagggaccctttcagcagagcgtcgttgcttgacacagcccgtggaggaccagggggtctccacccagctactcgcgccctctggcagcgtgtgcttctcctacaccggcacgccctggaagttgttcctacgcaaggaggtgttctacccacgggagaacttcagccatccctactacctgaggctcctctgtgagcagatcctacgggacaccttctccgagtcctgtatccggatttcccagaatgagcggcggaaaatgaaagacctgctgggaggcttggaggtggacctggattctctcaccaccaccgaagacagcgtcaagaagcgcatcgtggtggccgctcgggacaactgggccaattacttctcccgcttctttcctgtctcgggcgagagtggcagcgacgtgcagctgttagccgtgtcccaccgtgggctgcgactgctcaaggtgacccaaggccccggcctccgccccgaccagctgaagattctctgctcatacagctttgcggaggtgctgggtgtggagtgccggggcggctccaccctggagctgtcactgaagagcgagcagctggtgctgcacacagcccgggcaagggccatcgaggcgctggttgagctattcctgaatgagcttaagaaggactccggctatgtcatcgccctgcgcagctacatcactgacaactgcagcctcctcagcttccaccgtggggacctcatcaagctgctgccggtggccaccctggagccaggctggcagtttggctctgccgggggccgttccggactctttcctgccgacatagtgcagccggctgccgctcccgacttttccttctccaaggagcagaggagtggctggcacaagggtcagctgtccaacggggaaccagggctggctcggtgggacagggcctcagaggtgaggaagatgggagagggacaagcagaggcaaggcctgcctgagactgaggaaggaaaggggtttgaccactcccgaggctgccatgcggtgggaccaccctgctgtccgtctcctgtggctgcccctctgcccgctcctgatggctcgccttgtctctccagcaagactgtgcactccttgcaggcaggggctgggctggatgctgctcttgtgtcccacgtggtacttagttcaaggctgccccagcagatgcttaataaacagctcttcactttcctggcttctggtcttgctcctttggtgtctggctggggagggatggggctggggcaggacccctgggacagggcactggacactcaggtggcaccaggtttcttgtgatcccagcgccctgcccacccttggagccaggcacacagtgacgactcggaggccaccagcctgtcctctgtggcctatgcctttctgcccgactcccacagctacaccatgcaggaattcgcccggcgttacttccggaggtcccaggccttgctgggccagactgatggaggtgccgcaggaaaggacacggacagcctggtgcagtacaccaaggctcccatccaggagtcgctcctcagcctcagtgatgatgtgagcaagctggctgtagccagcttcctggccctgatgcggtttatgggtgaccagtccaagccccggggcaaggatgagatggatctgctctatgaactgctgaagctgtgccagcaggagaagctgagggatgagatttactgccaggttatcaagcaggtcacgggacacccccggccggaacactgcactcgaggctggagcttcctcagccttctcacaggcttcttccccccgtcgaccaggctgatgccctacctgaccaagtttctgcaggattcaggccccagccaagagctggcccggagcagccaggagcacctccagcgcacagtcaaatatggggggcgccggcggatgcccccaccgggtgaaatgaaggctttcctgaaaggacaagcgattcgcctgcttcttattcacctgccggggggtgtggattataggacgaatatccagactttcacagtagcagcagaagtgcaggaggagctgtgccggcaaatgggtatcacggagcctcaggaagtgcaggaattcgccctcttcctcatcaaagagaagagccagctggtgcggcccctgcagcccgccgaatacctcaacagcgtggtagtggaccaggacgtgagcctgcacagccggcggctccactgggagaccccactgcacttcgataactccacctacatcagcacccactacagccaggtgctgtgggactaccttcaggggaagctgccagtcagcgccaaggcagacgcgcagctcgccaggctggccgccctgcagcacctcagcaaggccaacaggaataccccctcagggcaggacctgctagcttacgtgccaaagcagctgcaacggcaggtgaacacggcctccatcaagaacctgatgggtcaggagctgagacggctggaaggacacagcccccaggaagcacagatcagcttcattgaggccatgagccagctgcccctcttcggctacaccgtctatggggtgctgcgagtgagcatgcaggccctgtccggacccactctcctggggctcaaccgccagcatctcatcctcatggaccccagctcccagagcctgtactgccgcattgccctgaagagcctgcagcggctccacctgctaagccctctggaggagaaggggccccctggcctggaagtcaactatggctcagctgacaacccccagaccatctggtttgagctgccacaggcccaggagctgctatacaccactgtcttcctgatagacagcagtgcctcttgcactgagtggcccagcatcaactgagaggagtgcaggccggggagagaagaggatgaggcctcccccggcccaagtctcacccacatggtctgccttggatgctatcagatcactgttctagaacctgcctcagcacagcccagccggcccacatgcaggccatgaggcaggggctgctatcacgtcaccagcaggcaaagaaaacagccagaccctctccaggacggcctggggccaaagcgggctgcaggaactcggctggggcacctgaggttgcccagtctgagggagatgcccacccgaccccaggctccgcccaggccccacattagcacaagcccaggcatgggagaaacagctgctgaggaaataaaactccctggagaaaaaaaatg

SEQ ID NO: 354326 - DNA, 8214 bp, Homo sapiens
  misc_feature (2926)..(2926): n is a, c, g, or t
gggctccttctgcatctgctgggctgagcctgctggggtggggtgcagggatggagaggtaaaggagtggggctgcctctgaggatttagaatctctcaaggactagggctgtctgcgcgccttggagttctcgcttccactcacctccagaggacgatgcccctcaccccacacccacgttcatccaagcatggtctctgctcccttttctggtcctgggctgggcagcctgggccgggagtgctcctggcttctctgggatggctggagcccaccacaagccccagccctggcccgtgctgtcctcctgctgggaggagttgcttagtgcagcagacagagcagaggctctgagtggtcctgccactcactagctgtgtggccttgggcaagtggatgaacctttctgaggtccagcgttcccgtctgtaaaacagaattcccagcaggacctaccttgtgagtttcagaggcttaacggagatagtccatgagagagctgtgtgctccagggcagccgttctgtcccactctggccggtcctgcctttggcatggcctgtcctccgtggccttgtagagacgcaggagtctcaaaggcagtggaagacagaggccccagggtgggcccgcctgtagccccacttcccccacgtcaggaggaaagggaagagggagagtcccccagtctctctcagttggcagaggctctgcacccctttacagaggatcctgccgcctcaggacagccaggagggggctggagggagaggaggtggcccctgccctcagtccctggacgggcactattcatggccccctgttctgtcccacaatccagtgtgtccttgtgaccgtgccctccctgaggctggtggtgatggtggcctgtgtgtgcatccaagctcctgtgtgtgtgtttcaaggggcacaaagctgcatgaagcttcctaagagagtgctgagggagcacttcctataggaggaaggctggaaggcttcctggaggcagcagcctggagccctgtgcatgaggatgcgggactctgatagccaacctgctatttagtagggaaagtcgccttccaagccacaggatggccgtgacaagaggcccaaaggctcgcaggagtgctgcagcagagggcaggggtgtgggcagctagagggacctgtggctgggcagggctgaggtagcccgtgtgctgtgccggatcctttagacttgaccctgttggctacacagcatcagccctgggtattactcatccctgcgccctggccagaatgaaggaagcctctggggtggggggagggcacagccccatgtgcccacctcactgccacatgcccccaggccctgcgggtgaatggcctggagcaactgtgcaacaacctcgccagcgagcgcctacagctcttctccagccagatgctgctggcccaggaggaggaggagtgtcggcgggagttgctgtcctgggtgcctgtccctcagcctccgagggagtcctgcctagacctcctggtagatcagccccacagcctcctgagtatcctggacgcccagacatggctgtcccaggctggagtgcaatggtgcggtctcggctcactgcaacctccacctcccaggccacggaccacaccttcctccagaagagccactatcaccatggtgaccaccccagctatgccaagccccggctgcccctgcccgtgttcaccgtgcgacattatgcagggactgtcacctaccaggttcacaagtttttaaacagaaaccgggatcagctggaccctgctgtggtggagatgcttggccagagccagctccagctggtgggcagcctgttccaggaggcagagccccagtccaggggagggcgaggcagacccacgctggcctctcgcttccagcaggccctggaggacctcatagcccggctgggcaggagccatgtctatttcatccagtgcctcacccctaaccctggaaagcttccaggcctctttgacgtgggacatgtgacagagcaactgcaccaggcagccatactggaggccgtgggcacccgcagtgccaacttccccgtgcgtgtgccctttgaggccttcctggccagcttccaggccctggggtcagaagggcaggaagacctctctgaccgggagaagtgtggtgccgtcctgagccaggtgctgggggccgaatcacctctctatcaccttggagccaccaaggtcctgctgcaggagcagggctggcagcggctggaggagctccgggaccagcagcgctcccaggccctggtcgacctgcaccgcagcttccacacctgcatctcccgccagcgcgtcctgccccggatgcaggctcgcatgcgtgggttccaggccaggaagcggtacctccggcggcgggcagctttgggacagctgaacaccatcctgctggtggcccagcccctgctccagaggcggcagagactgcagcttgggcgttggcagggctggcatagcagcgaaagggccttggagagagtgccaagcatggagctggggcgcttggagatcccggctgagctggccgtcatgctgaagacggcggaaagccatcgggacgccctggctgggagcatcaccgagtgcctgccgcctgaggttcctgcccggcccagcctgactctcccagcagacattgacctgttccctttctccagcttcgtcgccatcggctttcaggaaccgtccctgcccaggccagggcagccactggcgaagcccctaacccagctggatggagacaaccctcagcgtgccctggacatcaacaaagtgatgctgcggctcctgggggacggatccctggagtcctggcagaggcagatcatgggcgcatacctggtgcggcaggggcagtgcnggccagggctgcggaatgagctctttagccagctggtggcccagctatggcagaacccagatgaacagcagagccagcgtggctgggccctcatggctgttttgctcagcgcctttcccccactgcctgtcctacagaagccactgctcaagttcgtgtctgaccaggcccccaggggcatggcagcgctgtgccagcacaagctgctgggggccttggagcagtcgcagctggcctcgggggccactcgggcccaccccccgacccagctggagtggctggccggatggcggcggggccgcatggcgctggatgtgttcaccttcagcgaggagtgctactcggccgaggtggagtcttggaccaccggggagcagctggctgggtggatcctgcagagcagaggcctggaggcgcctccccggggctggtctgtgtcactgcactccagggacgcatggcaggacttggctggctgcgactttgtgctggacctgatcagccagactgaggacctgggggacccagctcgcccccgcagctaccccatcactcctcttggctcagccgaggccattccccttgcccctggcattcaggccccctcactgcccccaggaccccctccaggtccagccccaacgctgcccagcagggaccacacaggggaggtccagaggtcagggagcctggacggcttcctggaccagatcttccagccagtgatatcctccggcctcagcgatctggaacaaagctgggctctgagcagccgcatgaagggagggggcgccattgggcccacacagcagggctaccccatggtgtacccaggaatgattcagatgcctgcataccagccaggcatggtccctgcacccatgcccatgatgccagcaatgggcacagtccctgccatgccagccatggtggtgccgccgcagccaccgcttcccagcctggatgcagggcagctggccgtccagcagcagaactttatccagcagcaggcgctaatcctggcccagcagatgacagcccaggccatgtccctgtccctggagcagcagatgcagcagcggcagcagcaggctcgggcctccgaggctgcgtcccaggcctcaccctcagccgtcacctccaagcccaggaagccccccacacccccggagaagccacagcgtgacctgggatcagagggtggctgcctgagggagacctccgaggaggctgaagacaggccctatcagcccaagagcttccagcagaaacggaactatttccagaggatggggcagccacagatcacagtgaggacgatgaagcccccggccaaggtccacatcccccagggggaagcgcaggaggaggaggaggaggaggaggaggaggaggagcaggaggagcaagaagtggaaacaagagcagtgccgtcccctcctcctccccccatcgtgaagaagccattgaagcaaggtggggccaaagctccaaaagaggctgaggctgagccagccaaggagacagcggccaaggccatggccaagggccagcccaaggcagggggactgtggtgcgcagctcagactccaagcccaagcggccacaacccagcagggaaattggcaacatcatccgcatgtaccagagccgcccgggccccgtgcctgtgcccgtgcagccatccaggcctcccaaagctttcctgaggaaaatcgaccccaaggacgaggctctggccaagctgggtatcaacggtgcccactcgtccccgccgatgctgtcccccagcccaggaaagggccccccgccagctgtggctcctcgacccaaggccccgctacagcttgggccctctagctccatcaaggaaaagcaggggccccttctggacctgtttggccagaagctgcctattgcccacacacccccacctccaccagcgccaccactgcctctgcccgaggacccagggaccctttcagcagagcgtcgttgcttgacacagcccgtggaggaccagggggtctccacccagctactcgcgccctctggcagcgtgtgcttctcctacaccggcacgccctggaagttgttcctacgcaaggaggtgttctacccacgggagaacttcagccatccctactacctgaggctcctctgtgagcagatcctacgggacaccttctccgagtcctgtatccggatttcccagaatgagcggcggaaaatgaaagacctgctgggaggcttggaggtggacctggattctctcaccaccaccgaagacagcgtcaagaagcgcatcgtggtggccgctcgggacaactgggccaattacttctcccgcttctttcctgtctcgggcgagagtggcagcgacgtgcagctgttagccgtgtcccaccgtgggctgcgactgctcaaggtgacccaaggccccggcctccgccccgaccagctgaagattctctgctcatacagctttgcggaggtgctgggtgtggagtgccggggcggctccaccctggagctgtcactgaagagcgagcagctggtgctgcacacagcccgggcaagggccatcgaggcgctggttgagctattcctgaatgagcttaagaaggactccggctatgtcatcgccctgcgcagctacatcactgacaactgcagcctcctcagcttccaccgtggggacctcatcaagctgctgccggtggccaccctggagccaggctggcagtttggctctgccgggggccgttccggactctttcctgccgacatagtgcagccggctgccgctcccgacttttccttctccaaggagcagaggagtggctggcacaagggtcagctgtccaacggggaaccagggctggctcggtgggacagggcctcagaggtgaggaagatgggagagggacaagcagaggcaaggcctgcctgagactgaggaaggaaaggggtttgaccactcccgaggctgccatgcggtgggaccaccctgctgtccgtctcctgtggctgcccctctgcccgctcctgatggctcgccttgtctctccagcaagactgtgcactccttgcaggcaggggctgggctggatgctgctcttgtgtcccacgtggtacttagttcaaggctgccccagcagatgcttaataaacagctcttcactttcctggcttctggtcttgctcctttggtgtctggctggggagggatggggctggggcaggacccctgggacagggcactggacactcaggtggcaccaggtttcttgtgatcccagcgccctgcccacccttggagccaggcacacagtgacgactcggaggccaccagcctgtcctctgtggcctatgcctttctgcccgactcccacagctacaccatgcaggaattcgcccggcgttacttccggaggtcccaggccttgctgggccagactgatggaggtgccgcaggaaaggacacggacagcctggtgcagtacaccaaggctcccatccaggagtcgctcctcagcctcagtgatgatgtgagcaagctggctgtagccagcttcctggccctgatgcggtttatgggtgaccagtccaagccccggggcaaggatgagatggatctgctctatgaactgctgaagctgtgccagcaggagaagctgagggatgagatttactgccaggttatcaagcaggtcacgggacacccccggccggaacactgcactcgaggctggagcttcctcagccttctcacaggcttcttccccccgtcgaccaggctgatgccctacctgaccaagtttctgcaggattcaggccccagccaagagctggcccggagcagccaggagcacctccagcgcacagtcaaatatggggggcgccggcggatgcccccaccgggtgaaatgaaggctttcctgaaaggacaagcgattcgcctgcttcttattcacctgccggggggtgtggattataggacgaatatccagactttcacagtagcagcagaagtgcaggaggagctgtgccggcaaatgggtatcacggagcctcaggaagtgcaggaattcgccctcttcctcatcaaagagaagagtaagcttggggacggagcctcacggtggggccactcccctgcccaggggccagctggtgcggcccctgcagcccgccgaatacctcaacagcgtggtagtggaccaggacgtgagcctgcacagccggcggctccactgggagaccccactgcacttcgataactccacctacatcagcacccactacagccaggtgctgtgggactaccttcaggggaagctgccagtcagcgccaaggcagacgcgcagctcgccaggctggccgccctgcagcacctcagcaaggccaacaggaataccccctcagggcaggacctgctagcttacgtgccaaagcagctgcaacggcaggtgaacacggcctccatcaagaacctgatgggtcaggagctgagacggctggaaggacacagcccccaggaagcacagatcagcttcattgaggccatgagccagctgcccctcttcggctacaccgtctatggggtgctgcgagtgagcatgcaggccctgtccggacccactctcctggggctcaaccgccagcatctcatcctcatggaccccagctcccagagcctgtactgccgcattgccctgaagagcctgcagcggctccacctgctaagccctctggaggagaaggggccccctggcctggaagtcaactatggctcagctgacaacccccagaccatctggtttgagctgccacaggcccaggagctgctatacaccactgtcttcctgatagacagcagtgcctcttgcactgagtggcccagcatcaactgagaggagtgcaggccggggagagaagaggatgaggcctcccccggcccaagtctcacccacatggtctgccttggatgctatcagatcactgttctagaacctgcctcagcacagcccagccggcccacatgcaggccatgaggcaggggctgctatcacgtcaccagcaggcaaagaaaacagccagaccctctccaggacggcctggggccaaagcgggctgcaggaactcggctggggcacctgaggttgcccagtctgagggagatgcccacccgaccccaggctccgcccaggccccacattagcacaagcccaggcatgggagaaacagctgctgaggaaataaaactccctggagaaaaaaaatg

SEQ ID NO: 354327 - DNA, 8205 bp, Homo sapiens
  misc_feature (2926)..(2926): n is a, c, g, or t
gggctccttctgcatctgctgggctgagcctgctggggtggggtgcagggatggagaggtaaaggagtggggctgcctctgaggatttagaatctctcaaggactagggctgtctgcgcgccttggagttctcgcttccactcacctccagaggacgatgcccctcaccccacacccacgttcatccaagcatggtctctgctcccttttctggtcctgggctgggcagcctgggccgggagtgctcctggcttctctgggatggctggagcccaccacaagccccagccctggcccgtgctgtcctcctgctgggaggagttgcttagtgcagcagacagagcagaggctctgagtggtcctgccactcactagctgtgtggccttgggcaagtggatgaacctttctgaggtccagcgttcccgtctgtaaaacagaattcccagcaggacctaccttgtgagtttcagaggcttaacggagatagtccatgagagagctgtgtgctccagggcagccgttctgtcccactctggccggtcctgcctttggcatggcctgtcctccgtggccttgtagagacgcaggagtctcaaaggcagtggaagacagaggccccagggtgggcccgcctgtagccccacttcccccacgtcaggaggaaagggaagagggagagtcccccagtctctctcagttggcagaggctctgcacccctttacagaggatcctgccgcctcaggacagccaggagggggctggagggagaggaggtggcccctgccctcagtccctggacgggcactattcatggccccctgttctgtcccacaatccagtgtgtccttgtgaccgtgccctccctgaggctggtggtgatggtggcctgtgtgtgcatccaagctcctgtgtgtgtgtttcaaggggcacaaagctgcatgaagcttcctaagagagtgctgagggagcacttcctataggaggaaggctggaaggcttcctggaggcagcagcctggagccctgtgcatgaggatgcgggactctgatagccaacctgctatttagtagggaaagtcgccttccaagccacaggatggccgtgacaagaggcccaaaggctcgcaggagtgctgcagcagagggcaggggtgtgggcagctagagggacctgtggctgggcagggctgaggtagcccgtgtgctgtgccggatcctttagacttgaccctgttggctacacagcatcagccctgggtattactcatccctgcgccctggccagaatgaaggaagcctctggggtggggggagggcacagccccatgtgcccacctcactgccacatgcccccaggccctgcgggtgaatggcctggagcaactgtgcaacaacctcgccagcgagcgcctacagctcttctccagccagatgctgctggcccaggaggaggaggagtgtcggcgggagttgctgtcctgggtgcctgtccctcagcctccgagggagtcctgcctagacctcctggtagatcagccccacagcctcctgagtatcctggacgcccagacatggctgtcccaggctggagtgcaatggtgcggtctcggctcactgcaacctccacctcccaggccacggaccacaccttcctccagaagagccactatcaccatggtgaccaccccagctatgccaagccccggctgcccctgcccgtgttcaccgtgcgacattatgcagggactgtcacctaccaggttcacaagtttttaaacagaaaccgggatcagctggaccctgctgtggtggagatgcttggccagagccagctccagctggtgggcagcctgttccaggaggcagagccccagtccaggggagggcgaggcagacccacgctggcctctcgcttccagcaggccctggaggacctcatagcccggctgggcaggagccatgtctatttcatccagtgcctcacccctaaccctggaaagcttccaggcctctttgacgtgggacatgtgacagagcaactgcaccaggcagccatactggaggccgtgggcacccgcagtgccaacttccccgtgcgtgtgccctttgaggccttcctggccagcttccaggccctggggtcagaagggcaggaagacctctctgaccgggagaagtgtggtgccgtcctgagccaggtgctgggggccgaatcacctctctatcaccttggagccaccaaggtcctgctgcaggagcagggctggcagcggctggaggagctccgggaccagcagcgctcccaggccctggtcgacctgcaccgcagcttccacacctgcatctcccgccagcgcgtcctgccccggatgcaggctcgcatgcgtgggttccaggccaggaagcggtacctccggcggcgggcagctttgggacagctgaacaccatcctgctggtggcccagcccctgctccagaggcggcagagactgcagcttgggcgttggcagggctggcatagcagcgaaagggccttggagagagtgccaagcatggagctggggcgcttggagatcccggctgagctggccgtcatgctgaagacggcggaaagccatcgggacgccctggctgggagcatcaccgagtgcctgccgcctgaggttcctgcccggcccagcctgactctcccagcagacattgacctgttccctttctccagcttcgtcgccatcggctttcaggaaccgtccctgcccaggccagggcagccactggcgaagcccctaacccagctggatggagacaaccctcagcgtgccctggacatcaacaaagtgatgctgcggctcctgggggacggatccctggagtcctggcagaggcagatcatgggcgcatacctggtgcggcaggggcagtgcnggccagggctgcggaatgagctctttagccagctggtggcccagctatggcagaacccagatgaacagcagagccagcgtggctgggccctcatggctgttttgctcagcgcctttcccccactgcctgtcctacagaagccactgctcaagttcgtgtctgaccaggcccccaggggcatggcagcgctgtgccagcacaagctgctgggggccttggagcagtcgcagctggcctcgggggccactcgggcccaccccccgacccagctggagtggctggccggatggcggcggggccgcatggcgctggatgtgttcaccttcagcgaggagtgctactcggccgaggtggagtcttggaccaccggggagcagctggctgggtggatcctgcagagcagaggcctggaggcgcctccccggggctggtctgtgtcactgcactccagggacgcatggcaggacttggctggctgcgactttgtgctggacctgatcagccagactgaggacctgggggacccagctcgcccccgcagctaccccatcactcctcttggctcagccgaggccattccccttgcccctggcattcaggccccctcactgcccccaggaccccctccaggtccagccccaacgctgcccagcagggaccacacaggggaggtccagaggtcagggagcctggacggcttcctggaccagatcttccagccagtgatatcctccggcctcagcgatctggaacaaagctgggctctgagcagccgcatgaagggagggggcgccattgggcccacacagcagggctaccccatggtgtacccaggaatgattcagatgcctgcataccagccaggcatggtccctgcacccatgcccatgatgccagcaatgggcacagtccctgccatgccagccatggtggtgccgccgcagccaccgcttcccagcctggatgcagggcagctggccgtccagcagcagaactttatccagcagcaggcgctaatcctggcccagcagatgacagcccaggccatgtccctgtccctggagcagcagatgcagcagcggcagcagcaggctcgggcctccgaggctgcgtcccaggcctcaccctcagccgtcacctccaagcccaggaagccccccacacccccggagaagccacagcgtgacctgggatcagagggtggctgcctgagggagacctccgaggaggctgaagacaggccctatcagcccaagagcttccagcagaaacggaactatttccagaggatggggcagccacagatcacagtgaggacgatgaagcccccggccaaggtccacatcccccagggggaagcgcaggaggaggaggaggaggaggaggaggaggaggagcaggaggagcaagaagtggaaacaagagcagtgccgtcccctcctcctccccccatcgtgaagaagccattgaagcaaggtggggccaaagctccaaaagaggctgaggctgagccagccaaggagacagcggccaaggccatggccaagggccagcccaaggcagggggactgtggtgcgcagctcagactccaagcccaagcggccacaacccagcagggaaattggcaacatcatccgcatgtaccagagccgcccgggccccgtgcctgtgcccgtgcagccatccaggcctcccaaagctttcctgaggaaaatcgaccccaaggacgaggctctggccaagctgggtatcaacggtgcccactcgtccccgccgatgctgtcccccagcccaggaaagggccccccgccagctgtggctcctcgacccaaggccccgctacagcttgggccctctagctccatcaaggaaaagcaggggccccttctggacctgtttggccagaagctgcctattgcccacacacccccacctccaccagcgccaccactgcctctgcccgaggacccagggaccctttcagcagagcgtcgttgcttgacacagcccgtggaggaccagggggtctccacccagctactcgcgccctctggcagcgtgtgcttctcctacaccggcacgccctggaagttgttcctacgcaaggaggtgttctacccacgggagaacttcagccatccctactacctgaggctcctctgtgagcagatcctacgggacaccttctccgagtcctgtatccggatttcccagaatgagcggcggaaaatgaaagacctgctgggaggcttggaggtggacctggattctctcaccaccaccgaagacagcgtcaagaagcgcatcgtggtggccgctcgggacaactgggccaattacttctcccgcttctttcctgtctcgggcgagagtggcagcgacgtgcagctgttagccgtgtcccaccgtgggctgcgactgctcaaggtgacccaaggccccggcctccgccccgaccagctgaagattctctgctcatacagctttgcggaggtgctgggtgtggagtgccggggcggctccaccctggagctgtcactgaagagcgagcagctggtgctgcacacagcccgggcaagggccatcgaggcgctggttgagctattcctgaatgagcttaagaaggactccggctatgtcatcgccctgcgcagctacatcactgacaactgcagcctcctcagcttccaccgtggggacctcatcaagctgctgccggtggccaccctggagccaggctggcagtttggctctgccgggggccgttccggactctttcctgccgacatagtgcagccggctgccgctcccgacttttccttctccaaggagcagaggagtggctggcacaagggtcagctgtccaacggggaaccagggctggctcggtgggacagggcctcagaggtgaggaagatgggagagggacaagcagaggcaaggcctgcctgagactgaggaaggaaaggggtttgaccactcccgaggctgccatgcggtgggaccaccctgctgtccgtctcctgtggctgcccctctgcccgctcctgatggctcgccttgtctctccagcaagactgtgcactccttgcaggcaggggctgggctggatgctgctcttgtgtcccacgtggtacttagttcaaggctgccccagcagatgcttaataaacagctcttcactttcctggcttctggtcttgctcctttggtgtctggctggggagggatggggctggggcaggacccctgggacagggcactggacactcaggtggcaccaggtttcttgtgatcccagcgccctgcccacccttggagccaggcacacagtgacgactcggaggccaccagcctgtcctctgtggcctatgcctttctgcccgactcccacagctacaccatgcaggaattcgcccggcgttacttccggaggtcccaggccttgctgggccagactgatggaggtgccgcaggaaaggacacggacagcctggtgcagtacaccaaggctcccatccaggagtcgctcctcagcctcagtgatgatgtgagcaagctggctgtagccagcttcctggccctgatgcggtttatgggtgaccagtccaagccccggggcaaggatgagatggatctgctctatgaactgctgaagctgtgccagcaggagaagctgagggatgagatttactgccaggttatcaagcaggtcacgggacacccccggccggaacactgcactcgaggctggagcttcctcagccttctcacaggcttcttccccccgtcgaccaggctgatgccctacctgaccaagtttctgcaggattcaggccccagccaagagctggcccggagcagccaggagcacctccagcgcacagtcaaatatggggggcgccggcggatgcccccaccgggtgaaatgaaggctttcctgaaaggacaagcgattcgcctgcttcttattcacctgccggggggtgtggattataggacgaatatccagactttcacagtagcagcagaagtgcaggaggagctgtgccggcaaatgggtatcacggagcctcaggaagtgcaggaattcgccctcttcctcatcaaagagaagagccagctggtgcggcccctgcagcccgccgaatacctcaacagcgtggtagtggaccaggacgtgagcctgcacagccggcggctccactgggagaccccactgcacttcgataactccacctacatcagcacccactacagccaggtgctgtgggactaccttcaggggaagctgccagtcagcgccaaggcagacgcgcagctcgccaggctggccgccctgcagcacctcagcaaggccaacaggaataccccctcagggcaggacctgctagcttacgtgccaaagcagctgcaacggcaggtgaacacggcctccatcaagaacctgatgggtcaggagctgagacggctggaaggacacagcccccaggaagcacagatcagcttcattgaggccatgagccagctgcccctcttcggctacaccgtctatggggtgctgcgagtgagcatgcaggccctgtccggacccactctcctggggctcaaccgccagcatctcatcctcatggaccccagctcccagagcctgtactgccgcattgccctgaagagcctgcagcggctccacctgctaagccctctggaggagaaggggccccctggcctggaagtcaactatggctcagctgacaacccccagaccatctggtttgagctgccacaggcccaggagctgctatacaccactgtcttcctgatagacagcagtgcctcttgcactgagtggcccagcatcaactgagaggagtgcaggccggggagagaagaggatgaggcctcccccggcccaagtctcacccacatggtctgccttggatggggcccctttaaaattaaccccaaagggaagaatttccccctatcagatcactgttctagaacctgcctcagcacagcccagccggcccacatgcaggccatgaggcaggggctgctatcacgtcaccagcaggcaaagaaaacagccagaccctctccaggacggcctggggccaaagcgggctgcaggaactcggctggggcacctgaggttgcccagtctgagggagatgcccacccgaccccaggctccgcccaggccccacattagcacaagcccaggcatgggagaaacagctgctgaggaaataaaactccctggagaaaaaaaatg

SEQ ID NO: 354328 - DNA, 4512 bp, Homo sapiens
tctcagacttggagtggtaatgattcctgcattgcccctgcttgccctctgagacagactgcagcttgggcgttggcagggctggcatagcagcgaaagggccttggagagagtgccaagcatggagctggggcgcttggagatcccggctgagctggccgtcatgctgaagacggcggaaagccatcgggacgccctggctgggagcatcaccgagtgcctgccgcctgaggttcctgcccggcccagcctgactctcccacagaactttatccagcagcaggcgctaatcctggcccagcagatgacagcccaggccatgtccctgtccctggagcagcagatgcagcagcggcagcagcaggctcgggcctccgaggctgcgtcccaggcctcaccctcagccgtcacctccaagcccaggaagccccccacacccccggagaagccacagcgtgacctgggatcagagggtggctgcctgagggagacctccgaggaggctgaagacaggccctatcagcccaagagcttccagcagaaacggaactatttccagaggatggggcagccacagatcacagtgaggacgatgaagcccccggccaaggtccacatcccccagggggaagcgcaggaggaggaggaggaggaggaggaggaggaggagcaggaggagcaagaagtggaaacaagagcagtgccgtcccctcctcctccccccatcgtgaagaagccattgaagcaaggtggggccaaagctccaaaagaggctgaggctgagccagccaaggagacagcggccaaggccatggccaagggccagcccaaggcagggggactgtggtgcgcagctcagactccaagcccaagcggccacaacccagcagggaaattggcaacatcatccgcatgtaccagagccgcccgggccccgtgcctgtgcccgtgcagccatccaggcctcccaaagctttcctgaggaaaatcgaccccaaggacgaggctctggccaagctgggtatcaacggtgcccactcgtccccgccgatgctgtcccccagcccaggaaagggccccccgccagctgtggctcctcgacccaaggccccgctacagcttgggccctctagctccatcaaggaaaagcaggggccccttctggacctgtttggccagaagctgcctattgcccacacacccccacctccaccagcgccaccactgcctctgcccgaggacccagggaccctttcagcagagcgtcgttgcttgacacagcccgtggaggaccagggggtctccacccagctactcgcgccctctggcagcgtgtgcttctcctacaccggcacgccctggaagttgttcctacgcaaggaggtgttctacccacgggagaacttcagccatccctactacctgaggctcctctgtgagcagatcctacgggacaccttctccgagtcctgtatccggatttcccagaatgagcggcggaaaatgaaagacctgctgggaggcttggaggtggacctggattctctcaccaccaccgaagacagcgtcaagaagcgcatcgtggtggccgctcgggacaactgggccaattacttctcccgcttctttcctgtctcgggcgagagtggcagcgacgtgcagctgttagccgtgtcccaccgtgggctgcgactgctcaaggtgacccaaggccccggcctccgccccgaccagctgaagattctctgctcatacagctttgcggaggtgctgggtgtggagtgccggggcggctccaccctggagctgtcactgaagagcgagcagctggtgctgcacacagcccgggcaagggccatcgaggcgctggttgagctattcctgaatgagcttaagaaggactccggctatgtcatcgccctgcgcagctacatcactgacaactgcagcctcctcagcttccaccgtggggacctcatcaagctgctgccggtggccaccctggagccaggctggcagtttggctctgccgggggccgttccggactctttcctgccgacatagtgcagccggctgccgctcccgacttttccttctccaaggagcagaggagtggctggcacaagggtcagctgtccaacggggaaccagggctggctcggtgggacagggcctcagaggtgaggaagatgggagagggacaagcagaggcaaggcctgcctgagactgaggaaggaaaggggtttgaccactcccgaggctgccatgcggtgggaccaccctgctgtccgtctcctgtggctgcccctctgcccgctcctgatggctcgccttgtctctccagcaagactgtgcactccttgcaggcaggggctgggctggatgctgctcttgtgtcccacgtggtacttagttcaaggctgccccagcagatgcttaataaacagctcttcactttcctggcttctggtcttgctcctttggtgtctggctggggagggatggggctggggcaggacccctgggacagggcactggacactcaggtggcaccaggtttcttgtgatcccagcgccctgcccacccttggagccaggcacacagtgacgactcggaggccaccagcctgtcctctgtggcctatgcctttctgcccgactcccacagctacaccatgcaggaattcgcccggcgttacttccggaggtcccaggccttgctgggccagactgatggaggtgccgcaggaaaggacacggacagcctggtgcagtacaccaaggctcccatccaggagtcgctcctcagcctcagtgatgatgtgagcaagctggctgtagccagcttcctggccctgatgcggtttatgggtgaccagtccaagccccggggcaaggatgagatggatctgctctatgaactgctgaagctgtgccagcaggagaagctgagggatgagatttactgccaggttatcaagcaggtcacgggacacccccggccggaacactgcactcgaggctggagcttcctcagccttctcacaggcttcttccccccgtcgaccaggctgatgccctacctgaccaagtttctgcaggattcaggccccagccaagagctggcccggagcagccaggagcacctccagcgcacagtcaaatatggggggcgccggcggatgcccccaccgggtgaaatgaaggctttcctgaaaggacaagcgattcgcctgcttcttattcacctgccggggggtgtggattataggacgaatatccagactttcacagtagcagcagaagtgcaggaggagctgtgccggcaaatgggtatcacggagcctcaggaagtgcaggaattcgccctcttcctcatcaaagagaagagccagctggtgcggcccctgcagcccgccgaatacctcaacagcgtggtagtggaccaggacgtgagcctgcacagccggcggctccactgggagaccccactgcacttcgataactccacctacatcagcacccactacagccaggtgctgtgggactaccttcaggggaagctgccagtcagcgccaaggcagacgcgcagctcgccaggctggccgccctgcagcacctcagcaaggccaacaggaataccccctcagggcaggacctgctagcttacgtgccaaagcagctgcaacggcaggtgaacacggcctccatcaagaacctgatgggtcaggagctgagacggctggaaggacacagcccccaggaagcacagatcagcttcattgaggccatgagccagctgcccctcttcggctacaccgtctatggggtgctgcgagtgagcatgcaggccctgtccggacccactctcctggggctcaaccgccagcatctcatcctcatggaccccagctcccagagcctgtactgccgcattgccctgaagagcctgcagcggctccacctgctaagccctctggaggagaaggggccccctggcctggaagtcaactatggctcagctgacaacccccagaccatctggtttgagctgccacaggcccaggagctgctatacaccactgtcttcctgatagacagcagtgcctcttgcactgagtggcccagcatcaactgagaggagtgcaggccggggagagaagaggatgaggcctcccccggcccaagtctcacccacatggtctgccttggatgctatcagatcactgttctagaacctgcctcagcacagcccagccggcccacatgcaggccatgaggcaggggctgctatcacgtcaccagcaggcaaagaaaacagccagaccctctccaggacggcctggggccaaagcgggctgcaggaactcggctggggcacctgaggttgcccagtctgagggagatgcccacccgaccccaggctccgcccaggccccacattagcacaagcccaggcatgggagaaacagctgctgaggaaataaaactccctggagaaaaaaaatg

SEQ ID NO: 354329 - DNA, 7600 bp, Homo sapiens
  misc_feature (2926)..(2926): n is a, c, g, or t
gggctccttctgcatctgctgggctgagcctgctggggtggggtgcagggatggagaggtaaaggagtggggctgcctctgaggatttagaatctctcaaggactagggctgtctgcgcgccttggagttctcgcttccactcacctccagaggacgatgcccctcaccccacacccacgttcatccaagcatggtctctgctcccttttctggtcctgggctgggcagcctgggccgggagtgctcctggcttctctgggatggctggagcccaccacaagccccagccctggcccgtgctgtcctcctgctgggaggagttgcttagtgcagcagacagagcagaggctctgagtggtcctgccactcactagctgtgtggccttgggcaagtggatgaacctttctgaggtccagcgttcccgtctgtaaaacagaattcccagcaggacctaccttgtgagtttcagaggcttaacggagatagtccatgagagagctgtgtgctccagggcagccgttctgtcccactctggccggtcctgcctttggcatggcctgtcctccgtggccttgtagagacgcaggagtctcaaaggcagtggaagacagaggccccagggtgggcccgcctgtagccccacttcccccacgtcaggaggaaagggaagagggagagtcccccagtctctctcagttggcagaggctctgcacccctttacagaggatcctgccgcctcaggacagccaggagggggctggagggagaggaggtggcccctgccctcagtccctggacgggcactattcatggccccctgttctgtcccacaatccagtgtgtccttgtgaccgtgccctccctgaggctggtggtgatggtggcctgtgtgtgcatccaagctcctgtgtgtgtgtttcaaggggcacaaagctgcatgaagcttcctaagagagtgctgagggagcacttcctataggaggaaggctggaaggcttcctggaggcagcagcctggagccctgtgcatgaggatgcgggactctgatagccaacctgctatttagtagggaaagtcgccttccaagccacaggatggccgtgacaagaggcccaaaggctcgcaggagtgctgcagcagagggcaggggtgtgggcagctagagggacctgtggctgggcagggctgaggtagcccgtgtgctgtgccggatcctttagacttgaccctgttggctacacagcatcagccctgggtattactcatccctgcgccctggccagaatgaaggaagcctctggggtggggggagggcacagccccatgtgcccacctcactgccacatgcccccaggccctgcgggtgaatggcctggagcaactgtgcaacaacctcgccagcgagcgcctacagctcttctccagccagatgctgctggcccaggaggaggaggagtgtcggcgggagttgctgtcctgggtgcctgtccctcagcctccgagggagtcctgcctagacctcctggtagatcagccccacagcctcctgagtatcctggacgcccagacatggctgtcccaggctggagtgcaatggtgcggtctcggctcactgcaacctccacctcccaggccacggaccacaccttcctccagaagagccactatcaccatggtgaccaccccagctatgccaagccccggctgcccctgcccgtgttcaccgtgcgacattatgcagggactgtcacctaccaggttcacaagtttttaaacagaaaccgggatcagctggaccctgctgtggtggagatgcttggccagagccagctccagctggtgggcagcctgttccaggaggcagagccccagtccaggggagggcgaggcagacccacgctggcctctcgcttccagcaggccctggaggacctcatagcccggctgggcaggagccatgtctatttcatccagtgcctcacccctaaccctggaaagcttccaggcctctttgacgtgggacatgtgacagagcaactgcaccaggcagccatactggaggccgtgggcacccgcagtgccaacttccccgtgcgtgtgccctttgaggccttcctggccagcttccaggccctggggtcagaagggcaggaagacctctctgaccgggagaagtgtggtgccgtcctgagccaggtgctgggggccgaatcacctctctatcaccttggagccaccaaggtcctgctgcaggagcagggctggcagcggctggaggagctccgggaccagcagcgctcccaggccctggtcgacctgcaccgcagcttccacacctgcatctcccgccagcgcgtcctgccccggatgcaggctcgcatgcgtgggttccaggccaggaagcggtacctccggcggcgggcagctttgggacagctgaacaccatcctgctggtggcccagcccctgctccagaggcggcagagactgcagcttgggcgttggcagggctggcatagcagcgaaagggccttggagagagtgccaagcatggagctggggcgcttggagatcccggctgagctggccgtcatgctgaagacggcggaaagccatcgggacgccctggctgggagcatcaccgagtgcctgccgcctgaggttcctgcccggcccagcctgactctcccagcagacattgacctgttccctttctccagcttcgtcgccatcggctttcaggaaccgtccctgcccaggccagggcagccactggcgaagcccctaacccagctggatggagacaaccctcagcgtgccctggacatcaacaaagtgatgctgcggctcctgggggacggatccctggagtcctggcagaggcagatcatgggcgcatacctggtgcggcaggggcagtgcnggccagggctgcggaatgagctctttagccagctggtggcccagctatggcagaacccagatgaacagcagagccagcgtggctgggccctcatggctgttttgctcagcgcctttcccccactgcctgtcctacagaagccactgctcaagttcgtgtctgaccaggcccccaggggcatggcagcgctgtgccagcacaagctgctgggggccttggagcagtcgcagctggcctcgggggccactcgggcccaccccccgacccagctggagtggctggccggatggcggcggggccgcatggcgctggatgtgttcaccttcagcgaggagtgctactcggccgaggtggagtcttggaccaccggggagcagctggctgggtggatcctgcagagcagaggcctggaggcgcctccccggggctggtctgtgtcactgcactccagggacgcatggcaggacttggctggctgcgactttgtgctggacctgatcagccagactgaggacctgggggacccagctcgcccccgcagctaccccatcactcctcttggctcagccgaggccattccccttgcccctggcattcaggccccctcactgcccccaggaccccctccaggtccagccccaacgctgcccagcagggaccacacaggggaggtccagaggtcagggagcctggacggcttcctggaccagatcttccagccagtgatatcctccggcctcagcgatctggaacaaagctgggctctgagcagccgcatgaagggagggggcgccattgggcccacacagcagggctaccccatggtgtacccaggaatgattcagatgcctgcataccagccaggcatggtccctgcacccatgcccatgatgccagcaatgggcacagtccctgccatgccagccatggtggtgccgccgcagccaccgcttcccagcctggatgcagggcagctggccgtccagcagcagaactttatccagcagcaggcgctaatcctggcccagcagatgacagcccaggccatgtccctgtccctggagcagcagatgcagcagcggcagcagcaggctcgggcctccgaggctgcgtcccaggcctcaccctcagccgtcacctccaagcccaggaagccccccacacccccggagaagccacagcgtgacctgggatcagagggtggctgcctgagggagacctccgaggaggctgaagacaggccctatcagcccaagagcttccagcagaaacggaactatttccagaggatggggcagccacagatcacagtgaggacgatgaagcccccggccaaggtccacatcccccagggggaagcgcaggaggaggaggaggaggaggaggaggaggaggagcaggaggagcaagaagtggaaacaagagcagtgccgtcccctcctcctccccccatcgtgaagaagccattgaagcaaggtggggccaaagctccaaaagaggctgaggctgagccagccaaggagacagcggccaaggccatggccaagggccagcccaaggcagggggactgtggtgcgcagctcagactccaagcccaagcggccacaacccagcagggaaattggcaacatcatccgcatgtaccagagccgcccgggccccgtgcctgtgcccgtgcagccatccaggcctcccaaagctttcctgaggaaaatcgaccccaaggacgaggctctggccaagctgggtatcaacggtgcccactcgtccccgccgatgctgtcccccagcccaggaaagggccccccgccagctgtggctcctcgacccaaggccccgctacagcttgggccctctagctccatcaaggaaaagcaggggccccttctggacctgtttggccagaagctgcctattgcccacacacccccacctccaccagcgccaccactgcctctgcccgaggacccagggaccctttcagcagagcgtcgttgcttgacacagcccgtggaggaccagggggtctccacccagctactcgcgccctctggcagcgtgtgcttctcctacaccggcacgccctggaagttgttcctacgcaaggaggtgttctacccacgggagaacttcagccatccctactacctgaggctcctctgtgagcagatcctacgggacaccttctccgagtcctgtatccggatttcccagaatgagcggcggaaaatgaaagacctgctgggaggcttggaggtggacctggattctctcaccaccaccgaagacagcgtcaagaagcgcatcgtggtggccgctcgggacaactgggccaattacttctcccgcttctttcctgtctcgggcgagagtggcagcgacgtgcagctgttagccgtgtcccaccgtgggctgcgactgctcaaggtgacccaaggccccggcctccgccccgaccagctgaagattctctgctcatacagctttgcggaggtgctgggtgtggagtgccggggcggctccaccctggagctgtcactgaagagcgagcagctggtgctgcacacagcccgggcaagggccatcgaggcgctggttgagctattcctgaatgagcttaagaaggactccggctatgtcatcgccctgcgcagctacatcactgacaactgcagcctcctcagcttccaccgtggggacctcatcaagctgctgccggtggccaccctggagccaggctggcagtttggctctgccgggggccgttccggactctttcctgccgacatagtgcagccggctgccgctcccgacttttccttctccaaggagcagaggagtggctggcacaagggtcagctgtccaacggggaaccagggctggctcggtgggacagggcctcagaggtgaggaagatgggagagggacaagcagaggcaaggcctgcctgagactgaggaaggaaaggggtttgaccactcccgaggctgccatgcggtgggaccaccctgctgtccgtctcctgtggctgcccctctgcccgctcctgatggctcgccttgtctctccagcaagactgtgcactccttgcaggcaggggctgggctggatgctgctcttgtgtcccacgtggtacttagttcaaggctgccccagcagatgcttaataaacagctcttcactttcctggcttctggtcttgctcctttggtgtctggctggggagggatggggctggggcaggacccctgggacagggcactggacactcaggtggcaccaggtttcttgtgatcccagcgccctgcccacccttggagccaggcacacagtgacgactcggaggccaccagcctgtcctctgtggcctatgcctttctgcccgactcccacagctacaccatgcaggaattcgcccggcgttacttccggaggtcccaggccttgctgggccagactgatggaggtgccgcaggaaaggacacggacagcctggtgcagtacaccaaggctcccatccaggagtcgctcctcagcctcagtgatgatgtgagcaagctggctgtagccagcttcctggccctgatgcggtttatgggtgaccagtccaagccccggggcaaggatgagatggatctgctctatgaactgctgaagctgtgccagcaggagaagctgagggatgagatttactgccaggttatcaagcaggtcacgggacacccccggccggaacactgcactcgaggctggagcttcctcagccttctcacaggcttcttccccccgtcgaccaggctgatgccctacctgaccaagtttctgcaggattcaggccccagccaagagctggcccggagcagccaggagcacctccagcgcacagtcaaatatggggggcgccggcggatgcccccaccgggtgaaatgaaggctttcctgaaaggacaagcgattcgcctgcttcttattcacctgccggggggtgtggattataggacgaatatccagactttcacagtagcagcagaagtgcaggaggagctgtgccggcaaatgggtatcacggagcctcaggaagtgcaggaattcgccctcttcctcatcaaagagaagagccagctggtgcggcccctgcagcccgccgaatacctcaacagcgtggtagtggaccaggacgtgagcctgcacagccggcggctccactgggagaccccactgcacttcgataactccacctacatcagcacccactacagccaggtgctgtgggactaccttcaggggaagctgccagtcagcgccaaggcagacgcgcagctcgccaggctggccgccctgcagcacctcagcaaggccaacaggaataccccctcagggcaggacctgctagcttacgtgccaaagcagctgcaacggcaggtgaacacggcctccatcaagaacctgatgggtcaggagctgagacggctggaaggacacagcccccaggaagcacagatcagcttcattgaggccatgagccagctgcccctcttcggctacaccgtctatggggtgctgcgagtgagcatgcaggccctgtccggacccactctcctggggctcaaccgccagcatctcatcctcatggaccccagctcccaggtgggcacagctcttgcctcagcac

SEQ ID NO: 354330 - DNA, 1826 bp, Homo sapiens
ggctgcctagcaacttcctggaggtcccaggccttgctgggccagactgatggaggtgccgcaggaaaggacacggacagcctggtgcagtacaccaaggctcccatccaggagtcgctcctcagcctcagtgatgatgtgagcaagctggctgtagccagcttcctggccctgatgcggtttatgggtgaccagtccaagccccggggcaaggatgagatggatctgctctatgaactgctgaagctgtgccagcaggagaagctgagggatgagatttactgccaggttatcaagcaggtcacgggacacccccggccggaacactgcactcgaggctggagcttcctcagccttctcacaggcttcttccccccgtcgaccaggctgatgccctacctgaccaagtttctgcaggattcaggccccagccaagagctggcccggagcagccaggagcacctccagcgcacagtcaaatatggggggcgccggcggatgcccccaccgggtgaaatgaaggctttcctgaaaggacaagcgattcgcctgcttcttattcacctgccggggggtgtggattataggacgaatatccagactttcacagtagcagcagaagtgcaggaggagctgtgccggcaaatgggtatcacggagcctcaggaagtgcaggaattcgccctcttcctcatcaaagagaagagccagctggtgcggcccctgcagcccgccgaatacctcaacagcgtggtagtggaccaggacgtgagcctgcacagccggcggctccactgggagaccccactgcacttcgataactccacctacatcagcacccactacagccaggtgctgtgggactaccttcaggggaagctgccagtcagcgccaaggcagacgcgcagctcgccaggctggccgccctgcagcacctcagcaaggccaacaggaataccccctcagggcaggacctgctagcttacgtgccaaagcagctgcaacggcaggtgaacacggcctccatcaagaacctgatgggtcaggagctgagacggctggaaggacacagcccccaggaagcacagatcagcttcattgaggccatgagccagctgcccctcttcggctacaccgtctatggggtgctgcgagtgagcatgcaggccctgtccggacccactctcctggggctcaaccgccagcatctcatcctcatggaccccagctcccagagcctgtactgccgcattgccctgaagagcctgcagcggctccacctgctaagccctctggaggagaaggggccccctggcctggaagtcaactatggctcagctgacaacccccagaccatctggtttgagctgccacaggcccaggagctgctatacaccactgtcttcctgatagacagcagtgcctcttgcactgagtggcccagcatcaactgagaggagtgcaggccggggagagaagaggatgaggcctcccccggcccaagtctcacccacatggtctgccttggatgctatcagatcactgttctagaacctgcctcagcacagcccagccggcccacatgcaggccatgaggcaggggctgctatcacgtcaccagcaggcaaagaaaacagccagaccctctccaggacggcctggggccaaagcgggctgcaggaactcggctggggcacctgaggttgcccagtctgagggagatgcccacccgaccccaggctccgcccaggccccacattagcacaagcccaggcatgggagaaacagctgctgaggaaataaaactccctggagaaaaaaaatg

SEQ ID NO: 354331 - DNA, 6190 bp, Homo sapiens
  misc_feature (2997)..(2997): n is a, c, g, or t
gggctccttctgcatctgctgggctgagcctgctggggtggggtgcagggatggagaggtaaaggagtggggctgcctctgaggatttagaatctctcaaggactagggctgtctgcgcgccttggagttctcgcttccactcacctccagaggacgatgcccctcaccccacacccacgttcatccaagcatggtctctgctcccttttctggtcctgggctgggcagcctgggccgggagtgctcctggcttctctgggatggctggagcccaccacaagccccagccctggcccgtgctgtcctcctgctgggaggagttgcttagtgcagcagacagagcagaggctctgagtggtcctgccactcactagctgtgtggccttgggcaagtggatgaacctttctgaggtccagcgttcccgtctgtaaaacagaattcccagcaggacctaccttgtgagtttcagaggcttaacggagatagtccatgagagagctgtgtgctccagggcagccgttctgtcccactctggccggtcctgcctttggcatggcctgtcctccgtggccttgtagagacgcaggagtctcaaaggcagtggaagacagaggccccagggtgggcccgcctgtagccccacttcccccacgtcaggaggaaagggaagagggagagtcccccagtctctctcagttggcagaggctctgcacccctttacagaggatcctgccgcctcaggacagccaggagggggctggagggagaggaggtggcccctgccctcagtccctggacgggcactattcatggccccctgttctgtcccacaatccagtgtgtccttgtgaccgtgccctccctgaggctggtggtgatggtggcctgtgtgtgcatccaagctcctgtgtgtgtgtttcaaggggcacaaagctgcatgaagcttcctaagagagtgctgagggagcacttcctataggaggaaggctggaaggcttcctggaggcagcagcctggagccctgtgcatgaggatgcgggactctgatagccaacctgctatttagtagggaaagtcgccttccaagccacaggatggccgtgacaagaggcccaaaggctcgcaggagtgctgcagcagagggcaggggtgtgggcagctagagggacctgtggctgggcagggctgaggtagcccgtgtgctgtgccggatcctttagacttgaccctgttggctacacagcatcagccctgggtattactcatccctgcgccctggccagaatgaaggaagcctctggggtggggggagggcacagccccatgtgcccacctcactgccacatgcccccaggccctgcgggtgaatggcctggagcaactgtgcaacaacctcgccagcgagcgcctacagctcttctccagccagatgctgctggcccaggaggaggaggagtgtcggcgggagttgctgtcctgggtgcctgtccctcagcctccgagggagtcctgcctagacctcctggtagatcagccccacagcctcctgagtatcctggacgcccagacatggctgtcccaggctggagtgcaatggtgcggtctcggctcactgcaacctccacctcccaggccacggaccacaccttcctccagaagagccactatcaccatggtgaccaccccagctatgccaagccccggctgcccctgcccgtgttcaccgtgcgacattatgcagggactgtcacctaccaggttcacaagtttttaaacagaaaccgggatcagctggaccctgctgtggtggagatgcttggccagagccagctccagctggtgggcagcctgttccaggaggcagagccccagtccaggggagggcgaggcagacccacgctggcctctcgcttccagcaggccctggaggacctcatagcccggctgggcaggagccatgtctatttcatccagtgcctcacccctaaccctggaaagcttccaggcctctttgacgtgggacatgtgacagagcaactgcaccaggcagccatactggaggccgtgggcacccgcagtgccaacttccccgtgcgtgtgccctttgaggccttcctggccagcttccaggccctggggtcagaagggcaggaagacctctctgaccgggagaagtgtggtgccgtcctgagccaggtgctgggggccgaatcacctctctatcaccttggagccaccaaggtcctgctgcaggagcagggctggcagcggctggaggagctccgggaccagcagcgctcccaggccctggtcgacctgcaccgcagcttccacacctgcatctcccgccagcgcgtcctgccccggatgcaggctcgcatgcgtgggttccaggccagcctgtcttcacacattcctccaacagctgttggctgaccgtctgcctcatctacccttgggccagatgctggaagcggtacctccggcggcgggcagctttgggacagctgaacaccatcctgctggtggcccagcccctgctccagaggcggcagagactgcagcttgggcgttggcagggctggcatagcagcgaaagggccttggagagagtgccaagcatggagctggggcgcttggagatcccggctgagctggccgtcatgctgaagacggcggaaagccatcgggacgccctggctgggagcatcaccgagtgcctgccgcctgaggttcctgcccggcccagcctgactctcccagcagacattgacctgttccctttctccagcttcgtcgccatcggctttcaggaaccgtccctgcccaggccagggcagccactggcgaagcccctaacccagctggatggagacaaccctcagcgtgccctggacatcaacaaagtgatgctgcggctcctgggggacggatccctggagtcctggcagaggcagatcatgggcgcatacctggtgcggcaggggcagtgcnggccagggctgcggaatgagctctttagccagctggtggcccagctatggcagaacccagatgaacagcagagccagcgtggctgggccctcatggctgttttgctcagcgcctttcccccactgcctgtcctacagaagccactgctcaagttcgtgtctgaccaggcccccaggggcatggcagcgctgtgccagcacaagctgctgggggccttggagcagtcgcagctggcctcgggggccactcgggcccaccccccgacccagctggagtggctggccggatggcggcggggccgcatggcgctggatgtgttcaccttcagcgaggagtgctactcggccgaggtggagtcttggaccaccggggagcagctggctgggtggatcctgcagagcagaggcctggaggcgcctccccggggctggtctgtgtcactgcactccagggacgcatggcaggacttggctggctgcgactttgtgctggacctgatcagccagactgaggacctgggggacccagctcgcccccgcagctaccccatcactcctcttggctcagccgaggccattccccttgcccctggcattcaggccccctcactgcccccaggaccccctccaggtccagccccaacgctgcccagcagggaccacacaggggaggtccagaggtcagggagcctggacggcttcctggaccagatcttccagccagtgatatcctccggcctcagcgatctggaacaaagctgggctctgagcagccgcatgaagggagggggcgccattgggcccacacagcagggctaccccatggtgtacccaggaatgattcagatgcctgcataccagccaggcatggtccctgcacccatgcccatgatgccagcaatgggcacagtccctgccatgccagccatggtggtgccgccgcagccaccgcttcccagcctggatgcagggcagctggccgtccagcagcagaactttatccagcagcaggcgctaatcctggcccagcagatgacagcccaggccatgtccctgtccctggagcagcagatgcagcagcggcagcagcaggctcgggcctccgaggctgcgtcccaggcctcaccctcagccgtcacctccaagcccaggaagccccccacacccccggagaagccacagcgtgacctgggatcagagggtggctgcctgagggagacctccgaggaggctgaagacaggccctatcagcccaagagcttccagcagaaacggaactatttccagaggatggggcagccacagatcacagtgaggacgatgaagcccccggccaaggtccacatcccccagggggaagcgcaggaggaggaggaggaggaggaggaggaggaggagcaggaggagcaagaagtggaaacaagagcagtgccgtcccctcctcctccccccatcgtgaagaagccattgaagcaaggtggggccaaagctccaaaagaggctgaggctgagccagccaaggagacagcggccaaggccatggccaagggccagcccaaggcagggggactgtggtgcgcagctcagactccaagcccaagcggccacaacccagcagggaaattggcaacatcatccgcatgtaccagagccgcccgggccccgtgcctgtgcccgtgcagccatccaggcctcccaaagctttcctgaggaaaatcgaccccaaggacgaggctctggccaagctgggtatcaacggtgcccactcgtccccgccgatgctgtcccccagcccaggaaagggccccccgccagctgtggctcctcgacccaaggccccgctacagcttgggccctctagctccatcaaggaaaagcaggggccccttctggacctgtttggccagaagctgcctattgcccacacacccccacctccaccagcgccaccactgcctctgcccgaggacccagggaccctttcagcagagcgtcgttgcttgacacagcccgtggaggaccagggggtctccacccagctactcgcgccctctggcagcgtgtgcttctcctacaccggcacgccctggaagttgttcctacgcaaggaggtgttctacccacgggagaacttcagccatccctactacctgaggctcctctgtgagcagatcctacgggacaccttctccgagtcctgtatccggatttcccagaatgagcggcggaaaatgaaagacctgctgggaggcttggaggtggacctggattctctcaccaccaccgaagacagcgtcaagaagcgcatcgtggtggccgctcgggacaactgggccaattacttctcccgcttctttcctgtctcgggcgagagtggcagcgacgtgcagctgttagccgtgtcccaccgtgggctgcgactgctcaaggtgacccaaggccccggcctccgccccgaccagctgaagattctctgctcatacagctttgcggaggtgctgggtgtggagtgccggggcggctccaccctggagctgtcactgaagagcgagcagctggtgctgcacacagcccgggcaagggccatcgaggcgctggttgagctattcctgaatgagcttaagaaggactccggctatgtcatcgccctgcgcagctacatcactgacaactgcagcctcctcagcttccaccgtggggacctcatcaagctgctgccggtggccaccctggagccaggctggcagtttggctctgccgggggccgttccggactctttcctgccgacatagtgcagccggctgccgctcccgacttttccttctccaaggagcagaggagtggctggcacaagggtcagctgtccaacggggaaccagggctggctcggtgggacagggcctcagaggtgaggaagatgggagagggacaagcagaggcaaggcctgcctgagactgaggaaggaaaggggtttgaccactcccgaggctgccatgcggtgggaccaccctgctgtccgtctcctgtggctgcccctctgcccgctcctgatggctcgccttgtctctccagcaagactgtgcactccttgcaggcaggggctgggctggatgctgctcttgtgtcccacgtggtacttagttcaaggctgccccagcagatgcttaataaacagctcttcactttcctggc

SEQ ID NO: 354332 - DNA, 3097 bp, Homo sapiens
gggctccttctgcatctgctgggctgagcctgctggggtggggtgcagggatggagaggtaaaggagtggggctgcctctgaggatttagaatctctcaaggactagggctgtctgcgcgccttggagttctcgcttccactcacctccagaggacgatgcccctcaccccacacccacgttcatccaagcatggtctctgctcccttttctggtcctgggctgggcagcctgggccgggagtgctcctggcttctctgggatggctggagcccaccacaagccccagccctggcccgtgctgtcctcctgctgggaggagttgcttagtgcagcagacagagcagaggctctgagtggtcctgccactcactagctgtgtggccttgggcaagtggatgaacctttctgaggtccagcgttcccgtctgtaaaacagaattcccagcaggacctaccttgtgagtttcagaggcttaacggagatagtccatgagagagctgtgtgctccagggcagccgttctgtcccactctggccggtcctgcctttggcatggcctgtcctccgtggccttgtagagacgcaggagtctcaaaggcagtggaagacagaggccccagggtgggcccgcctgtagccccacttcccccacgtcaggaggaaagggaagagggagagtcccccagtctctctcagttggcagaggctctgcacccctttacagaggatcctgccgcctcaggacagccaggagggggctggagggagaggaggtggcccctgccctcagtccctggacgggcactattcatggccccctgttctgtcccacaatccagtgtgtccttgtgaccgtgccctccctgaggctggtggtgatggtggcctgtgtgtgcatccaagctcctgtgtgtgtgtttcaaggggcacaaagctgcatgaagcttcctaagagagtgctgagggagcacttcctataggaggaaggctggaaggcttcctggaggcagcagcctggagccctgtgcatgaggatgcgggactctgatagccaacctgctatttagtagggaaagtcgccttccaagccacaggatggccgtgacaagaggcccaaaggctcgcaggagtgctgcagcagagggcaggggtgtgggcagctagagggacctgtggctgggcagggctgaggtagcccgtgtgctgtgccggatcctttagacttgaccctgttggctacacagcatcagccctgggtattactcatccctgcgccctggccagaatgaaggaagcctctggggtggggggagggcacagccccatgtgcccacctcactgccacatgcccccaggccctgcgggtgaatggcctggagcaactgtgcaacaacctcgccagcgagcgcctacagctcttctccagccagatgctgctggcccaggaggaggaggagtgtcggcgggagttgctgtcctgggtgcctgtccctcagcctccgagggagtcctgcctagacctcctggtagatcagccccacagcctcctgagtatcctggacgcccagacatggctgtcccaggctggagtgcaatggtgcggtctcggctcactgcaacctccacctcccaggccacggaccacaccttcctccagaagagccactatcaccatggtgaccaccccagctatgccaagccccggctgcccctgcccgtgttcaccgtgcgacattatgcagggactgtcacctaccaggttcacaagtttttaaacagaaaccgggatcagctggaccctgctgtggtggagatgcttggccagagccagctccagctggtgggcagcctgttccaggaggcagagccccagtccaggggagggcgaggcagacccacgctggcctctcgcttccagcaggccctggaggacctcatagcccggctgggcaggagccatgtctatttcatccagtgcctcacccctaaccctggaaagcttccaggcctctttgacgtgggacatgtgacagagcaactgcaccaggcagccatactggaggccgtgggcacccgcagtgccaacttccccgtgcgtgtgccctttgaggccttcctggccagcttccaggccctggggtcagaagggcaggaagacctctctgaccgggagaagtgtggtgccgtcctgagccaggtgctgggggccgaatcacctctctatcaccttggagccaccaaggtcctgctgcaggagcagggctggcagcggctggaggagctccgggaccagcagcgctcccaggccctggtcgacctgcaccgcagcttccacacctgcatctcccgccagcgcgtcctgccccggatgcaggctcgcatgcgtgggttccaggccagcctgtcttcacacattcctccaacagctgttggctgaccgtctgcctcatctacccttgggccagatgctggaagcggtacctccggcggcgggcagctttgggacagctgaacaccatcctgctggtggcccagcccctgctccagaggcggcagagactgcagcttgggcgttggcagggctggcatagcagcgaaagggccttggagagagtgccaagcatggagctggggcgcttggagatcccggctgagctggccgtcatgctgaagacggcggaaagccatcgggacgccctggctgggagcatcaccgagtgcctgccgcctgaggttcctgcccggcccagcctgactctcccagcagacattgacctgttccctttctccagcttcgtcgccatcggctttcaggaagtaaatgataatctttgggaaaccaggaccctgcctcccagcccagaggtggaggagggcggtcagggtggggtctacagtggcacagcactgacaaaggtagagggaaatgtaatagcacatctacgctgcagtctggtgaaagtggccggggtggtccttggaaaacagttgggctgttcttggcaggaattagtgacagcctttccgtcacgggcagggacgccttgatttaaaataaataaataaataaaacgtctgggtatagacttttgaaa

SEQ ID NO: 354333 - DNA, 2600 bp, Homo sapiens
gggctccttctgcatctgctgggctgagcctgctggggtggggtgcagggatggagaggtaaaggagtggggctgcctctgaggatttagaatctctcaaggactagggctgtctgcgcgccttggagttctcgcttccactcacctccagaggacgatgcccctcaccccacacccacgttcatccaagcatggtctctgctcccttttctggtcctgggctgggcagcctgggccgggagtgctcctggcttctctgggatggctggagcccaccacaagccccagccctggcccgtgctgtcctcctgctgggaggagttgcttagtgcagcagacagagcagaggctctgagtggtcctgccactcactagctgtgtggccttgggcaagtggatgaacctttctgaggtccagcgttcccgtctgtaaaacagaattcccagcaggacctaccttgtgagtttcagaggcttaacggagatagtccatgagagagctgtgtgctccagggcagccgttctgtcccactctggccggtcctgcctttggcatggcctgtcctccgtggccttgtagagacgcaggagtctcaaaggcagtggaagacagaggccccagggtgggcccgcctgtagccccacttcccccacgtcaggaggaaagggaagagggagagtcccccagtctctctcagttggcagaggctctgcacccctttacagaggatcctgccgcctcaggacagccaggagggggctggagggagaggaggtggcccctgccctcagtccctggacgggcactattcatggccccctgttctgtcccacaatccagtgtgtccttgtgaccgtgccctccctgaggctggtggtgatggtggcctgtgtgtgcatccaagctcctgtgtgtgtgtttcaaggggcacaaagctgcatgaagcttcctaagagagtgctgagggagcacttcctataggaggaaggctggaaggcttcctggaggcagcagcctggagccctgtgcatgaggatgcgggactctgatagccaacctgctatttagtagggaaagtcgccttccaagccacaggatggccgtgacaagaggcccaaaggctcgcaggagtgctgcagcagagggcaggggtgtgggcagctagagggacctgtggctgggcagggctgaggtagcccgtgtgctgtgccggatcctttagacttgaccctgttggctacacagcatcagccctgggtattactcatccctgcgccctggccagaatgaaggaagcctctggggtggggggagggcacagccccatgtgcccacctcactgccacatgcccccaggccctgcgggtgaatggcctggagcaactgtgcaacaacctcgccagcgagcgcctacagctcttctccagccagatgctgctggcccaggaggaggaggagtgtcggcgggagttgctgtcctgggtgcctgtccctcagcctccgagggagtcctgcctagacctcctggtagatcagccccacagcctcctgagtatcctggacgcccagacatggctgtcccaggctggagtgcaatggtgcggtctcggctcactgcaacctccacctcccaggccacggaccacaccttcctccagaagagccactatcaccatggtgaccaccccagctatgccaagccccggctgcccctgcccgtgttcaccgtgcgacattatgcagggactgtcacctaccaggttcacaagtttttaaacagaaaccgggatcagctggaccctgctgtggtggagatgcttggccagagccagctccagctggtgggcagcctgttccaggaggcagagccccagtccaggggagggcgaggcagacccacgctggcctctcgcttccagcaggccctggaggacctcatagcccggctgggcaggagccatgtctatttcatccagtgcctcacccctaaccctggaaagcttccaggcctctttgacgtgggacatgtgacagagcaactgcaccaggcagccatactggaggccgtgggcacccgcagtgccaacttccccgtgcgtgtgccctttgaggccttcctggccagcttccaggccctggggtcagaagggcaggaagacctctctgaccgggagaagtgtggtgccgtcctgagccaggtgctgggggccgaatcacctctctatcaccttggagccaccaaggtcctgctgcaggagcagggctggcagcggctggaggagctccgggaccagcagcgctcccaggccctggtcgacctgcaccgcagcttccacacctgcatctcccgccagcgcgtcctgccccggatgcaggctcgcatgcgtgggttccaggccagcctgtcttcacacattcctccaacagctgttggctgaccgtctgcctcatctacccttgggccagatgctggcgacagagctggggatgccagagacggggcctcccaggctggttgggaagtcagattcagatggtagagcagccagtgatcttcccagagagtaactcgagggctgagaatgaagtgaagacagtg

SEQ ID NO: 354334 - DNA, 167 bp, Homo sapiens
gtccaggggagggcgaggcagacccacgctggcctctcgcttccagcaggccctggaggacctcatagcccggctgggcaggtaagaacagcgcccgccacaccagaccccagggagttgtatggggctccagtctgtgcccgagtgacccctctttccctcatcag

SEQ ID NO: 354335 - DNA, 270 bp, Homo sapiens
actggccctgggcagctccagggcatcttgggcagtagcaggacccaggagactgcccgagacccaccaccttcctgtagggcgagagtggcagcgacgtgcagctgttagccgtgtcccaccgtgggctgcgactgctcaaggtgacccaaggccccggcctccgccccgaccagctgaagattctctgctcatacaggtgcgctggcccacgaccctgggctagaggtgggggcaggtggcaaggtgaccccagttcatgcccgatcc

SEQ ID NO: 354336 - DNA, 382 bp, Homo sapiens
ccattgaagcaaggtggggccaaagctccaaaagaggctgaggctgagccagccaaggagacagcggccaaggccatggccaagggccagcccaaggcagggggactgtggtgcgcagctcagactccaagcccaagcggccacaacccagcagggaaattggcaacatcatccgcatgtaccagagccgcccgggccccgtgcctgtgcccgtgcagccatccaggtgggcccccacggggaggtggccagggctgtcccgctcctcggggaatcaccctatgaacttagtgacctcttgcttctcccacgaggcctcccaaagctttcctgaggaaaatcgaccccaaggacgaggctctggccaagctgggtatcaacg

SEQ ID NO: 354337 - DNA, 545 bp, Homo sapiens
gacggagcctcacggtggggccactcccctgcccaggggtgaggtggtttggtttctgctggggtggcagggccgggtgtgtgtggtctgagcagcagtggacctaggctccccatgcaggccagctggtgcggcccctgcagcccgccgaatacctcaacagcgtggtagtggaccaggacgtgagcctgcacagccggcggctccactgggagaccccactgcacttcgataactccacctacatcagcacccactacagccaggtcagcctgcctgcctccgagctgctgctgcagtttgagggcgcggcttcctgcctgggcgacctccaagcccctctccccacaagggtgtgggtctgtggtggctggggggtgacagtggcaaaaggaggcttgagcctctagagccaccaactgatggggggctttggaccaccgctgccctcctcaccgtgctccccgcacaggtgctgtgggactaccttcaggggaagctgccagtcagcgccaaggcagacgcgcagctcgccaggctggccg

SEQ ID NO: 354338 - DNA, 8099 bp, Homo sapiens
  misc_feature (2926)..(2926): n is a, c, g, or t
gggctccttctgcatctgctgggctgagcctgctggggtggggtgcagggatggagaggtaaaggagtggggctgcctctgaggatttagaatctctcaaggactagggctgtctgcgcgccttggagttctcgcttccactcacctccagaggacgatgcccctcaccccacacccacgttcatccaagcatggtctctgctcccttttctggtcctgggctgggcagcctgggccgggagtgctcctggcttctctgggatggctggagcccaccacaagccccagccctggcccgtgctgtcctcctgctgggaggagttgcttagtgcagcagacagagcagaggctctgagtggtcctgccactcactagctgtgtggccttgggcaagtggatgaacctttctgaggtccagcgttcccgtctgtaaaacagaattcccagcaggacctaccttgtgagtttcagaggcttaacggagatagtccatgagagagctgtgtgctccagggcagccgttctgtcccactctggccggtcctgcctttggcatggcctgtcctccgtggccttgtagagacgcaggagtctcaaaggcagtggaagacagaggccccagggtgggcccgcctgtagccccacttcccccacgtcaggaggaaagggaagagggagagtcccccagtctctctcagttggcagaggctctgcacccctttacagaggatcctgccgcctcaggacagccaggagggggctggagggagaggaggtggcccctgccctcagtccctggacgggcactattcatggccccctgttctgtcccacaatccagtgtgtccttgtgaccgtgccctccctgaggctggtggtgatggtggcctgtgtgtgcatccaagctcctgtgtgtgtgtttcaaggggcacaaagctgcatgaagcttcctaagagagtgctgagggagcacttcctataggaggaaggctggaaggcttcctggaggcagcagcctggagccctgtgcatgaggatgcgggactctgatagccaacctgctatttagtagggaaagtcgccttccaagccacaggatggccgtgacaagaggcccaaaggctcgcaggagtgctgcagcagagggcaggggtgtgggcagctagagggacctgtggctgggcagggctgaggtagcccgtgtgctgtgccggatcctttagacttgaccctgttggctacacagcatcagccctgggtattactcatccctgcgccctggccagaatgaaggaagcctctggggtggggggagggcacagccccatgtgcccacctcactgccacatgcccccaggccctgcgggtgaatggcctggagcaactgtgcaacaacctcgccagcgagcgcctacagctcttctccagccagatgctgctggcccaggaggaggaggagtgtcggcgggagttgctgtcctgggtgcctgtccctcagcctccgagggagtcctgcctagacctcctggtagatcagccccacagcctcctgagtatcctggacgcccagacatggctgtcccaggctggagtgcaatggtgcggtctcggctcactgcaacctccacctcccaggccacggaccacaccttcctccagaagagccactatcaccatggtgaccaccccagctatgccaagccccggctgcccctgcccgtgttcaccgtgcgacattatgcagggactgtcacctaccaggttcacaagtttttaaacagaaaccgggatcagctggaccctgctgtggtggagatgcttggccagagccagctccagctggtgggcagcctgttccaggaggcagagccccagtccaggggagggcgaggcagacccacgctggcctctcgcttccagcaggccctggaggacctcatagcccggctgggcaggagccatgtctatttcatccagtgcctcacccctaaccctggaaagcttccaggcctctttgacgtgggacatgtgacagagcaactgcaccaggcagccatactggaggccgtgggcacccgcagtgccaacttccccgtgcgtgtgccctttgaggccttcctggccagcttccaggccctggggtcagaagggcaggaagacctctctgaccgggagaagtgtggtgccgtcctgagccaggtgctgggggccgaatcacctctctatcaccttggagccaccaaggtcctgctgcaggagcagggctggcagcggctggaggagctccgggaccagcagcgctcccaggccctggtcgacctgcaccgcagcttccacacctgcatctcccgccagcgcgtcctgccccggatgcaggctcgcatgcgtgggttccaggccaggaagcggtacctccggcggcgggcagctttgggacagctgaacaccatcctgctggtggcccagcccctgctccagaggcggcagagactgcagcttgggcgttggcagggctggcatagcagcgaaagggccttggagagagtgccaagcatggagctggggcgcttggagatcccggctgagctggccgtcatgctgaagacggcggaaagccatcgggacgccctggctgggagcatcaccgagtgcctgccgcctgaggttcctgcccggcccagcctgactctcccagcagacattgacctgttccctttctccagcttcgtcgccatcggctttcaggaaccgtccctgcccaggccagggcagccactggcgaagcccctaacccagctggatggagacaaccctcagcgtgccctggacatcaacaaagtgatgctgcggctcctgggggacggatccctggagtcctggcagaggcagatcatgggcgcatacctggtgcggcaggggcagtgcnggccagggctgcggaatgagctctttagccagctggtggcccagctatggcagaacccagatgaacagcagagccagcgtggctgggccctcatggctgttttgctcagcgcctttcccccactgcctgtcctacagaagccactgctcaagttcgtgtctgaccaggcccccaggggcatggcagcgctgtgccagcacaagctgctgggggccttggagcagtcgcagctggcctcgggggccactcgggcccaccccccgacccagctggagtggctggccggatggcggcggggccgcatggcgctggatgtgttcaccttcagcgaggagtgctactcggccgaggtggagtcttggaccaccggggagcagctggctgggtggatcctgcagagcagaggcctggaggcgcctccccggggctggtctgtgtcactgcactccagggacgcatggcaggacttggctggctgcgactttgtgctggacctgatcagccagactgaggacctgggggacccagctcgcccccgcagctaccccatcactcctcttggctcagccgaggccattccccttgcccctggcattcaggccccctcactgcccccaggaccccctccaggtccagccccaacgctgcccagcagggaccacacaggggaggtccagaggtcagggagcctggacggcttcctggaccagatcttccagccagtgatatcctccggcctcagcgatctggaacaaagctgggctctgagcagccgcatgaagggagggggcgccattgggcccacacagcagggctaccccatggtgtacccaggaatgattcagatgcctgcataccagccaggcatggtccctgcacccatgcccatgatgccagcaatgggcacagtccctgccatgccagccatggtggtgccgccgcagccaccgcttcccagcctggatgcagggcagctggccgtccagcagcagaactttatccagcagcaggcgctaatcctggcccagcagatgacagcccaggccatgtccctgtccctggagcagcagatgcagcagcggcagcagcaggctcgggcctccgaggctgcgtcccaggcctcaccctcagccgtcacctccaagcccaggaagccccccacacccccggagaagccacagcgtgacctgggatcagagggtggctgcctgagggagacctccgaggaggctgaagacaggccctatcagcccaagagcttccagcagaaacggaactatttccagaggatggggcagccacagatcacagtgaggacgatgaagcccccggccaaggtccacatcccccagggggaagcgcaggaggaggaggaggaggaggaggaggaggaggagcaggaggagcaagaagtggaaacaagagcagtgccgtcccctcctcctccccccatcgtgaagaagccattgaagcaaggtggggccaaagctccaaaagaggctgaggctgagccagccaaggagacagcggccaaggccatggccaagggccagcccaaggcagggggactgtggtgcgcagctcagactccaagcccaagcggccacaacccagcagggaaattggcaacatcatccgcatgtaccagagccgcccgggccccgtgcctgtgcccgtgcagccatccaggcctcccaaagctttcctgaggaaaatcgaccccaaggacgaggctctggccaagctgggtatcaacggtgcccactcgtccccgccgatgctgtcccccagcccaggaaagggccccccgccagctgtggctcctcgacccaaggccccgctacagcttgggccctctagctccatcaaggaaaagcaggggccccttctggacctgtttggccagaagctgcctattgcccacacacccccacctccaccagcgccaccactgcctctgcccgaggacccagggaccctttcagcagagcgtcgttgcttgacacagcccgtggaggaccagggggtctccacccagctactcgcgccctctggcagcgtgtgcttctcctacaccggcacgccctggaagttgttcctacgcaaggaggtgttctacccacgggagaacttcagccatccctactacctgaggctcctctgtgagcagatcctacgggacaccttctccgagtcctgtatccggatttcccagaatgagcggcggaaaatgaaagacctgctgggaggcttggaggtggacctggattctctcaccaccaccgaagacagcgtcaagaagcgcatcgtggtggccgctcgggacaactgggccaattacttctcccgcttctttcctgtctcgggcgagagtggcagcgacgtgcagctgttagccgtgtcccaccgtgggctgcgactgctcaaggtgacccaaggccccggcctccgccccgaccagctgaagattctctgctcatacagctttgcggaggtgctgggtgtggagtgccggggcggctccaccctggagctgtcactgaagagcgagcagctggtgctgcacacagcccgggcaagggccatcgaggcgctggttgagctattcctgaatgagcttaagaaggactccggctatgtcatcgccctgcgcagctacatcactgacaactgcagcctcctcagcttccaccgtggggacctcatcaagctgctgccggtggccaccctggagccaggctggcagtttggctctgccgggggccgttccggactctttcctgccgacatagtgcagccggctgccgctcccgacttttccttctccaaggagcagaggagtggctggcacaagggtcagctgtccaacggggaaccagggctggctcggtgggacagggcctcagaggtgaggaagatgggagagggacaagcagaggcaaggcctgcctgagactgaggaaggaaaggggtttgaccactcccgaggctgccatgcggtgggaccaccctgctgtccgtctcctgtggctgcccctctgcccgctcctgatggctcgccttgtctctccagcaagactgtgcactccttgcaggcaggggctgggctggatgctgctcttgtgtcccacgtggtacttagttcaaggctgccccagcagatgcttaataaacagctcttcactttcctggcttctggtcttgctcctttggtgtctggctggggagggatggggctggggcaggacccctgggacagggcactggacactcaggtggcaccaggtttcttgtgatcccagcgccctgcccacccttggagccaggcacacagtgacgactcggaggccaccagcctgtcctctgtggcctatgcctttctgcccgactcccacagctacaccatgcaggaattcgcccggcgttacttccggaggtcccaggccttgctgggccagactgatggaggtgccgcaggaaaggacacggacagcctggtgcagtacaccaaggctcccatccaggagtcgctcctcagcctcagtgatgatgtgagcaagctggctgtagccagcttcctggccctgatgcggtttatgggtgaccagtccaagccccggggcaaggatgagatggatctgctctatgaactgctgaagctgtgccagcaggagaagctgagggatgagatttactgccaggttatcaagcaggtcacgggacacccccggccgctgatgccctacctgaccaagtttctgcaggattcaggccccagccaagagctggcccggagcagccaggagcacctccagcgcacagtcaaatatggggggcgccggcggatgcccccaccgggtgaaatgaaggctttcctgaaaggacaagcgattcgcctgcttcttattcacctgccggggggtgtggattataggacgaatatccagactttcacagtagcagcagaagtgcaggaggagctgtgccggcaaatgggtatcacggagcctcaggaagtgcaggaattcgccctcttcctcatcaaagagaagagccagctggtgcggcccctgcagcccgccgaatacctcaacagcgtggtagtggaccaggacgtgagcctgcacagccggcggctccactgggagaccccactgcacttcgataactccacctacatcagcacccactacagccaggtgctgtgggactaccttcaggggaagctgccagtcagcgccaaggcagacgcgcagctcgccaggctggccgccctgcagcacctcagcaaggccaacaggaataccccctcagggcaggacctgctagcttacgtgccaaagcagctgcaacggcaggtgaacacggcctccatcaagaacctgatgggtcaggagctgagacggctggaaggacacagcccccaggaagcacagatcagcttcattgaggccatgagccagctgcccctcttcggctacaccgtctatggggtgctgcgagtgagcatgcaggccctgtccggacccactctcctggggctcaaccgccagcatctcatcctcatggaccccagctcccagagcctgtactgccgcattgccctgaagagcctgcagcggctccacctgctaagccctctggaggagaaggggccccctggcctggaagtcaactatggctcagctgacaacccccagaccatctggtttgagctgccacaggcccaggagctgctatacaccactgtcttcctgatagacagcagtgcctcttgcactgagtggcccagcatcaactgagaggagtgcaggccggggagagaagaggatgaggcctcccccggcccaagtctcacccacatggtctgccttggatgctatcagatcactgttctagaacctgcctcagcacagcccagccggcccacatgcaggccatgaggcaggggctgctatcacgtcaccagcaggcaaagaaaacagccagaccctctccaggacggcctggggccaaagcgggctgcaggaactcggctggggcacctgaggttgcccagtctgagggagatgcccacccgaccccaggctccgcccaggccccacattagcacaagcccaggcatgggagaaacagctgctgaggaaataaaactccctggagaaaaaaaatg

SEQ ID NO: 354339 - DNA, 8236 bp, Homo sapiens
  misc_feature (2997)..(2997): n is a, c, g, or t
gggctccttctgcatctgctgggctgagcctgctggggtggggtgcagggatggagaggtaaaggagtggggctgcctctgaggatttagaatctctcaaggactagggctgtctgcgcgccttggagttctcgcttccactcacctccagaggacgatgcccctcaccccacacccacgttcatccaagcatggtctctgctcccttttctggtcctgggctgggcagcctgggccgggagtgctcctggcttctctgggatggctggagcccaccacaagccccagccctggcccgtgctgtcctcctgctgggaggagttgcttagtgcagcagacagagcagaggctctgagtggtcctgccactcactagctgtgtggccttgggcaagtggatgaacctttctgaggtccagcgttcccgtctgtaaaacagaattcccagcaggacctaccttgtgagtttcagaggcttaacggagatagtccatgagagagctgtgtgctccagggcagccgttctgtcccactctggccggtcctgcctttggcatggcctgtcctccgtggccttgtagagacgcaggagtctcaaaggcagtggaagacagaggccccagggtgggcccgcctgtagccccacttcccccacgtcaggaggaaagggaagagggagagtcccccagtctctctcagttggcagaggctctgcacccctttacagaggatcctgccgcctcaggacagccaggagggggctggagggagaggaggtggcccctgccctcagtccctggacgggcactattcatggccccctgttctgtcccacaatccagtgtgtccttgtgaccgtgccctccctgaggctggtggtgatggtggcctgtgtgtgcatccaagctcctgtgtgtgtgtttcaaggggcacaaagctgcatgaagcttcctaagagagtgctgagggagcacttcctataggaggaaggctggaaggcttcctggaggcagcagcctggagccctgtgcatgaggatgcgggactctgatagccaacctgctatttagtagggaaagtcgccttccaagccacaggatggccgtgacaagaggcccaaaggctcgcaggagtgctgcagcagagggcaggggtgtgggcagctagagggacctgtggctgggcagggctgaggtagcccgtgtgctgtgccggatcctttagacttgaccctgttggctacacagcatcagccctgggtattactcatccctgcgccctggccagaatgaaggaagcctctggggtggggggagggcacagccccatgtgcccacctcactgccacatgcccccaggccctgcgggtgaatggcctggagcaactgtgcaacaacctcgccagcgagcgcctacagctcttctccagccagatgctgctggcccaggaggaggaggagtgtcggcgggagttgctgtcctgggtgcctgtccctcagcctccgagggagtcctgcctagacctcctggtagatcagccccacagcctcctgagtatcctggacgcccagacatggctgtcccaggctggagtgcaatggtgcggtctcggctcactgcaacctccacctcccaggccacggaccacaccttcctccagaagagccactatcaccatggtgaccaccccagctatgccaagccccggctgcccctgcccgtgttcaccgtgcgacattatgcagggactgtcacctaccaggttcacaagtttttaaacagaaaccgggatcagctggaccctgctgtggtggagatgcttggccagagccagctccagctggtgggcagcctgttccaggaggcagagccccagtccaggggagggcgaggcagacccacgctggcctctcgcttccagcaggccctggaggacctcatagcccggctgggcaggagccatgtctatttcatccagtgcctcacccctaaccctggaaagcttccaggcctctttgacgtgggacatgtgacagagcaactgcaccaggcagccatactggaggccgtgggcacccgcagtgccaacttccccgtgcgtgtgccctttgaggccttcctggccagcttccaggccctggggtcagaagggcaggaagacctctctgaccgggagaagtgtggtgccgtcctgagccaggtgctgggggccgaatcacctctctatcaccttggagccaccaaggtcctgctgcaggagcagggctggcagcggctggaggagctccgggaccagcagcgctcccaggccctggtcgacctgcaccgcagcttccacacctgcatctcccgccagcgcgtcctgccccggatgcaggctcgcatgcgtgggttccaggccagcctgtcttcacacattcctccaacagctgttggctgaccgtctgcctcatctacccttgggccagatgctggaagcggtacctccggcggcgggcagctttgggacagctgaacaccatcctgctggtggcccagcccctgctccagaggcggcagagactgcagcttgggcgttggcagggctggcatagcagcgaaagggccttggagagagtgccaagcatggagctggggcgcttggagatcccggctgagctggccgtcatgctgaagacggcggaaagccatcgggacgccctggctgggagcatcaccgagtgcctgccgcctgaggttcctgcccggcccagcctgactctcccagcagacattgacctgttccctttctccagcttcgtcgccatcggctttcaggaaccgtccctgcccaggccagggcagccactggcgaagcccctaacccagctggatggagacaaccctcagcgtgccctggacatcaacaaagtgatgctgcggctcctgggggacggatccctggagtcctggcagaggcagatcatgggcgcatacctggtgcggcaggggcagtgcnggccagggctgcggaatgagctctttagccagctggtggcccagctatggcagaacccagatgaacagcagagccagcgtggctgggccctcatggctgttttgctcagcgcctttcccccactgcctgtcctacagaagccactgctcaagttcgtgtctgaccaggcccccaggggcatggcagcgctgtgccagcacaagctgctgggggccttggagcagtcgcagctggcctcgggggccactcgggcccaccccccgacccagctggagtggctggccggatggcggcggggccgcatggcgctggatgtgttcaccttcagcgaggagtgctactcggccgaggtggagtcttggaccaccggggagcagctggctgggtggatcctgcagagcagaggcctggaggcgcctccccggggctggtctgtgtcactgcactccagggacgcatggcaggacttggctggctgcgactttgtgctggacctgatcagccagactgaggacctgggggacccagctcgcccccgcagctaccccatcactcctcttggctcagccgaggccattccccttgcccctggcattcaggccccctcactgcccccaggaccccctccaggtccagccccaacgctgcccagcagggaccacacaggggaggtccagaggtcagggagcctggacggcttcctggaccagatcttccagccagtgatatcctccggcctcagcgatctggaacaaagctgggctctgagcagccgcatgaagggagggggcgccattgggcccacacagcagggctaccccatggtgtacccaggaatgattcagatgcctgcataccagccaggcatggtccctgcacccatgcccatgatgccagcaatgggcacagtccctgccatgccagccatggtggtgccgccgcagccaccgcttcccagcctggatgcagggcagctggccgtccagcagcagaactttatccagcagcaggcgctaatcctggcccagcagatgacagcccaggccatgtccctgtccctggagcagcagatgcagcagcggcagcagcaggctcgggcctccgaggctgcgtcccaggcctcaccctcagccgtcacctccaagcccaggaagccccccacacccccggagaagccacagcgtgacctgggatcagagggtggctgcctgagggagacctccgaggaggctgaagacaggccctatcagcccaagagcttccagcagaaacggaactatttccagaggatggggcagccacagatcacagtgaggacgatgaagcccccggccaaggtccacatcccccagggggaagcgcaggaggaggaggaggaggaggaggaggaggaggagcaggaggagcaagaagtggaaacaagagcagtgccgtcccctcctcctccccccatcgtgaagaagccattgaagcaaggtggggccaaagctccaaaagaggctgaggctgagccagccaaggagacagcggccaaggccatggccaagggccagcccaaggcagggggactgtggtgcgcagctcagactccaagcccaagcggccacaacccagcagggaaattggcaacatcatccgcatgtaccagagccgcccgggccccgtgcctgtgcccgtgcagccatccaggcctcccaaagctttcctgaggaaaatcgaccccaaggacgaggctctggccaagctgggtatcaacggtgcccactcgtccccgccgatgctgtcccccagcccaggaaagggccccccgccagctgtggctcctcgacccaaggccccgctacagcttgggccctctagctccatcaaggaaaagcaggggccccttctggacctgtttggccagaagctgcctattgcccacacacccccacctccaccagcgccaccactgcctctgcccgaggacccagggaccctttcagcagagcgtcgttgcttgacacagcccgtggaggaccagggggtctccacccagctactcgcgccctctggcagcgtgtgcttctcctacaccggcacgccctggaagttgttcctacgcaaggaggtgttctacccacgggagaacttcagccatccctactacctgaggctcctctgtgagcagatcctacgggacaccttctccgagtcctgtatccggatttcccagaatgagcggcggaaaatgaaagacctgctgggaggcttggaggtggacctggattctctcaccaccaccgaagacagcgtcaagaagcgcatcgtggtggccgctcgggacaactgggccaattacttctcccgcttctttcctgtctcgggcgagagtggcagcgacgtgcagctgttagccgtgtcccaccgtgggctgcgactgctcaaggtgacccaaggccccggcctccgccccgaccagctgaagattctctgctcatacagctttgcggaggtgctgggtgtggagtgccggggcggctccaccctggagctgtcactgaagagcgagcagctggtgctgcacacagcccgggcaagggccatcgaggcgctggttgagctattcctgaatgagcttaagaaggactccggctatgtcatcgccctgcgcagctacatcactgacaactgcagcctcctcagcttccaccgtggggacctcatcaagctgctgccggtggccaccctggagccaggctggcagtttggctctgccgggggccgttccggactctttcctgccgacatagtgcagccggctgccgctcccgacttttccttctccaaggagcagaggagtggctggcacaagggtcagctgtccaacggggaaccagggctggctcggtgggacagggcctcagaggtgaggaagatgggagagggacaagcagaggcaaggcctgcctgagactgaggaaggaaaggggtttgaccactcccgaggctgccatgcggtgggaccaccctgctgtccgtctcctgtggctgcccctctgcccgctcctgatggctcgccttgtctctccagcaagactgtgcactccttgcaggcaggggctgggctggatgctgctcttgtgtcccacgtggtacttagttcaaggctgccccagcagatgcttaataaacagctcttcactttcctggcttctggtcttgctcctttggtgtctggctggggagggatggggctggggcaggacccctgggacagggcactggacactcaggtggcaccaggtttcttgtgatcccagcgccctgcccacccttggagccaggcacacagtgacgactcggaggccaccagcctgtcctctgtggcctatgcctttctgcccgactcccacagctacaccatgcaggaattcgcccggcgttacttccggaggtcccaggccttgctgggccagactgatggaggtgccgcaggaaaggacacggacagcctggtgcagtacaccaaggctcccatccaggagtcgctcctcagcctcagtgatgatgtgagcaagctggctgtagccagcttcctggccctgatgcggtttatgggtgaccagtccaagccccggggcaaggatgagatggatctgctctatgaactgctgaagctgtgccagcaggagaagctgagggatgagatttactgccaggttatcaagcaggtcacgggacacccccggccggaacactgcactcgaggctggagcttcctcagccttctcacaggcttcttccccccgtcgaccaggctgatgccctacctgaccaagtttctgcaggattcaggccccagccaagagctggcccggagcagccaggagcacctccagcgcacagtcaaatatggggggcgccggcggatgcccccaccgggtgaaatgaaggctttcctgaaaggacaagcgattcgcctgcttcttattcacctgccggggggtgtggattataggacgaatatccagactttcacagtagcagcagaagtgcaggaggagctgtgccggcaaatgggtatcacggagcctcaggaagtgcaggaattcgccctcttcctcatcaaagagaagagccagctggtgcggcccctgcagcccgccgaatacctcaacagcgtggtagtggaccaggacgtgagcctgcacagccggcggctccactgggagaccccactgcacttcgataactccacctacatcagcacccactacagccaggtgctgtgggactaccttcaggggaagctgccagtcagcgccaaggcagacgcgcagctcgccaggctggccgccctgcagcacctcagcaaggccaacaggaataccccctcagggcaggacctgctagcttacgtgccaaagcagctgcaacggcaggtgaacacggcctccatcaagaacctgatgggtcaggagctgagacggctggaaggacacagcccccaggaagcacagatcagcttcattgaggccatgagccagctgcccctcttcggctacaccgtctatggggtgctgcgagtgagcatgcaggccctgtccggacccactctcctggggctcaaccgccagcatctcatcctcatggaccccagctcccagagcctgtactgccgcattgccctgaagagcctgcagcggctccacctgctaagccctctggaggagaaggggccccctggcctggaagtcaactatggctcagctgacaacccccagaccatctggtttgagctgccacaggcccaggagctgctatacaccactgtcttcctgatagacagcagtgcctcttgcactgagtggcccagcatcaactgagaggagtgcaggccggggagagaagaggatgaggcctcccccggcccaagtctcacccacatggtctgccttggatgctatcagatcactgttctagaacctgcctcagcacagcccagccggcccacatgcaggccatgaggcaggggctgctatcacgtcaccagcaggcaaagaaaacagccagaccctctccaggacggcctggggccaaagcgggctgcaggaactcggctggggcacctgaggttgcccagtctgagggagatgcccacccgaccccaggctccgcccaggccccacattagcacaagcccaggcatgggagaaacagctgctgaggaaataaaactccctggagaaaaaaaatg

SEQ ID NO: 354340 - DNA, 8108 bp, Homo sapiens
  misc_feature (2926)..(2926): n is a, c, g, or t
gggctccttctgcatctgctgggctgagcctgctggggtggggtgcagggatggagaggtaaaggagtggggctgcctctgaggatttagaatctctcaaggactagggctgtctgcgcgccttggagttctcgcttccactcacctccagaggacgatgcccctcaccccacacccacgttcatccaagcatggtctctgctcccttttctggtcctgggctgggcagcctgggccgggagtgctcctggcttctctgggatggctggagcccaccacaagccccagccctggcccgtgctgtcctcctgctgggaggagttgcttagtgcagcagacagagcagaggctctgagtggtcctgccactcactagctgtgtggccttgggcaagtggatgaacctttctgaggtccagcgttcccgtctgtaaaacagaattcccagcaggacctaccttgtgagtttcagaggcttaacggagatagtccatgagagagctgtgtgctccagggcagccgttctgtcccactctggccggtcctgcctttggcatggcctgtcctccgtggccttgtagagacgcaggagtctcaaaggcagtggaagacagaggccccagggtgggcccgcctgtagccccacttcccccacgtcaggaggaaagggaagagggagagtcccccagtctctctcagttggcagaggctctgcacccctttacagaggatcctgccgcctcaggacagccaggagggggctggagggagaggaggtggcccctgccctcagtccctggacgggcactattcatggccccctgttctgtcccacaatccagtgtgtccttgtgaccgtgccctccctgaggctggtggtgatggtggcctgtgtgtgcatccaagctcctgtgtgtgtgtttcaaggggcacaaagctgcatgaagcttcctaagagagtgctgagggagcacttcctataggaggaaggctggaaggcttcctggaggcagcagcctggagccctgtgcatgaggatgcgggactctgatagccaacctgctatttagtagggaaagtcgccttccaagccacaggatggccgtgacaagaggcccaaaggctcgcaggagtgctgcagcagagggcaggggtgtgggcagctagagggacctgtggctgggcagggctgaggtagcccgtgtgctgtgccggatcctttagacttgaccctgttggctacacagcatcagccctgggtattactcatccctgcgccctggccagaatgaaggaagcctctggggtggggggagggcacagccccatgtgcccacctcactgccacatgcccccaggccctgcgggtgaatggcctggagcaactgtgcaacaacctcgccagcgagcgcctacagctcttctccagccagatgctgctggcccaggaggaggaggagtgtcggcgggagttgctgtcctgggtgcctgtccctcagcctccgagggagtcctgcctagacctcctggtagatcagccccacagcctcctgagtatcctggacgcccagacatggctgtcccaggctggagtgcaatggtgcggtctcggctcactgcaacctccacctcccaggccacggaccacaccttcctccagaagagccactatcaccatggtgaccaccccagctatgccaagccccggctgcccctgcccgtgttcaccgtgcgacattatgcagggactgtcacctaccaggttcacaagtttttaaacagaaaccgggatcagctggaccctgctgtggtggagatgcttggccagagccagctccagctggtgggcagcctgttccaggaggcagagccccagtccaggggagggcgaggcagacccacgctggcctctcgcttccagcaggccctggaggacctcatagcccggctgggcaggagccatgtctatttcatccagtgcctcacccctaaccctggaaagcttccaggcctctttgacgtgggacatgtgacagagcaactgcaccaggcagccatactggaggccgtgggcacccgcagtgccaacttccccgtgcgtgtgccctttgaggccttcctggccagcttccaggccctggggtcagaagggcaggaagacctctctgaccgggagaagtgtggtgccgtcctgagccaggtgctgggggccgaatcacctctctatcaccttggagccaccaaggtcctgctgcaggagcagggctggcagcggctggaggagctccgggaccagcagcgctcccaggccctggtcgacctgcaccgcagcttccacacctgcatctcccgccagcgcgtcctgccccggatgcaggctcgcatgcgtgggttccaggccaggaagcggtacctccggcggcgggcagctttgggacagctgaacaccatcctgctggtggcccagcccctgctccagaggcggcagagactgcagcttgggcgttggcagggctggcatagcagcgaaagggccttggagagagtgccaagcatggagctggggcgcttggagatcccggctgagctggccgtcatgctgaagacggcggaaagccatcgggacgccctggctgggagcatcaccgagtgcctgccgcctgaggttcctgcccggcccagcctgactctcccagcagacattgacctgttccctttctccagcttcgtcgccatcggctttcaggaaccgtccctgcccaggccagggcagccactggcgaagcccctaacccagctggatggagacaaccctcagcgtgccctggacatcaacaaagtgatgctgcggctcctgggggacggatccctggagtcctggcagaggcagatcatgggcgcatacctggtgcggcaggggcagtgcnggccagggctgcggaatgagctctttagccagctggtggcccagctatggcagaacccagatgaacagcagagccagcgtggctgggccctcatggctgttttgctcagcgcctttcccccactgcctgtcctacagaagccactgctcaagttcgtgtctgaccaggcccccaggggcatggcagcgctgtgccagcacaagctgctgggggccttggagcagtcgcagctggcctcgggggccactcgggcccaccccccgacccagctggagtggctggccggatggcggcggggccgcatggcgctggatgtgttcaccttcagcgaggagtgctactcggccgaggtggagtcttggaccaccggggagcagctggctgggtggatcctgcagagcagaggcctggaggcgcctccccggggctggtctgtgtcactgcactccagggacgcatggcaggacttggctggctgcgactttgtgctggacctgatcagccagactgaggacctgggggacccagctcgcccccgcagctaccccatcactcctcttggctcagccgaggccattccccttgcccctggcattcaggccccctcactgcccccaggaccccctccaggtccagccccaacgctgcccagcagggaccacacaggggaggtccagaggtcagggagcctggacggcttcctggaccagatcttccagccagtgatatcctccggcctcagcgatctggaacaaagctgggctctgagcagccgcatgaagggagggggcgccattgggcccacacagcagggctaccccatggtgtacccaggaatgattcagatgcctgcataccagccaggcatggtccctgcacccatgcccatgatgccagcaatgggcacagtccctgccatgccagccatggtggtgccgccgcagccaccgcttcccagcctggatgcagggcagctggccgtccagcagcagaactttatccagcagcaggcgctaatcctggcccagcagatgacagcccaggccatgtccctgtccctggagcagcagatgcagcagcggcagcagcaggctcgggcctccgaggctgcgtcccaggcctcaccctcagccgtcacctccaagcccaggaagccccccacacccccggagaagccacagcgtgacctgggatcagagggtggctgcctgagggagacctccgaggaggctgaagacaggccctatcagcccaagagcttccagcagaaacggaactatttccagaggatggggcagccacagatcacagtgaggacgatgaagcccccggccaaggtccacatcccccagggggaagcgcaggaggaggaggaggaggaggaggaggaggaggagcaggaggagcaagaagtggaaacaagagcagtgccgtcccctcctcctccccccatcgtgaagaagccattgaagcaaggtggggccaaagctccaaaagaggctgaggctgagccagccaaggagacagcggccaaggccatggccaagggccagcccaaggcagggggactgtggtgcgcagctcagactccaagcccaagcggccacaacccagcagggaaattggcaacatcatccgcatgtaccagagccgcccgggccccgtgcctgtgcccgtgcagccatccaggcctcccaaagctttcctgaggaaaatcgaccccaaggacgaggctctggccaagctgggtatcaacggtgcccactcgtccccgccgatgctgtcccccagcccaggaaagggccccccgccagctgtggctcctcgacccaaggccccgctacagcttgggccctctagctccatcaaggaaaagcaggggccccttctggacctgtttggccagaagctgcctattgcccacacacccccacctccaccagcgccaccactgcctctgcccgaggacccagggaccctttcagcagagcgtcgttgcttgacacagcccgtggaggaccagggggtctccacccagctactcgcgccctctggcagcgtgtgcttctcctacaccggcacgccctggaagttgttcctacgcaaggaggtgttctacccacgggagaacttcagccatccctactacctgaggctcctctgtgagcagatcctacgggacaccttctccgagtcctgtatccggatttcccagaatgagcggcggaaaatgaaagacctgctgggaggcttggaggtggacctggattctctcaccaccaccgaagacagcgtcaagaagcgcatcgtggtggccgctcgggacaactgggccaattacttctcccgcttctttcctgtctcgggcgagagtggcagcgacgtgcagctgttagccgtgtcccaccgtgggctgcgactgctcaaggtgacccaaggccccggcctccgccccgaccagctgaagattctctgctcatacagctttgcggaggtgctgggtgtggagtgccggggcggctccaccctggagctgtcactgaagagcgagcagctggtgctgcacacagcccgggcaagggccatcgaggcgctggttgagctattcctgaatgagcttaagaaggactccggctatgtcatcgccctgcgcagctacatcactgacaactgcagcctcctcagcttccaccgtggggacctcatcaagctgctgccggtggccaccctggagccaggctggcagtttggctctgccgggggccgttccggactctttcctgccgacatagtgcagccggctgccgctcccgacttttccttctccaaggagcagaggagtggctggcacaagggtcagctgtccaacggggaaccagggctggctcggtgggacagggcctcagaggtgaggaagatgggagagggacaagcagaggcaaggcctgcctgagactgaggaaggaaaggggtttgaccactcccgaggctgccatgcggtgggaccaccctgctgtccgtctcctgtggctgcccctctgcccgctcctgatggctcgccttgtctctccagcaagactgtgcactccttgcaggcaggggctgggctggatgctgctcttgtgtcccacgtggtacttagttcaaggctgccccagcagatgcttaataaacagctcttcactttcctggcttctggtcttgctcctttggtgtctggctggggagggatggggctggggcaggacccctgggacagggcactggacactcaggtggcaccaggtttcttgtgatcccagcgccctgcccacccttggagccaggcacacagtgacgactcggaggccaccagcctgtcctctgtggcctatgcctttctgcccgactcccacagctacaccatgcaggaattcgcccggcgttacttccggaggtcccaggccttgctgggccagactgatggaggtgccgcaggaaaggacacggacagcctggtgcagtacaccaaggctcccatccaggagtcgctcctcagcctcagtgatgatgtgagcaagctggctgtagccagcttcctggccctgatgcggtttatgggtgaccagtccaagccccggggcaaggatgagatggatctgctctatgaactgctgaagctgtgccagcaggagaagctgagggatgagatttactgccaggttatcaagcaggtcacgggacacccccggccggaacactgcactcgaggctggagcttcctcagccttctcacaggcttcttccccccgtcgaccaggctgatgccctacctgaccaagtttctgcaggattcaggccccagccaagagctggcccggagcagccaggagcacctccagcgcacagtcaaatatggggggcgccggcggatgcccccaccgggtgaaatgaaggctttcctgaaaggacaagcgattcgcctgcttcttattcacctgccggggggtgtggattataggacgaatatccagactttcacagtagcagcagaagtgcaggaggagctgtgccggcaaatgggtatcacggagcctcaggaagtgcaggaattcgccctcttcctcatcaaagagaagagccagctggtgcggcccctgcagcccgccgaatacctcaacagcgtggtagtggaccaggacgtgagcctgcacagccggcggctccactgggagaccccactgcacttcgataactccacctacatcagcacccactacagccaggtgctgtgggactaccttcaggggaagctgccagtcagcgccaaggcagacgcgcagctcgccaggctggccgccctgcagcacctcagcaaggccaacaggaataccccctcagggcaggacctgctagcttacgtgccaaagcagctgcaacggcaggtgaacacggcctccatcaagaacctgatgggtcaggagctgagacggctggaaggacacagcccccaggaagcacagatcagcttcattgaggccatgagccagctgcccctcttcggctacaccgtctatggggtgctgcgagtgagcatgcaggccctgtccggacccactctcctggggctcaaccgccagcatctcatcctcatggaccccagctcccagagcctgtactgccgcattgccctgaagagcctgcagcggctccacctgctaagccctctggaggagaaggggccccctggcctggaagtcaactatggctcagctgacaacccccagaccatctggtttgagctgccacaggcccaggagctgctatacaccactgtcttcctgatagacagcagtgcctcttgcactgagtggcccagcatcaactgagaggagtgcaggccggggagagaagaggatgaggcctcccccggcccaagtctcacccacatggtctgccttggatgctatcagatcactgttctagaacctgcctcagcacagcccagccggcccacatgcaggccatgaggcaggggctgctatcacgtcaccagcaggcatcggctggggcacctgaggttgcccagtctgagggagatgcccacccgaccccaggctccgcccaggccccacattagcacaagcccaggcatgggagaaacagctgctgaggaaataaaactccctggagaaaaaaaatg

SEQ ID NO: 354341 - DNA, 2919 bp, Homo sapiens
gagagagagagagactagttctcttctctctcctttcctgtctcgggcgagagtggcagcgacgtgcagctgttagccgtgtcccaccgtgggctgcgactgctcaaggtgacccaaggccccggcctccgccccgaccagctgaagattctctgctcatacagctttgcggaggtgctgggtgtggagtgccggggcggctccaccctggagctgtcactgaagagcgagcagctggtgctgcacacagcccgggcaagggccatcgaggcgctggttgagctattcctgaatgagcttaagaaggactccggctatgtcatcgccctgcgcagctacatcactgacaactgcagcctcctcagcttccaccgtggggacctcatcaagctgctgccggtggccaccctggagccaggctggcagtttggctctgccgggggccgttccggactctttcctgccgacatagtgcagccggctgccgctcccgacttttccttctccaaggagcagaggagtggctggcacaagggtcagctgtccaacggggaaccagggctggctcggtgggacagggcctcagaggtgaggaagatgggagagggacaagcagaggcaaggcctgcctgagactgaggaaggaaaggggtttgaccactcccgaggctgccatgcggtgggaccaccctgctgtccgtctcctgtggctgcccctctgcccgctcctgatggctcgccttgtctctccagcaagactgtgcactccttgcaggcaggggctgggctggatgctgctcttgtgtcccacgtggtacttagttcaaggctgccccagcagatgcttaataaacagctcttcactttcctggcttctggtcttgctcctttggtgtctggctggggagggatggggctggggcaggacccctgggacagggcactggacactcaggtggcaccaggtttcttgtgatcccagcgccctgcccacccttggagccaggcacacagtgacgactcggaggccaccagcctgtcctctgtggcctatgcctttctgcccgactcccacagctacaccatgcaggaattcgcccggcgttacttccggaggtcccaggccttgctgggccagactgatggaggtgccgcaggaaaggacacggacagcctggtgcagtacaccaaggctcccatccaggagtcgctcctcagcctcagtgatgatgtgagcaagctggctgtagccagcttcctggccctgatgcggtttatgggtgaccagtccaagccccggggcaaggatgagatggatctgctctatgaactgctgaagctgtgccagcaggagaagctgagggatgagatttactgccaggttatcaagcaggtcacgggacacccccggccggaacactgcactcgaggctggagcttcctcagccttctcacaggcttcttccccccgtcgaccaggctgatgccctacctgaccaagtttctgcaggattcaggccccagccaagagctggcccggagcagccaggagcacctccagcgcacagtcaaatatggggggcgccggcggatgcccccaccgggtgaaatgaaggctttcctgaaaggacaagcgattcgcctgcttcttattcacctgccggggggtgtggattataggacgaatatccagactttcacagtagcagcagaagtgcaggaggagctgtgccggcaaatgggtatcacggagcctcaggaagtgcaggaattcgccctcttcctcatcaaagagaagagccagctggtgcggcccctgcagcccgccgaatacctcaacagcgtggtagtggaccaggacgtgagcctgcacagccggcggctccactgggagaccccactgcacttcgataactccacctacatcagcacccactacagccaggtgctgtgggactaccttcaggggaagctgccagtcagcgccaaggcagacgcgcagctcgccaggctggccgccctgcagcacctcagcaaggccaacaggaataccccctcagggcaggacctgctagcttacgtgccaaagcagctgcaacggcaggtgaacacggcctccatcaagaacctgatgggtcaggagctgagacggctggaaggacacagcccccaggaagcacagatcagcttcattgaggccatgagccagctgcccctcttcggctacaccgtctatggggtgctgcgagtgagcatgcaggccctgtccggacccactctcctggggctcaaccgccagcatctcatcctcatggaccccagctcccagagcctgtactgccgcattgccctgaagagcctgcagcggctccacctgctaagccctctggaggagaaggggccccctggcctggaagtcaactatggctcagctgacaacccccagaccatctggtttgagctgccacaggcccaggagctgctatacaccactgtcttcctgatagacagcagtgcctcttgcactgagtggcccagcatcaactgagaggagtgcaggccggggagagaagaggatgaggcctcccccggcccaagtctcacccacatggtctgccttggatgctatcagatcactgttctagaacctgcctcagcacagcccagccggcccacatgcaggccatgaggcaggggctgctatcacgtcaccagcaggcaaagaaaacagccagaccctctccaggacggcctggggccaaagcgggctgcaggaactcggctggggcacctgaggttgcccagtctgagggagatgcccacccgaccccaggctccgcccaggccccacattagcacaagcccaggcatgggagaaacagctgctgaggaaataaaactccctggagaaaaaaaatg

SEQ ID NO: 354342 - DNA, 1424 bp, Homo sapiens
taaatcgatcggccagtgtaaaacgacggccagtgtaaaacgacggccagtgtaaaccgatggccacgtgtaaaccgatgtcgggtgtaccgcgatgtcccgcgtacgacgaaggtgagtgttatcctgaaaggacaagcgattcgcctgcttcttattcacctgccggggggtgtggattataggacgaatatccagactttcacagtagcagcagaagtgcaggaggagctgtgccggcaaatgggtatcacggagcctcaggaagtgcaggaattcgccctcttcctcatcaaagagaagagccagctggtgcggcccctgcagcccgccgaatacctcaacagcgtggtagtggaccaggacgtgagcctgcacagccggcggctccactgggagaccccactgcacttcgataactccacctacatcagcacccactacagccaggtgctgtgggactaccttcaggggaagctgccagtcagcgccaaggcagacgcgcagctcgccaggctggccgccctgcagcacctcagcaaggccaacaggaataccccctcagggcaggacctgctagcttacgtgccaaagcagctgcaacggcaggtgaacacggcctccatcaagaacctgatgggtcaggagctgagacggctggaaggacacagcccccaggaagcacagatcagcttcattgaggccatgagccagctgcccctcttcggctacaccgtctatggggtgctgcgagtgagcatgcaggccctgtccggacccactctcctggggctcaaccgccagcatctcatcctcatggaccccagctcccagagcctgtactgccgcattgccctgaagagcctgcagcggctccacctgctaagccctctggaggagaaggggccccctggcctggaagtcaactatggctcagctgacaacccccagaccatctggtttgagctgccacaggcccaggagctgctatacaccactgtcttcctgatagacagcagtgcctcttgcactgagtggcccagcatcaactgagaggagtgcaggccggggagagaagaggatgaggcctcccccggcccaagtctcacccacatggtctgccttggatgctatcagatcactgttctagaacctgcctcagcacagcccagccggcccacatgcaggccatgaggcaggggctgctatcacgtcaccagcaggcaaagaaaacagccagaccctctccaggacggcctggggccaaagcgggctgcaggaactcggctggggcacctgaggttgcccagtctgagggagatgcccacccgaccccaggctccgcccaggccccacattagcacaagcccaggcatgggagaaacagctgctgaggaaataaaactccctggagaaaaaaaatg

SEQ ID NO: 354343 - DNA, 5597 bp, Homo sapiens
  misc_feature (2997)..(2997): n is a, c, g, or t
gggctccttctgcatctgctgggctgagcctgctggggtggggtgcagggatggagaggtaaaggagtggggctgcctctgaggatttagaatctctcaaggactagggctgtctgcgcgccttggagttctcgcttccactcacctccagaggacgatgcccctcaccccacacccacgttcatccaagcatggtctctgctcccttttctggtcctgggctgggcagcctgggccgggagtgctcctggcttctctgggatggctggagcccaccacaagccccagccctggcccgtgctgtcctcctgctgggaggagttgcttagtgcagcagacagagcagaggctctgagtggtcctgccactcactagctgtgtggccttgggcaagtggatgaacctttctgaggtccagcgttcccgtctgtaaaacagaattcccagcaggacctaccttgtgagtttcagaggcttaacggagatagtccatgagagagctgtgtgctccagggcagccgttctgtcccactctggccggtcctgcctttggcatggcctgtcctccgtggccttgtagagacgcaggagtctcaaaggcagtggaagacagaggccccagggtgggcccgcctgtagccccacttcccccacgtcaggaggaaagggaagagggagagtcccccagtctctctcagttggcagaggctctgcacccctttacagaggatcctgccgcctcaggacagccaggagggggctggagggagaggaggtggcccctgccctcagtccctggacgggcactattcatggccccctgttctgtcccacaatccagtgtgtccttgtgaccgtgccctccctgaggctggtggtgatggtggcctgtgtgtgcatccaagctcctgtgtgtgtgtttcaaggggcacaaagctgcatgaagcttcctaagagagtgctgagggagcacttcctataggaggaaggctggaaggcttcctggaggcagcagcctggagccctgtgcatgaggatgcgggactctgatagccaacctgctatttagtagggaaagtcgccttccaagccacaggatggccgtgacaagaggcccaaaggctcgcaggagtgctgcagcagagggcaggggtgtgggcagctagagggacctgtggctgggcagggctgaggtagcccgtgtgctgtgccggatcctttagacttgaccctgttggctacacagcatcagccctgggtattactcatccctgcgccctggccagaatgaaggaagcctctggggtggggggagggcacagccccatgtgcccacctcactgccacatgcccccaggccctgcgggtgaatggcctggagcaactgtgcaacaacctcgccagcgagcgcctacagctcttctccagccagatgctgctggcccaggaggaggaggagtgtcggcgggagttgctgtcctgggtgcctgtccctcagcctccgagggagtcctgcctagacctcctggtagatcagccccacagcctcctgagtatcctggacgcccagacatggctgtcccaggctggagtgcaatggtgcggtctcggctcactgcaacctccacctcccaggccacggaccacaccttcctccagaagagccactatcaccatggtgaccaccccagctatgccaagccccggctgcccctgcccgtgttcaccgtgcgacattatgcagggactgtcacctaccaggttcacaagtttttaaacagaaaccgggatcagctggaccctgctgtggtggagatgcttggccagagccagctccagctggtgggcagcctgttccaggaggcagagccccagtccaggggagggcgaggcagacccacgctggcctctcgcttccagcaggccctggaggacctcatagcccggctgggcaggagccatgtctatttcatccagtgcctcacccctaaccctggaaagcttccaggcctctttgacgtgggacatgtgacagagcaactgcaccaggcagccatactggaggccgtgggcacccgcagtgccaacttccccgtgcgtgtgccctttgaggccttcctggccagcttccaggccctggggtcagaagggcaggaagacctctctgaccgggagaagtgtggtgccgtcctgagccaggtgctgggggccgaatcacctctctatcaccttggagccaccaaggtcctgctgcaggagcagggctggcagcggctggaggagctccgggaccagcagcgctcccaggccctggtcgacctgcaccgcagcttccacacctgcatctcccgccagcgcgtcctgccccggatgcaggctcgcatgcgtgggttccaggccagcctgtcttcacacattcctccaacagctgttggctgaccgtctgcctcatctacccttgggccagatgctggaagcggtacctccggcggcgggcagctttgggacagctgaacaccatcctgctggtggcccagcccctgctccagaggcggcagagactgcagcttgggcgttggcagggctggcatagcagcgaaagggccttggagagagtgccaagcatggagctggggcgcttggagatcccggctgagctggccgtcatgctgaagacggcggaaagccatcgggacgccctggctgggagcatcaccgagtgcctgccgcctgaggttcctgcccggcccagcctgactctcccagcagacattgacctgttccctttctccagcttcgtcgccatcggctttcaggaaccgtccctgcccaggccagggcagccactggcgaagcccctaacccagctggatggagacaaccctcagcgtgccctggacatcaacaaagtgatgctgcggctcctgggggacggatccctggagtcctggcagaggcagatcatgggcgcatacctggtgcggcaggggcagtgcnggccagggctgcggaatgagctctttagccagctggtggcccagctatggcagaacccagatgaacagcagagccagcgtggctgggccctcatggctgttttgctcagcgcctttcccccactgcctgtcctacagaagccactgctcaagttcgtgtctgaccaggcccccaggggcatggcagcgctgtgccagcacaagctgctgggggccttggagcagtcgcagctggcctcgggggccactcgggcccaccccccgacccagctggagtggctggccggatggcggcggggccgcatggcgctggatgtgttcaccttcagcgaggagtgctactcggccgaggtggagtcttggaccaccggggagcagctggctgggtggatcctgcagagcagaggcctggaggcgcctccccggggctggtctgtgtcactgcactccagggacgcatggcaggacttggctggctgcgactttgtgctggacctgatcagccagactgaggacctgggggacccagctcgcccccgcagctaccccatcactcctcttggctcagccgaggccattccccttgcccctggcattcaggccccctcactgcccccaggaccccctccaggtccagccccaacgctgcccagcagggaccacacaggggaggtccagaggtcagggagcctggacggcttcctggaccagatcttccagccagtgatatcctccggcctcagcgatctggaacaaagctgggctctgagcagccgcatgaagggagggggcgccattgggcccacacagcagggctaccccatggtgtacccaggaatgattcagatgcctgcataccagccaggcatggtccctgcacccatgcccatgatgccagcaatgggcacagtccctgccatgccagccatggtggtgccgccgcagccaccgcttcccagcctggatgcagggcagctggccgtccagcagcagaactttatccagcagcaggcgctaatcctggcccagcagatgacagcccaggccatgtccctgtccctggagcagcagatgcagcagcggcagcagcaggctcgggcctccgaggctgcgtcccaggcctcaccctcagccgtcacctccaagcccaggaagccccccacacccccggagaagccacagcgtgacctgggatcagagggtggctgcctgagggagacctccgaggaggctgaagacaggccctatcagcccaagagcttccagcagaaacggaactatttccagaggatggggcagccacagatcacagtgaggacgatgaagcccccggccaaggtccacatcccccagggggaagcgcaggaggaggaggaggaggaggaggaggaggaggagcaggaggagcaagaagtggaaacaagagcagtgccgtcccctcctcctccccccatcgtgaagaagccattgaagcaaggtggggccaaagctccaaaagaggctgaggctgagccagccaaggagacagcggccaaggccatggccaagggccagcccaaggcagggggactgtggtgcgcagctcagactccaagcccaagcggccacaacccagcagggaaattggcaacatcatccgcatgtaccagagccgcccgggccccgtgcctgtgcccgtgcagccatccaggcctcccaaagctttcctgaggaaaatcgaccccaaggacgaggctctggccaagctgggtatcaacggtgcccactcgtccccgccgatgctgtcccccagcccaggaaagggccccccgccagctgtggctcctcgacccaaggccccgctacagcttgggccctctagctccatcaaggaaaagcaggggccccttctggacctgtttggccagaagctgcctattgcccacacacccccacctccaccagcgccaccactgcctctgcccgaggacccagggaccctttcagcagagcgtcgttgcttgacacagcccgtggaggaccagggggtctccacccagctactcgcgccctctggcagcgtgtgcttctcctacaccggcacgccctggaagttgttcctacgcaaggaggtgttctacccacgggagaacttcagccatccctactacctgaggctcctctgtgagcagatcctacgggacaccttctccgagtcctgtatccggatttcccagaatgagcggcggaaaatgaaagacctgctgggaggcttggaggtggacctggattctctcaccaccaccgaagacagcgtcaagaagcgcatcgtggtggccgctcgggacaactgggccaattacttctcccgcttctttcctgtctcgaagtcccgggagcgggtatgcctgggagtggccagctggctgcctggctctggcccacagagggcaagtgtggaggaattcccagccctaaggtcttgctggtagctgtgagcaaggatgcagctgctgtaggctgatgtctttcctggtggggcagatggaggtgcagcgccggccctggttagtgaagtacggggacagcggggagcagatagccggtgtcccggtgggaagt

SEQ ID NO: 354344 - DNA, 270 bp, Homo sapiens
ctggccctgggcagctccagggcatcttgggcagtagcaggacccaggagactgcccgagacccaccaccttcctgtagggcgagagtggcagcgacgtgcagctgttagccgtgtcccaccgtgggctgcgactgctcaaggtgacccaaggccccggcctccgccccgaccagctgaagattctctgctcatacaggtgcgctggcccacgaccctgggctagaggtgggggcaggtggcaaggtgaccccagttcatgcccgatccc

SEQ ID NO: 354345 - DNA, 141 bp, Homo sapiens
gacgacaggcgtgagccactgctcccagcctactttatattttcattagctggaaatggaggttcccagaaacatcaagatttgtgacattagctgggcttggtagcatgtgcctctagtcccagctactcaggaggctga

SEQ ID NO: 354346 - DNA, 942 bp, Homo sapiens
tacgggctatgtcgaccaggcgtacccgcacgcgtcggccaaggatctcccagcaggaaaatggccattgcatggacaccaatgaatgcatccagttcccattcgtgtgccctcgagacaagcccgtatgtgtcaacacctatggaagctacaggtgccggaccaacaagaagtgcagtcggggctacgagcccaacgaggatggcacagcctgcgtggggactctcggccagtcaccgggcccccgccccaccacccccaccgctgctgctgccactgccgctgctgctgccgctgctggagctgccactgctgcaccggtcctcgtagatggagatctcaatctggggtcggtggttaaggagagctgcgagcccagctgctgagcaggggtgggacatgaaccagcggatggagtccagcaggggagtgggaaagtgggcttgtgctgctgcctagacagtagggatgtaaaggcctgggagctagaccctccccaagcccatccatgcacattacttagctaacaattagggagactcgtaaggccaggccctgtgctgggcacatagctgtgatcacagcagacagggtcgctgccctgatggcgcttacattccagtgggtctaatgaccatatcttaggacacagatgtgcccagggaggtggtgtcactgcacaggaagtatgaggactttagtgtcctgagttcaaatcctgattcaggaactcacaaagctatgtgaccttacaccagtcacttaacttgttagccatccattatcgcatctgcaaaatggggattaagaatagaatcttggggttagtgtggagattagattaaatgtatgtaagacacttggcacaaaacctggcacatagtaaaggctcaataaaaacaagtgcctctcactgggctttgtcaacacgtgaaactgggt

SEQ ID NO: 354347 - DNA, 2653 bp, Homo sapiens
agcgggtataaagcgagcgcgcggcgtcggggcgggaggctcgaggccagcccgggaccggggctgggagcaagcaggcggcggcgccggcggcagaggcggcagcgagcgcccgcttcccacgcccctaggcggcggggccgagagcgggaggatggctccgagcgctgaccccggcatgtccaggatgttaccgttcctgctgctgctctggtttctgcccatcactgaggggtcccagcgggctgaacccatgttcactgcagtcaccaactcagttctgcctcctgactatgacagtaatcccacccagctcaactatggtgtggcagttactgatgtggaccatgatggggactttgagatcgtcgtggcggggtacaatggacccaacctggttctgaagtatgaccgggcccagaagcggctggtgaacatcgcggtcgatgagcgcagctcaccctactacgcgctgcgggaccggcaggggaacgccatcggggtcacagcctgcgacatcgacggggacggccgggaggagatctacttcctcaacaccaataatgccttctcgggggtggccacgtacaccgacaagttgttcaagttccgcaataaccggtgggaagacatcctgagcgatgaggtcaacgtggcccgtggtgtggccagcctctttgccggacgctctgtggcctgtgtggacagaaagggctctggacgctactctatctacattgccaattacgcctacggtaatgtgggccctgatgccctcattgaaatggaccctgaggccagtgacctctcccggggcattctggcgctcagagatgtggctgctgaggctggggtcagcaaatatacagggggccgaggcgtcagcgtgggccccatcctcagcagcagtgcctcggatatcttctgcgacaatgagaatgggcctaacttccttttccacaaccggggcgatggcacctttgtggacgctgcggccagtgctggtgtggacgacccccaccagcatgggcgaggtgtcgccctggctgacttcaaccgtgatggcaaagtggacatcgtctatggcaactggaatggcccccaccgcctctatctgcaaatgagcacccatgggaaggtccgcttccgggacatcgcctcacccaagttctccatgccctcccctgtccgcacggtcatcaccgccgactttgacaatgaccaggagctggagatcttcttcaacaacattgcctaccgcagctcctcagccaaccgcctcttccgcgtcatccgtagagagcacggagaccccctcatcgaggagctcaatcccggcgacgccttggagcctgagggccggggcacagggggtgtggtgaccgacttcgacggagacgggatgctggacctcatcttgtcccatggagagtccatggctcagccgctgtccgtcttccggggcaatcagggcttcaacaacaactggctgcgagtggtgccacgcacccggtttggggcctttgccaggggagctaaggtcgtgctctacaccaagaagagtggggcccacctgaggatcatcgacgggggctcaggctacctgtgtgagatggagcccgtggcacactttggcctggggaaggatgaagccagcagtgtggaggtgacgtggccagatggcaagatggtgagccggaacgtggccagcggggagatgaactcagtgctggagatcctctacccccgggatgaggacacacttcaggacccagccccactggagacaccaatgaatgcatccagttcccattcgtgtgccctcgagacaagcccgtatgtgtcaacacctatggaagctacaggtgccggaccaacaagaagtgcagtcggggctacgagcccaacgaggatggcacagcctgcgtggggactctcggccagtcaccgggcccccgccccaccacccccaccgctgctgctgccactgccgctgctgctgccgctgctggagctgccactgctgcaccggtcctcgtagatggagatctcaatctggggtcggtggttaaggagagctgcgagcccagctgctgagcaggggtgggacatgaaccagcggatggagtccagcaggggagtgggaaagtgggcttgtgctgctgcctagacagtagggatgtaaaggcctgggagctagaccctccccaagcccatccatgcacattacttagctaacaattagggagactcgtaaggccaggccctgtgctgggcacatagctgtgatcacagcagacagggtcgctgccctgatggcgcttacattccagtgggtctaatgaccatatcttaggacacagatgtgcccagggaggtggtgtcactgcacaggaagtatgaggactttagtgtcctgagttcaaatcctgattcaggaactcacaaagctatgtgaccttacaccagtcacttaacttgttagccatccattatcgcatctgcaaaatggggattaagaatagaatcttggggttagtgtggagattagattaaatgtatgtaagacacttggcacaaaacctggcacatagtaaaggctcaataaaaacaagtgcctctcactgggctttgtcaacacgtgaaactgggt

SEQ ID NO: 354348 - DNA, 2147 bp, Homo sapiens
agcgggtataaagcgagcgcgcggcgtcggggcgggaggctcgaggccagcccgggaccggggctgggagcaagcaggcggcggcgccggcggcagaggcggcagcgagcgcccgcttcccacgcccctaggcggcggggccgagagcgggaggatggctccgagcgctgaccccggcatgtccaggatgttaccgttcctgctgctgctctggtttctgcccatcactgaggggtcccagcgggctgaacccatgttcactgcagtcaccaactcagttctgcctcctgactatgacagtaatcccacccagctcaactatggtgtggcagttactgatgtggaccatgatggggactttgagatcgtcgtggcggggtacaatggacccaacctggttctgaagtatgaccgggcccagaagcggctggtgaacatcgcggtcgatgagcgcagctcaccctactacgcgctgcgggaccggcaggggaacgccatcggggtcacagcctgcgacatcgacggggacggccgggaggagatctacttcctcaacaccaataatgccttctcgggggtggccacgtacaccgacaagttgttcaagttccgcaataaccggtgggaagacatcctgagcgatgaggtcaacgtggcccgtggtgtggccagcctctttgccggacgctctgtggcctgtgtggacagaaagggctctggacgctactctatctacattgccaattacgcctacggtaatgtgggccctgatgccctcattgaaatggaccctgaggccagtgacctctcccggggcattctggcgctcagagatgtggctgctgaggctggggtcagcaaatatacagggggccgaggcgtcagcgtgggccccatcctcagcagcagtgcctcggatatcttctgcgacaatgagaatgggcctaacttccttttccacaaccggggcgatggcacctttgtggacgctgcggccagtgctggtgtggacgacccccaccagcatgggcgaggtgtcgccctggctgacttcaaccgtgatggcaaagtggacatcgtctatggcaactggaatggcccccaccgcctctatctgcaaatgagcacccatgggaaggtccgcttccgggacatcgcctcacccaagttctccatgccctcccctgtccgcacggtcatcaccgccgactttgacaatgaccaggagctggagatcttcttcaacaacattgcctaccgcagctcctcagccaaccgcctcttccgcgtcatccgtagagagcacggagaccccctcatcgaggagctcaatcccggcgacgccttggagcctgagggccggggcacagggggtgtggtgaccgacttcgacggagacgggatgctggacctcatcttgtcccatggagagtccatggctcagccgctgtccgtcttccggggcaatcagggcttcaacaacaactggctgcgagtggtgccacgcacccggtttggggcctttgccaggggagctaaggtcgtgctctacaccaagaagagtggggcccacctgaggatcatcgacgggggctcaggctacctgtgtgagatggagcccgtggcacactttggcctggggaaggatgaagccagcagtgtggaggtgacgtggccagatggcaagatggtgagccggaacgtggccagcggggagatgaactcagtgctggagatcctctacccccgggatgaggacacacttcaggacccagccccactggagtgtggccaaggattctcccagcaggaaaatggccattgcatggacaccaatgaatgcatccagttcccattcgtgtgccctcgagacaagcccgtatgtgtcaacacctatggaagctacaggtgccggaccaacaagaagtgcagtcggggctacgagcccaacgaggatggcacagcctgcgtggctcaagtggcctttttaggtgggtattcttcagccgcctctagaatctctgagcctctctctcgggcctcatatctttctctaggccttggactttgccttcagttatatgcactttaaatcccatcaataaaggaaaaaacaaaacaaaactaacagcctttgtggaaaacta

SEQ ID NO: 354349 - DNA, 2223 bp, Homo sapiens
agcgggtataaagcgagcgcgcggcgtcggggcgggaggctcgaggccagcccgggaccggggctgggagcaagcaggcggcggcgccggcggcagaggcggcagcgagcgcccgcttcccacgcccctaggcggcggggccgagagcgggaggatggctccgagcgctgaccccggcatgtccaggatgttaccgttcctgctgctgctctggtttctgcccatcactgaggggtcccagcgggctgaacccatgttcactgcagtcaccaactcagttctgcctcctgactatgacagtaatcccacccagctcaactatggtgtggcagttactgatgtggaccatgatggggactttgagatcgtcgtggcggggtacaatggacccaacctggttctgaagtatgaccgggcccagaagcggctggtgaacatcgcggtcgatgagcgcagctcaccctactacgcgctgcgggaccggcaggggaacgccatcggggtcacagcctgcgacatcgacggggacggccgggaggagatctacttcctcaacaccaataatgccttctcgggggtggccacgtacaccgacaagttgttcaagttccgcaataaccggtgggaagacatcctgagcgatgaggtcaacgtggcccgtggtgtggccagcctctttgccggacgctctgtggcctgtgtggacagaaagggctctggacgctactctatctacattgccaattacgcctacggtaatgtgggccctgatgccctcattgaaatggaccctgaggccagtgacctctcccggggcattctggcgctcagagatgtggctgctgaggctggggtcagcaaatatacagggggccgaggcgtcagcgtgggccccatcctcagcagcagtgcctcggatatcttctgcgacaatgagaatgggcctaacttccttttccacaaccggggcgatggcacctttgtggacgctgcggccagtgctggtgtggacgacccccaccagcatgggcgaggtgtcgccctggctgacttcaaccgtgatggcaaagtggacatcgtctatggcaactggaatggcccccaccgcctctatctgcaaatgagcacccatgggaaggtccgcttccgggacatcgcctcacccaagttctccatgccctcccctgtccgcacggtcatcaccgccgactttgacaatgaccaggagctggagatcttcttcaacaacattgcctaccgcagctcctcagccaaccgcctcttccgcgtcatccgtagagagcacggagaccccctcatcgaggagctcaatcccggcgacgccttggagcctgagggccggggcacagggggtgtggtgaccgacttcgacggagacgggatgctggacctcatcttgtcccatggagagtccatggctcagccgctgtccgtcttccggggcaatcagggcttcaacaacaactggctgcgagtggtgccacgcacccggtttggggcctttgccaggggagctaaggtcgtgctctacaccaagaagagtggggcccacctgaggatcatcgacgggggctcaggctacctgtgtgagatggagcccgtggcacactttggcctggggaaggatgaagccagcagtgtggaggtgacgtggccagatggcaagatggtgagccggaacgtggccagcggggagatgaactcagtgctggagatcctctacccccgggatgaggacacacttcaggacccagccccactggagacaccaatgaatgcatccagttcccattcgtgtgccctcgagacaagcccgtatgtgtcaacacctatggaagctacaggtgccggaccaacaagaagtgcagtcggggctacgagcccaacgaggatggcacagcctgcgtggaaagaaccttgctacttggtctctgcaatctccttggaaaatagaatgctcctgtagccagaacactctttggaaatgatgtaacgccacagaatatgctcacgaccagcctcagtagtgaaggcttgttataaaacatagatctattcttcatggggaaaaaaagtcatcccaggatataataaaattacacttaagaatgcagcaacccttttaaaaacatattcaacaaaaaaaaagcccctgccattttctgatatcatggtaatactcctaataaatcacaaaatatg

SEQ ID NO: 354350 - DNA, 2696 bp, Homo sapiens
agcgggtataaagcgagcgcgcggcgtcggggcgggaggctcgaggccagcccgggaccggggctgggagcaagcaggcggcggcgccggcggcagaggcggcagcgagcgcccgcttcccacgcccctaggcggcggggccgagagcgggaggatggctccgagcgctgaccccggcatgtccaggatgttaccgttcctgctgctgctctggtttctgcccatcactgaggggtcccagcgggctgaacccatgttcactgcagtcaccaactcagttctgcctcctgactatgacagtaatcccacccagctcaactatggtgtggcagttactgatgtggaccatgatggggactttgagatcgtcgtggcggggtacaatggacccaacctggttctgaagtatgaccgggcccagaagcggctggtgaacatcgcggtcgatgagcgcagctcaccctactacgcgctgcgggaccggcaggggaacgccatcggggtcacagcctgcgacatcgacggggacggccgggaggagatctacttcctcaacaccaataatgccttctcgggggtggccacgtacaccgacaagttgttcaagttccgcaataaccggtgggaagacatcctgagcgatgaggtcaacgtggcccgtggtgtggccagcctctttgccggacgctctgtggcctgtgtggacagaaagggctctggacgctactctatctacattgccaattacgcctacggtaatgtgggccctgatgccctcattgaaatggaccctgaggccagtgacctctcccggggcattctggcgctcagagatgtggctgctgaggctggggtcagcaaatatacagggggccgaggcgtcagcgtgggccccatcctcagcagcagtgcctcggatatcttctgcgacaatgagaatgggcctaacttccttttccacaaccggggcgatggcacctttgtggacgctgcggccagtgctggtgtggacgacccccaccagcatgggcgaggtgtcgccctggctgacttcaaccgtgatggcaaagtggacatcgtctatggcaactggaatggcccccaccgcctctatctgcaaatgagcacccatgggaaggtccgcttccgggacatcgcctcacccaagttctccatgccctcccctgtccgcacggtcatcaccgccgactttgacaatgaccaggagctggagatcttcttcaacaacattgcctaccgcagctcctcagccaaccgcctcttccgcgtcatccgtagagagcacggagaccccctcatcgaggagctcaatcccggcgacgccttggagcctgagggccggggcacagggggtgtggtgaccgacttcgacggagacgggatgctggacctcatcttgtcccatggagagtccatggctcagccgctgtccgtcttccggggcaatcagggcttcaacaacaactggctgcgagtggtgccacgcacccggtttggggcctttgccaggggagctaaggtcgtgctctacaccaagaagagtggggcccacctgaggatcatcgacgggggctcaggctacctgtgtgagatggagcccgtggcacactttggcctggggaaggatgaagccagcagtgtggaggtgacgtggccagatggcaagatggtgagccggaacgtggccagcggggagatgaactcagtgctggagatcctctacccccgggatgaggacacacttcaggacccagccccactggagtgtggccaaggattctcccagcaggaaaatggccattgcatggacaccaatgaatgcatccagttcccattcgtgtgccctcgagacaagcccgtatgtgtcaacacctatggaagctacaggtgccggaccaacaagaagtgcagtcggggctacgagcccaacgaggatggcacagcctgcgtggggactctcggccagtcaccgggcccccgccccaccacccccaccgctgctgctgccactgccgctgctgctgccgctgctggagctgccactgctgcaccggtcctcgtagatggagatctcaatctggggtcggtggttaaggagagctgcgagcccagctgctgagcaggggtgggacatgaaccagcggatggagtccagcaggggagtgggaaagtgggcttgtgctgctgcctagacagtagggatgtaaaggcctgggagctagaccctccccaagcccatccatgcacattacttagctaacaattagggagactcgtaaggccaggccctgtgctgggcacatagctgtgatcacagcagacagggtcgctgccctgatggcgcttacattccagtgggtctaatgaccatatcttaggacacagatgtgcccagggaggtggtgtcactgcacaggaagtatgaggactttagtgtcctgagttcaaatcctgattcaggaactcacaaagctatgtgaccttacaccagtcacttaacttgttagccatccattatcgcatctgcaaaatggggattaagaatagaatcttggggttagtgtggagattagattaaatgtatgtaagacacttggcacaaaacctggcacatagtaaaggctcaataaaaacaagtgcctctcactgggctttgtcaacacgtgaaactgggt

SEQ ID NO: 354351 - DNA, 539 bp, Homo sapiens
tgcagacagacaggtctattggacagcattgctccagagaggagggacctcaaatctgtcttgttcaccatttccctagcacttagaacagtgctcaattcatgcttttattcaatggatgaattagttgatgctgatgcttccgctgagagcctcctgctctcctctgctgctgatgctctctccttctgcccctcagggaaggatgaagccagcagtgtggaggtgacgtggccagatggcaagatggtgagccggaacgtggccagcggggagatgaactcagtgctggagatcctctacccccgggatgaggacacacttcaggacccagccccactggagtgtggccaaggattctcccagcaggaaaatggccattgcatggacaccaatgaatgcatccagttcccattcgtgtgccctcgagacaaggtagagccgagagacaaggtagagccgagagacaaggtagagccgagagacaaggtagagccgagagacaaggtagagccgagagacaaggtagagccgagggg

SEQ ID NO: 354352 - DNA, 2007 bp, Homo sapiens
agcgggtataaagcgagcgcgcggcgtcggggcgggaggctcgaggccagcccgggaccggggctgggagcaagcaggcggcggcgccggcggcagaggcggcagcgagcgcccgcttcccacgcccctaggcggcggggccgagagcgggaggatggctccgagcgctgaccccggcatgtccaggatgttaccgttcctgctgctgctctggtttctgcccatcactgaggggtcccagcgggctgaacccatgttcactgcagtcaccaactcagttctgcctcctgactatgacagtaatcccacccagctcaactatggtgtggcagttactgatgtggaccatgatggggactttgagatcgtcgtggcggggtacaatggacccaacctggttctgaagtatgaccgggcccagaagcggctggtgaacatcgcggtcgatgagcgcagctcaccctactacgcgctgcgggaccggcaggggaacgccatcggggtcacagcctgcgacatcgacggggacggccgggaggagatctacttcctcaacaccaataatgccttctcgggggtggccacgtacaccgacaagttgttcaagttccgcaataaccggtgggaagacatcctgagcgatgaggtcaacgtggcccgtggtgtggccagcctctttgccggacgctctgtggcctgtgtggacagaaagggctctggacgctactctatctacattgccaattacgcctacggtaatgtgggccctgatgccctcattgaaatggaccctgaggccagtgacctctcccggggcattctggcgctcagagatgtggctgctgaggctggggtcagcaaatatacagggggccgaggcgtcagcgtgggccccatcctcagcagcagtgcctcggatatcttctgcgacaatgagaatgggcctaacttccttttccacaaccggggcgatggcacctttgtggacgctgcggccagtgctggtgtggacgacccccaccagcatgggcgaggtgtcgccctggctgacttcaaccgtgatggcaaagtggacatcgtctatggcaactggaatggcccccaccgcctctatctgcaaatgagcacccatgggaaggtccgcttccgggacatcgcctcacccaagttctccatgccctcccctgtccgcacggtcatcaccgccgactttgacaatgaccaggagctggagatcttcttcaacaacattgcctaccgcagctcctcagccaaccgcctcttccgcgtcatccgtagagagcacggagaccccctcatcgaggagctcaatcccggcgacgccttggagcctgagggccggggcacagggggtgtggtgaccgacttcgacggagacgggatgctggacctcatcttgtcccatggagagtccatggctcagccgctgtccgtcttccggggcaatcagggcttcaacaacaactggctgcgagtggtgccacgcacccggtttggggcctttgccaggggagctaaggtcgtgctctacaccaagaagagtggggcccacctgaggatcatcgacgggggctcaggctacctgtgtgagatggagcccgtggcacactttggcctggggaaggatgaagccagcagtgtggaggtgacgtggccagatggcaagatggtgagccggaacgtggccagcggggagatgaactcagtgctggagatcctctacccccgggatgaggacacacttcaggacccagccccactggagtgtggccaaggattctcccagcaggaaaatggccattgcatggacaccaatgaatgcatccagttcccattcgtgtgccctcgagacaagcccgtatgtgtcaacacctatggaagctacaggtgccggaccaacaagaagtgcagtcggggctacgagcccaacgaggatggcacagcctgcgtggctcaggtggcatcgataaacaccgggtaccgagc

SEQ ID NO: 354353 - DNA, 369 bp, Homo sapiens
caaagtgccaaggaatgattctgcagtgtgttcaacgcttatcttagaccagtctctgaatgacagctatgaacaccatagcaacccttccttgccagttttaaaatacatggtgtgggctccttttctctgagtaggttctggaaagatgaattaagggattcaccatgcaaaaatgtagactggaggcaggaggaacttttttgcatcagctggacaaacccagaatttgtccttttcttctctggagcaggcttcctgtctctggagtttaaactcacaagttaagtctgcacataatttatgggagtaagataagtgcatctgtgaggttattcagatcaatgaatgttttgcagtatttgggtg

SEQ ID NO: 354354 - DNA, 444 bp, Homo sapiens
cttttgctatttatttgtccttaagctgtctttccaattccagattgtcctgggtatttgccacaaaaaagaaagcatgtacattatcctatcgttcatttaagtaaatggtaataaaatattttaaggggctattaatatttaaaatccttttctactatggcaaaaatctacagagaaactgaactggcaaaattaactacctggagcaaaacagatgtgcagatctaactaaaacagagctatagtgaaacaaaatgagattgtaagaagacattaaagctattgatttgatttttccatagcaagcaccaaaagcttatattcacagttcctgtgtttcatattagacttatagctgaattggtattttgctgaaaattcctagaaaactgcttgatgacaataaaaagtaaataaaagcactgctaccttctttgattg

SEQ ID NO: 354355 - DNA, 371 bp, Homo sapiens
tttttttttctgtttttgttcttttctttgccctcatattttctcttataaaaccacatagattttaattttttcatccaagttaacaatctctgtgttttaacagatacatttagttcattaacattttttagggtttatttctgccatcttagtttgagctttgtgtttactttgctatatatgatctttgctttcttttttccaaacttttagtgggattgattctgatttctttatttcctcttttcctgttctactgatttggtaattatcagtcttatttgtatttctgtatatacatacagatgttttagatgttacccttacatttttaacacacatacttgactttgaaaagtacaaaatgt

SEQ ID NO: 354356 - DNA, 1691 bp, Homo sapiens
  misc_feature (23)..(24): n is a, c, g, or t
  misc_feature (1335)..(1335): n is a, c, g, or t
aacctacggctaggtacgaggcnnggtgttacagaggccttctctgagggcaagaggaggagaggagaaatagagtaaggcaggcagaggaaacagtctgagctaagaccctgtggctagaagtggcagagggagaggcagcaggaaggccagcggggaggctggggcccagtgcaggcccaggttggaggagcgtagcacatggagtttggtaggagtttgggacgccctggtggatcttaattgtgatggggtgggtgtgaaaggcagtccaggttgcactggttgcacaggagaagtgatcagaagaggaccccagcaggtgtgagccgtgagctgggaggtgcttcagtagtgcaggccatagctgaaggtgtcctacatcagcagggtgatggtgaggtttgaaccactgtttcactgcatagtccctgctgatggacacttgagtgttcagattttttgctggtatattcagtgctgcagtggacattttcatacaaaatatttcggtacacttttgtttatatctgaaaggtaaattcctagcagtagaattattagagcaaacggaatttaacattttggtgtgtattgccaaattgccctcccaagtggtttagtcagcttacccttgccaacaatagatctatccttgccagccttgggcatcacatttaccagtttaatagattgtaaaaccatatcttaattggctaccctgaagccaccatactggagaggctgcgtacagtgtttcacgtagagagagggatacccaggaggcccacctgctccaaccccagctgcatgagtcttcccagcccaggcacagacatgtggataagatttaaacatttccagccccagccttcaagcaatcctagttgacactgaggggagccaacataagctgagctgagaaacagtctgcccagtctgcagattcatgagcaaaagaaatgttgggctgggtacagtggctcacgcctgtaatcccagtactttgggaggccgaggtgggtggatcagttgaggtcaggagtttgagaccagcctggccaacatggtgaagccctgtctctactaaaaattagccgagtgtggtggtgcgggcctgtaatcccagctactcaggtggctgaggcaggagaatggcttgaacccgggaggcggaggttgcagtgagccaagatcaggccactgcactccagcctggatgacgggatgagactctgtctcaaaaaaacgaaacaaaaattttttaagagaaatgtcatttgtttttgtttttgagacagggtctcactctgttgccctcactagagtgcagtnggatcacggctcactgaagtctctacctaccggctcaattgatcttcccaccacagcctcccaaatagctgggagaaatgtcctgtttttaatgaatttgtcttcctttttgtcttgtttgttttaatatctagtgatctaataaatttggatgatatcttttgactatcaattatgaaacctgtatcagatatacacatctttccttcttcatcctcaggctttctggttttgatggtgatactgtggcttttgtacttctggtggtttcccttatactgttaaacctcttttttttttttaaattaaaccaacttagtatgcattaaccactgaacaagggaaaggaactcaca

SEQ ID NO: 354357 - DNA, 518 bp, Homo sapiens
tttcgaagaagatataaaatatgattagttctgtggctgtgaatgttataattaaggagagaacgacccaccatctgttgggtagataccacagccgggtcttcgcatgatccccctgtctgcagttagcagagctgtcatgctgtgtggccgtggaatgatctccagatttcatgtgatgccaatgaagtacaggaaaaactggactcccagaaaccaccacaaagtaatcactctcccatctctgcttggtacctttgattcttccacaagcacatctcaggcagccaaaaagattgtgttgaattttatgttctgtgggtttctttccaaaataatagatatggagtttgcaatctcccccgtgagaagaatatgttttgggaagaatgggagtcatatggaagtgacttgaacccaactctcagcctggagtcaggctcagtctagagaagctgatccctagacaacctgcagatacatgagtaagaaataaagacctgtcatgaagttttaag

SEQ ID NO: 354358 - DNA, 542 bp, Homo sapiens
aggagtacttagagagtgtccggccagcaaaatattttcaattagcttaaatagacacctagacagaacaaataaatgtcttggtgatgtctgctccagaaggcccactggtctctgtggagtggtgggagcattagaaactgaagggggaacgcgtggtgtagtccctaaggaacagaagaatcttgcccgctggccacactagggctccacccaggcctcattctttccgctttgttccttgggacctttcgagtgtggacgagctgggcagcttgctgctaagctcaagggctaggatttttgtccaacaaccaagtgtcctcttgagtccttcatagcctcttatcatgacccactctaagccattggcaactgcacaccggatgacattctagtgtcttctagaaagggtctgccacatgaccagtttgtggtcaaagaattactgcttaataggcttcaagtaagaagacagatgttttctaattaatactggacactgacaaattcatgtttactataaaatctccttacatgga

SEQ ID NO: 354359 - DNA, 4409 bp, Homo sapiens
  misc_feature (23)..(24): n is a, c, g, or t
  misc_feature (4053)..(4053): n is a, c, g, or t
aacctacggctaggtacgaggcnnggtgttaggcgctgcgcggcgcagcgaaaatggcggcttccaggtgggcgcgcaaggccgtggtcctgctttgtgcctctgacctgctgctgctgctgctactgctaccaccgcctgggtcctgcgcggccgaaggctcgcccgggacgcccgacgagtctaccccacctccccggaagaagaagaaggatattcgcgattacaatgatgcagacatggcgcgtcttctggagcaatgggagaaagatgatgacattgaagaaggagatcttccagagcacaagagaccttcagcacctgtcgacttctcaaagatagacccaagcaagcctgaaagcatattgaaaatgacgaaaaaagggaagactctcatgatgtttgtcactgtatcaggaagccctactgagaaggagacagaggaaattacgagcctctggcagggcagccttttcaatgccaactatgacgtccagaggttcattgtgggatcagaccgtgctatcttcatgcttcgcgatgggagctacgcctgggagatcaaggactttttggtcggtcaagacaggtgtgctgatgtaactctggagggccaggtgtaccccggcaaaggaggaggaagcaaagagaaaaataaaacaaagcaagacaagggcaaaaaaaagaaggaaggagatctgaaatctcggtcttccaaggaagaaaatcgagctgggaataaaagagaagacctgtgatggggcagcagtgacgcgctgtggggggacaggtggacgtggagagctctttgcccagctcctggggtgggagtggtctcaggcaactgcacaccggatgacattctagtgtcttctagaaagggtctgccacatgaccagtttgtggtcaaagaattactgcttaataggcttcaagtaagaagacagatgttttctaattaatactggacactgacaaattcatgtttactataaaatctccttacatggaaatgtgactgtgttgctttttcccatttacacttggtgagtcatcaactctactgagattccactcccctccaagcacctgctgtgattgggtggcctgctctgatcagatagcaaattctgatcagagaagactttaaaactcttgacttaattgagtaaactcttcatgccatatacatcattttcattatgttaaaggtaaaatatgctttgtgaactcagatgtctgtagccaggaagccagggtgtgtaaatccaaaatctatgcaggaaatgcggagaatagaaaatatgtcacttgaaatcctaagtagttttgaatttctttgacttgaatcttactcatcagtaagagaactcttggtgtctgtcaggttttatgtggtctgtaaagttaggggttctgttttgtttccttatttaggaaagagtactgctggtgtcgaggggttatatgttccatttaatgtgacagttttaaaggatttaagtagggaatcagagtcctttgcagagtgtgacagacgactcaataacctcatttgtttctaaacatttttctttgataaagtgcctaaatctgtgctttcgtatagagtaacatgatgtgctactgttgatgtctgattttgccgttcatgttagagcctactgtgaataagagttagaacatttatatacagatgtcatttctaagaactaaaattctttgggaaaaaccctcaattgtgattttaataaattaaaagtagcacattacatggttagaaaatgtcagtgttaaagaatggtacaaagtgaaaagtgtatccctctcttgccgccggtggtagcttgtcccagtggaagctgctgttaacaatttgtgcccccacatccccctccctgcccatccaccaaaaaaaagtacatttacttatgtaaatgtacttatggtgatgtatgtttgttttggcctcacagcatctgtttccccttaatttggtagctgctcacatttccctcgaaagaaccacaccctctgcattctcagttctctgctttggatgggacatttgccctgcagtccccccaccctccaggccatgccctctccagggtgaggcctgtgtgatctaccgtactagggtactaggccctgaaagaggcttttcttgttcctcctgcatcttgaacctggagcgggagctgttgtaggccccgcccttggagaagagaactgtctgacagtggggagagagcgccacaccctggtggcataaacgagtccctgaatcatgccgtggctgaaccaagccctgtctgtgggctttttctgttgtactcagggcagtttgatggggttactgtcctgcatagccataatggcccagtataaagcagctgttttgatgagataattgctttaattaagcaaaaggtagcaaagctttcactccgccctgtaccttctgtttccacttaggagccttcccatgtcagaatgtgcagatctgtctcattgtttcctgtgcagtgtgcccccacttcacccagtagtttctgtgtgtctgttatgtactaggtactacaaggtgccaggacggtgtagatacagcctctgctatcgtaaaactcaatgattcggtgggggaagacaaatgtcagtaatgtacaaagtaaaatggcagctgttagaagtatgaaaggggcagggtagggggaggtagaatcttccctgaccaggttaagaaaaccagaggccttctctgagggcaagaggaggagaggagaaatagagtaaggcaggcagaggaaacagtctgagctaagaccctgtggctagaagtggcagagggagaggcagcaggaaggccagcggggaggctggggcccagtgcaggcccaggttggaggagcgtagcacatggagtttggtaggagtttgggacgccctggtggatcttaattgtgatggggtgggtgtgaaaggcagtccaggttgcactggttgcacaggagaagtgatcagaagaggaccccagcaggtgtgagccgtgagctgggaggtgcttcagtagtgcaggccatagctgaaggtgtcctacatcagcagggtgatggtgaggtttgaaccactgtttcactgcatagtccctgctgatggacacttgagtgttcagattttttgctggtatattcagtgctgcagtggacattttcatacaaaatatttcggtacacttttgtttatatctgaaaggtaaattcctagcagtagaattattagagcaaacggaatttaacattttggtgtgtattgccaaattgccctcccaagtggtttagtcagcttacccttgccaacaatagatctatccttgccagccttgggcatcacatttaccagtttaatagattgtaaaaccatatcttaattggctaccctgaagccaccatactggagaggctgcgtacagtgtttcacgtagagagagggatacccaggaggcccacctgctccaaccccagctgcatgagtcttcccagcccaggcacagacatgtggataagatttaaacatttccagccccagccttcaagcaatcctagttgacactgaggggagccaacataagctgagctgagaaacagtctgcccagtctgcagattcatgagcaaaagaaatgttgggctgggtacagtggctcacgcctgtaatcccagtactttgggaggccgaggtgggtggatcagttgaggtcaggagtttgagaccagcctggccaacatggtgaagccctgtctctactaaaaattagccgagtgtggtggtgcgggcctgtaatcccagctactcaggtggctgaggcaggagaatggcttgaacccgggaggcggaggttgcagtgagccaagatcaggccactgcactccagcctggatgacgggatgagactctgtctcaaaaaaacgaaacaaaaattttttaagagaaatgtcatttgtttttgtttttgagacagggtctcactctgttgccctcactagagtgcagtnggatcacggctcactgaagtctctacctaccggctcaattgatcttcccaccacagcctcccaaatagctgggagaaatgtcctgtttttaatgaatttgtcttcctttttgtcttgtttgttttaatatctagtgatctaataaatttggatgatatcttttgactatcaattatgaaacctgtatcagatatacacatctttccttcttcatcctcaggctttctggttttgatggtgatactgtggcttttgtacttctggtggtttcccttatactgttaaacctcttttttttttttaaattaaaccaacttagtatgcattaaccactgaacaagggaaaggaactcaca

SEQ ID NO: 354360 - DNA, 1798 bp, Homo sapiens
caggaaggcgtgtgcaaggcggggtccggcccgcgcaggtcgggtaagcgcgtctagggcgctgcgcggcgcagcgaaaatggcggcttccaggtgggcgcgcaaggccgtggtcctgctttgtgcctctgacctgctgctgctgctgctactgctaccaccgcctgggtcctgcgcggccgaaggctcgcccgggacgcccgacgagtctaccccacctccccggaagaagaagaaggatattcgcgattacaatgatgcagacatggcgcgtcttctggagcaatgggagaaagatgatgacattgaagaaggagatcttccagagcacaagagaccttcagcacctgtcgacttctcaaagatagacccaagcaagcctgaaagcatattgaaaatgacgaaaaaagggaagactctcatgatgtttgtcactgtatcaggaagccctactgagaaggagacagaggaaattacgagcctctggcagggcagccttttcaatgccaactatgacgtccagaggttcattgtgggatcagaccgtgctatcttcatgcttcgcgatgggagctacgcctgggagatcaaggactttttggtcggtcaagacaggtgtgctgatgtaactctggagggccaggtgtaccccggcaaaggaggaggaagcaaagagaaaaataaaacaaagcaagacaagggcaaaaaaaagaaggaaggagatctgaaatctcggtcttccaaggaagaaaatcgagctgggaataaaagagaagacctgtgatggggcagcagtgacgcgctgtggggggacaggtggacgtggagagctctttgcccagctcctggggtgggagtggtctcaggcaactgcacaccggatgacattctagtgtcttctagaaagggtctgccacatgaccagtttgtggtcaaagaattactgcttaataggcttcaagtaagaagacagatgttttctaattaatactggacactgacaaattcatgtttactataaaatctccttacatggaaatgtgactgtgttgctttttcccatttacacttggtgagtcatcaactctactgagattccactcccctccaagcacctgctgtgattgggtggcctgctctgatcagatagcaaattctgatcagagaagactttaaaactcttgacttaattgagtaaactcttcatgccatatacatcattttcattatgttaaaggtaaaatatgctttgtgaactcagatgtctgtagccaggaagccagggtgtgtaaatccaaaatctatgcaggaaatgcggagaatagaaaatatgtcacttgaaatcctaagtagttttgaatttctttgacttgaatcttactcatcagtaagagaactcttggtgtctgtcaggttttatgtggtctgtaaagttaggggttctgttttgtttccttatttaggaaagagtactgctggtgtcgaggggttatatgttccatttaatgtgacagttttaaaggatttaagtagggaatcagagtcctttgcagagtgtgacagacgactcaataacctcatttgtttctaaacatttttctttgataaagtgcctaaatctgtgctttcgtatagagtaacatgatgtgctactgttgatgtctgattttgccgttcatgttagagcctactgtgaataagagttagaacatttatatacagatgtcatttctaagaactaaaattctttgggaaaaaccctcaattgtgattttaataaattaaaagtagcacatta

SEQ ID NO: 354361 - DNA, 1609 bp, Homo sapiens
caggaaggcgtgtgcaaggcggggtccggcccgcgcaggtcgggtaagcgcgtctagggcgctgcgcggcgcagcgaaaatggcggcttccaggtgggcgcgcaaggccgtggtcctgctttgtgcctctgacctgctgctgctgctgctactgctaccaccgcctgggtcctgcgcggccgaaggctcgcccgggacgcccgacgagtctaccccacctccccggaagaagaagaaggatattcgcgattacaatgatgcagacatggcgcgtcttctggagcaatgggagaaagatgatgacattgaagaaggagatcttccagagcacaagagaccttcagcacctgtcgacttctcaaagatagacccaagcaagcctgaaagcatattgaaaatgacgaaaaaagggaagactctcatgatgtttgtcactgtatcaggaagccctactgagaaggagacagaggaaattacgagcctctggcagggcagccttttcaatgccaactatgacgtccagaggttcattgtgggatcagaccgtgctatcttcatgcttcgcgatgggagctacgcctgggagatcaaggactttttggtcggtcaagacaggtgtgctgatgtaactctggagggccaggtgtaccccggcaaaggaggaggaagcaaagagaaaaataaaacaaagcaagacaagggcaaaaaaaagaaggaaggagatctgaaatctcggtcttccaaggaagaaaatcgagctgggaataaaagagaagacctgtgatggggcagcagtgacgcgctgtggggggacaggtggacgtggagagctctttgcccagctcctggggtgggagtggtctcaggcaactgcacaccggatgacattctagtgtcttctagaaagggtctgccacatgaccagtttgtggtcaaagaattactgcttaataggcttcaagtaagaagacagatgttttctaattaatactggacactgacaaattcatgtttactataaaatctccttacatggaaatgtgactgtgttgctttttcccatttacacttgacccctgagccccttccagtgctgcctgaggtgccctctacctgtgcctgcctctcgtctgccagtttgatttggacctgtttttcccacctcagcccccatgctcttgtcaaacgtgtttggctccagccaaacagggcctgggaggaaaagagagtcctgcttctgcctggcttccccatcggggaggggagttgaagtgacagcctcctgacagcttagaaatgtggaggacgcagcaagttctggacatggccagccatatgaatgatatcttctctttctttgaaccatctccacctgctcttatggacaccccgccttggggcaaggcaaggtaggatcttgacatatgactagctcttgggaataaggccatggaagtaaggcagacacatggggtgatttcatcagccttattatccttagataactgtttatcttaggttatccttagataagttattatccctagataaaatgaagcccattttaatagaaatgaaacaacacatttcaactcggggtcctctgtcg

SEQ ID NO: 354362 - DNA, 4140 bp, Homo sapiens
  misc_feature (7)..(7): n is a, c, g, or t
  misc_feature (3784)..(3784): n is a, c, g, or t
gcttccncctcctttgccggggtacacctggcccacaagagaccttcagcacctgtcgacttctcaaagatagacccaagcaagcctgaaagcatattgaaaatgacgaaaaaagggaagactctcatgatgtttgtcactgtatcaggaagccctactgagaaggagacagaggaaattacgagcctctggcagggcagccttttcaatgccaactatgacgtccagaggttcattgtgggatcagaccgtgctatcttcatgcttcgcgatgggagctacgcctgggagatcaaggactttttggtcggtcaagacaggtgtgctgatgtaactctggagggccaggtgtaccccggcaaaggaggaggaagcaaagagaaaaataaaacaaagcaagacaagggcaaaaaaaagaaggaaggagatctgaaatctcggtcttccaaggaagaaaatcgagctgggaataaaagagaagacctgtgatggggcagcagtgacgcgctgtggggggacaggtggacgtggagagctctttgcccagctcctggggtgggagtggtctcaggcaactgcacaccggatgacattctagtgtcttctagaaagggtctgccacatgaccagtttgtggtcaaagaattactgcttaataggcttcaagtaagaagacagatgttttctaattaatactggacactgacaaattcatgtttactataaaatctccttacatggaaatgtgactgtgttgctttttcccatttacacttggtgagtcatcaactctactgagattccactcccctccaagcacctgctgtgattgggtggcctgctctgatcagatagcaaattctgatcagagaagactttaaaactcttgacttaattgagtaaactcttcatgccatatacatcattttcattatgttaaaggtaaaatatgctttgtgaactcagatgtctgtagccaggaagccagggtgtgtaaatccaaaatctatgcaggaaatgcggagaatagaaaatatgtcacttgaaatcctaagtagttttgaatttctttgacttgaatcttactcatcagtaagagaactcttggtgtctgtcaggttttatgtggtctgtaaagttaggggttctgttttgtttccttatttaggaaagagtactgctggtgtcgaggggttatatgttccatttaatgtgacagttttaaaggatttaagtagggaatcagagtcctttgcagagtgtgacagacgactcaataacctcatttgtttctaaacatttttctttgataaagtgcctaaatctgtgctttcgtatagagtaacatgatgtgctactgttgatgtctgattttgccgttcatgttagagcctactgtgaataagagttagaacatttatatacagatgtcatttctaagaactaaaattctttgggaaaaaccctcaattgtgattttaataaattaaaagtagcacattacatggttagaaaatgtcagtgttaaagaatggtacaaagtgaaaagtgtatccctctcttgccgccggtggtagcttgtcccagtggaagctgctgttaacaatttgtgcccccacatccccctccctgcccatccaccaaaaaaaagtacatttacttatgtaaatgtacttatggtgatgtatgtttgttttggcctcacagcatctgtttccccttaatttggtagctgctcacatttccctcgaaagaaccacaccctctgcattctcagttctctgctttggatgggacatttgccctgcagtccccccaccctccaggccatgccctctccagggtgaggcctgtgtgatctaccgtactagggtactaggccctgaaagaggcttttcttgttcctcctgcatcttgaacctggagcgggagctgttgtaggccccgcccttggagaagagaactgtctgacagtggggagagagcgccacaccctggtggcataaacgagtccctgaatcatgccgtggctgaaccaagccctgtctgtgggctttttctgttgtactcagggcagtttgatggggttactgtcctgcatagccataatggcccagtataaagcagctgttttgatgagataattgctttaattaagcaaaaggtagcaaagctttcactccgccctgtaccttctgtttccacttaggagccttcccatgtcagaatgtgcagatctgtctcattgtttcctgtgcagtgtgcccccacttcacccagtagtttctgtgtgtctgttatgtactaggtactacaaggtgccaggacggtgtagatacagcctctgctatcgtaaaactcaatgattcggtgggggaagacaaatgtcagtaatgtacaaagtaaaatggcagctgttagaagtatgaaaggggcagggtagggggaggtagaatcttccctgaccaggttaagaaaaccagaggccttctctgagggcaagaggaggagaggagaaatagagtaaggcaggcagaggaaacagtctgagctaagaccctgtggctagaagtggcagagggagaggcagcaggaaggccagcggggaggctggggcccagtgcaggcccaggttggaggagcgtagcacatggagtttggtaggagtttgggacgccctggtggatcttaattgtgatggggtgggtgtgaaaggcagtccaggttgcactggttgcacaggagaagtgatcagaagaggaccccagcaggtgtgagccgtgagctgggaggtgcttcagtagtgcaggccatagctgaaggtgtcctacatcagcagggtgatggtgaggtttgaaccactgtttcactgcatagtccctgctgatggacacttgagtgttcagattttttgctggtatattcagtgctgcagtggacattttcatacaaaatatttcggtacacttttgtttatatctgaaaggtaaattcctagcagtagaattattagagcaaacggaatttaacattttggtgtgtattgccaaattgccctcccaagtggtttagtcagcttacccttgccaacaatagatctatccttgccagccttgggcatcacatttaccagtttaatagattgtaaaaccatatcttaattggctaccctgaagccaccatactggagaggctgcgtacagtgtttcacgtagagagagggatacccaggaggcccacctgctccaaccccagctgcatgagtcttcccagcccaggcacagacatgtggataagatttaaacatttccagccccagccttcaagcaatcctagttgacactgaggggagccaacataagctgagctgagaaacagtctgcccagtctgcagattcatgagcaaaagaaatgttgggctgggtacagtggctcacgcctgtaatcccagtactttgggaggccgaggtgggtggatcagttgaggtcaggagtttgagaccagcctggccaacatggtgaagccctgtctctactaaaaattagccgagtgtggtggtgcgggcctgtaatcccagctactcaggtggctgaggcaggagaatggcttgaacccgggaggcggaggttgcagtgagccaagatcaggccactgcactccagcctggatgacgggatgagactctgtctcaaaaaaacgaaacaaaaattttttaagagaaatgtcatttgtttttgtttttgagacagggtctcactctgttgccctcactagagtgcagtnggatcacggctcactgaagtctctacctaccggctcaattgatcttcccaccacagcctcccaaatagctgggagaaatgtcctgtttttaatgaatttgtcttcctttttgtcttgtttgttttaatatctagtgatctaataaatttggatgatatcttttgactatcaattatgaaacctgtatcagatatacacatctttccttcttcatcctcaggctttctggttttgatggtgatactgtggcttttgtacttctggtggtttcccttatactgttaaacctcttttttttttttaaattaaaccaacttagtatgcattaaccactgaacaagggaaaggaactcaca

SEQ ID NO: 354363 - DNA, 2259 bp, Homo sapiens
caggaaggcgtgtgcaaggcggggtccggcccgcgcaggtcgggtaagcgcgtctagggcgctgcgcggcgcagcgaaaatggcggcttccaggtgggcgcgcaaggccgtggtcctgctttgtgcctctgacctgctgctgctgctgctactgctaccaccgcctgggtcctgcgcggccgaaggctcgcccgggacgcccgacgagtctaccccacctccccggaagaagaagaaggatattcgcgattacaatgatgcagacatggcgcgtcttctggagcaatgggagaaagatgatgacattgaagaaggagatcttccagagcacaagagaccttcagcacctgtcgacttctcaaagatagacccaagcaagcctgaaagcatattgaaaatgacgaaaaaagggaagactctcatgatgtttgtcactgtatcaggaagccctactgagaaggagacagaggaaattacgagcctctggcagggcagccttttcaatgccaactatgacgtccagaggttcattgtgggatcagaccgtgctatcttcatgcttcgcgatgggagctacgcctgggagatcaaggactttttggtcggtcaagacaggtgtgctgatgtaactctggagggccaggtgtaccccggcaaaggaggaggaagcaaagagaaaaataaaacaaagcaagacaagggcaaaaaaaagaaggaaggagatctgaaatctcggtcttccaaggaagaaaatcgagctgggaataaaagagaagacctgtgatggggcagcagtgacgcgctgtggggggacaggtggacgtggagagctctttgcccagctcctggggtgggagtggtctcaggcaactgcacaccggatgacattctagtgtcttctagaaagggtctgccacatgaccagtttgtggtcaaagaattactgcttaataggcttcaagtaagaagacagatgttttctaattaatactggacactgacaaattcatgtttactataaaatctccttacatggaaatgtgactgtgttgctttttcccatttacacttgacccctgagccccttccagtgctgcctgaggtgccctctacctgtgcctgcctctcgtctgccagtttgatttggacctgtttttcccacctcagcccccatgctcttgtcaaacgtgtttggctccagccaaacagggcctgggaggaaaagagagtcctgcttctgcctggcttccccatcggggaggggagttgaagtgacagcctcctgacagcttagaaatgtggaggacgcagcaagttctggacatggccagccatatgaatgatatcttctctttctttgaaccatctccacctgctcttatggacaccccgccttggggcaaggcaagggatgggcacaacttggaagattttggctttgtgatcctcagtgtccagtgtcacccagatgggccggaagctgcctttgaagccaacgaatgccatttgctctgaaaagcaatgatgagtctcctgagcaaaagccctatgagaggacggctgccccaccccgttccatggctccccatcgccagccccccacgcccaccagcacttgctctgaaggaacacttggttcatcagaagaaaaaaagcccattgttgtcaccatctcaaatctgttgggtagataccacagccgggtcttcgcatgatccccctgtctgcagttagcagagctgtcatgctgtgtggccgtggaatgatctccagatttcatgtgatgccaatgaagtacaggaaaaactggactcccagaaaccaccacaaagtaatcactctcccatctctgcttggtacctttgaaaggccttaagggaaatgcaaacagtcctgtagaatgaaatctgggagcaatgaggaagaaggacccagggagatcgtgtccgtgtctgcagccagcctggggaagagaagcctaagagatagctgtgtccctagattcttccacaagcacatctcaggcagccaaaaagattgtgttgaattttatgttctgtgggtttctttccaaaataatagatatggagtttgcaatctcccccgtgagaagaatatgttttgggaagaatgggagtcatatggaagtgacttgaacccaactctcagcctggagtcaggctcagtctagagaagctgatccctagacaacctgcagatacatgagtaagaaataaagacctgtcatgaagttttaag

SEQ ID NO: 354364 - DNA, 4070 bp, Homo sapiens
  misc_feature (3714)..(3714): n is a, c, g, or t
tacatgagatatcagtagctgctaggctttggaaaatccaatttttcattccatattcatgtagaatttgaaataaactgataagtgccagagaattgctctgaccccttagcaccttactagtacgtgctggctgactgattgcatctctctgcccaaggttcattgtgggatcagaccgtgctatcttcatgcttcgcgatgggagctacgcctgggagatcaaggactttttggtcggtcaagacaggtgtgctgatgtaactctggagggccaggtgtaccccggcaaaggaggaggaagcaaagagaaaaataaaacaaagcaagacaagggcaaaaaaaagaaggaaggagatctgaaatctcggtcttccaaggaagaaaatcgagctgggaataaaagagaagacctgtgatggggcagcagtgacgcgctgtggggggacaggtggacgtggagagctctttgcccagctcctggggtgggagtggtctcaggcaactgcacaccggatgacattctagtgtcttctagaaagggtctgccacatgaccagtttgtggtcaaagaattactgcttaataggcttcaagtaagaagacagatgttttctaattaatactggacactgacaaattcatgtttactataaaatctccttacatggaaatgtgactgtgttgctttttcccatttacacttggtgagtcatcaactctactgagattccactcccctccaagcacctgctgtgattgggtggcctgctctgatcagatagcaaattctgatcagagaagactttaaaactcttgacttaattgagtaaactcttcatgccatatacatcattttcattatgttaaaggtaaaatatgctttgtgaactcagatgtctgtagccaggaagccagggtgtgtaaatccaaaatctatgcaggaaatgcggagaatagaaaatatgtcacttgaaatcctaagtagttttgaatttctttgacttgaatcttactcatcagtaagagaactcttggtgtctgtcaggttttatgtggtctgtaaagttaggggttctgttttgtttccttatttaggaaagagtactgctggtgtcgaggggttatatgttccatttaatgtgacagttttaaaggatttaagtagggaatcagagtcctttgcagagtgtgacagacgactcaataacctcatttgtttctaaacatttttctttgataaagtgcctaaatctgtgctttcgtatagagtaacatgatgtgctactgttgatgtctgattttgccgttcatgttagagcctactgtgaataagagttagaacatttatatacagatgtcatttctaagaactaaaattctttgggaaaaaccctcaattgtgattttaataaattaaaagtagcacattacatggttagaaaatgtcagtgttaaagaatggtacaaagtgaaaagtgtatccctctcttgccgccggtggtagcttgtcccagtggaagctgctgttaacaatttgtgcccccacatccccctccctgcccatccaccaaaaaaaagtacatttacttatgtaaatgtacttatggtgatgtatgtttgttttggcctcacagcatctgtttccccttaatttggtagctgctcacatttccctcgaaagaaccacaccctctgcattctcagttctctgctttggatgggacatttgccctgcagtccccccaccctccaggccatgccctctccagggtgaggcctgtgtgatctaccgtactagggtactaggccctgaaagaggcttttcttgttcctcctgcatcttgaacctggagcgggagctgttgtaggccccgcccttggagaagagaactgtctgacagtggggagagagcgccacaccctggtggcataaacgagtccctgaatcatgccgtggctgaaccaagccctgtctgtgggctttttctgttgtactcagggcagtttgatggggttactgtcctgcatagccataatggcccagtataaagcagctgttttgatgagataattgctttaattaagcaaaaggtagcaaagctttcactccgccctgtaccttctgtttccacttaggagccttcccatgtcagaatgtgcagatctgtctcattgtttcctgtgcagtgtgcccccacttcacccagtagtttctgtgtgtctgttatgtactaggtactacaaggtgccaggacggtgtagatacagcctctgctatcgtaaaactcaatgattcggtgggggaagacaaatgtcagtaatgtacaaagtaaaatggcagctgttagaagtatgaaaggggcagggtagggggaggtagaatcttccctgaccaggttaagaaaaccagaggccttctctgagggcaagaggaggagaggagaaatagagtaaggcaggcagaggaaacagtctgagctaagaccctgtggctagaagtggcagagggagaggcagcaggaaggccagcggggaggctggggcccagtgcaggcccaggttggaggagcgtagcacatggagtttggtaggagtttgggacgccctggtggatcttaattgtgatggggtgggtgtgaaaggcagtccaggttgcactggttgcacaggagaagtgatcagaagaggaccccagcaggtgtgagccgtgagctgggaggtgcttcagtagtgcaggccatagctgaaggtgtcctacatcagcagggtgatggtgaggtttgaaccactgtttcactgcatagtccctgctgatggacacttgagtgttcagattttttgctggtatattcagtgctgcagtggacattttcatacaaaatatttcggtacacttttgtttatatctgaaaggtaaattcctagcagtagaattattagagcaaacggaatttaacattttggtgtgtattgccaaattgccctcccaagtggtttagtcagcttacccttgccaacaatagatctatccttgccagccttgggcatcacatttaccagtttaatagattgtaaaaccatatcttaattggctaccctgaagccaccatactggagaggctgcgtacagtgtttcacgtagagagagggatacccaggaggcccacctgctccaaccccagctgcatgagtcttcccagcccaggcacagacatgtggataagatttaaacatttccagccccagccttcaagcaatcctagttgacactgaggggagccaacataagctgagctgagaaacagtctgcccagtctgcagattcatgagcaaaagaaatgttgggctgggtacagtggctcacgcctgtaatcccagtactttgggaggccgaggtgggtggatcagttgaggtcaggagtttgagaccagcctggccaacatggtgaagccctgtctctactaaaaattagccgagtgtggtggtgcgggcctgtaatcccagctactcaggtggctgaggcaggagaatggcttgaacccgggaggcggaggttgcagtgagccaagatcaggccactgcactccagcctggatgacgggatgagactctgtctcaaaaaaacgaaacaaaaattttttaagagaaatgtcatttgtttttgtttttgagacagggtctcactctgttgccctcactagagtgcagtnggatcacggctcactgaagtctctacctaccggctcaattgatcttcccaccacagcctcccaaatagctgggagaaatgtcctgtttttaatgaatttgtcttcctttttgtcttgtttgttttaatatctagtgatctaataaatttggatgatatcttttgactatcaattatgaaacctgtatcagatatacacatctttccttcttcatcctcaggctttctggttttgatggtgatactgtggcttttgtacttctggtggtttcccttatactgttaaacctcttttttttttttaaattaaaccaacttagtatgcattaaccactgaacaagggaaaggaactcaca

SEQ ID NO: 354365 - DNA, 3823 bp, Homo sapiens
  misc_feature (3467)..(3467): n is a, c, g, or t
gacgttcccatggtagaaaagaagagcaagaaacccaagagagaaagagaaaaaacacaaagagaaaaataaaacaaagcaagacaagggcaaaaaaaagaaggaaggagatctgaaatctcggtcttccaaggaagaaaatcgagctgggaataaaagagaagacctgtgatggggcagcagtgacgcgctgtggggggacaggtggacgtggagagctctttgcccagctcctggggtgggagtggtctcaggcaactgcacaccggatgacattctagtgtcttctagaaagggtctgccacatgaccagtttgtggtcaaagaattactgcttaataggcttcaagtaagaagacagatgttttctaattaatactggacactgacaaattcatgtttactataaaatctccttacatggaaatgtgactgtgttgctttttcccatttacacttggtgagtcatcaactctactgagattccactcccctccaagcacctgctgtgattgggtggcctgctctgatcagatagcaaattctgatcagagaagactttaaaactcttgacttaattgagtaaactcttcatgccatatacatcattttcattatgttaaaggtaaaatatgctttgtgaactcagatgtctgtagccaggaagccagggtgtgtaaatccaaaatctatgcaggaaatgcggagaatagaaaatatgtcacttgaaatcctaagtagttttgaatttctttgacttgaatcttactcatcagtaagagaactcttggtgtctgtcaggttttatgtggtctgtaaagttaggggttctgttttgtttccttatttaggaaagagtactgctggtgtcgaggggttatatgttccatttaatgtgacagttttaaaggatttaagtagggaatcagagtcctttgcagagtgtgacagacgactcaataacctcatttgtttctaaacatttttctttgataaagtgcctaaatctgtgctttcgtatagagtaacatgatgtgctactgttgatgtctgattttgccgttcatgttagagcctactgtgaataagagttagaacatttatatacagatgtcatttctaagaactaaaattctttgggaaaaaccctcaattgtgattttaataaattaaaagtagcacattacatggttagaaaatgtcagtgttaaagaatggtacaaagtgaaaagtgtatccctctcttgccgccggtggtagcttgtcccagtggaagctgctgttaacaatttgtgcccccacatccccctccctgcccatccaccaaaaaaaagtacatttacttatgtaaatgtacttatggtgatgtatgtttgttttggcctcacagcatctgtttccccttaatttggtagctgctcacatttccctcgaaagaaccacaccctctgcattctcagttctctgctttggatgggacatttgccctgcagtccccccaccctccaggccatgccctctccagggtgaggcctgtgtgatctaccgtactagggtactaggccctgaaagaggcttttcttgttcctcctgcatcttgaacctggagcgggagctgttgtaggccccgcccttggagaagagaactgtctgacagtggggagagagcgccacaccctggtggcataaacgagtccctgaatcatgccgtggctgaaccaagccctgtctgtgggctttttctgttgtactcagggcagtttgatggggttactgtcctgcatagccataatggcccagtataaagcagctgttttgatgagataattgctttaattaagcaaaaggtagcaaagctttcactccgccctgtaccttctgtttccacttaggagccttcccatgtcagaatgtgcagatctgtctcattgtttcctgtgcagtgtgcccccacttcacccagtagtttctgtgtgtctgttatgtactaggtactacaaggtgccaggacggtgtagatacagcctctgctatcgtaaaactcaatgattcggtgggggaagacaaatgtcagtaatgtacaaagtaaaatggcagctgttagaagtatgaaaggggcagggtagggggaggtagaatcttccctgaccaggttaagaaaaccagaggccttctctgagggcaagaggaggagaggagaaatagagtaaggcaggcagaggaaacagtctgagctaagaccctgtggctagaagtggcagagggagaggcagcaggaaggccagcggggaggctggggcccagtgcaggcccaggttggaggagcgtagcacatggagtttggtaggagtttgggacgccctggtggatcttaattgtgatggggtgggtgtgaaaggcagtccaggttgcactggttgcacaggagaagtgatcagaagaggaccccagcaggtgtgagccgtgagctgggaggtgcttcagtagtgcaggccatagctgaaggtgtcctacatcagcagggtgatggtgaggtttgaaccactgtttcactgcatagtccctgctgatggacacttgagtgttcagattttttgctggtatattcagtgctgcagtggacattttcatacaaaatatttcggtacacttttgtttatatctgaaaggtaaattcctagcagtagaattattagagcaaacggaatttaacattttggtgtgtattgccaaattgccctcccaagtggtttagtcagcttacccttgccaacaatagatctatccttgccagccttgggcatcacatttaccagtttaatagattgtaaaaccatatcttaattggctaccctgaagccaccatactggagaggctgcgtacagtgtttcacgtagagagagggatacccaggaggcccacctgctccaaccccagctgcatgagtcttcccagcccaggcacagacatgtggataagatttaaacatttccagccccagccttcaagcaatcctagttgacactgaggggagccaacataagctgagctgagaaacagtctgcccagtctgcagattcatgagcaaaagaaatgttgggctgggtacagtggctcacgcctgtaatcccagtactttgggaggccgaggtgggtggatcagttgaggtcaggagtttgagaccagcctggccaacatggtgaagccctgtctctactaaaaattagccgagtgtggtggtgcgggcctgtaatcccagctactcaggtggctgaggcaggagaatggcttgaacccgggaggcggaggttgcagtgagccaagatcaggccactgcactccagcctggatgacgggatgagactctgtctcaaaaaaacgaaacaaaaattttttaagagaaatgtcatttgtttttgtttttgagacagggtctcactctgttgccctcactagagtgcagtnggatcacggctcactgaagtctctacctaccggctcaattgatcttcccaccacagcctcccaaatagctgggagaaatgtcctgtttttaatgaatttgtcttcctttttgtcttgtttgttttaatatctagtgatctaataaatttggatgatatcttttgactatcaattatgaaacctgtatcagatatacacatctttccttcttcatcctcaggctttctggttttgatggtgatactgtggcttttgtacttctggtggtttcccttatactgttaaacctcttttttttttttaaattaaaccaacttagtatgcattaaccactgaacaagggaaaggaactcaca

SEQ ID NO: 354366 - DNA, 443 bp, Homo sapiens
atagacggacgagattgaaatgtgtttggctccagccaaacagggcctgggaggaaaagagagtcctgcttctgcctggcttccccatcggggaggggagttgaagtgacagcctcctgacagcttagaaatgtggaggacgcagcaagttctggacatggccagccatatgaatgatatcttctctttctttgaaccatctccacctgctcttatggacaccccgccttggggcaaggcaaggtaggatcttgacatatgactagctcttgggaataaggccatggaagtaaggcagacacatggggtgatttcatcagccttattatccttagataactgtttatcttaggttatccttagataagttattatccctagataaaatgaagcccattttaatagaaatgaaacaacacatttcaactcggggtcctctgtcg

SEQ ID NO: 354367 - DNA, 829 bp, Homo sapiens
  misc_feature (767)..(767): n is a, c, g, or t
caggaaggcgtgtgcaaggcggggtccggcccgcgcaggtcgggtaagcgcgtctagggcgctgcgcggcgcagcgaaaatggcggcttccaggtgggcgcgcaaggccgtggtcctgctttgtgcctctgacctgctgctgctgctgctactgctaccaccgcctgggtcctgcgcggccgaaggctcgcccgggacgcccgacgagtctaccccacctccccggaagaagaagaaggatattcgcgattacaatgatgcagacatggcgcgtcttctggagcaatgggagaaagatgatgacattgaagaaggagatcttccagagcacaagagaccttcagcacctgtcgacttctcaaagatagacccaagcaagcctgaaagcatattgaaaatgacgaaaaaagggaagactctcatgatgtttgtcactgtatcaggaagccctactgagaaggagacagaggaaattacgagcctctggcagggcagccttttcaatgccaactatgacgtccagaggttcattgtgggatcagaccgtgctatcttcatgcttcgcgatgggagctacgcctgggagatcaaggactttttggtcggtcaagacaggtgtgctgatgtaactctggagggccaggtgtaccccggcaaaggaggaggaagcaaagagaaaaataaaacaaagcaagacaagggcaaaaaaaagaaggaaggagatctgaaatctcggtcttccaaggaagaaaatcgagctggatacnaacagaccgtcagggcacatgacgcgtgttggggcagtgaccgtcactcatgcccacaggta

SEQ ID NO: 354368 - DNA, 684 bp, Homo sapiens
  misc_feature (23)..(24): n is a, c, g, or t
aacctacggctaggtacgaggcnnggtgttaggcgctgcgcggcgcagcgaaaatggcggcttccaggtgggcgcgcaaggccgtggtcctgctttgtgcctctgacctgctgctgctgctgctactgctaccaccgcctgggtcctgcgcggccgaaggctcgcccgggacgcccgacgagtctaccccacctccccggaagaagaagaaggatattcgcgattacaatgatgcagacatggcgcgtcttctggagcaatgggagaaagatgatgacattgaagaaggagatcttccagagcacaagagaccttcagcacctgtcgacttctcaaagatagacccaagcaagcctgaaagcatattgaaaatgacgaaaaaagggaagactctcatgatgtttgtcactgtatcaggaagccctactgagaaggagacagaggaaattacgagcctctggcagggcagccttttcaatgccaactatgacgtccagaggctggagtgcagcggcgtgatctcggctcactgcaacctccgcctccctggttcaagcgattctcctgcctcagcctcccgagtagctggaactacaggcgcccgccaccatgcctggctaattttgtatttttagtagagacagggtttcaccatgttggccaggctggtcttgaatttctgac

SEQ ID NO: 354369 - DNA, 2980 bp, Homo sapiens
caggaaggcgtgtgcaaggcggggtccggcccgcgcaggtcgggtaagcgcgtctagggcgctgcgcggcgcagcgaaaatggcggcttccaggtgggcgcgcaaggccgtggtcctgctttgtgcctctgacctgctgctgctgctgctactgctaccaccgcctgggtcctgcgcggccgaaggctcgcccgggacgcccgacgagtctaccccacctccccggaagaagaagaaggatattcgcgattacaatgatgcagacatggcgcgtcttctggagcaatgggagaaagatgatgacattgaagaaggagatcttccagagcacaagagaccttcagcacctgtcgacttctcaaagatagacccaagcaagcctgaaagcatattgaaaatgacgaaaaaagggaagactctcatgatgtttgtcactgtatcaggaagccctactgagaaggagacagaggaaattacgagcctctggcagggcagccttttcaatgccaactatgacgtccagaggttcattgtgggatcagaccgtgctatcttcatgcttcgcgatgggagctacgcctgggagatcaaggactttttggtcggtcaagacaggtgtgctgatgtaactctggagggccaggtgtaccccggcaaaggaggaggaagcaaagagaaaaataaaacaaagcaagacaagggcaaaaaaaagaaggaaggagatctgaaatctcggtcttccaaggaagaaaatcgagctgggaataaaagagaagacctgtgatggggcagcagtgacgcgctgtggggggacaggtggacgtggagagctctttgcccagctcctggggtgggagtggtctcaggcaactgcacaccggatgacattctagtgtcttctagaaagggtctgccacatgaccagtttgtggtcaaagaattactgcttaataggcttcaagtaagaagacagatgttttctaattaatactggacactgacaaattcatgtttactataaaatctccttacatggaaatgtgactgtgttgctttttcccatttacacttgacccctgagccccttccagtgctgcctgaggtgccctctacctgtgcctgcctctcgtctgccagtttgatttggacctgtttttcccacctcagcccccatgctcttgtcaaacgtgtttggctccagccaaacagggcctgggaggaaaagagagtcctgcttctgcctggcttccccatcggggaggggagttgaagtgacagcctcctgacagcttagaaatgtggaggacgcagcaagttctggacatggccagccatatgaatgatatcttctctttctttgaaccatctccacctgctcttatggacaccccgccttggggcaaggcaagggatgggcacaacttggaagattttggctttgtgatcctcagtgtccagtgtcacccagatgggccggaagctgcctttgaagccaacgaatgccatttgctctgaaaagcaatgatgagtctcctgagcaaaagccctatgagaggacggctgccccaccccgttccatggctccccatcgccagccccccacgcccaccaggtaccgcctagccacactgcactgtggccccttgggaagagctctgtgctcagctactgatggtgcctgacatgtgtttgtatggggcaggcagggtctcacctgagcctcactgccacctaggcagggtgatggctttgttgtagacaggggagccatgcacagcaggaaatggggcaaactgtaagggaggagacctcctaggaacctgcctaccttcgagctgcccctaggacaaccagcaagtccctgcccctctctgaagcccagtgttcccatccatcaaatgatggcattgatctacaagatctccttccccactctatcactctgtggctctagaaagagttctgagaggtgaagaaatctgaccaagagtgtggagtaaatggtgcaccccagattagaactctaaacccctgaaacccacacagcactctccatcttgcagttcacagcttgagcatccgaggggcatgggaatccacgtctatactcagcccatcttggcaggcaacatgcatttatcaccaccgggaaagtgccattcaacttaggtcaccttacatacatcagcttttggcaaccgggatcttaatttaaaagacagaggctccaaaatgatttcaggactgggctggaaaggatacttctcttttccttatgtcctcctttggctggtttgaagggtttgcattgcttctgatttttctcattgccccatatgatgggtttctgattttgatgttttccatagtgaggatggtgtataactaagaagcccagctttgagttaggaagattaggatccaagtcctaaccttaagcaagtggcttggctgttaaattcttggtgtcctcatcttaaatggaaataatagtacctgctgcacaggttattaatgagtaagtgagataattataacatgttgtgcaaagtgcaaggctgaacattgaatagcaaccacaatgatcattatcattattgcccgtggagcttctctgccgcccatacagcctctctgaggactctccctgcacctagtttttgtgatgataatgggtgtcatgctgacatgtccctcctggatggcttcttccagcacagccagcaagcctgtgctaggcttcaccaccgaagctgcctggccttggacaagccatgtaggttctctgggctttagttttctggaacaaataagagttttgcaagctgcaaaggactgtacaaacgctaggcatcagctagaatgttgaagaagatgcaggacccctggccagtctgaatagcaggaattgggtaggagggtgagactaagccacttttcttatgatacttttgttgaataaagggccactttccaagca

SEQ ID NO: 354370 - DNA, 4435 bp, Homo sapiens
  misc_feature (4079)..(4079): n is a, c, g, or t
caggaaggcgtgtgcaaggcggggtccggcccgcgcaggtcgggtaagcgcgtctagggcgctgcgcggcgcagcgaaaatggcggcttccaggtgggcgcgcaaggccgtggtcctgctttgtgcctctgacctgctgctgctgctgctactgctaccaccgcctgggtcctgcgcggccgaaggctcgcccgggacgcccgacgagtctaccccacctccccggaagaagaagaaggatattcgcgattacaatgatgcagacatggcgcgtcttctggagcaatgggagaaagatgatgacattgaagaaggagatcttccagagcacaagagaccttcagcacctgtcgacttctcaaagatagacccaagcaagcctgaaagcatattgaaaatgacgaaaaaagggaagactctcatgatgtttgtcactgtatcaggaagccctactgagaaggagacagaggaaattacgagcctctggcagggcagccttttcaatgccaactatgacgtccagaggttcattgtgggatcagaccgtgctatcttcatgcttcgcgatgggagctacgcctgggagatcaaggactttttggtcggtcaagacaggtgtgctgatgtaactctggagggccaggtgtaccccggcaaaggaggaggaagcaaagagaaaaataaaacaaagcaagacaagggcaaaaaaaagaaggaaggagatctgaaatctcggtcttccaaggaagaaaatcgagctgggaataaaagagaagacctgtgatggggcagcagtgacgcgctgtggggggacaggtggacgtggagagctctttgcccagctcctggggtgggagtggtctcaggcaactgcacaccggatgacattctagtgtcttctagaaagggtctgccacatgaccagtttgtggtcaaagaattactgcttaataggcttcaagtaagaagacagatgttttctaattaatactggacactgacaaattcatgtttactataaaatctccttacatggaaatgtgactgtgttgctttttcccatttacacttggtgagtcatcaactctactgagattccactcccctccaagcacctgctgtgattgggtggcctgctctgatcagatagcaaattctgatcagagaagactttaaaactcttgacttaattgagtaaactcttcatgccatatacatcattttcattatgttaaaggtaaaatatgctttgtgaactcagatgtctgtagccaggaagccagggtgtgtaaatccaaaatctatgcaggaaatgcggagaatagaaaatatgtcacttgaaatcctaagtagttttgaatttctttgacttgaatcttactcatcagtaagagaactcttggtgtctgtcaggttttatgtggtctgtaaagttaggggttctgttttgtttccttatttaggaaagagtactgctggtgtcgaggggttatatgttccatttaatgtgacagttttaaaggatttaagtagggaatcagagtcctttgcagagtgtgacagacgactcaataacctcatttgtttctaaacatttttctttgataaagtgcctaaatctgtgctttcgtatagagtaacatgatgtgctactgttgatgtctgattttgccgttcatgttagagcctactgtgaataagagttagaacatttatatacagatgtcatttctaagaactaaaattctttgggaaaaaccctcaattgtgattttaataaattaaaagtagcacattacatggttagaaaatgtcagtgttaaagaatggtacaaagtgaaaagtgtatccctctcttgccgccggtggtagcttgtcccagtggaagctgctgttaacaatttgtgcccccacatccccctccctgcccatccaccaaaaaaaagtacatttacttatgtaaatgtacttatggtgatgtatgtttgttttggcctcacagcatctgtttccccttaatttggtagctgctcacatttccctcgaaagaaccacaccctctgcattctcagttctctgctttggatgggacatttgccctgcagtccccccaccctccaggccatgccctctccagggtgaggcctgtgtgatctaccgtactagggtactaggccctgaaagaggcttttcttgttcctcctgcatcttgaacctggagcgggagctgttgtaggccccgcccttggagaagagaactgtctgacagtggggagagagcgccacaccctggtggcataaacgagtccctgaatcatgccgtggctgaaccaagccctgtctgtgggctttttctgttgtactcagggcagtttgatggggttactgtcctgcatagccataatggcccagtataaagcagctgttttgatgagataattgctttaattaagcaaaaggtagcaaagctttcactccgccctgtaccttctgtttccacttaggagccttcccatgtcagaatgtgcagatctgtctcattgtttcctgtgcagtgtgcccccacttcacccagtagtttctgtgtgtctgttatgtactaggtactacaaggtgccaggacggtgtagatacagcctctgctatcgtaaaactcaatgattcggtgggggaagacaaatgtcagtaatgtacaaagtaaaatggcagctgttagaagtatgaaaggggcagggtagggggaggtagaatcttccctgaccaggttaagaaaaccagaggccttctctgagggcaagaggaggagaggagaaatagagtaaggcaggcagaggaaacagtctgagctaagaccctgtggctagaagtggcagagggagaggcagcaggaaggccagcggggaggctggggcccagtgcaggcccaggttggaggagcgtagcacatggagtttggtaggagtttgggacgccctggtggatcttaattgtgatggggtgggtgtgaaaggcagtccaggttgcactggttgcacaggagaagtgatcagaagaggaccccagcaggtgtgagccgtgagctgggaggtgcttcagtagtgcaggccatagctgaaggtgtcctacatcagcagggtgatggtgaggtttgaaccactgtttcactgcatagtccctgctgatggacacttgagtgttcagattttttgctggtatattcagtgctgcagtggacattttcatacaaaatatttcggtacacttttgtttatatctgaaaggtaaattcctagcagtagaattattagagcaaacggaatttaacattttggtgtgtattgccaaattgccctcccaagtggtttagtcagcttacccttgccaacaatagatctatccttgccagccttgggcatcacatttaccagtttaatagattgtaaaaccatatcttaattggctaccctgaagccaccatactggagaggctgcgtacagtgtttcacgtagagagagggatacccaggaggcccacctgctccaaccccagctgcatgagtcttcccagcccaggcacagacatgtggataagatttaaacatttccagccccagccttcaagcaatcctagttgacactgaggggagccaacataagctgagctgagaaacagtctgcccagtctgcagattcatgagcaaaagaaatgttgggctgggtacagtggctcacgcctgtaatcccagtactttgggaggccgaggtgggtggatcagttgaggtcaggagtttgagaccagcctggccaacatggtgaagccctgtctctactaaaaattagccgagtgtggtggtgcgggcctgtaatcccagctactcaggtggctgaggcaggagaatggcttgaacccgggaggcggaggttgcagtgagccaagatcaggccactgcactccagcctggatgacgggatgagactctgtctcaaaaaaacgaaacaaaaattttttaagagaaatgtcatttgtttttgtttttgagacagggtctcactctgttgccctcactagagtgcagtnggatcacggctcactgaagtctctacctaccggctcaattgatcttcccaccacagcctcccaaatagctgggagaaatgtcctgtttttaatgaatttgtcttcctttttgtcttgtttgttttaatatctagtgatctaataaatttggatgatatcttttgactatcaattatgaaacctgtatcagatatacacatctttccttcttcatcctcaggctttctggttttgatggtgatactgtggcttttgtacttctggtggtttcccttatactgttaaacctcttttttttttttaaattaaaccaacttagtatgcattaaccactgaacaagggaaaggaactcaca

SEQ ID NO: 354371 - DNA, 1954 bp, Homo sapiens
caggaaggcgtgtgcaaggcggggtccggcccgcgcaggtcgggtaagcgcgtctagggcgctgcgcggcgcagcgaaaatggcggcttccaggtgggcgcgcaaggccgtggtcctgctttgtgcctctgacctgctgctgctgctgctactgctaccaccgcctgggtcctgcgcggccgaaggctcgcccgggacgcccgacgagtctaccccacctccccggaagaagaagaaggatattcgcgattacaatgatgcagacatggcgcgtcttctggagcaatgggagaaagatgatgacattgaagaaggagatcttccagagcacaagagaccttcagcacctgtcgacttctcaaagatagacccaagcaagcctgaaagcatattgaaaatgacgaaaaaagggaagactctcatgatgtttgtcactgtatcaggaagccctactgagaaggagacagaggaaattacgagcctctggcagggcagccttttcaatgccaactatgacgtccagaggttcattgtgggatcagaccgtgctatcttcatgcttcgcgatgggagctacgcctgggagatcaaggactttttggtcggtcaagacaggtgtgctgatgtaactctggagggccaggtgtaccccggcaaaggaggaggaagcaaagagaaaaataaaacaaagcaagacaagggcaaaaaaaagaaggaaggagatctgaaatctcggtcttccaaggaagaaaatcgagctgggaataaaagagaagacctgtgatggggcagcagtgacgcgctgtggggggacaggtggacgtggagagctctttgcccagctcctggggtgggagtggtctcaggcaactgcacaccggatgacattctagtgtcttctagaaagggtctgccacatgaccagtttgtggtcaaagaattactgcttaataggcttcaagtaagaagacagatgttttctaattaatactggacactgacaaattcatgtttactataaaatctccttacatggaaatgtgactgtgttgctttttcccatttacacttggtgagtcatcaactctactgagattccactcccctccaagcacctgctgtgattgggtggcctgctctgatcagatagcaaattctgatcagagaagactttaaaactcttgacttaattgagtaaactcttcatgccatatacatcattttcattatgttaaaggtaaaatatgctttgtgaactcagatgtctgtagccaggaagccagggtgtgtaaatccaaaatctatgcaggaaatgcggagaatagaaaatatgtcacttgaaatcctaagtagttttgaatttctttgacttgaatcttactcatcagtaagagaactcttggtgtctgtcaggttttatgtggtctgtaaagttaggggttctgttttgtttccttatttaggaaagagtactgctggtgtcgaggggttatatgttccatttaatgtgacagttttaaaggatttaagtagggaatcagagtcctttgcagagtgtgacagacgactcaataacctcatttgtttctaaacatttttctttgataaagtgcctaaatctgtgctttcgtatagagtaacatgatgtgctactgttgatgtctgattttgccgttcatgttagagcctactgtgaataagagttagaacatttatatacagatgtcatttctaagaactaaaattctttgggaaaaaccctcaattgtgattttaataaattaaaagtagcacattaaaaaaaaaaaaaagggggggggggcgcttattatttctcagggccccgttcgtgttccccctttgttaaggggccctgggcattatttgtctccccccaaaccctcccgggacacacactgcttcgaaacctctggagacagaacccgtatcgccg

SEQ ID NO: 354372 - DNA, 1602 bp, Homo sapiens
caggaaggcgtgtgcaaggcggggtccggcccgcgcaggtcgggtaagcgcgtctagggcgctgcgcggcgcagcgaaaatggcggcttccaggtgggcgcgcaaggccgtggtcctgctttgtgcctctgacctgctgctgctgctgctactgctaccaccgcctgggtcctgcgcggccgaaggctcgcccgggacgcccgacgagtctaccccacctccccggaagaagaagaaggatattcgcgattacaatgatgcagacatggcgcgtcttctggagcaatgggagaaagatgatgacattgaagaaggagatcttccagagcacaagagaccttcagcacctgtcgacttctcaaagatagacccaagcaagcctgaaagcatattgaaaatgacgaaaaaagggaagactctcatgatgtttgtcactgtatcaggaagccctactgagaaggagacagaggaaattacgagcctctggcagggcagccttttcaatgccaactatgacgtccagaggttcattgtgggatcagaccgtgctatcttcatgcttcgcgatgggagctacgcctgggagatcaaggactttttggtcggtcaagacaggtgtgctgatgtaactctggagggccaggtgtaccccggcaaaggaggaggaagcaaagagaaaaataaaacaaagcaagacaagggcaaaaaaaagaaggaaggagatctgaaatctcggtcttccaaggaagaaaatcgagctgggaataaaagagaagacctgtgatggggcagcagtgacgcgctgtggggggacaggtggacgtggagagctctttgcccagctcctggggtgggagtggtctcaggcaactgcacaccggatgacattctagtgtcttctagaaagggtctgccacatgaccagtttgtggtcaaagaattactgcttaataggcttcaagtaagaagacagatgttttctaattaatactggacactgacaaattcatgtttactataaaatctccttacatggaaatgtgactgtgttgctttttcccatttacacttgacccctgagccccttccagtgctgcctgaggtgccctctacctgtgcctgcctctcgtctgccagtttgatttggacctgtttttcccacctcagcccccatgctcttgtcaaacgtgtttggctccagccaaacagggcctgggaggaaaagagagtcctgcttctgcctggcttccccatcggggaggggagttgaagtgacagcctcctgacagcttagaaatgtggaggacgcagcaagttctggacatggccagccatatgaatgatatcttctctttctttgaaccatctccacctgctcttatggacaccccgccttggggcaaggcaaggtaggatcttgacatatgactagctcttgggaataaggccatggaagtaaggcagacacatggggtgatttcatcagccttattatccttagataactgtttatcttaggttatccttagataagttattatccctagataaaatgaagcccattttaatagaaatgaaacaaacacatttcagatgatgaca

SEQ ID NO: 354373 - DNA, 2123 bp, Homo sapiens
caggaaggcgtgtgcaaggcggggtccggcccgcgcaggtcgggtaagcgcgtctagggcgctgcgcggcgcagcgaaaatggcggcttccaggtgggcgcgcaaggccgtggtcctgctttgtgcctctgacctgctgctgctgctgctactgctaccaccgcctgggtcctgcgcggccgaaggctcgcccgggacgcccgacgagtctaccccacctccccggaagaagaagaaggatattcgcgattacaatgatgcagacatggcgcgtcttctggagcaatgggagaaagatgatgacattgaagaaggagatcttccagagcacaagagaccttcagcacctgtcgacttctcaaagatagacccaagcaagcctgaaagcatattgaaaatgacgaaaaaagggaagactctcatgatgtttgtcactgtatcaggaagccctactgagaaggagacagaggaaattacgagcctctggcagggcagccttttcaatgccaactatgacgtccagaggttcattgtgggatcagaccgtgctatcttcatgcttcgcgatgggagctacgcctgggagatcaaggactttttggtcggtcaagacaggtgtgctgatgtaactctggagggccaggtgtaccccggcaaaggaggaggaagcaaagagaaaaataaaacaaagcaagacaagggcaaaaaaaagaaggaaggagatctgaaatctcggtcttccaaggaagaaaatcgagctgggaataaaagagaagacctgtgatggggcagcagtgacgcgctgtggggggacaggtggacgtggagagctctttgcccagctcctggggtgggagtggtctcaggcaactgcacaccggatgacattctagtgtcttctagaaagggtctgccacatgaccagtttgtggtcaaagaattactgcttaataggcttcaagtaagaagacagatgttttctaattaatactggacactgacaaattcatgtttactataaaatctccttacatggaaatgtgactgtgttgctttttcccatttacacttgacccctgagccccttccagtgctgcctgaggtgccctctacctgtgcctgcctctcgtctgccagtttgatttggacctgtttttcccacctcagcccccatgctcttgtcaaacgtgtttggctccagccaaacagggcctgggaggaaaagagagtcctgcttctgcctggcttccccatcggggaggggagttgaagtgacagcctcctgacagcttagaaatgtggaggacgcagcaagttctggacatggccagccatatgaatgatatcttctctttctttgaaccatctccacctgctcttatggacaccccgccttggggcaaggcaagggatgggcacaacttggaagattttggctttgtgatcctcagtgtccagtgtcacccagatgggccggaagctgcctttgaagccaacgaatgccatttgctctgaaaagcaatgatgagtctcctgagcaaaagccctatgagaggacggctgccccaccccgttccatggctccccatcgccagccccccacgcccaccagcacttgctctgaaggaacacttggttcatcagaagaaaaaaagcccattgttgtcaccatctcaaatctgttgggtagataccacagccgggtcttcgcatgatccccctgtctgcagttagcagagctgtcatgctgtgtggccgtggaatgatctccagatttcatgtgatgccaatgaagtacaggaaaaactggactcccagaaaccaccacaaagtaatcactctcccatctctgcttggtacctttgattcttccacaagcacatctcaggcagccaaaaagattgtgttgaattttatgttctgtgggtttctttccaaaataatagatatggagtttgcaatctcccccgtgagaagaatatgttttgggaagaatgggagtcatatggaagtgacttgaacccaactctcagcctggagtcaggctcagtctagagaagctgatccctagacaacctgcagatacatgagtaagaaataaagacctgtcatgaagttttaag

SEQ ID NO: 354374 - DNA, 1037 bp, Homo sapiens
caggaaggcgtgtgcaaggcggggtccggcccgcgcaggtcgggtaagcgcgtctagggcgctgcgcggcgcagcgaaaatggcggcttccaggtgggcgcgcaaggccgtggtcctgctttgtgcctctgacctgctgctgctgctgctactgctaccaccgcctgggtcctgcgcggccgaaggctcgcccgggacgcccgacgagtctaccccacctccccggaagaagaagaaggatattcgcgattacaatgatgcagacatggcgcgtcttctggagcaatgggagaaagatgatgacattgaagaaggagatcttccagagcacaagagaccttcagcacctgtcgacttctcaaagatagacccaagcaagcctgaaagcatattgaaaatgacgaaaaaagggaagactctcatgatgtttgtcactgtatcaggaagccctactgagaaggagacagaggaaattacgagcctctggcagggcagccttttcaatgccaactatgacgtccagaggttcattgtgggatcagaccgtgctatcttcatgcttcgcgatgggagctacgcctgggagatcaaggactttttggtcggtcaagacaggtgtgctgatgtaactctggagggccaggtgtaccccggcaaaggaggaggaagcaaagagaaaaataaaacaaagcaagacaagggcaaaaaaaagaaggaaggagatctgaaatctcggtcttccaaggaagaaaatcgagctgggaataaaagagaagacctgtgatggggcagcagtgacgcgctgtggggggacaggtggacgtggagagctctttgcccagctcctggggtgggagtggtctcaggcaactgcacaccggatgacattctagtgtcttctagaaagggtctgccacatgaccagtttgtggtcaaagaattactgcttaataggcttcaagtaagaagacagatgttttctaattaatactggacactgacaaattcatgtttactataaaatctccttacatgga

SEQ ID NO: 354375 - DNA, 2174 bp, Homo sapiens
  misc_feature (23)..(24): n is a, c, g, or t
aacctacggctaggtacgaggcnnggtgttaggcgctgcgcggcgcagcgaaaatggcggcttccaggtgggcgcgcaaggccgtggtcctgctttgtgcctctgacctgctgctgctgctgctactgctaccaccgcctgggtcctgcgcggccgaaggctcgcccgggacgcccgacgagtctaccccacctccccggaagaagaagaaggatattcgcgattacaatgatgcagacatggcgcgtcttctggagcaatgggagacccctgagccccttccagtgctgcctgaggtgccctctacctgtgcctgcctctcgtctgccagtttgatttggacctgtttttcccacctcagcccccatgctcttgtcaaacgtgtttggctccagccaaacagggcctgggaggaaaagagagtcctgcttctgcctggcttccccatcggggaggggagttgaagtgacagcctcctgacagcttagaaatgtggaggacgcagcaagttctggacatggccagccatatgaatgatatcttctctttctttgaaccatctccacctgctcttatggacaccccgccttggggcaaggcaagggatgggcacaacttggaagattttggctttgtgatcctcagtgtccagtgtcacccagatgggccggaagctgcctttgaagccaacgaatgccatttgctctgaaaagcaatgatgagtctcctgagcaaaagccctatgagaggacggctgccccaccccgttccatggctccccatcgccagccccccacgcccaccaggtaccgcctagccacactgcactgtggccccttgggaagagctctgtgctcagctactgatggtgcctgacatgtgtttgtatggggcaggcagggtctcacctgagcctcactgccacctaggcagggtgatggctttgttgtagacaggggagccatgcacagcaggaaatggggcaaactgtaagggaggagacctcctaggaacctgcctaccttcgagctgcccctaggacaaccagcaagtccctgcccctctctgaagcccagtgttcccatccatcaaatgatggcattgatctacaagatctccttccccactctatcactctgtggctctagaaagagttctgagaggtgaagaaatctgaccaagagtgtggagtaaatggtgcaccccagattagaactctaaacccctgaaacccacacagcactctccatcttgcagttcacagcttgagcatccgaggggcatgggaatccacgtctatactcagcccatcttggcaggcaacatgcatttatcaccaccgggaaagtgccattcaacttaggtcaccttacatacatcagcttttggcaaccgggatcttaatttaaaagacagaggctccaaaatgatttcaggactgggctggaaaggatacttctcttttccttatgtcctcctttggctggtttgaagggtttgcattgcttctgatttttctcattgccccatatgatgggtttctgattttgatgttttccatagtgaggatggtgtataactaagaagcccagctttgagttaggaagattaggatccaagtcctaaccttaagcaagtggcttggctgttaaattcttggtgtcctcatcttaaatggaaataatagtacctgctgcacaggttattaatgagtaagtgagataattataacatgttgtgcaaagtgcaaggctgaacattgaatagcaaccacaatgatcattatcattattgcccgtggagcttctctgccgcccatacagcctctctgaggactctccctgcacctagtttttgtgatgataatgggtgtcatgctgacatgtccctcctggatggcttcttccagcacagccagcaagcctgtgctaggcttcaccaccgaagctgcctggccttggacaagccatgtaggttctctgggctttagttttctggaacaaataagagttttgcaagctgcaaaggactgtacaaacgctaggcatcagctagaatgttgaagaagatgcaggacccctggccagtctgaatagcaggaattgggtaggagggtgagactaagccacttttcttatgatacttttgttgaataaagggccactttccaagca

SEQ ID NO: 354376 - DNA, 2020 bp, Homo sapiens
ccggacctcaggcccagttcagtgtacttcccctctctacttcctccctccagtcccttctccatccctcccttttttggctgccccttgcctgccttcctcgccagtagcttgcagagtagacacgatgacaccttttgcaggctaaaaaggctgagagtggcactatgtgcagtgagccaccatggaggaccaagcaggtcagcgggactatgatctcctggtggtcggcgggggatctggtggcctggcttgtgccaaggaggccgctcagctgggaaggaaggtgtccgtggtggactacgtggaaccttctccccaaggcacccggtggggcctcggcggcacctgcgtcaacgtgggctgcatccccaagaagctgatgcaccaggcggcactgctgggaggcctgatccaagatgcccccaactatggctgggaggtggcccagcccgtgccgcatgactggaggaagatggcagaagctgttcaaaatcacgtgaaatccttgaactggggccaccgtgtccagcttcaggacagaaaagtcaagtactttaacatcaaagccagctttgttgacgagcacacggtttgcggcgttgccaaaggtgggaaagagattctgctgtcagccgatcacatcatcattgctactggagggcggccgagataccccacgcacatcgaaggtgccttggaatatggaatcacaagtgatgacatcttctggctgaaggaatcccctggaaaaacgttggtggtcggggccagctatgtggccctggagtgtgctggcttcctcaccgggattgggctggacaccaccatcatgatgcgcagcatccccctccgcggcttcgaccagcaaatgtcctccatggtcatagagcacatggcatctcatggcacccggttcctgaggggctgtgccccctcgcgggtcaggaggctccctgatggccagctgcaggtcacctgggaggacagcaccaccggcaaggaggacacgggcacctttgacaccgtcctgtgggccataggtcgagtcccagacaccagaagtctgaatttggagaaggctggggtagatactagccccgacactcagaagatcctggtggactcccgggaagccacctctgtgccccacatctacgccattggtgacgtggtggaggggcggcctgagctgacacccacagcgatcatggccgggaggctcctggtgcagcggctcttcggcgggtcctcagatctgatggactacgacaatgttcccacgaccgtcttcaccccgctggagtatggctgtgtggggctgtccgaggaggaggcagtggctcgccacgggcaggagcatgttgaggtctatcacgcccattataaaccactggagttcacggtggctggacgagatgcatcccagtgttatgtaaagatggtgtgcctgagggagcccccacagctggtgctgggcctgcatttccttggccccaacgcaggcgaagttactcaaggatttgctctggggatcaagtgtggggcttcctatgcgcaggtgatgcggaccgtgggtatccatcccacatgctctgaggaggtagtcaagctgcgcatctccaagcgctcaggcctggaccccacggtgacaggctgctgagggtaagcgccatccctgcaggccagggcacacggtgcgcccgccgccagctcctcggaggccagacccaggatggctgcaggccaggtttggggggcctcaaccctctcctggagcgcctgtgagatggtcagcgtggagcgcaagtgctggacaggtggcccgtgtgccccacagggatggctcaggggactgtccacctcacccctgcacctctcagcctctgccgccgggcacccccccccaggctcctggtgccagatgatgacgacctgggtggaaacctaccctgtgggcacccatgtccgagccccctggcatttctgcaatgcaaataaagagggtactttttctgaa

SEQ ID NO: 354377 - DNA, 2020 bp, Homo sapiens
gccctgcctaacaccaggcccaccgaaccttgaggtaaagggccagtgacccccatggggacaattaaaggcaaagaattaggtagtaaatttagaggaatggtactacagagatcgaccgccctgctgcctactgtggaggtagacaagcattgtactgagacagaagaagaggctgggacccatctggattggctcaggtcagcgggactatgatctcctggtggtcggcgggggatctggtggcctggcttgtgccaaggaggccgctcagctgggaaggaaggtgtccgtggtggactacgtggaaccttctccccaaggcacccggtggggcctcggcggcacctgcgtcaacgtgggctgcatccccaagaagctgatgcaccaggcggcactgctgggaggcctgatccaagatgcccccaactatggctgggaggtggcccagcccgtgccgcatgactggaggaagatggcagaagctgttcaaaatcacgtgaaatccttgaactggggccaccgtgtccagcttcaggacagaaaagtcaagtactttaacatcaaagccagctttgttgacgagcacacggtttgcggcgttgccaaaggtgggaaagagattctgctgtcagccgatcacatcatcattgctactggagggcggccgagataccccacgcacatcgaaggtgccttggaatatggaatcacaagtgatgacatcttctggctgaaggaatcccctggaaaaacgttggtggtcggggccagctatgtggccctggagtgtgctggcttcctcaccgggattgggctggacaccaccatcatgatgcgcagcatccccctccgcggcttcgaccagcaaatgtcctccatggtcatagagcacatggcatctcatggcacccggttcctgaggggctgtgccccctcgcgggtcaggaggctccctgatggccagctgcaggtcacctgggaggacagcaccaccggcaaggaggacacgggcacctttgacaccgtcctgtgggccataggtcgagtcccagacaccagaagtctgaatttggagaaggctggggtagatactagccccgacactcagaagatcctggtggactcccgggaagccacctctgtgccccacatctacgccattggtgacgtggtggaggggcggcctgagctgacacccacagcgatcatggccgggaggctcctggtgcagcggctcttcggcgggtcctcagatctgatggactacgacaatgttcccacgaccgtcttcaccccgctggagtatggctgtgtggggctgtccgaggaggaggcagtggctcgccacgggcaggagcatgttgaggtctatcacgcccattataaaccactggagttcacggtggctggacgagatgcatcccagtgttatgtaaagatggtgtgcctgagggagcccccacagctggtgctgggcctgcatttccttggccccaacgcaggcgaagttactcaaggatttgctctggggatcaagtgtggggcttcctatgcgcaggtgatgcggaccgtgggtatccatcccacatgctctgaggaggtagtcaagctgcgcatctccaagcgctcaggcctggaccccacggtgacaggctgctgagggtaagcgccatccctgcaggccagggcacacggtgcgcccgccgccagctcctcggaggccagacccaggatggctgcaggccaggtttggggggcctcaaccctctcctggagcgcctgtgagatggtcagcgtggagcgcaagtgctggacaggtggcccgtgtgccccacagggatggctcaggggactgtccacctcacccctgcacctctcagcctctgccgccgggcacccccccccaggctcctggtgccagatgatgacgacctgggtggaaacctaccctgtgggcacccatgtccgagccccctggcatttctgcaatgcaaataaagagggtactttttctgaa

SEQ ID NO: 354378 - DNA, 3347 bp, Homo sapiens
attccccacaccctatcccagtgttccaccctaggtctgaaggcccccgccccgaatccggccgcattcggccccggtctagccagcgctctcacctctcccgcgacggcccgcccgggactggacccgccccggtccggcgcaggcagcgcggcgggcagccctagctgccccagaagccccacgacgatggcggcaatggcggtggcgctgcggggattaggagggcgcttccggtggcggacgcaggccgtggcgggcggggtgcggggcgcggcgcggggcgcagcagcaggtcagcgggactatgatctcctggtggtcggcgggggatctggtggcctggcttgtgccaaggaggccgctcagctgggaaggaaggtgtccgtggtggactacgtggaaccttctccccaaggcacccggtggggcctcggcggcacctgcgtcaacgtgggctgcatccccaagaagctgatgcaccaggcggcactgctgggaggcctgatccaagatgcccccaactatggctgggaggtggcccagcccgtgccgcatgactggaggaagatggcagaagctgttcaaaatcacgtgaaatccttgaactggggccaccgtgtccagcttcaggacagaaaagtcaagtactttaacatcaaagccagctttgttgacgagcacacggtttgcggcgttgccaaaggtgggaaagagattctgctgtcagccgatcacatcatcattgctactggagggcggccgagataccccacgcacatcgaaggtgccttggaatatggaatcacaagtgatgacatcttctggctgaaggaatcccctggaaaaacgttggtggtcggggccagctatgtggccctggagtgtgctggcttcctcaccgggattgggctggacaccaccatcatgatgcgcagcatccccctccgcggcttcgaccagcaaatgtcctccatggtcatagagcacatggcatctcatggcacccggttcctgaggggctgtgccccctcgcgggtcaggaggctccctgatggccagctgcaggtcacctgggaggacagcaccaccggcaaggaggacacgggcacctttgacaccgtcctgtgggccataggtcgagtcccagacaccagaagtctgaatttggagaaggctggggtagatactagccccgacactcagaagatcctggtggactcccgggaagccacctctgtgccccacatctacgccattggtgacgtggtggaggggcggcctgagctgacacccacagcgatcatggccgggaggctcctggtgcagcggctcttcggcgggtcctcagatctgatggactacgacaatgttcccacgaccgtcttcaccccgctggagtatggctgtgtggggctgtccgaggaggaggcagtggctcgccacgggcaggagcatgttgaggtctatcacgcccattataaaccactggagttcacggtggctggacgagatgcatcccagtgttatgtaaagatggtgtgcctgagggagcccccacagctggtgctgggcctgcatttccttggccccaacgcaggcgaagttactcaaggatttgctctggggatcaagtgtggggcttcctatgcgcaggtgatgcggaccgtgggtatccatcccacatgctctgaggaggtagtcaagctgcgcatctccaagcgctcaggcctggaccccacggtgacaggctgctgagggtaagcgccatccctgcaggccagggcacacggtgcgcccgccgccagctcctcggaggccagacccaggtatgcaggtggggctggctctgtttgaggacagggcatgtggcaggggtgcaggagccctggccatgggctccctccaggtgtacagcaaggctacacctgccacgccacccagaatgggtgctccatcctgtaaccaggccacagcggtgacaggcagaaggggaagttcccaggggcccaaacctccccgggggaccccagaccccggcctggccacagctgctccccacacacaggaggtatcaagaaacggggctcatccttagcagcctatcccaggtggatgttggcgtggaaggtgtcccgggtgggctaaagtcgggcatctcaagttgctgccccacagggggctgcagtcgggaagctggcctcccaccgaggcctcccaccaaggcctggctcctgcagagttcagcgcccgctcatttccctatctcccagaaggtggagacgctgccctgtgatggccggccctgcccagcctgccctgcacatctggttctgttccagctctgcagagccaggctgaccggggggcatgttgttcatcgtgacctcttctggggaggaagaaactggcaagggctcctggcctctgccccagggatgcctgtgccagagccccctcgcctcgtggtctaatagtgcatcctccggcctgggctgcagggcaggggccggggcagggtgggccctcagcccgtgccatccagcccacctggggcacccccatggctgtcagcccctcccagggttggggtgtttgggctccatctctcccccggggctgaggtggagaccaggcagagcagtgggctccccccaagatgcctgtggacaggctctagggtctgcatggcgccgaggggctctggggaggcctctctgggggtactcagggccccctgcttcaccgtggccgcctccccccggcggggccgcgctcgatagggataaacaaagggcatcctgaggaaactcttatcagaacattacacctcccagagctgttttgttaggagcctgctataaatttttatcatttcaaaatatttttgtagcaccgcgtcgctccctgtgacgcatcgccctggggtggggccattctctgctgggtttatttctcacccatctcccttgggggtccctgggtgtggcagtgggagacatagctaggctgatgtgaggggtgggtggctgacctgtgctgaccttcctgttgttggcaggatggctgcaggccaggtttggggggcctcaaccctctcctggagcgcctgtgagatggtcagcgtggagcgcaagtgctggacaggtggcccgtgtgccccacagggatggctcaggggactgtccacctcacccctgcacctctcagcctctgccgccgggcacccccccccaggctcctggtgccagatgatgacgacctgggtggaaacctaccctgtgggcacccatgtccgagccccctggcatttctgcaatgcaaataaagagggtactttttctgaa

SEQ ID NO: 354379 - DNA, 642 bp, Homo sapiens
cttgtgacggagggcagccttcacaactgaaaggcacgtggacttgagaatgttttagtccaccttggtggctcatgcttgtaattctagcaccttgggaggccaaggtggaaggattgcttgaggccaggtgtttgagaccagcctgggcaacatagccagaccccatctctacaaaacaaaaaaatttagctggacgtggtgatcggtgcttgtagtcccagctattctggaggctgaggctagaggatcacttgagcccgggaggtagaggctgcagtgagctgtgattgtgccactgtgcccctgtcgtgggggcccttccgggtctatgtcccagccctgtgctgaccgtgttccttctcacctttcatccctcccccaagcagggcagtggactacaatcttctgggtgacagagtgagatcctgtctcaaaaataaatagaataaaaaagaaaatatcttagttctgtgtctggctgagaacactgggtgaggtttgagttcagagtggttggtatggtgtgcgtgtgatttgcaaagatgatcacacacgcccacggccaacctcaccaccatatggcttggtctctggatttgcacagactatgtgtatcgagtcactctttctgctctgttg

SEQ ID NO: 354380 - DNA, 940 bp, Homo sapiens
atttgttatggactgtgacgtgcagatcaagctgcacgtcaggagcacatggaacgctttggggtccctttttagccggggattccagtgaatgaaaacggggcggcctgagctgacacccacagcgatcatggccgggaggctcctggtgcagcggctcttcggcgggtcctcagatctgatggactacgacaatgttcccacgaccgtcttcaccccgctggagtatggctgtgtggggctgtccgaggaggaggcagtggctcgccacgggcaggagcatgttgaggtctatcacgcccattataaaccactggagttcacggtggctggacgagatgcatcccagtgttatgtaaagatggtgtgcctgagggagcccccacagctggtgctgggcctgcatttccttggccccaacgcaggcgaagttactcaaggatttgctctggggatcaagtgtggggcttcctatgcgcaggtgatgcggaccgtgggtatccatcccacatgctctgaggaggtagtcaagctgcgcatctccaagcgctcaggcctggaccccacggtgacaggctgctgagggtaagcgccatccctgcaggccagggcacacggtgcgcccgccgccagctcctcggaggccagacccaggatggctgcaggccaggtttggggggcctcaaccctctcctggagcgcctgtgagatggtcagcgtggagcgcaagtgctggacaggtggcccgtgtgccccacagggatggctcaggggactgtccacctcacccctgcacctctcagcctctgccgccgggcacccccccccaggctcctggtgccagatgatgacgacctgggtggaaacctaccctgtgggcacccatgtccgagccccctggcatttctgcaatgcaaataaagagggtactttttctgaa

SEQ ID NO: 354381 - DNA, 1075 bp, Homo sapiens
atttgttatggactgtgacgtgcagatcaagctgcacgtcaggagcacatggaacgctttggggtccctttttagccggggattccagtgaatgaaaacggtagcaggggctcttttgagcttggtcatggggcagccctccgagggcagagtggagggcagcaaacaggagaatgagcaacctacctaggtccttgggatgcccctcaggaggacgagctctagggggaatgctgggcggcctgagctgacacccacagcgatcatggccgggaggctcctggtgcagcggctcttcggcgggtcctcagatctgatggactacgacaatgttcccacgaccgtcttcaccccgctggagtatggctgtgtggggctgtccgaggaggaggcagtggctcgccacgggcaggagcatgttgaggtctatcacgcccattataaaccactggagttcacggtggctggacgagatgcatcccagtgttatgtaaagatggtgtgcctgagggagcccccacagctggtgctgggcctgcatttccttggccccaacgcaggcgaagttactcaaggatttgctctggggatcaagtgtggggcttcctatgcgcaggtgatgcggaccgtgggtatccatcccacatgctctgaggaggtagtcaagctgcgcatctccaagcgctcaggcctggaccccacggtgacaggctgctgagggtaagcgccatccctgcaggccagggcacacggtgcgcccgccgccagctcctcggaggccagacccaggatggctgcaggccaggtttggggggcctcaaccctctcctggagcgcctgtgagatggtcagcgtggagcgcaagtgctggacaggtggcccgtgtgccccacagggatggctcaggggactgtccacctcacccctgcacctctcagcctctgccgccgggcacccccccccaggctcctggtgccagatgatgacgacctgggtggaaacctaccctgtgggcacccatgtccgagccccctggcatttctgcaatgcaaataaagagggtactttttctgaa

SEQ ID NO: 354382 - DNA, 988 bp, Homo sapiens
actgcacccggtctctaagtggacattctgagaaacagtttaaacacaaccgctctaggtcaaagccactgaagataacctttcagccccctctctgtttccttcaggtcgagtcccagacaccagaagtctgaatttggagaaggctggggtagatactagccccgacactcagaagatcctggtggactcccgggaagccacctctgtgccccacatctacgccattggtgacgtggtggaggttcccacgaccgtcttcaccccgctggagtatggctgtgtggggctgtccgaggaggaggcagtggctcgccacgggcaggagcatgttgaggtctatcacgcccattataaaccactggagttcacggtggctggacgagatgcatcccagtgttatgtaaagatggtgtgcctgagggagcccccacagctggtgctgggcctgcatttccttggccccaacgcaggcgaagttactcaaggatttgctctggggatcaagtgtggggcttcctatgcgcaggtgatgcggaccgtgggtatccatcccacatgctctgaggaggtagtcaagctgcgcatctccaagcgctcaggcctggaccccacggtgacaggctgctgagggtaagcgccatccctgcaggccagggcacacggtgcgcccgccgccagctcctcggaggccagacccaggatggctgcaggccaggtttggggggcctcaaccctctcctggagcgcctgtgagatggtcagcgtggagcgcaagtgctggacaggtggcccgtgtgccccacagggatggctcaggggactgtccacctcacccctgcacctctcagcctctgccgccgggcacccccccccaggctcctggtgccagatgatgacgacctgggtggaaacctaccctgtgggcacccatgtccgagccccctggcatttctgcaatgcaaataaagagggtactttttctgaa

SEQ ID NO: 354383 - DNA, 2046 bp, Homo sapiens
attccccacaccctatcccagtgttccaccctaggtctgaaggcccccgccccgaatccggccgcattcggccccggtctagccagcgctctcacctctcccgcgacggcccgcccgggactggacccgccccggtccggcgcaggcagcgcggcgggcagccctagctgccccagaagccccacgacgatggcggcaatggcggtggcgctgcggggattaggagggcgcttccggtggcggacgcaggccgtggcgggcggggtgcggggcgcggcgcggggcgcagcagcaggtcagcgggactatgatctcctggtggtcggcgggggatctggtggcctggcttgtgccaaggaggccgctcagctgggaaggaaggtgtccgtggtggactacgtggaaccttctccccaaggcacccggtggggcctcggcggcacctgcgtcaacgtgggctgcatccccaagaagctgatgcaccaggcggcactgctgggaggcctgatccaagatgcccccaactatggctgggaggtggcccagcccgtgccgcatgactggaggaagatggcagaagctgttcaaaatcacgtgaaatccttgaactggggccaccgtgtccagcttcaggacagaaaagtcaagtactttaacatcaaagccagctttgttgacgagcacacggtttgcggcgttgccaaaggtgggaaagagattctgctgtcagccgatcacatcatcattgctactggagggcggccgagataccccacgcacatcgaaggtgccttggaatatggaatcacaagtgatgacatcttctggctgaaggaatcccctggaaaaacgttggtggtcggggccagctatgtggccctggagtgtgctggcttcctcaccgggattgggctggacaccaccatcatgatgcgcagcatccccctccgcggcttcgaccagcaaatgtcctccatggtcatagagcacatggcatctcatggcacccggttcctgaggggctgtgccccctcgcgggtcaggaggctccctgatggccagctgcaggtcacctgggaggacagcaccaccggcaaggaggacacgggcacctttgacaccgtcctgtgggccataggtcgagtcccagacaccagaagtctgaatttggagaaggctggggtagatactagccccgacactcagaagatcctggtggactcccgggaagccacctctgtgccccacatctacgccattggtgacgtggtggaggggcggcctgagctgacacccacagcgatcatggccgggaggctcctggtgcagcggctcttcggcgggtcctcagatctgatggactacgacaatgttcccacgaccgtcttcaccccgctggagtatggctgtgtggggctgtccgaggaggaggcagtggctcgccacgggcaggagcatgttgaggtctatcacgcccattataaaccactggagttcacggtggctggacgagatgcatcccagtgttatgtaaagatggtgtgcctgagggagcccccacagctggtgctgggcctgcatttccttggccccaacgcaggcgaagttactcaaggatttgctctggggatcaagtgtggggcttcctatgcgcaggtgatgcggaccgtgggtatccatcccacatgctctgaggaggtagtcaagctgcgcatctccaagcgctcaggcctggaccccacggtgacaggctgctgagggatggctgcaggccaggtttggggggcctcaaccctctcctggagcgcctgtgagatggtcagcgtggagcgcaagtgctggacaggtggcccgtgtgccccacagggatggctcaggggactgtccacctcacccctgcacctctcagcctctgccgccgggcacccccccccaggctcctggtgccagatgatgacgacctgggtggaaacctaccctgtgggcacccatgtccgagccccctggcatttctgcaatgcaaataaagagggtactttttctgaa

SEQ ID NO: 354384 - DNA, 1006 bp, Homo sapiens
atttgttatggactgtgacgtgcagatcaagctgcacgtcaggagcacatggaacgctttggggtccctttttagccggggattccagtgaatgaaaacggtagcaggggctcttttgagcttggtcatggggcagccctccgagggcagagtggagggcagcaaacaggagaatgagcaacctacctaggtccttgggatgcccctcaggaggacgagctctagggggaatgctgggcggcctgagctgacacccacagcgatcatggccgggaggctcctggtgcagcggctcttcggcgggtcctcagatctgatggactacgacaatgttcccacgaccgtcttcaccccgctggagtatggctgtgtggggctgtccgaggaggaggcagtggctcgccacgggcaggagcatgttgaggtctatcacgcccattataaaccactggagttcacggtggctggacgagatgcatcccagtgttatgtaaagatggtgtgcctgagggagcccccacagctggtgctgggcctgcatttccttggccccaacgcaggcgaagttactcaaggatttgctctggggatcaagtgtggggcttcctatgcgcaggtgatgcggaccgtgggtatccatcccacatgctctgaggaggtagtcaagctgcgcatctccaagcgctcaggcctggaccccacggtgacaggctgctgagggatggctgcaggccaggtttggggggcctcaaccctctcctggagcgcctgtgagatggtcagcgtggagcgcaagtgctggacaggtggcccgtgtgccccacagggatggctcaggggactgtccacctcacccctgcacctctcagcctctgccgccgggcacccccccccaggctcctggtgccagatgatgacgacctgggtggaaacctaccctgtgggcacccatgtccgagccccctggcatttctgcaatgcaaataaagagggtactttttctgaa

SEQ ID NO: 354385 - DNA, 382 bp, Homo sapiens
cagatcaagctgcacgtcaggagcacatggaacgctttggggtccctttttagccggggattccagtgaatgaaaacggtagcaggggctcttttgagcttggtcatggggcagccctccgaggtcagcaatgtgcagaaggggtttggagagaaggcttgagcatgtgagggtggcacggccagcctcatcagcagcggactcctttcccagggcagagtggagggcagcaaacaggagaatgagcaacctacctaggtccttgggatgcccctcaggaggacgagctctagggggaatgctgtacgtcaccatgctcggtgccagtgttggggattttctaaagggagatgcccactcggagggcaaagggtgatggcat

SEQ ID NO: 354386 - DNA, 294 bp, Homo sapiens
cactctttctgctctgttgtgtggtgtcttgtcacccctgaccatcacagaatggagtgtccaatcctgataaaattgatcctgtaccacgtttaaccagacagacagtccgtcccacctctcatcccttctctcagcacaggtcagcgggactatgatctcctggtggtcggcgggggatctggtggcctggcttgtgccaaggagggtatgtattctgtatacttcgtggcaaggcctcgaagcttttagggcccctagagagggtggtgctgtccagaaaacgtccatgag

SEQ ID NO: 354387 - DNA, 2115 bp, Homo sapiens
attccccacaccctatcccagtgttccaccctaggtctgaaggcccccgccccgaatccggccgcattcggccccggtctagccagcgctctcacctctcccgcgacggcccgcccgggactggacccgccccggtccggcgcaggcagcgcggcgggcagccctagctgccccagaagccccacgacgatggcggcaatggcggtggcgctgcggggattaggagggcgcttccggtggcggacgcaggccgtggcgggcggggtgcggggcgcggcgcggggcgcagcagcaggtcagcgggactatgatctcctggtggtcggcgggggatctggtggcctggcttgtgccaaggaggccgctcagctgggaaggaaggtgtccgtggtggactacgtggaaccttctccccaaggcacccggtggggcctcggcggcacctgcgtcaacgtgggctgcatccccaagaagctgatgcaccaggcggcactgctgggaggcctgatccaagatgcccccaactatggctgggaggtggcccagcccgtgccgcatgactggaggaagatggcagaagctgttcaaaatcacgtgaaatccttgaactggggccaccgtgtccagcttcaggacagaaaagtcaagtactttaacatcaaagccagctttgttgacgagcacacggtttgcggcgttgccaaaggtgggaaagagattctgctgtcagccgatcacatcatcattgctactggagggcggccgagataccccacgcacatcgaaggtgccttggaatatggaatcacaagtgatgacatcttctggctgaaggaatcccctggaaaaacgttggtggtcggggccagctatgtggccctggagtgtgctggcttcctcaccgggattgggctggacaccaccatcatgatgcgcagcatccccctccgcggcttcgaccagcaaatgtcctccatggtcatagagcacatggcatctcatggcacccggttcctgaggggctgtgccccctcgcgggtcaggaggctccctgatggccagctgcaggtcacctgggaggacagcaccaccggcaaggaggacacgggcacctttgacaccgtcctgtgggccataggtcgagtcccagacaccagaagtctgaatttggagaaggctggggtagatactagccccgacactcagaagatcctggtggactcccgggaagccacctctgtgccccacatctacgccattggtgacgtggtggaggggcggcctgagctgacacccacagcgatcatggccgggaggctcctggtgcagcggctcttcggcgggtcctcagatctgatggactacgacaatgttcccacgaccgtcttcaccccgctggagtatggctgtgtggggctgtccgaggaggaggcagtggctcgccacgggcaggagcatgttgaggtctatcacgcccattataaaccactggagttcacggtggctggacgagatgcatcccagtgttatgtaaagatggtgtgcctgagggagcccccacagctggtgctgggcctgcatttccttggccccaacgcaggcgaagttactcaaggatttgctctggggatcaagtgtggggcttcctatgcgcaggtgatgcggaccgtgggtatccatcccacatgctctgaggaggtagtcaagctgcgcatctccaagcgctcaggcctggaccccacggtgacaggctgctgagggtaagcgccatccctgcaggccagggcacacggtgcgcccgccgccagctcctcggaggccagacccaggatggctgcaggccaggtttggggggcctcaaccctctcctggagcgcctgtgagatggtcagcgtggagcgcaagtgctggacaggtggcccgtgtgccccacagggatggctcaggggactgtccacctcacccctgcacctctcagcctctgccgccgggcacccccccccaggctcctggtgccagatgatgacgacctgggtggaaacctaccctgtgggcacccatgtccgagccccctggcatttctgcaatgcaaataaagagggtactttttctgaa

SEQ ID NO: 354388 - DNA, 2000 bp, Homo sapiens
  misc_feature (157)..(157): n is a, c, g, or t
  misc_feature (183)..(183): n is a, c, g, or t
cagagtgagactttgactcagaaaaaaaaaaaagaaaagaaagcgtgggtcatttgtttctgtgcactatgctcccagccactgttttgccagccttgtcatgcccgttctcttggtgttaccacacccctgaaatcagaaggtgacaccatctggngggcaccacagctccctgctggaacntgtccgggtgatgaggactgtccccaagagaggtccagccacctcttgctgcacaccagggctgtacgtggcctcttaggaccgtgctgagctggcttccgtccctgctttgacacctgtggttaacatgtccctgggatccctgggggacaggcgaggtgcccccacatcccctccatgcttctcagcatggttgccgcttacctcttggtccatctgagccacagcaccaggccctgctgggggctggagctcccttttaccagtgttccctattgatccagttggtgaggtttaatttgcagaggaagtgtttgaaaatcttatctttatctttcagaaaagtcaagtactttaacatcaaagccagctttgttgacgagcacacggtttgcggcgttgccaaaggtgggaaagagattctgctgtcagccgatcacatcatcattgctactggagggcggccgagataccccacgcacatcgaaggtgccttggaatatggaatcacaagtgatgacatcttctggctgaaggaatcccctggaaaaacgttggtggtcggggccagctatgtggccctggagtgtgctggcttcctcaccgggattgggctggacaccaccatcatgatgcgcagcatccccctccgcggcttcgaccagcaaatgtcctccatggtcatagagcacatggcatctcatggcacccggttcctgaggggctgtgccccctcgcgggtcaggaggctccctgatggccagctgcaggtcacctgggaggacagcaccaccggcaaggaggacacgggcacctttgacaccgtcctgtgggccataggtcgagtcccagacaccagaagtctgaatttggagaaggctggggtagatactagccccgacactcagaagatcctggtggactcccgggaagccacctctgtgccccacatctacgccattggtgacgtggtggaggggcggcctgagctgacacccacagcgatcatggccgggaggctcctggtgcagcggctcttcggcgggtcctcagatctgatggactacgacaatgttcccacgaccgtcttcaccccgctggagtatggctgtgtggggctgtccgaggaggaggcagtggctcgccacgggcaggagcatgttgaggtctatcacgcccattataaaccactggagttcacggtggctggacgagatgcatcccagtgttatgtaaagatggtgtgcctgagggagcccccacagctggtgctgggcctgcatttccttggccccaacgcaggcgaagttactcaaggatttgctctggggatcaagtgtggggcttcctatgcgcaggtgatgcggaccgtgggtatccatcccacatgctctgaggaggtagtcaagctgcgcatctccaagcgctcaggcctggaccccacggtgacaggctgctgagggtaagcgccatccctgcaggccagggcacacggtgcgcccgccgccagctcctcggaggccagacccaggatggctgcaggccaggtttggggggcctcaaccctctcctggagcgcctgtgagatggtcagcgtggagcgcaagtgctggacaggtggcccgtgtgccccacagggatggctcaggggactgtccacctcacccctgcacctctcagcctctgccgccgggcacccccccccaggctcctggtgccagatgatgacgacctgggtggaaacctaccctgtgggcacccatgtccgagccccctggcatttctgcaatgcaaataaagagggtactttttctgaa

SEQ ID NO: 354389 - DNA, 7270 bp, Homo sapiens
  misc_feature (1000)..(1000): n is a, c, g, or t
  misc_feature (1271)..(1271): n is a, c, g, or t
  misc_feature (2656)..(2656): n is a, c, g, or t
  misc_feature (3626)..(3626): n is a, c, g, or t
  misc_feature (3745)..(3745): n is a, c, g, or t
  misc_feature (4046)..(4046): n is a, c, g, or t
  misc_feature (4931)..(4931): n is a, c, g, or t
  misc_feature (5169)..(5169): n is a, c, g, or t
  misc_feature (5321)..(5321): n is a, c, g, or t
  misc_feature (6418)..(6418): n is a, c, g, or t
  misc_feature (6433)..(6434): n is a, c, g, or t
  misc_feature (6729)..(6729): n is a, c, g, or t
  misc_feature (6741)..(6741): n is a, c, g, or t
  misc_feature (6804)..(6804): n is a, c, g, or t
attccccacaccctatcccagtgttccaccctaggtctgaaggcccccgccccgaatccggccgcattcggccccggtctagccagcgctctcacctctcccgcgacggcccgcccgggactggacccgccccggtccggcgcaggcagcgcggcgggcagccctagctgccccagaagccccacgacgatggcggcaatggcggtggcgctgcggggattaggagggcgcttccggtggcggacgcaggccgtggcgggcggggtgcggggcgcggcgcggggcgcagcagcaggtcagcgggactatgatctcctggtggtcggcgggggatctggtggcctggcttgtgccaaggaggccgctcagctgggaaggaaggtgtccgtggtggactacgtggaaccttctccccaaggcacccggtggggcctcggcggcacctgcgtcaacgtgggctgcatccccaagaagctgatgcaccaggcggcactgctgggaggcctgatccaagatgcccccaactatggctgggaggtggcccagcccgtgccgcatgactggaggaagatggcagaagctgttcaaaatcacgtgaaatccttgaactggggccaccgtgtccagcttcaggacagaaaagtcaagtactttaacatcaaagccagctttgttgacgagcacacggtttgcggcgttgccaaaggtgggaaagagattctgctgtcagccgatcacatcatcattgctactggagggcggccgagataccccacgcacatcgaaggtgccttggaatatggaatcacaagtgatgacatcttctggctgaaggaatcccctggaaaaacgttggtggtcggggccagctgtatcctttgcaagcgtgcaggtggccgtcctgggaactggacactccttcccttgagtccctccctgccacccgcccttccggcaggctctttgctgcctcagatcggcacttactgggcctctcggngtggaggatctactgtgcctggggacagtttgaggctgacctctggccagggattcctggaggctcttcctgagctgggacagctggacatggccatgaggcagctgggctgtcctccctcaagagcagccccagcctggacccattgcttcagaagggacaattagacagggagggtcaggagaggagctgcaggagggcctggggtcaaggggacatctgagggagatgaaagtccctggccgggcgcggtggctcatgcctgtagtcncacctcctgggtagctggggctacaggcgcccaccactacacctgactaatttttgtatttttagtagagacggggtttcaccatgtaggccaggatggtctcaatctcctgaccttgtgatccacctgccttggcctcccaaagtactgagattacaggtgtgagccaccgcacctggccagtatgtattttttctttagcatattaaatgttttgctgcttcaggctttccagctaggtttttttctttttttgcgtgtgaaacagggtctctctctgttgcctaggaggagtgtggtggtgtgatcatagctcactgcagcctccacctcccaggctcaatcaatcttcccatctcagccttctaagtgctgggattacaggtttgagctactgtgcccagccaagctagtttgttgtttttaacataaaaatgatatggatttgaaagttttaaaaattatggtgacatacacataacatcaaattcatcatcttaagcattttaaagtatatagttcagtggtgttaagtacgttcatattgtacaagcagcatgaccatccatctctagaacttttccattatctccaaactgagctctgtccccattaaacactcactccctgctgcccgggcactcacccttcactgtgtgtctctatggatctgactcctcgagggacttcatgtaagtagaatcatgcagtgtttgtccttttgtgactggctcatttctcttagcacaatgttttcagggtgcatccatgttgcagcatttgttagagttagcatttgtgtagcatgtgccagcatttccttcctgttgaaggctgagttgtatgtgtgtccatcatctgtcagtggacacttaggttgcttccgtcttttggctgttgtggatcatgctgctgtgaacatgggtgtgcacaagccgcctgttttcagcacataaaaatgacacagagtttttaaagttctgtccagccttctcgtggctttcagtgtttcccagtgggtccctttgggcctggcaggtcatcacatgccaggagtggcattttgcaggcctttccagaagtcacatttcgaaggcttccaaagacatcacccttccagtgctgggcagaggcctgggcgtttcccggccaggcgtgggctggctacaacttgctgggcacagtctggtctcaccttcttgctctctgtcaggtgtaggtccggttttgcatggggcagtggccgagcaggtgtggggagtgtggacacagccaggggatacctgtgcccaggcctgggccggggctgtctgacgggactggcaaggggcagctggagccaacagggatcgcccagacactgctctgtcccaggcctgctgcanaggaggccattgcagatgggccgccgcaaggagggctgcgggtcctcgtcagggtgggtggcggcacacacagcatgcctgctcagatgtcctacccacctcggtgcctggccgtctagtttaggctcctagttttcccaatcaccctgtcaacttgcatgttgaaggcgggagcaacctagtcagtgttgttagttctccgaggcctttctgtgctgagcctggtccgttgtcccctgcgagagcccaagatcagagccagggtccctctcagatcacctgcctccacctccatcagctaaccgggcttgcgtggggctggccaggggtcagtgtctcctgggggagggctcccagaggcacaagctgtgtcatagggtgatgcacttctgaagcagtcactcggaatgggaaatcagaaaggaaaccagcctggagcggctgaggcttcacttttgtgcagtggacacaagcgcagaggtgatgaccggggaggacctgagatgcctgagcgcacgcagggctcttggcccggaggtgatcagtcagcaagagcaatgttctcagccacgttgtaaaagtagattttaagtaagtttattatgataaacactacgaaggattaggtaacattttggactctggagtgtactgatggttctcatcctaaactccactttatttttctttcaaaatttatcctcctactgtcattcccaaataaactccactctaaaggggaggtggcgagtttctccctcccaccgcgccctagccctcctcctctgtctgctgacacctccgttcacccacagcataagggagctgttgccattgaaccgaggggcagccctcgaccaagcccatagggatgtagcagaccaatgggccgggggctgtgtccccggaaagccggggcgtcagcctggcaggcaacaagcgaggcccctccctactcagcagagctgcngtggcctgcacgcccatcctcccttgctaggagtctgttttatttttttgtactttcaaaatgagcatcccccagacagtctgcctggcatgattgatgctgggggtggaagcttttcncagtccttggcctctgaccctgcttcccgagggcggcgcggcttctgcgcgcctgctgggggccgctcgggcatgtgctgacttcgctgctgctcagagccaggttttgtaaacattcaggagccacttcccaggtcagcaactgcgagcgttttctgctggtttgtacgataagcctttaaccaagctttatttctacttgcaataaaggatgatccactctgggaggttaaaataaagcgccctaggggcggcacagctggcaatgccaacatctccgactctgcttcctgtaccgggngtgcactacgtccgcacaagctgggctccgacaggaaggggggatgcctccgtgcccggtgcacacacacacagaaggggcccaggtgctgcacagagctcccgtgtggggccgagtgctggccctgcccgttgcccgtgtgcctggcgcctggccgcagctggcgaggaccatggacattggcattgcgaagtgggccctgcagtctggaagcagaggaggaccagagccccttcctcgacgcagccttgatctccacgtggtggattaaacatattagcagttaaagcagttaattgctgtgcagggggcccccgctcattgtttgtctctgaatcacccgcccacaccaggtgtctcagataatagactgggaacttcagtgaggaggatttcctgtctgcagatgtgccgattacagcgctgagtgaagacagtcagccagcactgctgcgggctcgaattcgcccgctgagttaaccagttgtggcctgaatccctggctgtctaggggagcagggccaggctggggcatcctgagcaaacgcctcccagtgcaggggcttctaagtgcagttaagtttagatttggttttaaagaagggacagactgcctctggactgcagccctgaaaaactggaagttgagatcttcatgtgcccctttggcgtccccagcccctctggatggttctctgtccctctcttgagggtgagatgctgaaggctctggcgtatccctccctgcaccacaggagtcctgcccatggccagaagagccagcagacacaggaggggactcgctaaacctgggggtcccacagccaggcagctgttgtgcctgagtgccagggagggtggccacaggtctgcctggggccttgngatatggcaggtgagacgagacccagggaaggaatccgtctggatcttaccccagccactgaagctatttcctctttgggctttatcttagataactcagagatgtccacctgtgtgtaaaccagcatcagagcctgaaacacaacatgcatggagcatgggagcttggcttcccggcttcctcttggcaccacacagaggccacccccacagcctgcccctgtatagtctcccccangtggcacgtgtgcctggaccacagccagagagactggggtgcccaggagatgatgatgggggctggcggtgcccaggaggggagctgttgccagggtgggctgcagccctgggctcctctctccacccaggcactgtttgctggcatgtacncggcaggcaactgtctttgctcagctgtgctcggctgatggctcccgtacaccgcagactcagctacacaagtccctgcggattgtccctctgttgagtgccaggcagcaggaaagggcagaaagcaagaaccaagctggggatgggtgggagcatcctaagcctggtgagagggaaggggcggctcctcctggatgccctctgtgctggtgtgggtgcagctggggcttaggggccgcggtgggtgtggatgctgcccgggcgagggggctgcggtgggcccatcaggactgctctcagggatgcgccttgctgcagctgcgtgaaaccaagtttgtggctatgctcttcccggtggggatgggcccagcagtgaccctggcatccacatgcctccatgctctcagggtggagtggccatccctgagcaggtgacacggatcggaggcccctctttgatagtctaacacctttttattttagtgcaaatttagtttgtaattaatgacatcaagagagacccaaatctgcctccattgtgagtttgatattttttgaagtggggccaagatgaacattcatggagctcttcctatgagcggtggctgcggccttcccctccacaccacgtggccccgggcgtgcgctgctgctcctgagacagcactgttggctcagccctagctcatggtggtgctaacacctcacagaggccaggccagagtagcaggaggcagcgccctgtgcttacccaccagcctggtgccccacgcttggcttgagggctagttcacacttatgtccagagcccacagctatctgacaggccagccggcacctgcatacatggttgtccaactgggtcttgttaccatgacaaattcagtacttaatgattagaactgagtggaaaccaattaaaaaaaaaagaacaacatggtgaaaagtcttctagagataggtcagcaccatttatgcatattaccatgcaccctctaatgtctgcaggtgccctggggcagccaacctgttacaattgcaattatgttaacaattgttaaagggccgggtgaggtggctcatgcctgtaatcccancactttggaatgccnnggtgggaggatcatttgagcccaggagttcaagaccagcctgagcaacagagtgaaacctcttttcaaataattaataataataataataataataattgttttttgtttgtttttgagacggtgtctagctctgttgcccaggttggagtgcaggagcgcgatctggctcaccgcaacctccacctcccgaattcaagcgattctcctgcctcagccttccaagtagctgggattacaggcacccgccaccgcgcccagctaatttttgtatttttagtagagacagggtttcnctgtgttagccnggctggtctcgaactcctgacgtcatgatccgcccgcctcagcctcccaaagtgttgggattncaggcgtgagccactgcacccggtctaataataactgttaaagcaataatgaccactcgccacagagcacgctccttcctgggggtcctctgggcctgagctgggggctgcgccgtactccaaggctgactgtggggtcttacacatcataatgcacataggcagcttgagtaggaaaggcccttatgctgcctgaggggaagctcacccccaccccccaaggagccgccctgggtatgagacatccctggaacggcctaggggtccctggtggctgctggcagtcacagcaagtggccaatcaggtcccattgaggcccaggggctcactcatttattcaactaacatggcgtctcgatgggacctgaggccagcagggcaggtgcgtccccttccccctggtgggctcatagctgcgggtaggggcccggggctcattgagaaggtgcgattccagaaaaaaaa

SEQ ID NO: 354390 - DNA, 1433 bp, Homo sapiens
cacagccatttgggagaaaatttaatttaagtggcacattccgctggtgtgatgggatgtccttgtgttcagcaatagggagaccagctgtcctcctggggcttgttaccagactgcaaagcccccgccacctctctgtgtgcgtccctgtggctaagacatgacaaggtagggctttcagtggcatttatgtggccctggagtgtgctggcttcctcaccgggattgggctggacaccaccatcatgatgcgcagcatccccctccgcggcttcgaccagcaaatgtcctccatggtcatagagcacatggcatctcatggcacccggttcctgaggggctgtgccccctcgcgggtcaggaggctccctgatggccagctgcaggtcacctgggaggacagcaccaccggcaaggaggacacgggcacctttgacaccgtcctgtgggccataggtcgagtcccagacaccagaagtctgaatttggagaaggctggggtagatactagccccgacactcagaagatcctggtggactcccgggaagccacctctgtgccccacatctacgccattggtgacgtggtggaggggcggcctgagctgacacccacagcgatcatggccgggaggctcctggtgcagcggctcttcggcgggtcctcagatctgatggactacgacaatgttcccacgaccgtcttcaccccgctggagtatggctgtgtggggctgtccgaggaggaggcagtggctcgccacgggcaggagcatgttgaggtctatcacgcccattataaaccactggagttcacggtggctggacgagatgcatcccagtgttatgtaaagatggtgtgcctgagggagcccccacagctggtgctgggcctgcatttccttggccccaacgcaggcgaagttactcaaggatttgctctggggatcaagtgtggggcttcctatgcgcaggtgatgcggaccgtgggtatccatcccacatgctctgaggaggtagtcaagctgcgcatctccaagcgctcaggcctggaccccacggtgacaggctgctgagggtaagcgccatccctgcaggccagggcacacggtgcgcccgccgccagctcctcggaggccagacccaggatggctgcaggccaggtttggggggcctcaaccctctcctggagcgcctgtgagatggtcagcgtggagcgcaagtgctggacaggtggcccgtgtgccccacagggatggctcaggggactgtccacctcacccctgcacctctcagcctctgccgccgggcacccccccccaggctcctggtgccagatgatgacgacctgggtggaaacctaccctgtgggcacccatgtccgagccccctggcatttctgcaatgcaaataaagagggtactttttctgaa

SEQ ID NO: 354391 - DNA, 1909 bp, Homo sapiens
attccccacaccctatcccagtgttccaccctaggtctgaaggcccccgccccgaatccggccgcattcggccccggtctagccagcgctctcacctctcccgcgacggcccgcccgggactggacccgccccggtccggcgcaggcagcgcggcgggcagccctagctgccccagaagccccacgacgatggcggcaatggcggtggcgctgcggggattaggagggcgcttccggtggcggacgcaggccgtggcgggcggggtgcggggcgcggcgcggggcgcagcagcaggtcagcgggactatgatctcctggtggtcggcgggggatctggtggcctggcttgtgccaaggaggccgctcagctgggaaggaaggtgtccgtggtggactacgtggaaccttctccccaaggcacccggtggggcctcggcggcacctgcgtcaacgtgggctgcatccccaagaagctgatgcaccaggcggcactgctgggaggcctgatccaagatgcccccaactatggctgggaggtggcccagcccgtgccgcatgactggaggaagatggcagaagctgttcaaaatcacgtgaaatccttgaactggggccaccgtgtccagcttcaggacagaaaagtcaagtactttaacatcaaagccagctttgttgacgagcacacggtttgcggcgttgccaaaggtgggaaagagattctgctgtcagccgatcacatcatcattgctactggagggcggccgagataccccacgcacatcgaaggtgccttggaatatggaatcacaagtgatgacatcttctggctgaaggaatcccctggaaaaacgttggtggtcggggccagctatgtggccctggagtgtgctggcttcctcaccgggattgggctggacaccaccatcatgatgcgcagcatccccctccgcggcttcgaccagcaaatgtcctccatggtcatagagcacatggcatctcatggcacccggttcctgaggggctgtgccccctcgcgggtcaggaggctccctgatggccagctgcaggtcacctgggaggacagcaccaccggcaaggaggacacgggcacctttgacaccgtcctgtgggccataggtcgagtcccagacaccagaagtctgaatttggagaaggctggggtagatactagccccgacactcagaagatcctggtggactcccgggaagccacctctgtgccccacatctacgccattggtgacgtggtggaggggcggcctgagctgacacccacagcgatcatggccgggaggctcctggtgcagcggctcttcggcgggtcctcagatctgatggactacgacaatgttcccacgaccgtcttcaccccgctggagtatggctgtgtggggctgtccgaggaggaggcagtggctcgccacgggcaggagcatgttgaggtctatcacgcccattataaaccactggagttcacggtggctggacgagatgcatcccagtgttatgtaaagatggtgtgcctgagggagcccccacagctggtgctgggcctgcatttccttggccccaacgcaggcgaagttactcaaggatttgctctggggatcaagtgtggggcttcctatgcgcaggtgatgcggaccgtgggtatccatcccacatgctctgaggaggtagtcaagctgcgcatctccaagcgctcaggcctggaccccacggtgacaggctgctgagggtaagcgccatccctgcaggccagggcacacggtgcgcccgccgccagctcctcggaggccagacccagatggtgcggccaggttggggggctcaacctctcgggggccggaaagggaggggacgcaaggggagggggcggtcccaggg

SEQ ID NO: 354392 - DNA, 4009 bp, Homo sapiens
  misc_feature (1670)..(1670): n is a, c, g, or t
  misc_feature (1908)..(1908): n is a, c, g, or t
  misc_feature (2060)..(2060): n is a, c, g, or t
  misc_feature (3157)..(3157): n is a, c, g, or t
  misc_feature (3172)..(3173): n is a, c, g, or t
  misc_feature (3468)..(3468): n is a, c, g, or t
  misc_feature (3480)..(3480): n is a, c, g, or t
  misc_feature (3543)..(3543): n is a, c, g, or t
attccccacaccctatcccagtgttccaccctaggtctgaaggcccccgccccgaatccggccgcattcggccccggtctagccagcgctctcacctctcccgcgacggcccgcccgggactggacccgccccggtccggcgcaggcagcgcggcgggcagccctagctgccccagaagccccacgacgatggcggcaatggcggtggcgctgcggggattaggagggcgcttccggtggcggacgcaggccgtggcgggcggggtgcggggcgcggcgcggggcgcagcagcaggtcagcgggactatgatctcctggtggtcggcgggggatctggtggcctggcttgtgccaaggaggccgctcagctgggaaggaaggtgtccgtggtggactacgtggaaccttctccccaaggcacccggtggggcctcggcggcacctgcgtcaacgtgggctgcatccccaagaagctgatgcaccaggcggcactgctgggaggcctgatccaagatgcccccaactatggctgggaggtggcccagcccgtgccgcatgactggaggaagatggcagaagctgttcaaaatcacgtgaaatccttgaactggggccaccgtgtccagcttcaggacagaaaagtcaagtactttaacatcaaagccagctttgttgacgagcacacggtttgcggcgttgccaaaggtgggaaagagattctgctgtcagccgatcacatcatcattgctactggagggcggccgagataccccacgcacatcgaaggtgccttggaatatggaatcacaagtgatgacatcttctggctgaaggaatcccctggaaaaacgttggtggtcggggccagctatgtggccctggagtgtgctggcttcctcaccgggattgggctggacaccaccatcatgatgcgcagcatccccctccgcggcttcgaccagcaaatgtcctccatggtcatagagcacatggcatctcatggcacccggttcctgaggggctgtgccccctcgcgggtcaggaggctccctgatggccagctgcaggtcacctgggaggacagcaccaccggcaaggaggacacgggcacctttgacaccgtcctgtgggccataggtgtctcagataatagactgggaacttcagtgaggaggatttcctgtctgcagatgtgccgattacagcgctgagtgaagacagtcagccagcactgctgcgggctcgaattcgcccgctgagttaaccagttgtggcctgaatccctggctgtctaggggagcagggccaggctggggcatcctgagcaaacgcctcccagtgcaggggcttctaagtgcagttaagtttagatttggttttaaagaagggacagactgcctctggactgcagccctgaaaaactggaagttgagatcttcatgtgcccctttggcgtccccagcccctctggatggttctctgtccctctcttgagggtgagatgctgaaggctctggcgtatccctccctgcaccacaggagtcctgcccatggccagaagagccagcagacacaggaggggactcgctaaacctgggggtcccacagccaggcagctgttgtgcctgagtgccagggagggtggccacaggtctgcctggggccttgngatatggcaggtgagacgagacccagggaaggaatccgtctggatcttaccccagccactgaagctatttcctctttgggctttatcttagataactcagagatgtccacctgtgtgtaaaccagcatcagagcctgaaacacaacatgcatggagcatgggagcttggcttcccggcttcctcttggcaccacacagaggccacccccacagcctgcccctgtatagtctcccccangtggcacgtgtgcctggaccacagccagagagactggggtgcccaggagatgatgatgggggctggcggtgcccaggaggggagctgttgccagggtgggctgcagccctgggctcctctctccacccaggcactgtttgctggcatgtacncggcaggcaactgtctttgctcagctgtgctcggctgatggctcccgtacaccgcagactcagctacacaagtccctgcggattgtccctctgttgagtgccaggcagcaggaaagggcagaaagcaagaaccaagctggggatgggtgggagcatcctaagcctggtgagagggaaggggcggctcctcctggatgccctctgtgctggtgtgggtgcagctggggcttaggggccgcggtgggtgtggatgctgcccgggcgagggggctgcggtgggcccatcaggactgctctcagggatgcgccttgctgcagctgcgtgaaaccaagtttgtggctatgctcttcccggtggggatgggcccagcagtgaccctggcatccacatgcctccatgctctcagggtggagtggccatccctgagcaggtgacacggatcggaggcccctctttgatagtctaacacctttttattttagtgcaaatttagtttgtaattaatgacatcaagagagacccaaatctgcctccattgtgagtttgatattttttgaagtggggccaagatgaacattcatggagctcttcctatgagcggtggctgcggccttcccctccacaccacgtggccccgggcgtgcgctgctgctcctgagacagcactgttggctcagccctagctcatggtggtgctaacacctcacagaggccaggccagagtagcaggaggcagcgccctgtgcttacccaccagcctggtgccccacgcttggcttgagggctagttcacacttatgtccagagcccacagctatctgacaggccagccggcacctgcatacatggttgtccaactgggtcttgttaccatgacaaattcagtacttaatgattagaactgagtggaaaccaattaaaaaaaaaagaacaacatggtgaaaagtcttctagagataggtcagcaccatttatgcatattaccatgcaccctctaatgtctgcaggtgccctggggcagccaacctgttacaattgcaattatgttaacaattgttaaagggccgggtgaggtggctcatgcctgtaatcccancactttggaatgccnnggtgggaggatcatttgagcccaggagttcaagaccagcctgagcaacagagtgaaacctcttttcaaataattaataataataataataataataattgttttttgtttgtttttgagacggtgtctagctctgttgcccaggttggagtgcaggagcgcgatctggctcaccgcaacctccacctcccgaattcaagcgattctcctgcctcagccttccaagtagctgggattacaggcacccgccaccgcgcccagctaatttttgtatttttagtagagacagggtttcnctgtgttagccnggctggtctcgaactcctgacgtcatgatccgcccgcctcagcctcccaaagtgttgggattncaggcgtgagccactgcacccggtctaataataactgttaaagcaataatgaccactcgccacagagcacgctccttcctgggggtcctctgggcctgagctgggggctgcgccgtactccaaggctgactgtggggtcttacacatcataatgcacataggcagcttgagtaggaaaggcccttatgctgcctgaggggaagctcacccccaccccccaaggagccgccctgggtatgagacatccctggaacggcctaggggtccctggtggctgctggcagtcacagcaagtggccaatcaggtcccattgaggcccaggggctcactcatttattcaactaacatggcgtctcgatgggacctgaggccagcagggcaggtgcgtccccttccccctggtgggctcatagctgcgggtaggggcccggggctcattgagaaggtgcgattccagaaaaaaaa

SEQ ID NO: 354393 - DNA, 1443 bp, Homo sapiens
attccccacaccctatcccagtgttccaccctaggtctgaaggcccccgccccgaatccggccgcattcggccccggtctagccagcgctctcacctctcccgcgacggcccgcccgggactggacccgccccggtccggcgcaggcagcgcggcgggcagccctagctgccccagaagccccacgacgatggcggcaatggcggtggcgctgcggggattaggagggcgcttccggtggcggacgcaggccgtggcgggcggggtgcggggcgcggcgcggggcgcagcagcaggtcagcgggactatgatctcctggtggtcggcgggggatctggtggcctggcttgtgccaaggaggccgctcagctgggaaggaaggtgtccgtggtggactacgtggaaccttctccccaaggcacccggtggggcctcggcggcacctgcgtcaacgtgggctgcatccccaagaagctgatgcaccaggcggcactgctgggaggcctgatccaagatgcccccaactatggctgggaggtggcccagcccgtgccgcatgactggaggaagatggcagaagctgttcaaaatcacgtgaaatccttgaactggggccaccgtgtccagcttcaggacagaaaagtcaagtactttaacatcaaagccagctttgttgacgagcacacggtttgcggcgttgccaaaggtgggaaagagattctgctgtcagccgatcacatcatcattgctactggagggcggccgagataccccacgcacatcgaaggtgccttggaatatggaatcacaagtgatgacatcttctggctgaaggaatcccctggaaaaacgttggtggtcggggccagctatgtggccctggagtgtgctggcttcctcaccgggattgggctggacaccaccatcatgatgcgcagcatccccctccgcggcttcgaccagcaaatgtcctccatggtcatagagcacatggcatctcatggcacccggttcctgaggggctgtgccccctcgcgggtcaggaggctccctgatggccagctgcaggtcacctgggaggacagcaccaccggcaaggaggacacgggcacctttgacaccgtcctgtgggccatagggctcccccatcctgctggctgccaggcgggttggccgctccccagtgcacctcgagagcaaccgtgaaggcctgtggggcggcactcacactaggctgtgcccatcttgccatccccagcaccttgcatctctgcgtgtctccccaccaccgtgggacatgctggaaaaaaccagagaagagactgagacggcatcagccaggtgtcctcatcgaggatcaactaggcaatcatcctcgccttccctggcccttgagcaattgcttattaaggtttcagcacataaatcctacttgtcaccttc

SEQ ID NO: 354394 - DNA, 4134 bp, Homo sapiens
cgcgggcgggaccgcggcggtcgggggacaccagctgcgtcggagcgcccagaacgccccgcgctccgccgagccccgctccacgcagacccgcgggcgggagggagccacgcacatcgccgccgcggccgtctccgcggggcggtaaccgagcctgcctcggagccgccgaacgcccacgccagcgaccctgactctatggccccgggggagcgcgccggagccgccgcgccgcccacccccagccggaaccctagcgtcccggggagcaagcggggagccccgggcgtccccggccccggcccagggccctgcttgtggcccccgctcccgccacggggcatgggaggcaggtagcccagctcgcgccaggacacccgtggcgggcggaacccgccaaggaccgcgaagtccagagaaaggaagctgaggagctgcccgcccgcccccggctgcagccccagcagggccctcccccggtggcgcgcacccgcgcgcgcacactcgcacaccgcacctcagctcctgcccggcctcgcccccacccgcgagcgccgaacctcctggggccggatgccatgggtaacaacttctccagtatcccctcgctgccccgaggaaacccgagccgcgcgccgcggggccacccccagaacctcaaagactctatcgggggccccttccccgtcacttctcaccgatgccaccacaagcagaagcactgtccggcagtgctgcccagcggggggctcccagccacgccgctgctcttccacccgcacaccaagggctcccagatcctcatggacctcagccacaaggctgtcaagaggcaggccagcttctgcaacgccatcaccttcagcaaccgcccggtcctcatctacgagcaagtcaggctgaagatcaccaagaagcagtgctgctggagcggggccctgcggctgggcttcaccagcaaggacccgtcccgcatccaccctgactcgctgcccaagtacgcctgccccgacctggtgtcccagagtggcttctgggccaaggcgctgcctgaggagtttgccaatgagggcaacatcatcgcattctgggtggacaagaagggccgtgtcttccaccgcatcaacgactcggctgttatgctgttcttcagcggggtccgcacggccgacccgctctgggccctggtggacgtctacggcctcacgcggggcgtccagctgcttgatagcgagctggtgctcccggactgtctgcggccgcgctccttcaccgccctgcggcggccgtcgctgcggcgcgaggcggacgacgcgcgcctctcggtgagcctatgcgacctcaacgtgccgggcgcggacggcgacgaggccgcgccggccgccggctgccccatcccgcagaactcactcaactcgcagcacagccgcgcgctgccggcgcagctcgacggcgacctgcgtttccacgccctgcgcgccggcgcgcacgtccgcatcctcgacgagcagacggtggcgcgcgtggagcacgggcgcgacgagcgcgcgctcgtcttcaccagccggcccgtgcgcgtggccgagaccatcttcgtcaaggtcacgcgctcgggtggcgcgcggcccggcgcgctgtcgttcggcgtcaccacgtgcgaccccggcacgctgcggccggccgacctgcctttcagccctgaggccctggtggaccgcaaggaattctgggccgtgtgccgcgtgcccgggcccctgcacagcggcgacatcctgggcctggtggtcaacgccgacggcgagctgcacctcagccacaatggcgcggccgccggcatgcagctgtgcgtggacgcctcgcagccgctttggatgctcttcggcctgcacgggaccatcacgcagatccgcatcctcggctccactatcctggccgagcggggtatcccatcactcccctgctcccctgcctccacgccaacctcgcccagtgccctgggcagccgcctgtctgaccccttgctcagcacgtgcagctctggccctctgggtagctctgctggtgggacagcccccaattcgccagtgagcctgcccgagtcgccagtgaccccaggtctgggccagtggagcgatgagtgcaccatttgctatgaacacgcggtggacacggtcatctacacatgtggccacatgtgcctctgctacgcctgtggcctgcgcctcaagaaggctctgcacgcctgctgccccatctgccgccgccccatcaaggacatcatcaagacctaccgcagctcctagcccgttgcggtggcccatcccgcatacccatcttctcgggcttcagcccagtcccagctgaggaacaagccagtggggccccttctcttcctcattttggaaacttttcctcctctattaaacatgggaaactgaagcccttgaaggtttggggagaggggggtatcaggcagggagggggcagaggcaaatcaccgggcagagggaggggaggagaggaggccgcactctccctgtctctcccgtctctgcacccagctcctctctgcatgctgagggctaaattgggatctcagcctgccctaatctttccccatctgaggcaggtttctaggaggtgtctgtagtccatgtggcacctttgtgagaattagaaaacatgtaccttcctctgggcagctgcagccctgagccaggacatgtggcctggctagtgcagcatggagtggattttaggctcatttgccctctcagccaactgcccttgagcagtgtacagcctgctcaacaaccgccctgggcaggccgctcctgagctgctgtctccctctctgacctatgcctaccttctctttcttcgttccctgcccactgggcatggcagctgggggtgagaggctggtggttgcctcccgtcctgggcaggctgcagcctcatgccatgtctctctcccactacctgatgggcacatggacaggctgcagagggctccaggttctgggcccctggctgagaaggggaggatcctgtcctggctgtagccttcctgccccaatcatctcgctggatgccattgcccaggggtagcccttcggtatgggctggggagaagggttggtcttctgccagggtccctaagaacaggtttgcagctaccctctctgaccttttccccatatcttgtgctgtccagggcctaggctgatagtcagagcctgtggcacacctgggatgggccagggccctgggtggggaggtgtgggttccctgggccaagaccagcctttttcctcagtttaattaatttatttatttggtttgtggttttgggttttttttgtttgtttgtttgtaggtgagttcccatcctctgggcccctagaaatgctgcctttgtgtgtggggtacctgggaaagggtgtggctgaggcagtcataatgcagtatcttcccctgactccagccacaaagctcatacccagccctaccaatcatgaattggaactccataaggaggggccaaattgggagaccttttggcaaacagtgtctattttacagagaggcaaaccaagcctccttagtgccctggggctgatggtcacccagagccatagagcacccttcctcctgggccagagctgggttatcatggttggcttaggtacctcaggtggcccaggaggtcccccctccataaggacgtcaaacttccaggagggccagtgttcctagtgtgggccaggaacaggacagggagaccttgtgatggcggggcagggagcctgttcgtagggaagatgaggaggcaagggctgcctctcacacctccaggttctctaagttctggggagggagcgccccacctgctgaggtcggtcctctcagccctgcctgccctggcctgggctctcccagcctcccagccctctgccccctcagatggctttttgtttttgtttttttttgcatccatcagagactgcacctctgtgtggcaggcagggcatgggttttagtcctggccactgaccagctgtgtggccctggccgagtcgtagccccctggagcccagcttccatttctataaaatggttgtttcgggagag

SEQ ID NO: 354395 - DNA, 4423 bp, Homo sapiens
cgcgggcgggaccgcggcggtcgggggacaccagctgcgtcggagcgcccagaacgccccgcgctccgccgagccccgctccacgcagacccgcgggcgggagggagccacgcacatcgccgccgcggccgtctccgcggggcggtaaccgagcctgcctcggagccgccgaacgcccacgccagcgaccctgactctatggccccgggggagcgcgccggagccgccgcgccgcccacccccagccggaaccctagcgtcccggggagcaagcggggagccccgggcgtccccggccccggcccagggccctgcttgtggcccccgctcccgccacggggcatgggaggcaggtagcccagctcgcgccaggacacccgtggcgggcggaacccgccaaggaccgcgaagtccagagaaaggaagctgaggagctgcccgcccgcccccggctgcagccccagcagggccctcccccggtggcgcgcacccgcgcgcgcacactcgcacaccgcacctcagctcctgcccggcctcgcccccacccgcgagcgccgaacctcctggggccggatgccatgggtaacaacttctccagtatcccctcgctgccccgaggaaacccgagccgcgcgccgcggggccacccccagaacctcaaagactctatcgggggccccttccccgtcacttctcaccgatgccaccacaagcagaagcactgtccggcagtgctgcccagcggggggctcccagccacgccgctgctcttccacccgcacaccaagggctcccagatcctcatggacctcagccacaaggctgtcaagaggcaggccagcttctgcaacgccatcaccttcagcaaccgcccggtcctcatctacgagcaagtcaggctgaagatcaccaagaagcagtgctgctggagcggggccctgcggctgggcttcaccagcaaggacccgtcccgcatccaccctgactcgctgcccaagtacgcctgccccgacctggtgtcccagagtggcttctgggccaaggcgctgcctgaggagtttgccaatgagggcaacatcatcgcattctgggtggacaagaagggccgtgtcttccaccgcatcaacgactcggctgttatgctgttcttcagcggggtccgcacggccgacccgctctgggccctggtggacgtctacggcctcacgcggggcgtccagctgcttgatagcgagctggtgctcccggactgtctgcggccgcgctccttcaccgccctgcggcggccgtcgctgcggcgcgaggcggacgacgcgcgcctctcggtgagcctatgcgacctcaacgtgccgggcgcggacggcgacgaggccgcgccggccgccggctgccccatcccgcagaactcactcaactcgcagcacagccgcgcgctgccggcgcagctcgacggcgacctgcgtttccacgccctgcgcgccggcgcgcacgtccgcatcctcgacgagcagacggtggcgcgcgtggagcacgggcgcgacgagcgcgcgctcgtcttcaccagccggcccgtgcgcgtggccgagaccatcttcgtcaaggtcacgcgctcgggtggcgcgcggcccggcgcgctgtcgttcggcgtcaccacgtgcgaccccggcacgctgcggccggccgacctgcctttcagccctgaggccctggtggaccgcaaggaattctgggccgtgtgccgcgtgcccgggcccctgcacagcggcgacatcctgggcctggtggtcaacgccgacggcgagctgcacctcagccacaatggcgcggccgccggcatgcagctgtgcgtggacgcctcgcagccgctttggatgctcttcggcctgcacgggaccatcacgcagatccgcatcctcggctccactatcctggccgagcggggtatcccatcactcccctgctcccctgcctccacgccaacctcgcccagtgccctgggcagccgcctgtctgaccccttgctcagcacgtgcagctctggccctctgggtagctctgctggtgggacagcccccaattcgccagtgagcctgcccgagtcgccagtgaccccaggtctgggccagtggagcgatgagtgcaccatttgctatgaacacgcggtggacacggtcatctacacatgtggccacatgtgcctctgctacgcctgtggcctgcgcctcaagaaggctctgcacgcctgctgccccatctgccgccgccccatcaaggacatcatcaagacctaccgcagctcctagcccgttgcggtggcccatcccgcatacccatcttctcgggcttcagcccagtcccagctgaggaacaagccagtggggccccttctcttcctcattttggaaacttttcctcctctattaaacatgggaaactgaagcccttgaaggtttggggagaggggggtatcaggcagggagggggcagaggcaaatcaccgggcagagggaggggaggagaggaggccgcactctccctgtctctcccgtctctgcacccagctcctctctgcatgctgagggctaaattgggatctcagcctgccctaatctttccccatctgaggcaggtttctaggaggtgtctgtagtccatgtggcacctttgtgagaattagaaaacatgtaccttcctctgggcagctgcagccctgagccaggacatgtggcctggctagtgcagcatggagtggattttaggctcatttgccctctcagccaactgcccttgagcagtgtacagcctgctcaacaaccgccctgggcaggccgctcctgagctgctgtctccctctctgacctatgcctaccttctctttcttcgttccctgcccactgggcatggcagctgggggtgagaggctggtggttgcctcccgtcctgggcaggctgcagcctcatgccatgtctctctcccactacctgatgggcacatggacaggctgcagagggctccaggttctgggcccctggctgagaaggggaggatcctgtcctggctgtagccttcctgccccaatcatctcgctggatgccattgcccaggggtagcccttcggtatgggctggggagaagggttggtcttctgccagggtccctaagaacaggtttgcagctaccctctctgaccttttccccatatcttgtgctgtccagggcctaggctgatagtcagagcctgtggcacacctgggatgggccagggccctgggtggggaggtgtgggttccctgggccaagaccagcctttttcctcagtttaattaatttatttatttggtttgtggttttgggttttttttgtttgtttgtttgtaggtgagttcccatcctctgggcccctagaaatgctgcctttgtgtgtggggtacctgggaaagggtgtggctgaggcagtcataatgcagtatcttcccctgactccagccacaaagctcatacccagccctaccaatcatgaattggaactccataaggaggggccaaattgggagaccttttggcaaacagtgtctattttacagagaggcaaaccaagcctccttagtgccctggggctgatggtcacccagagccatagagcacccttcctcctgggccagagctgggttatcatggttggcttaggtacctcaggtggcccaggaggtcccccctccataaggacgtcaaacttccaggagggccagtgttcctagtgtgggccaggaacaggacagggagaccttgtgatggcggggcagggagcctgttcgtagggaagatgaggaggcaagggctgcctctcacacctccaggttctctaagttctggggagggagcgccccacctgctgaggtcggtcctctcagccctgcctgccctggcctgggctctcccagcctcccagccctctgccccctcagatggctttttgtttttgtttttttttgcatccatcagagactgcacctctgtgtggcaggcagggcatgggttttagtcctggccactgaccagctgtgtggccctggccgagtcgtagccccctggagcccagcttccatttctataaaatggttgtttcgggagagaggggcaggctttctgtgtgactcgggagttcttccgtgagggctgccagggggtggtgtgccaggacctcaggctgggcctttgtgctggccttgcagtgggtgtgtggggaagtcacgggttttgatgggatagcagacaggtggattgcagagctccggaaagacccagccgggtgtcaagaagagccctcctagtttggcctctaactggctgtgtgaccccaggcaggtcacttgtcctctctgggaagcagctgaataatgaacactgggattttcccaggct

SEQ ID NO: 354396 - DNA, 4616 bp, Homo sapiens
cgcgggcgggaccgcggcggtcgggggacaccagctgcgtcggagcgcccagaacgccccgcgctccgccgagccccgctccacgcagacccgcgggcgggagggagccacgcacatcgccgccgcggccgtctccgcggggcggtaaccgagcctgcctcggagccgccgaacgcccacgccagcgaccctgactctatggccccgggggagcgcgccggagccgccgcgccgcccacccccagccggaaccctagcgtcccggggagcaagcggggagccccgggcgtccccggccccggcccagggccctgcttgtggcccccgctcccgccacggggcatgggaggcaggtagcccagctcgcgccaggacacccgtggcgggcggaacccgccaaggaccgcgaagtccagagaaaggaagctgaggagctgcccgcccgcccccggctgcagccccagcagggccctcccccggtggcgcgcacccgcgcgcgcacactcgcacaccgcacctcagctcctgcccggcctcgcccccacccgcgagcgccgaacctcctggggccggatgccatgggtaacaacttctccagtatcccctcgctgccccgaggaaacccgagccgcgcgccgcggggccacccccagaacctcaaagactctatcgggggccccttccccgtcacttctcaccgatgccaccacaagcagaagcactgtccggcagtgctgcccagcggggggctcccagccacgccgctgctcttccacccgcacaccaagggctcccagatcctcatggacctcagccacaaggctgtcaagaggcaggccagcttctgcaacgccatcaccttcagcaaccgcccggtcctcatctacgagcaagtcaggctgaagatcaccaagaagcagtgctgctggagcggggccctgcggctgggcttcaccagcaaggacccgtcccgcatccaccctgactcgctgcccaagtacgcctgccccgacctggtgtcccagagtggcttctgggccaaggcgctgcctgaggagtttgccaatgagggcaacatcatcgcattctgggtggacaagaagggccgtgtcttccaccgcatcaacgactcggctgttatgctgttcttcagcggggtccgcacggccgacccgctctgggccctggtggacgtctacggcctcacgcggggcgtccagctgcttgatagcgagctggtgctcccggactgtctgcggccgcgctccttcaccgccctgcggcggccgtcgctgcggcgcgaggcggacgacgcgcgcctctcggtgagcctatgcgacctcaacgtgccgggcgcggacggcgacgaggccgcgccggccgccggctgccccatcccgcagaactcactcaactcgcagcacagccgcgcgctgccggcgcagctcgacggcgacctgcgtttccacgccctgcgcgccggcgcgcacgtccgcatcctcgacgagcagacggtggcgcgcgtggagcacgggcgcgacgagcgcgcgctcgtcttcaccagccggcccgtgcgcgtggccgagaccatcttcgtcaaggtcacgcgctcgggtggcgcgcggcccggcgcgctgtcgttcggcgtcaccacgtgcgaccccggcacgctgcggccggccgacctgcctttcagccctgaggccctggtggaccgcaaggaattctgggccgtgtgccgcgtgcccgggcccctgcacagcggcgacatcctgggcctggtggtcaacgccgacggcgagctgcacctcagccacaatggcgcggccgccggcatgcagctgtgcgtggacgcctcgcagccgctttggatgctcttcggcctgcacgggaccatcacgcagatccgcatcctcggtgagtgcccgcagctgcgcctgggcgtatgcctttcctggaggcggggacgatccgggtaggagacaaagggcgagctccccttcctccaggctcatgatggtgttgctaaggaatcacagacacctaaggctccactatcctggccgagcggggtatcccatcactcccctgctcccctgcctccacgccaacctcgcccagtgccctgggcagccgcctgtctgaccccttgctcagcacgtgcagctctggccctctgggtagctctgctggtgggacagcccccaattcgccagtgagcctgcccgagtcgccagtgaccccaggtctgggccagtggagcgatgagtgcaccatttgctatgaacacgcggtggacacggtcatctacacatgtggccacatgtgcctctgctacgcctgtggcctgcgcctcaagaaggctctgcacgcctgctgccccatctgccgccgccccatcaaggacatcatcaagacctaccgcagctcctagcccgttgcggtggcccatcccgcatacccatcttctcgggcttcagcccagtcccagctgaggaacaagccagtggggccccttctcttcctcattttggaaacttttcctcctctattaaacatgggaaactgaagcccttgaaggtttggggagaggggggtatcaggcagggagggggcagaggcaaatcaccgggcagagggaggggaggagaggaggccgcactctccctgtctctcccgtctctgcacccagctcctctctgcatgctgagggctaaattgggatctcagcctgccctaatctttccccatctgaggcaggtttctaggaggtgtctgtagtccatgtggcacctttgtgagaattagaaaacatgtaccttcctctgggcagctgcagccctgagccaggacatgtggcctggctagtgcagcatggagtggattttaggctcatttgccctctcagccaactgcccttgagcagtgtacagcctgctcaacaaccgccctgggcaggccgctcctgagctgctgtctccctctctgacctatgcctaccttctctttcttcgttccctgcccactgggcatggcagctgggggtgagaggctggtggttgcctcccgtcctgggcaggctgcagcctcatgccatgtctctctcccactacctgatgggcacatggacaggctgcagagggctccaggttctgggcccctggctgagaaggggaggatcctgtcctggctgtagccttcctgccccaatcatctcgctggatgccattgcccaggggtagcccttcggtatgggctggggagaagggttggtcttctgccagggtccctaagaacaggtttgcagctaccctctctgaccttttccccatatcttgtgctgtccagggcctaggctgatagtcagagcctgtggcacacctgggatgggccagggccctgggtggggaggtgtgggttccctgggccaagaccagcctttttcctcagtttaattaatttatttatttggtttgtggttttgggttttttttgtttgtttgtttgtaggtgagttcccatcctctgggcccctagaaatgctgcctttgtgtgtggggtacctgggaaagggtgtggctgaggcagtcataatgcagtatcttcccctgactccagccacaaagctcatacccagccctaccaatcatgaattggaactccataaggaggggccaaattgggagaccttttggcaaacagtgtctattttacagagaggcaaaccaagcctccttagtgccctggggctgatggtcacccagagccatagagcacccttcctcctgggccagagctgggttatcatggttggcttaggtacctcaggtggcccaggaggtcccccctccataaggacgtcaaacttccaggagggccagtgttcctagtgtgggccaggaacaggacagggagaccttgtgatggcggggcagggagcctgttcgtagggaagatgaggaggcaagggctgcctctcacacctccaggttctctaagttctggggagggagcgccccacctgctgaggtcggtcctctcagccctgcctgccctggcctgggctctcccagcctcccagccctctgccccctcagatggctttttgtttttgtttttttttgcatccatcagagactgcacctctgtgtggcaggcagggcatgggttttagtcctggccactgaccagctgtgtggccctggccgagtcgtagccccctggagcccagcttccatttctataaaatggttgtttcgggagagaggggcaggctttctgtgtgactcgggagttcttccgtgagggctgccagggggtggtgtgccaggacctcaggctgggcctttgtgctggccttgcagtgggtgtgtggggaagtcactgtcccactatgggtctccactacccagtcactgaccctgggagaccccttctgtgtgggagggagcgggggctggctagcgggccccccagccagggatcccagaggctgagggttggggagaggaagccatcatctcattacctctgtcagtgcaggggtggctgctgcttcccttgtgcacttgggtcgctgtgattgtgaataaaagtgatttcgtaccagcctgaaa

SEQ ID NO: 354397 - DNA, 3652 bp, Homo sapiens
cgcagggaggctgcccttggtctgattgaccaagtgggagagggtgggctgaggccaccccctgccacccagatcaccaagaagcagtgctgctggagcggggccctgcggctgggcttcaccagcaaggacccgtcccgcatccaccctgactcgctgcccaagtacgcctgccccgacctggtgtcccagagtggcttctgggccaaggcgctgcctgaggagtttgccaatgagggcaacatcatcgcattctgggtggacaagaagggccgtgtcttccaccgcatcaacgactcggctgttatgctgttcttcagcggggtccgcacggccgacccgctctgggccctggtggacgtctacggcctcacgcggggcgtccagctgcttgatagcgagctggtgctcccggactgtctgcggccgcgctccttcaccgccctgcggcggccgtcgctgcggcgcgaggcggacgacgcgcgcctctcggtgagcctatgcgacctcaacgtgccgggcgcggacggcgacgaggccgcgccggccgccggctgccccatcccgcagaactcactcaactcgcagcacagccgcgcgctgccggcgcagctcgacggcgacctgcgtttccacgccctgcgcgccggcgcgcacgtccgcatcctcgacgagcagacggtggcgcgcgtggagcacgggcgcgacgagcgcgcgctcgtcttcaccagccggcccgtgcgcgtggccgagaccatcttcgtcaaggtcacgcgctcgggtggcgcgcggcccggcgcgctgtcgttcggcgtcaccacgtgcgaccccggcacgctgcggccggccgacctgcctttcagccctgaggccctggtggaccgcaaggaattctgggccgtgtgccgcgtgcccgggcccctgcacagcggcgacatcctgggcctggtggtcaacgccgacggcgagctgcacctcagccacaatggcgcggccgccggcatgcagctgtgcgtggacgcctcgcagccgctttggatgctcttcggcctgcacgggaccatcacgcagatccgcatcctcggctccactatcctggccgagcggggtatcccatcactcccctgctcccctgcctccacgccaacctcgcccagtgccctgggcagccgcctgtctgaccccttgctcagcacgtgcagctctggccctctgggtagctctgctggtgggacagcccccaattcgccagtgagcctgcccgagtcgccagtgaccccaggtctgggccagtggagcgatgagtgcaccatttgctatgaacacgcggtggacacggtcatctacacatgtggccacatgtgcctctgctacgcctgtggcctgcgcctcaagaaggctctgcacgcctgctgccccatctgccgccgccccatcaaggacatcatcaagacctaccgcagctcctagcccgttgcggtggcccatcccgcatacccatcttctcgggcttcagcccagtcccagctgaggaacaagccagtggggccccttctcttcctcattttggaaacttttcctcctctattaaacatgggaaactgaagcccttgaaggtttggggagaggggggtatcaggcagggagggggcagaggcaaatcaccgggcagagggaggggaggagaggaggccgcactctccctgtctctcccgtctctgcacccagctcctctctgcatgctgagggctaaattgggatctcagcctgccctaatctttccccatctgaggcaggtttctaggaggtgtctgtagtccatgtggcacctttgtgagaattagaaaacatgtaccttcctctgggcagctgcagccctgagccaggacatgtggcctggctagtgcagcatggagtggattttaggctcatttgccctctcagccaactgcccttgagcagtgtacagcctgctcaacaaccgccctgggcaggccgctcctgagctgctgtctccctctctgacctatgcctaccttctctttcttcgttccctgcccactgggcatggcagctgggggtgagaggctggtggttgcctcccgtcctgggcaggctgcagcctcatgccatgtctctctcccactacctgatgggcacatggacaggctgcagagggctccaggttctgggcccctggctgagaaggggaggatcctgtcctggctgtagccttcctgccccaatcatctcgctggatgccattgcccaggggtagcccttcggtatgggctggggagaagggttggtcttctgccagggtccctaagaacaggtttgcagctaccctctctgaccttttccccatatcttgtgctgtccagggcctaggctgatagtcagagcctgtggcacacctgggatgggccagggccctgggtggggaggtgtgggttccctgggccaagaccagcctttttcctcagtttaattaatttatttatttggtttgtggttttgggttttttttgtttgtttgtttgtaggtgagttcccatcctctgggcccctagaaatgctgcctttgtgtgtggggtacctgggaaagggtgtggctgaggcagtcataatgcagtatcttcccctgactccagccacaaagctcatacccagccctaccaatcatgaattggaactccataaggaggggccaaattgggagaccttttggcaaacagtgtctattttacagagaggcaaaccaagcctccttagtgccctggggctgatggtcacccagagccatagagcacccttcctcctgggccagagctgggttatcatggttggcttaggtacctcaggtggcccaggaggtcccccctccataaggacgtcaaacttccaggagggccagtgttcctagtgtgggccaggaacaggacagggagaccttgtgatggcggggcagggagcctgttcgtagggaagatgaggaggcaagggctgcctctcacacctccaggttctctaagttctggggagggagcgccccacctgctgaggtcggtcctctcagccctgcctgccctggcctgggctctcccagcctcccagccctctgccccctcagatggctttttgtttttgtttttttttgcatccatcagagactgcacctctgtgtggcaggcagggcatgggttttagtcctggccactgaccagctgtgtggccctggccgagtcgtagccccctggagcccagcttccatttctataaaatggttgtttcgggagagaggggcaggctttctgtgtgactcgggagttcttccgtgagggctgccagggggtggtgtgccaggacctcaggctgggcctttgtgctggccttgcagtgggtgtgtggggaagtcactgtcccactatgggtctccactacccagtcactgaccctgggagaccccttctgtgtgggagggagcgggggctggctagcgggccccccagccagggatcccagaggctgagggttggggagaggaagccatcatctcattacctctgtcagtgcaggggtggctgctgcttcccttgtgcacttgggtcgctgtgattgtgaataaaagtgatttcgtaccagcctgaaa

SEQ ID NO: 354398 - DNA, 4057 bp, Homo sapiens
accacccagagaaaagcatttttaatatttggatgtatgatcttttggcctttttaaaggctgtatttttgggttttttgtttgtttggcttataggcgattgttttttctttttgctgaactgaattttctacaaaataccgttttatattttgtataacttgtatgatttaaaaaagaacgatgagtttgattccctgttaagccactttcaaaagggtatcttggatagatctacttctcagcctgtgtcctgacatggcaatggtagcctcaaaaggtgattgttaaggttagatgagacaatgtacgcaaagagggtgtctgtgtgtttgctggggggtggttgctccctggctttccaggatgttaggccttcgtcagtgcactcgacagacggttactgtttgtcaacagaatgcttggcgctgttctagctgctagggataagacggaaggagcccaggagttaaatttttgaaaattttaaattatgaggaatacaagtttactgtagaaaatgaggaagtacacatatgcatatagcaagcacctgtgagcatttggaagcatccacatggtttcagtttcggtgcttccccccacctattcctctgcttaaacagatgtcctgcaagagtcgtttcttgactgtgttcgctaatttatgtcacaagcatcgtgtgcgccattagccatccgggattgtaacggtgcgcgcgtagggaccggacagcggggcgcgccggggccgcctcccgagagccctgcgtgacactgccccgtgtctcccgcgcagatagcgagctggtgctcccggactgtctgcggccgcgctccttcaccgccctgcggcggccgtcgctgcggcgcgaggcggacgacgcgcgcctctcggtgagcctatgcgacctcaacgtgccgggcgcggacggcgacgaggccgcgccggccgccggctgccccatcccgcagaactcactcaactcgcagcacagccgcgcgctgccggcgcagctcgacggcgacctgcgtttccacgccctgcgcgccggcgcgcacgtccgcatcctcgacgagcagacggtggcgcgcgtggagcacgggcgcgacgagcgcgcgctcgtcttcaccagccggcccgtgcgcgtggccgagaccatcttcgtcaaggtcacgcgctcgggtggcgcgcggcccggcgcgctgtcgttcggcgtcaccacgtgcgaccccggcacgctgcggccggccgacctgcctttcagccctgaggccctggtggaccgcaaggaattctgggccgtgtgccgcgtgcccgggcccctgcacagcggcgacatcctgggcctggtggtcaacgccgacggcgagctgcacctcagccacaatggcgcggccgccggcatgcagctgtgcgtggacgcctcgcagccgctttggatgctcttcggcctgcacgggaccatcacgcagatccgcatcctcggctccactatcctggccgagcggggtatcccatcactcccctgctcccctgcctccacgccaacctcgcccagtgccctgggcagccgcctgtctgaccccttgctcagcacgtgcagctctggccctctgggtagctctgctggtgggacagcccccaattcgccagtgagcctgcccgagtcgccagtgaccccaggtctgggccagtggagcgatgagtgcaccatttgctatgaacacgcggtggacacggtcatctacacatgtggccacatgtgcctctgctacgcctgtggcctgcgcctcaagaaggctctgcacgcctgctgccccatctgccgccgccccatcaaggacatcatcaagacctaccgcagctcctagcccgttgcggtggcccatcccgcatacccatcttctcgggcttcagcccagtcccagctgaggaacaagccagtggggccccttctcttcctcattttggaaacttttcctcctctattaaacatgggaaactgaagcccttgaaggtttggggagaggggggtatcaggcagggagggggcagaggcaaatcaccgggcagagggaggggaggagaggaggccgcactctccctgtctctcccgtctctgcacccagctcctctctgcatgctgagggctaaattgggatctcagcctgccctaatctttccccatctgaggcaggtttctaggaggtgtctgtagtccatgtggcacctttgtgagaattagaaaacatgtaccttcctctgggcagctgcagccctgagccaggacatgtggcctggctagtgcagcatggagtggattttaggctcatttgccctctcagccaactgcccttgagcagtgtacagcctgctcaacaaccgccctgggcaggccgctcctgagctgctgtctccctctctgacctatgcctaccttctctttcttcgttccctgcccactgggcatggcagctgggggtgagaggctggtggttgcctcccgtcctgggcaggctgcagcctcatgccatgtctctctcccactacctgatgggcacatggacaggctgcagagggctccaggttctgggcccctggctgagaaggggaggatcctgtcctggctgtagccttcctgccccaatcatctcgctggatgccattgcccaggggtagcccttcggtatgggctggggagaagggttggtcttctgccagggtccctaagaacaggtttgcagctaccctctctgaccttttccccatatcttgtgctgtccagggcctaggctgatagtcagagcctgtggcacacctgggatgggccagggccctgggtggggaggtgtgggttccctgggccaagaccagcctttttcctcagtttaattaatttatttatttggtttgtggttttgggttttttttgtttgtttgtttgtaggtgagttcccatcctctgggcccctagaaatgctgcctttgtgtgtggggtacctgggaaagggtgtggctgaggcagtcataatgcagtatcttcccctgactccagccacaaagctcatacccagccctaccaatcatgaattggaactccataaggaggggccaaattgggagaccttttggcaaacagtgtctattttacagagaggcaaaccaagcctccttagtgccctggggctgatggtcacccagagccatagagcacccttcctcctgggccagagctgggttatcatggttggcttaggtacctcaggtggcccaggaggtcccccctccataaggacgtcaaacttccaggagggccagtgttcctagtgtgggccaggaacaggacagggagaccttgtgatggcggggcagggagcctgttcgtagggaagatgaggaggcaagggctgcctctcacacctccaggttctctaagttctggggagggagcgccccacctgctgaggtcggtcctctcagccctgcctgccctggcctgggctctcccagcctcccagccctctgccccctcagatggctttttgtttttgtttttttttgcatccatcagagactgcacctctgtgtggcaggcagggcatgggttttagtcctggccactgaccagctgtgtggccctggccgagtcgtagccccctggagcccagcttccatttctataaaatggttgtttcgggagagaggggcaggctttctgtgtgactcgggagttcttccgtgagggctgccagggggtggtgtgccaggacctcaggctgggcctttgtgctggccttgcagtgggtgtgtggggaagtcactgtcccactatgggtctccactacccagtcactgaccctgggagaccccttctgtgtgggagggagcgggggctggctagcgggccccccagccagggatcccagaggctgagggttggggagaggaagccatcatctcattacctctgtcagtgcaggggtggctgctgcttcccttgtgcacttgggtcgctgtgattgtgaataaaagtgatttcgtaccagcctgaaa

SEQ ID NO: 354399 - DNA, 1533 bp, Homo sapiens
cgcgggcgggaccgcggcggtcgggggacaccagctgcgtcggagcgcccagaacgccccgcgctccgccgagccccgctccacgcagacccgcgggcgggagggagccacgcacatcgccgccgcggccgtctccgcggggcggtaaccgagcctgcctcggagccgccgaacgcccacgccagcgaccctgactctatggccccgggggagcgcgccggagccgccgcgccgcccacccccagccggaaccctagcgtcccggggagcaagcggggagccccgggcgtccccggccccggcccagggccctgcttgtggcccccgctcccgccacggggcatgggaggcaggtagcccagctcgcgccaggacacccgtggcgggcggaacccgccaaggaccgcgaagtccagagaaaggaagctgaggagctgcccgcccgcccccggctgcagccccagcagggccctcccccggtggcgcgcacccgcgcgcgcacactcgcacaccgcacctcagctcctgcccggcctcgcccccacccgcgagcgccgaacctcctggggccggatgccatgggtaacaacttctccagtatcccctcgctgccccgaggaaacccgagccgcgcgccgcggggccacccccagaacctcaaagactctatcgggggccccttccccgtcacttctcaccgatgccaccacaagcagaagcactgtccggcagtgctgcccagcggggggctcccagccacgccgctgctcttccacccgcacaccaagggctcccagatcctcatggacctcagccacaaggctgtcaagaggcaggccagcttctgcaacgccatcaccttcagcaaccgcccggtcctcatctacgagcaagtcaggctgaagatcaccaagaagcagtgctgctggagcggggccctgcggctgggcttcaccagcaaggacccgtcccgcatccaccctgactcgctgcccaagtacgcctgccccgacctggtgtcccagagtggcttctgggccaaggcgctgcctgaggagtttgccaatgagggcaacatcatcgcattctgggtggacaagaagggccgtgtcttccaccgcatcaacgactcggctgttatgctgttcttcagcggggtccgcacggccgacccgctctgggccctggtggacgtctacggcctcacgcggggcgtccagctgcttggtctggatacccgacaagagcggggacagtggccctcctgtgccttccagagtcgagcttacaagagctcaaggcatcaaggatcaactgcacatgttgggcacagataggccaccagggccccagcagtgctggtacaaggaagaggggcagtgcagcgcccaggatgccagattcagtggggaaggtcggtctgcctgccttatagttccccggaggctcccgagggctttgtctggttcagttattcctgtgcactctagttttctaccacaatgaatatatatcaagttgaaccatatgtaa

SEQ ID NO: 354400 - DNA, 4485 bp, Homo sapiens
cgcgggcgggaccgcggcggtcgggggacaccagctgcgtcggagcgcccagaacgccccgcgctccgccgagccccgctccacgcagacccgcgggcgggagggagccacgcacatcgccgccgcggccgtctccgcggggcggtaaccgagcctgcctcggagccgccgaacgcccacgccagcgaccctgactctatggccccgggggagcgcgccggagccgccgcgccgcccacccccagccggaaccctagcgtcccggggagcaagcggggagccccgggcgtccccggccccggcccagggccctgcttgtggcccccgctcccgccacggggcatgggaggcaggtagcccagctcgcgccaggacacccgtggcgggcggaacccgccaaggaccgcgaagtccagagaaaggaagctgaggagctgcccgcccgcccccggctgcagccccagcagggccctcccccggtggcgcgcacccgcgcgcgcacactcgcacaccgcacctcagctcctgcccggcctcgcccccacccgcgagcgccgaacctcctggggccggatgccatgggtaacaacttctccagtatcccctcgctgccccgaggaaacccgagccgcgcgccgcggggccacccccagaacctcaaagactctatcgggggccccttccccgtcacttctcaccgatgccaccacaagcagaagcactgtccggcagtgctgcccagcggggggctcccagccacgccgctgctcttccacccgcacaccaagggctcccagatcctcatggacctcagccacaaggctgtcaagaggcaggccagcttctgcaacgccatcaccttcagcaaccgcccggtcctcatctacgagcaagtcaggctgaagatcaccaagaagcagtgctgctggagcggggccctgcggctgggcttcaccagcaaggacccgtcccgcatccaccctgactcgctgcccaagtacgcctgccccgacctggtgtcccagagtggcttctgggccaaggcgctgcctgaggagtttgccaatgagggcaacatcatcgcattctgggtggacaagaagggccgtgtcttccaccgcatcaacgactcggctgttatgctgttcttcagcggggtccgcacggccgacccgctctgggccctggtggacgtctacggcctcacgcggggcgtccagctgcttgatagcgagctggtgctcccggactgtctgcggccgcgctccttcaccgccctgcggcggccgtcgctgcggcgcgaggcggacgacgcgcgcctctcggtgagcctatgcgacctcaacgtgccgggcgcggacggcgacgaggccgcgccggccgccggctgccccatcccgcagaactcactcaactcgcagcacagccgcgcgctgccggcgcagctcgacggcgacctgcgtttccacgccctgcgcgccggcgcgcacgtccgcatcctcgacgagcagacggtggcgcgcgtggagcacgggcgcgacgagcgcgcgctcgtcttcaccagccggcccgtgcgcgtggccgagaccatcttcgtcaaggtcacgcgctcgggtggcgcgcggcccggcgcgctgtcgttcggcgtcaccacgtgcgaccccggcacgctgcggccggccgacctgcctttcagccctgaggccctggtggaccgcaaggaattctgggccgtgtgccgcgtgcccgggcccctgcacagcggcgacatcctgggcctggtggtcaacgccgacggcgagctgcacctcagccacaatggcgcggccgccggcatgcagctgtgcgtggacgcctcgcagccgctttggatgctcttcggcctgcacgggaccatcacgcagatccgcatcctcggctccactatcctggccgagcggggtatcccatcactcccctgctcccctgcctccacgccaacctcgcccagtgccctgggcagccgcctgtctgaccccttgctcagcacgtgcagctctggccctctgggtagctctgctggtgggacagcccccaattcgccagtgagcctgcccgagtcgccagtgaccccaggtctgggccagtggagcgatgagtgcaccatttgctatgaacacgcggtggacacggtcatctacacatgtggccacatgtgcctctgctacgcctgtggcctgcgcctcaagaaggctctgcacgcctgctgccccatctgccgccgccccatcaaggacatcatcaagacctaccgcagctcctagcccgttgcggtggcccatcccgcatacccatcttctcgggcttcagcccagtcccagctgaggaacaagccagtggggccccttctcttcctcattttggaaacttttcctcctctattaaacatgggaaactgaagcccttgaaggtttggggagaggggggtatcaggcagggagggggcagaggcaaatcaccgggcagagggaggggaggagaggaggccgcactctccctgtctctcccgtctctgcacccagctcctctctgcatgctgagggctaaattgggatctcagcctgccctaatctttccccatctgaggcaggtttctaggaggtgtctgtagtccatgtggcacctttgtgagaattagaaaacatgtaccttcctctgggcagctgcagccctgagccaggacatgtggcctggctagtgcagcatggagtggattttaggctcatttgccctctcagccaactgcccttgagcagtgtacagcctgctcaacaaccgccctgggcaggccgctcctgagctgctgtctccctctctgacctatgcctaccttctctttcttcgttccctgcccactgggcatggcagctgggggtgagaggctggtggttgcctcccgtcctgggcaggctgcagcctcatgccatgtctctctcccactacctgatgggcacatggacaggctgcagagggctccaggttctgggcccctggctgagaaggggaggatcctgtcctggctgtagccttcctgccccaatcatctcgctggatgccattgcccaggggtagcccttcggtatgggctggggagaagggttggtcttctgccagggtccctaagaacaggtttgcagctaccctctctgaccttttccccatatcttgtgctgtccagggcctaggctgatagtcagagcctgtggcacacctgggatgggccagggccctgggtggggaggtgtgggttccctgggccaagaccagcctttttcctcagtttaattaatttatttatttggtttgtggttttgggttttttttgtttgtttgtttgtaggtgagttcccatcctctgggcccctagaaatgctgcctttgtgtgtggggtacctgggaaagggtgtggctgaggcagtcataatgcagtatcttcccctgactccagccacaaagctcatacccagccctaccaatcatgaattggaactccataaggaggggccaaattgggagaccttttggcaaacagtgtctattttacagagaggcaaaccaagcctccttagtgccctggggctgatggtcacccagagccatagagcacccttcctcctgggccagagctgggttatcatggttggcttaggtacctcaggtggcccaggaggtcccccctccataaggacgtcaaacttccaggagggccagtgttcctagtgtgggccaggaacaggacagggagaccttgtgatggcggggcagggagcctgttcgtagggaagatgaggaggcaagggctgcctctcacacctccaggttctctaagttctggggagggagcgccccacctgctgaggtcggtcctctcagccctgcctgccctggcctgggctctcccagcctcccagccctctgccccctcagatggctttttgtttttgtttttttttgcatccatcagagactgcacctctgtgtggcaggcagggcatgggttttagtcctggccactgaccagctgtgtggccctggccgagtcgtagccccctggagcccagcttccatttctataaaatggttgtttcgggagagaggggcaggctttctgtgtgactcgggagttcttccgtgagggctgccagggggtggtgtgccaggacctcaggctgggcctttgtgctggccttgcagtgggtgtgtggggaagtcactgtcccactatgggtctccactacccagtcactgaccctgggagaccccttctgtgtgggagggagcgggggctggctagcgggccccccagccagggatcccagaggctgagggttggggagaggaagccatcatctcattacctctgtcagtgcaggggtggctgctgcttcccttgtgcacttgggtcgctgtgattgtgaataaaagtgatttcgtaccagcctgaaa

SEQ ID NO: 354401 - DNA, 3918 bp, Homo sapiens
gattcggcacgatgaccagccggccggcccagcagaggtggctgcactgcccgtcgccggagatggggggacagatcacccggagcactctccacgactctatcgggggccccttccccgtcacttctcaccgatgccaccacaagcagaagcactgtccggcagtgctgcccagcggggggctcccagccacgccgctgctcttccacccgcacaccaagggctcccagatcctcatggacctcagccacaaggctgtcaagaggcaggccagcttctgcaacgccatcaccttcagcaaccgcccggtcctcatctacgagcaagtcaggctgaagatcaccaagaagcagtgctgctggagcggggccctgcggctgggcttcaccagcaaggacccgtcccgcatccaccctgactcgctgcccaagtacgcctgccccgacctggtgtcccagagtggcttctgggccaaggcgctgcctgaggagtttgccaatgagggcaacatcatcgcattctgggtggacaagaagggccgtgtcttccaccgcatcaacgactcggctgttatgctgttcttcagcggggtccgcacggccgacccgctctgggccctggtggacgtctacggcctcacgcggggcgtccagctgcttgatagcgagctggtgctcccggactgtctgcggccgcgctccttcaccgccctgcggcggccgtcgctgcggcgcgaggcggacgacgcgcgcctctcggtgagcctatgcgacctcaacgtgccgggcgcggacggcgacgaggccgcgccggccgccggctgccccatcccgcagaactcactcaactcgcagcacagccgcgcgctgccggcgcagctcgacggcgacctgcgtttccacgccctgcgcgccggcgcgcacgtccgcatcctcgacgagcagacggtggcgcgcgtggagcacgggcgcgacgagcgcgcgctcgtcttcaccagccggcccgtgcgcgtggccgagaccatcttcgtcaaggtcacgcgctcgggtggcgcgcggcccggcgcgctgtcgttcggcgtcaccacgtgcgaccccggcacgctgcggccggccgacctgcctttcagccctgaggccctggtggaccgcaaggaattctgggccgtgtgccgcgtgcccgggcccctgcacagcggcgacatcctgggcctggtggtcaacgccgacggcgagctgcacctcagccacaatggcgcggccgccggcatgcagctgtgcgtggacgcctcgcagccgctttggatgctcttcggcctgcacgggaccatcacgcagatccgcatcctcggctccactatcctggccgagcggggtatcccatcactcccctgctcccctgcctccacgccaacctcgcccagtgccctgggcagccgcctgtctgaccccttgctcagcacgtgcagctctggccctctgggtagctctgctggtgggacagcccccaattcgccagtgagcctgcccgagtcgccagtgaccccaggtctgggccagtggagcgatgagtgcaccatttgctatgaacacgcggtggacacggtcatctacacatgtggccacatgtgcctctgctacgcctgtggcctgcgcctcaagaaggctctgcacgcctgctgccccatctgccgccgccccatcaaggacatcatcaagacctaccgcagctcctagcccgttgcggtggcccatcccgcatacccatcttctcgggcttcagcccagtcccagctgaggaacaagccagtggggccccttctcttcctcattttggaaacttttcctcctctattaaacatgggaaactgaagcccttgaaggtttggggagaggggggtatcaggcagggagggggcagaggcaaatcaccgggcagagggaggggaggagaggaggccgcactctccctgtctctcccgtctctgcacccagctcctctctgcatgctgagggctaaattgggatctcagcctgccctaatctttccccatctgaggcaggtttctaggaggtgtctgtagtccatgtggcacctttgtgagaattagaaaacatgtaccttcctctgggcagctgcagccctgagccaggacatgtggcctggctagtgcagcatggagtggattttaggctcatttgccctctcagccaactgcccttgagcagtgtacagcctgctcaacaaccgccctgggcaggccgctcctgagctgctgtctccctctctgacctatgcctaccttctctttcttcgttccctgcccactgggcatggcagctgggggtgagaggctggtggttgcctcccgtcctgggcaggctgcagcctcatgccatgtctctctcccactacctgatgggcacatggacaggctgcagagggctccaggttctgggcccctggctgagaaggggaggatcctgtcctggctgtagccttcctgccccaatcatctcgctggatgccattgcccaggggtagcccttcggtatgggctggggagaagggttggtcttctgccagggtccctaagaacaggtttgcagctaccctctctgaccttttccccatatcttgtgctgtccagggcctaggctgatagtcagagcctgtggcacacctgggatgggccagggccctgggtggggaggtgtgggttccctgggccaagaccagcctttttcctcagtttaattaatttatttatttggtttgtggttttgggttttttttgtttgtttgtttgtaggtgagttcccatcctctgggcccctagaaatgctgcctttgtgtgtggggtacctgggaaagggtgtggctgaggcagtcataatgcagtatcttcccctgactccagccacaaagctcatacccagccctaccaatcatgaattggaactccataaggaggggccaaattgggagaccttttggcaaacagtgtctattttacagagaggcaaaccaagcctccttagtgccctggggctgatggtcacccagagccatagagcacccttcctcctgggccagagctgggttatcatggttggcttaggtacctcaggtggcccaggaggtcccccctccataaggacgtcaaacttccaggagggccagtgttcctagtgtgggccaggaacaggacagggagaccttgtgatggcggggcagggagcctgttcgtagggaagatgaggaggcaagggctgcctctcacacctccaggttctctaagttctggggagggagcgccccacctgctgaggtcggtcctctcagccctgcctgccctggcctgggctctcccagcctcccagccctctgccccctcagatggctttttgtttttgtttttttttgcatccatcagagactgcacctctgtgtggcaggcagggcatgggttttagtcctggccactgaccagctgtgtggccctggccgagtcgtagccccctggagcccagcttccatttctataaaatggttgtttcgggagagaggggcaggctttctgtgtgactcgggagttcttccgtgagggctgccagggggtggtgtgccaggacctcaggctgggcctttgtgctggccttgcagtgggtgtgtggggaagtcactgtcccactatgggtctccactacccagtcactgaccctgggagaccccttctgtgtgggagggagcgggggctggctagcgggccccccagccagggatcccagaggctgagggttggggagaggaagccatcatctcattacctctgtcagtgcaggggtggctgctgcttcccttgtgcacttgggtcgctgtgattgtgaataaaagtgatttcgtaccagcctgaaa

SEQ ID NO: 354402 - DNA, 4050 bp, Homo sapiens
aaaaaacccaaaaatacagcctttaaaaaggccaaaagatcatacatccaaatattaaaaatgcttttctctgggtggtgggcttataggcgattgttttttctttttgctgaactgaattttctacaaaataccgttttatattttgtataacttgtatgatttaaaaaagaacgatgagtttgattccctgttaagccactttcaaaagggtatcttggatagatctacttctcagcctgtgtcctgacatggcaatggtagcctcaaaaggtgattgttaaggttagatgagacaatgtacgcaaagagggtgtctgtgtgtttgctggggggtggttgctccctggctttccaggatgttaggccttcgtcagtgcactcgacagacggttactgtttgtcaacagaatgcttggcgctgttctagctgctagggataagacggaaggagcccaggagttaaatttttgaaaattttaaattatgaggaatacaagtttactgtagaaaatgaggaagtacacatatgcatatagcaagcacctgtgagcatttggaagcatccacatggtttcagtttcggtgcttccccccacctattcctctgcttaaacagatgtcctgcaagagtcgtttcttgactgtgttcgctaatttatgtcacaagcatcgtgtgcgccattagccatccgggattgtaacggtgcgcgcgtagggaccggacagcggggcgcgccggggccgcctcccgagagccctgcgtgacactgccccgtgtctcccgcgcagatagcgagctggtgctcccggactgtctgcggccgcgctccttcaccgccctgcggcggccgtcgctgcggcgcgaggcggacgacgcgcgcctctcggtgagcctatgcgacctcaacgtgccgggcgcggacggcgacgaggccgcgccggccgccggctgccccatcccgcagaactcactcaactcgcagcacagccgcgcgctgccggcgcagctcgacggcgacctgcgtttccacgccctgcgcgccggcgcgcacgtccgcatcctcgacgagcagacggtggcgcgcgtggagcacgggcgcgacgagcgcgcgctcgtcttcaccagccggcccgtgcgcgtggccgagaccatcttcgtcaaggtcacgcgctcgggtggcgcgcggcccggcgcgctgtcgttcggcgtcaccacgtgcgaccccggcacgctgcggccggccgacctgcctttcagccctgaggccctggtggaccgcaaggaattctgggccgtgtgccgcgtgcccgggcccctgcacagcggcgacatcctgggcctggtggtcaacgccgacggcgagctgcacctcagccacaatggcgcggccgccggcatgcagctgtgcgtggacgcctcgcagccgctttggatgctcttcggcctgcacgggaccatcacgcagatccgcatcctcggctccactatcctggccgagcggggtatcccatcactcccctgctcccctgcctccacgccaacctcgcccagtgccctgggcagccgcctgtctgaccccttgctcagcacgtgcagctctggccctctgggtagctctgctggtgggacagcccccaattcgccagtgagcctgcccgagtcgccagtgaccccaggtctgggccagtggagcgatgagtgcaccatttgctatgaacacgcggtggacacggtcatctacacatgtggccacatgtgcctctgctacgcctgtggcctgcgcctcaagaaggctctgcacgcctgctgccccatctgccgccgccccatcaaggacatcatcaagacctaccgcagctcctagcccgttgcggtggcccatcccgcatacccatcttctcgggcttcagcccagtcccagctgaggaacaagccagtggggccccttctcttcctcattttggaaacttttcctcctctattaaacatgggaaactgaagcccttgaaggtttggggagaggggggtatcaggcagggagggggcagaggcaaatcaccgggcagagggaggggaggagaggaggccgcactctccctgtctctcccgtctctgcacccagctcctctctgcatgctgagggctaaattgggatctcagcctgccctaatctttccccatctgaggcaggtttctaggaggtgtctgtagtccatgtggcacctttgtgagaattagaaaacatgtaccttcctctgggcagctgcagccctgagccaggacatgtggcctggctagtgcagcatggagtggattttaggctcatttgccctctcagccaactgcccttgagcagtgtacagcctgctcaacaaccgccctgggcaggccgctcctgagctgctgtctccctctctgacctatgcctaccttctctttcttcgttccctgcccactgggcatggcagctgggggtgagaggctggtggttgcctcccgtcctgggcaggctgcagcctcatgccatgtctctctcccactacctgatgggcacatggacaggctgcagagggctccaggttctgggcccctggctgagaaggggaggatcctgtcctggctgtagccttcctgccccaatcatctcgctggatgccattgcccaggggtagcccttcggtatgggctggggagaagggttggtcttctgccagggtccctaagaacaggtttgcagctaccctctctgaccttttccccatatcttgtgctgtccagggcctaggctgatagtcagagcctgtggcacacctgggatgggccagggccctgggtggggaggtgtgggttccctgggccaagaccagcctttttcctcagtttaattaatttatttatttggtttgtggttttgggttttttttgtttgtttgtttgtaggtgagttcccatcctctgggcccctagaaatgctgcctttgtgtgtggggtacctgggaaagggtgtggctgaggcagtcataatgcagtatcttcccctgactccagccacaaagctcatacccagccctaccaatcatgaattggaactccataaggaggggccaaattgggagaccttttggcaaacagtgtctattttacagagaggcaaaccaagcctccttagtgccctggggctgatggtcacccagagccatagagcacccttcctcctgggccagagctgggttatcatggttggcttaggtacctcaggtggcccaggaggtcccccctccataaggacgtcaaacttccaggagggccagtgttcctagtgtgggccaggaacaggacagggagaccttgtgatggcggggcagggagcctgttcgtagggaagatgaggaggcaagggctgcctctcacacctccaggttctctaagttctggggagggagcgccccacctgctgaggtcggtcctctcagccctgcctgccctggcctgggctctcccagcctcccagccctctgccccctcagatggctttttgtttttgtttttttttgcatccatcagagactgcacctctgtgtggcaggcagggcatgggttttagtcctggccactgaccagctgtgtggccctggccgagtcgtagccccctggagcccagcttccatttctataaaatggttgtttcgggagagaggggcaggctttctgtgtgactcgggagttcttccgtgagggctgccagggggtggtgtgccaggacctcaggctgggcctttgtgctggccttgcagtgggtgtgtggggaagtcactgtcccactatgggtctccactacccagtcactgaccctgggagaccccttctgtgtgggagggagcgggggctggctagcgggccccccagccagggatcccagaggctgagggttggggagaggaagccatcatctcattacctctgtcagtgcaggggtggctgctgcttcccttgtgcacttgggtcgctgtgattgtgaataaaagtgatttcgtaccagcctgaaa

SEQ ID NO: 354403 - DNA, 2297 bp, Homo sapiens
cgcgggcgggaccgcggcggtcgggggacaccagctgcgtcggagcgcccagaacgccccgcgctccgccgagccccgctccacgcagacccgcgggcgggagggagccacgcacatcgccgccgcggccgtctccgcggggcggtaaccgagcctgcctcggagccgccgaacgcccacgccagcgaccctgactctatggccccgggggagcgcgccggagccgccgcgccgcccacccccagccggaaccctagcgtcccggggagcaagcggggagccccgggcgtccccggccccggcccagggccctgcttgtggcccccgctcccgccacggggcatgggaggcaggtagcccagctcgcgccaggacacccgtggcgggcggaacccgccaaggaccgcgaagtccagagaaaggaagctgaggagctgcccgcccgcccccggctgcagccccagcagggccctcccccggtggcgcgcacccgcgcgcgcacactcgcacaccgcacctcagctcctgcccggcctcgcccccacccgcgagcgccgaacctcctggggccggatgccatgggtaacaacttctccagtatcccctcgctgccccgaggaaacccgagccgcgcgccgcggggccacccccagaacctcaaagactctatcgggggccccttccccgtcacttctcaccgatgccaccacaagcagaagcactgtccggcagtgctgcccagcggggggctcccagccacgccgctgctcttccacccgcacaccaagggctcccagatcctcatggacctcagccacaaggctgtcaagaggcaggccagcttctgcaacgccatcaccttcagcaaccgcccggtcctcatctacgagcaagtcaggctgaagatcaccaagaagcagtgctgctggagcggggccctgcggctgggcttcaccagcaaggacccgtcccgcatccaccctgactcgctgcccaagtacgcctgccccgacctggtgtcccagagtggcttctgggccaaggcgctgcctgaggagtttgccaatgagggcaacatcatcgcattctgggtggacaagaagggccgtgtcttccaccgcatcaacgactcggctgttatgctgttcttcagcggggtccgcacggccgacccgctctgggccctggtggacgtctacggcctcacgcggggcgtccagctgcttgatagcgagctggtgctcccggactgtctgcggccgcgctccttcaccgccctgcggcggccgtcgctgcggcgcgaggcggacgacgcgcgcctctcggtgagcctatgcgacctcaacgtgccgggcgcggacggcgacgaggccgcgccggccgccggctgccccatcccgcagaactcactcaactcgcagcacagccgcgcgctgccggcgcagctcgacggcgacctgcgtttccacgccctgcgcgccggcgcgcacgtccgcatcctcgacgagcagacggtggcgcgcgtggagcacgggcgcgacgagcgcgcgctcgtcttcaccagccggcccgtgcgcgtggccgagaccatcttcgtcaaggtcacgcgctcgggtggcgcgcggcccggcgcgctgtcgttcggcgtcaccacgtgcgaccccggcacgctgcggccggccgacctgcctttcagccctgaggccctggtggaccgcaaggaattctgggccgtgtgccgcgtgcccgggcccctgcacagcggcgacatcctgggcctggtggtcaacgccgacggcgagctgcacctcagccacaatggcgcggccgccggcatgcagctgtgcgtggacgcctcgcagccgctttggatgctcttcggcctgcacgggaccatcacgcagatccgcatcctcggtgagtgcccgcagctgcgcctgggcgtatgcctttcctggaggcggggacgatccgggtaggagacaaagggcgagctccccttcctccaggctcatgatggtgttgctaaggaatcacagacacctaaggtgagttctgggcgggacttggtcatcttgtcagtggcccttatatgtcacctgggagactcacctggggggtgaggcgagggaaagcgcggattattgagtttgatgcccagaatcagatcaacccatagtctcacagatacataaacagtccagaagcacacaacccactgaccactcaaaaatgagaggaaaaggccaggtgcggtggctcacgcctgtaatctcagcattttgggaggccgaggc

SEQ ID NO: 354404 - DNA, 1322 bp, Homo sapiens
tgcactgtgcaaatatattgactttatttgtctcctttcaggagcctcacagacatatccaggtaaaaagatcgttaaataaatgccttcagccatcgcaatgcaaaaataaatatcaatcctccagacgcagtagcagccgcgctgcgcccaaagtcccaacggccacgcctaacaattataaaagtgttcagcgagagtgttggcgtgagtgtgaatgggtgtgcgctggggggcacggtggagcggtgtgcaaaatcggagttgcaaaccatcggacaagggcatggagtggctacccgccgccgactcagcgcgggcgcgcctccccgcacacactcacagcagagttcgcactgggaagagttaaaaaataaacatttacaaggacgaggaaagcggccccgctcccggcgctcccgggccagggcgagcgcggcgaggggcgcaccgaccggttcgcagcggggcgggagtccgagcgcgcgaggagcggcggtcccgggtccttgcgggtcccccgggagcagggcgcgggcactctcggggttcacacgccggtccccgcgcggaccgcggacgcgcgcgtcccccccgcgggcggcgccccttacagggccgagtcggagtcgctggagtccaggctgttcctcagtttgcagctgctgagctgctcccgctgcagcgacaggctctgcgtgctgcggcgcaggcactccaggctctgcaggaacgacttcttggccttctcctcctccatgggggacaccccctcctcctccacctcctggatctcgtcgaaggtcaccggctgcgtcttgaagcgagactggcgcggccgcagccggcccggcccttgggcagcttggcgggcgcacgggctgcgggaactcgtcggccaggcacacgaagtgcggcatcaccgcctggtaactggagcagatgcccatcagctcgccgggcttggcggccatggcgcctccggcgtctgcggggccgggcggcggggcgccggggctctccgagggcggccgcaatgcttttttttttttttttttttacaatgagaataatcatccacttatatttccataactctctgcaataaagcactttaagttgggaataaggatgtttgcagacacatgccaattacgtgcggaacaggtgctgaattccaattcctgggagtttcttctttcaaaacaagctgctttcttttgttcagtgaacaagtatgtccaggactgaggtgaccatgcagggagtggaaagggtatgagattcagacttcacccttaatctggctctcctttgccagc

SEQ ID NO: 354405 - DNA, 1260 bp, Homo sapiens
tgcactgtgcaaatatattgactttatttgtctcctttcaggagcctcacagacatatccaggtaaaaagatcgttaaataaatgccttcagccatcgcaatgcaaaaataaatatcaatcctccagacgcagtagcagccgcgctgcgcccaaagtcccaacggccacgcctaacaattataaaagtgttcagcgagagtgttggcgtgagtgtgaatgggtgtgcgctggggggcacggtggagcggtgtgcaaaatcggagttgcaaaccatcggacaagggcatggagtggctacccgccgccgactcagcgcgggcgcgcctccccgcacacactcacagcagagttcgcactgggaagagttaaaaaataaacatttacaaggacgaggaaagcggccccgctcccggcgctcccgggccagggcgagcgcggcgaggggcgcaccgaccggttcgcagcggggcgcgggcactctcggggttcacacgccggtccccgcgcggaccgcggacgcgcgcgtcccccccgcgggcggcgccccttacagggccgagtcggagtcgctggagtccaggctgttcctcagtttgcagctgctgagctgctcccgctgcagcgacaggctctgcgtgctgcggcgcaggcactccaggctctgcaggaacgacttcttggccttctcctcctccatgggggacaccccctcctcctccacctcctggatctcgtcgaaggtcaccggctgcgtcttgaagcgagactggcgcggccgcagccggcccggcccttgggcagcttggcgggcgcacgggctgcgggaactcgtcggccaggcacacgaagtgcggcatcaccgcctggtaactggagcagatgcccatcagctcgccgggcttggcggccatggcgcctccggcgtctgcggggccgggcggcggggcgccggggctctccgagggcggccgcaatgcttttttttttttttttttttacaatgagaataatcatccacttatatttccataactctctgcaataaagcactttaagttgggaataaggatgtttgcagacacatgccaattacgtgcggaacaggtgctgaattccaattcctgggagtttcttctttcaaaacaagctgctttcttttgttcagtgaacaagtatgtccaggactgaggtgaccatgcagggagtggaaagggtatgagattcagacttcacccttaatctggctctcctttgccagc

SEQ ID NO: 354406 - DNA, 1027 bp, Homo sapiens
tgcactgtgcaaatatattgactttatttgtctcctttcaggagcctcacagacatatccaggtaaaaagatcgttaaataaatgccttcagccatcgcaatgcaaaaataaatatcaatcctccagacgcagtagcagccgcgctgcgcccaaagtcccaacggccacgcctaacaattataaaagtgttcagcgagagtgttggcgtgagtgtgaatgggtgtgcgctggggggcacggtggagcggtgtgcaaaatcggagttgcaaaccatcggacaagggcatggagtggctacccgccgccgactcagcgcgggcgcgcctccccgcacacactcacagcagagttcgcactgggaagagttaaaaaataaacatttacaaggacgaggaaagcggccccgctcccggcaggcactccaggctctgcaggaacgacttcttggccttctcctcctccatgggggacaccccctcctcctccacctcctggatctcgtcgaaggtcaccggctgcgtcttgaagcgagactggcgcggccgcagccggcccggcccttgggcagcttggcgggcgcacgggctgcgggaactcgtcggccaggcacacgaagtgcggcatcaccgcctggtaactggagcagatgcccatcagctcgccgggcttggcggccatggcgcctccggcgtctgcggggccgggcggcggggcgccggggctctccgagggcggccgcaatgcttttttttttttttttttttacaatgagaataatcatccacttatatttccataactctctgcaataaagcactttaagttgggaataaggatgtttgcagacacatgccaattacgtgcggaacaggtgctgaattccaattcctgggagtttcttctttcaaaacaagctgctttcttttgttcagtgaacaagtatgtccaggactgaggtgaccatgcagggagtggaaagggtatgagattcagacttcacccttaatctggctctcctttgccagc

SEQ ID NO: 354407 - DNA, 767 bp, Homo sapiens
tgcactgtgcaaatatattgactttatttgtctcctttcaggagcctcacagacatatccaggtaaaaagatcgttaaataaatgccttcagccatcgcaatgcaaaaataaatatcaatcctccagacgcagtagcagccgcgctgcgcccaaagtcccaacggccacgcctaacaattataaaagtgttcagcgagagtgttggcgtgagtgtgaatgggtgtgcgctggggggcacggtggagcggtgtgcaaaatcggagttgcaaaccatcggacaagggcatggagtggctacccgccgccgactcagcgcgggcgcgcctccccgcacacactcacagcagagttcgcactgggaagagttaaaaaataaacatttacaaggacgaggaaagcggccccgctcccgggccatggcgcctccggcgtctgcggggccgggcggcggggcgccggggctctccgagggcggccgcaatgcttttttttttttttttttttacaatgagaataatcatccacttatatttccataactctctgcaataaagcactttaagttgggaataaggatgtttgcagacacatgccaattacgtgcggaacaggtgctgaattccaattcctgggagtttcttctttcaaaacaagctgctttcttttgttcagtgaacaagtatgtccaggactgaggtgaccatgcagggagtggaaagggtatgagattcagacttcacccttaatctggctctcctttgccagc

SEQ ID NO: 354408 - DNA, 894 bp, Homo sapiens
tgcactgtgcaaatatattgactttatttgtctcctttcaggagcctcacagacatatccaggtaaaaagatcgttaaataaatgccttcagccatcgcaatgcaaaaataaatatcaatcctccagacgcagtagcagccgcgctgcgcccaaagtcccaacggccacgcctaacaattataaaagtgttcagcgagagtgttggcgtgagtgtgaatgggtgtgcgctggggggcacggtggagcggtgtgcaaaatcggagttgcaaaccatcggacaagggcatggagtggctacccgccgccgattcttggccttctcctcctccatgggggacaccccctcctcctccacctcctggatctcgtcgaaggtcaccggctgcgtcttgaagcgagactggcgcggccgcagccggcccggcccttgggcagcttggcgggcgcacgggctgcgggaactcgtcggccaggcacacgaagtgcggcatcaccgcctggtaactggagcagatgcccatcagctcgccgggcttggcggccatggcgcctccggcgtctgcggggccgggcggcggggcgccggggctctccgagggcggccgcaatgcttttttttttttttttttttacaatgagaataatcatccacttatatttccataactctctgcaataaagcactttaagttgggaataaggatgtttgcagacacatgccaattacgtgcggaacaggtgctgaattccaattcctgggagtttcttctttcaaaacaagctgctttcttttgttcagtgaacaagtatgtccaggactgaggtgaccatgcagggagtggaaagggtatgagattcagacttcacccttaatctggctctcctttgccagc

SEQ ID NO: 354409 - DNA, 839 bp, Homo sapiens
ttttttttgtgcaattttgtactgccccgactactacgggagccgggccagacatatccaggtaaaaagatcgttaaataaatgccttcagccatcgcaatgcaaaaataaatatcaatcctccagacgcagtagcagccgcggagtcgctggagtccaggctgttcctcagtttgcagctgctgagctgctcccgctgcagcgacaggctctgcgtgctgcggcgcaggcactccaggctctgcaggaacgacttcttggccttctcctcctccatgggggacaccccctcctcctccacctcctggatctcgtcgaaggtcaccggctgcgtcttgaagcgagactggcgcggccgcagccggcccggcccttgggcagcttggcgggcgcacgggctgcgggaactcgtcggccaggcacacgaagtgcggcatcaccgcctggtaactggagcagatgcccatcagctcgccgggcttggcggccatggcgcctccggcgtctgcggggccgggcggcggggcgccggggctctccgagggcggccgcaatgcttttttttttttttttttttacaatgagaataatcatccacttatatttccataactctctgcaataaagcactttaagttgggaataaggatgtttgcagacacatgccaattacgtgcggaacaggtgctgaattccaattcctgggagtttcttctttcaaaacaagctgctttcttttgttcagtgaacaagtatgtccaggactgaggtgaccatgcagggagtggaaagggtatgagattcagacttcacccttaatctggctctcctttgccagc

SEQ ID NO: 354410 - DNA, 1321 bp, Homo sapiens
ttttttttgtgcaattttgtactgccccgactactacgggagccgggccagacatatccaggtaaaaagatcgttaaataaatgccttcagccatcgcaatgcaaaaataaatatcaatcctccagacgcagtagcagccgcgctgcgcccaaagtcccaacggccacgcctaacaattataaaagtgttcagcgagagtgttggcgtgagtgtgaatgggtgtgcgctggggggcacggtggagcggtgtgcaaaatcggagttgcaaaccatcggacaagggcatggagtggctacccgccgccgactcagcgcgggcgcgcctccccgcacacactcacagcagagttcgcactgggaagagttaaaaaataaacatttacaaggacgaggaaagcggccccgctcccggcgctcccgggccagggcgagcgcggcgaggggcgcaccgaccggttcgcagcggggcgggagtccgagcgcgcgaggagcggcggtcccgggtccttgcgggtcccccgggagcagggcgcgggcactctcggggttcacacgccggtccccgcgcggaccgcggacgcgcgcgtcccccccgcgggcggcgccccttacagggccgagtcggagtcgctggagtccaggctgttcctcagtttgcagctgctgagctgctcccgctgcagcgacaggctctgcgtgctgcggcgcaggcactccaggctctgcaggaacgacttcttggccttctcctcctccatgggggacaccccctcctcctccacctcctggatctcgtcgaaggtcaccggctgcgtcttgaagcgagactggcgcggccgcagccggcccggcccttgggcagcttggcgggcgcacgggctgcgggaactcgtcggccaggcacacgaagtgcggcatcaccgcctggtaactggagcagatgcccatcagctcgccgggcttggcggccatggcgcctccggcgtctgcggggccgggcggcggggcgccggggctctccgagggcggccgcaatgcttttttttttttttttttttacaatgagaataatcatccacttatatttccataactctctgcaataaagcactttaagttgggaataaggatgtttgcagacacatgccaattacgtgcggaacaggtgctgaattccaattcctgggagtttcttctttcaaaacaagctgctttcttttgttcagtgaacaagtatgtccaggactgaggtgaccatgcagggagtggaaagggtatgagattcagacttcacccttaatctggctctcctttgccagc

SEQ ID NO: 354411 - DNA, 1201 bp, Homo sapiens
tgcactgtgcaaatatattgactttatttgtctcctttcaggagcctcacagacatatccaggtaaaaagatcgttaaataaatgccttcagccatcgcaatgcaaaaataaatatcaatcctccagacgcagtagcagccgcgctgcgcccaaagtcccaacggccacgcctaacaattataaaagtgttcagcgagagtgttggcgtgagtgtgaatgggtgtgcgctggggggcacggtggagcggtgtgcaaaatcggagttgcaaaccatcggacaagggcatggagtggctacccgccgccgactcagcgcgggcgcgcctccccgcacacactcacagcagagttcgcactgggaagagttaaaaaataaacatttacaaggacgaggaaagcggccccgctcccgcgggcactctcggggttcacacgccggtccccgcgcggaccgcggacgcgcgcgtcccccccgcgggcggcgccccttacagggccgagtcggagtcgctggagtccaggctgttcctcagtttgcagctgctgagctgctcccgctgcagcgacaggctctgcgtgctgcggcgcaggcactccaggctctgcaggaacgacttcttggccttctcctcctccatgggggacaccccctcctcctccacctcctggatctcgtcgaaggtcaccggctgcgtcttgaagcgagactggcgcggccgcagccggcccggcccttgggcagcttggcgggcgcacgggctgcgggaactcgtcggccaggcacacgaagtgcggcatcaccgcctggtaactggagcagatgcccatcagctcgccgggcttggcggccatggcgcctccggcgtctgcggggccgggcggcggggcgccggggctctccgagggcggccgcaatgcttttttttttttttttttttacaatgagaataatcatccacttatatttccataactctctgcaataaagcactttaagttgggaataaggatgtttgcagacacatgccaattacgtgcggaacaggtgctgaattccaattcctgggagtttcttctttcaaaacaagctgctttcttttgttcagtgaacaagtatgtccaggactgaggtgaccatgcagggagtggaaagggtatgagattcagacttcacccttaatctggctctcctttgccagc

SEQ ID NO: 354412 - DNA, 1052 bp, Homo sapiens
tgcactgtgcaaatatattgactttatttgtctcctttcaggagcctcacagacatatccaggtaaaaagatcgttaaataaatgccttcagccatcgcaatgcaaaaataaatatcaatcctccagacgcagtagcagccgcgctgcgcccaaagtcccaacggccacgcctaacaattataaaagtgttcagcgagagtgttggcgtgagtgtgaatgggtgtgcgctggggggcacggtggagcggtgtgcaaaatcggagttgcaaaccatcggacaagggcatggagtggctacccgccgccgactcagcgcgggcgcgcctccccgcacacactcacagcagagttcgcagagtcgctggagtccaggctgttcctcagtttgcagctgctgagctgctcccgctgcagcgacaggctctgcgtgctgcggcgcaggcactccaggctctgcaggaacgacttcttggccttctcctcctccatgggggacaccccctcctcctccacctcctggatctcgtcgaaggtcaccggctgcgtcttgaagcgagactggcgcggccgcagccggcccggcccttgggcagcttggcgggcgcacgggctgcgggaactcgtcggccaggcacacgaagtgcggcatcaccgcctggtaactggagcagatgcccatcagctcgccgggcttggcggccatggcgcctccggcgtctgcggggccgggcggcggggcgccggggctctccgagggcggccgcaatgcttttttttttttttttttttacaatgagaataatcatccacttatatttccataactctctgcaataaagcactttaagttgggaataaggatgtttgcagacacatgccaattacgtgcggaacaggtgctgaattccaattcctgggagtttcttctttcaaaacaagctgctttcttttgttcagtgaacaagtatgtccaggactgaggtgaccatgcagggagtggaaagggtatgagattcagacttcacccttaatctggctctcctttgccagc

SEQ ID NO: 354413 - DNA, 159 bp, Homo sapiens
tgcgccggggccccccgggaggcagcagccgggggctcgccgggcgggggatccaaatctgctgcggggtggcggcggcctcgcgggcccgggccggcgctcctcgggagggcgggcgggcgggcggactcgtcggggggcacggggctcgggggggtc

SEQ ID NO: 354414 - DNA, 204 bp, Homo sapiens
tccctctctccctcccttctccctcgtcttcctctcctctggtcttctttaaaggcaggggctcactctgttgcccaggctagagtgcagtggcgcgattgcagctcactgaagcctcaaactcctgggctcaagggatcctcccacctcagcctcctgagtagctgggactatgggtacatgcccctacacccctggctaatt

SEQ ID NO: 354415 - DNA, 439 bp, Homo sapiens
tgcaatgtaaatgctatataaattattatactgtattgtttagggaatattgacaagaaaaaaaagtctacatattcagtacaaatacaactatccttttattccccaaatattttcagtcgtggttggtttaatccacagataaggaacccacagatacagagggtggactgtatatgtaaacaacccatataatataccactatttaaacttctttgaactcctgaactctggtatacctttactcctttgtcattttaaatgaactgtgctacacaaattgaaatcttaaattcgatatacctgttgggcacggtggctcacgcctgtaatcccagcactttgggaggctgaggcaggcagatcacctgaggttgggagttcaagaccagcctgacgaacatggagaaaccccatgtctactaaaaatacagaatt

SEQ ID NO: 354416 - DNA, 5508 bp, Homo sapiens
acgtttccttcctgctcttgttgactaggcgctgttcttgcttggctggtgccccagggcctggagaggtctgaagaaacctgggagccagcagcccggggctccactctgggttctgaaagcccattccctgctctgcggctcctcccaccccacctcttctcagccttgcagctcaagggttgatctcaggagtccaggacccaggagagggaagaatctgaggaacacagaacagtgagcgttgcccacaccccatctcccgtcaccacatctcccctcaccctcaccctccctgcctggccctggaccccatcccaggacctccctatcagctgacttcttccagtgtcttgcaggcccctctgggctcctccctcccctggcttttcctaccactccccctctatcggcgtctatctgtaggtgccctgggatttataaaactgggttccgaatgctgaataagagacggtaagagccaaggcaaaggacagcactgttctctgcctgcctgataccctcaccacctgggaacatcccccagacaccctcttaactccgggacagagatggctggcggagcctggggccgcctggcctgttacttggagttcctgaagaaggaggagctgaaggagttccagcttctgctcgccaataaagcgcactccaggagctcttcgggtgagacacccgctcagccagagaagacgagtggcatggaggtggcctcgtacctggtggctcagtatggggagcagcgggcctgggacctagccctccatacctgggagcagatggggctgaggtcactgtgcgcccaagcccaggaaggggcaggccactctccctcattcccctacagcccaagtgaaccccacctggggtctcccagccaacccacctccaccgcagtgctaatgccctggatccatgaattgccggcggggtgcacccagggctcagagagaagggttttgagacagctgcctgacacatctggacgccgctggagagaaatctctgcctcactcctctaccaagctcttccaagctccccagaccatgagtctccaagccaggagtcacccaacgcccccacatccacagcagtgctggggagctggggatccccacctcagcccagcctagcacccagagagcaggaggctcctgggacccaatggcctctggatgaaacgtcaggaatttactacacagaaatcagagaaagagagagagagaaatcagagaaaggcaggcccccatgggcagcggtggtaggaacgcccccacaggcgcacaccagcctacagccccaccaccacccatgggagccttctgtgagagagagcctctgttccacatggccctggaaaaatgaggattttaaccaaaaattcacacagctgctacttctacaaagacctcaccccagaagccaagatcccctggtcaagagaagctggcctgattatgtggaggagaatcgaggacatttaattgagatcagagacttatttggcccaggcctggatacccaagaacctcgcatagtcatactgcagggggctgctggaattgggaagtcaacactggccaggcaggtgaaggaagcctgggggagaggccagctgtatggggaccgcttccagcatgtcttctacttcagctgcagagagctggcccagtccaaggtggtgagtctcgctgagctcatcggaaaagatgggacagccactccggctcccattagacagatcctgtctaggccagagcggctgctcttcatcctcgatggtgtagatgagccaggatgggtcttgcaggagccgagttctgagctctgtctgcactggagccagccacagccggcggatgcactgctgggcagtttgctggggaaaactatacttcccgaggcatccttcctgatcacggctcggaccacagctctgcagaacctcattccttctttggagcaggcacgttgggtagaggtcctggggttctctgagtccagcaggaaggaatatttctacagatatttcacagatgaaaggcaagcaattagagcctttaggttggtcaaatcaaacaaagagctctgggccctgtgtcttgtgccctgggtgtcctggctggcctgcacttgcctgatgcagcagatgaagcggaaggaaaaactcacactgacttccaagaccaccacaaccctctgtctacattaccttgcccaggctctccaagctcagccattgggaccccagctcagagacctctgctctctggctgctgagggcatctggcaaaaaaagacccttttcagtccagatgacctcaggaagcatgggttagatggggccatcatctccaccttcttgaagatgggtattcttcaagagcaccccatccctctgagctacagcttcattcacctctgtttccaagagttctttgcagcaatgtcctatgtcttggaggatgagaaggggagaggtaaacattctaattgcatcatagatttggaaaagacgctagaagcatatggaatacatggcctgtttggggcatcaaccacacgtttcctattgggcctgttaagtgatgagggggagagagagatggagaacatctttcactgccggctgtctcaggggaggaacctgatgcagtgggtcccgtccctgcagctgctgctgcagccacactctctggagtccctccactgcttgtacgagactcggaacaaaacgttcctgacacaagtgatggcccatttcgaagaaatgggcatgtgtgtagaaacagacatggagctcttagtgtgcactttctgcattaaattcagccgccacgtgaagaagcttcagctgattgagggcaggcagcacagatcaacatggagccccaccatggtagtcctgttcaggtgggtcccagtcacagatgcctattggcagattctcttctccgtcctcaaggtcaccagaaacctgaaggagctggacctaagtggaaactcgctgagccactctgcagtgaagagtctttgtaagaccctgagacgccctcgctgcctcctggagaccctgcggttggctggctgtggcctcacagctgaggactgcaaggaccttgcctttgggctgagagccaaccagaccctgaccgagctggacctgagcttcaatgtgctcacggatgctggagccaaacacctttgccagagactgagacagccgagctgcaagctacagcgactgcagctggtcagctgtggcctcacgtctgactgctgccaggacctggcctctgtgcttagtgccagccccagcctgaaggagctagacctgcagcagaacaacctggatgacgttggcgtgcgactgctctgtgaggggctcaggcatcctgcctgcaaactcatacgcctggggctggaccagacaactctgagtgatgagatgaggcaggaactgagggccctggagcaggagaaacctcagctgctcatcttcagcagacggaaaccaagtgtgatgacccctactgagggcctggatacgggagagatgagtaatagcacatcctcactcaagcggcagagactcggatcagagagggcggcttcccatgttgctcaggctaatctcaaactcctggacgtgagcaagatcttcccaattgctgagattgcagaggaaagctccccagaggtagtaccggtggaactcttgtgcgtgccttctcctgcctctcaaggggacctgcatacgaagcctttggggactgacgatgacttctggggccccacggggcctgtggctactgaggtagttgacaaagaaaagaacttgtaccgagttcacttccctgtagctggctcctaccgctggcccaacacgggtctctgctttgtgatgagagaagcggtgaccgttgagattgaattctgtgtgtgggaccagttcctgggtgagatcaacccacagcacagctggatggtggcagggcctctgctggacatcaaggctgagcctggagctgtggaagctgtgcacctccctcactttgtggctctccaagggggccatgtggacacatccctgttccaaatggcccactttaaagaggaggggatgctcctggagaagccagccagggtggagctgcatcacatagttctggaaaaccccagcttctcccccttgggagtcctcctgaaaatgatccataatgccctgcgcttcattcccgtcacctctgtggtgttgctttaccaccgcgtccatcctgaggaagtcaccttccacctctacctgatcccaagtgactgctccattcggaaggaactggagctctgctatcgaagccctggagaagaccagctgttctcggagttctacgttggccacttgggatcagggatcaggctgcaagtgaaagacaagaaagatgagactctggtgtgggaggccttggtgaaaccaggagatctcatgcctgcaactactctgatccctccagcccgcatagccgtaccttcacctctggatgccccgcagttgctgcactttgtggaccagtatcgagagcagctgatagcccgagtgacatcggtggaggttgtcttggacaaactgcatggacaggtgctgagccaggagcagtacgagagggtgctggctgagaacacgaggcccagccagatgcggaagctgttcagcttgagccagtcctgggaccggaagtgcaaagatggactctaccaagccctgaaggagacccatcctcacctcattatggaactctgggagaagggcagcaaaaagggactcctgccactcagcagctgaagtatcaacaccagcccttgacccttgagtcctggctttggctgacccttctttgggtctcagtttctttctctgcaaacaagttgccatctggtttgccttccagcactaaagtaatggaactttgatgatgcctttgctgggcattatgtgtccatgccagggatgccacagggggccccagtccaggtggcctaacagcatctcagggaatgtccatctggagctggcaagacccctgcagacctcatagagcctcatctggtggccacagcagccaagcctagagccctccggatcccatccaggcgcaaagaggaataggagggacatggaaccatttgcctctggctgtgtcacagggtgagccccaaaattggggttcagcgtgggaggccacgtggattcttggctttgtacaggaagatctacaagagcaagccaacagagtaaagtggaaggaagtttattcagaaaataaaggagtatcacagctcttttagaatttgtctagcaggctttccagtttttaccagaaaacccctataaattaaaaattttttacttaaatttaagaattaaaaaaatacaaaaaagaaaaaatgaaaataaaggaataagaagttacctactccaaaaaaaaaaa

SEQ ID NO: 354417 - DNA, 5442 bp, Homo sapiens
acgtttccttcctgctcttgttgactaggcgctgttcttgcttggctggtgccccagggcctggagaggtctgaagaaacctgggagccagcagcccggggctccactctgggttctgaaagcccattccctgctctgcggctcctcccaccccacctcttctcagccttgcagctcaagggttgatctcaggagtccaggacccaggagagggaagaatctgaggaacacagaacagtgagcgttgcccacaccccatctcccgtcaccacatctcccctcaccctcaccctccctgcctggccctggaccccatcccaggacctccctatcagctgacttcttccagtgtcttgcaggcccctctgggctcctccctcccctggcttttcctaccactccccctctatcggcgtctatctgtaggtgccctgggatttataaaactgggttccgaatgctgaataagagacggtaagagccaaggcaaaggacagcactgttctctgcctgcctgataccctcaccacctgggaacatcccccagacaccctcttaactccgggacagagatggctggcggagcctggggccgcctggcctgttacttggagttcctgaagaaggaggagctgaaggagttccagcttctgctcgccaataaagcgcactccaggagctcttcgggtgagacacccgctcagccagagaagacgagtggcatggaggtggcctcgtacctggtggctcagtatggggagcagcgggcctgggacctagccctccatacctgggagcagatggggctgaggtcactgtgcgcccaagcccaggaaggggcaggccactctccctcattcccctacagcccaagtgaaccccacctggggtctcccagccaacccacctccaccgcagtgctaatgccctggatccatgaattgccggcggggtgcacccagggctcagagagaagggttttgagacagctgcctgacacatctggacgccgctggagagaaatctctgcctcactcctctaccaagctcttccaagctccccagaccatgagtctccaagccaggagtcacccaacgcccccacatccacagcagtgctggggagctggggatccccacctcagcccagcctagcacccagagagcaggaggctcctgggacccaatggcctctggatgaaacgtcaggaatttactacacagaaatcagagaaagagagagagagaaatcagagaaaggcaggcccccatgggcagcggtggtaggaacgcccccacaggcgcacaccagcctacagccccaccaccacccatgggagccttctgtgagagagagcctctgttccacatggccctggaaaaatgaggattttaaccaaaaattcacacagctgctacttctacaaagacctcaccccagaagccaagatcccctggtcaagagaagctggcctgattatgtggaggagaatcgaggacatttaattgagatcagagacttatttggcccaggcctggatacccaagaacctcgcatagtcatactgcagggggctgctggaattgggaagtcaacactggccaggcaggtgaaggaagcctgggggagaggccagctgtatggggaccgcttccagcatgtcttctacttcagctgcagagagctggcccagtccaaggtggtgagtctcgctgagctcatcggaaaagatgggacagccactccggctcccattagacagatcctgtctaggccagagcggctgctcttcatcctcgatggtgtagatgagccaggatgggtcttgcaggagccgagttctgagctctgtctgcactggagccagccacagccggcggatgcactgctgggcagtttgctggggaaaactatacttcccgaggcatccttcctgatcacggctcggaccacagctctgcagaacctcattccttctttggagcaggcacgttgggtagaggtcctggggttctctgagtccagcaggaaggaatatttctacagatatttcacagatgaaaggcaagcaattagagcctttaggttggtcaaatcaaacaaagagctctgggccctgtgtcttgtgccctgggtgtcctggctggcctgcacttgcctgatgcagcagatgaagcggaaggaaaaactcacactgacttccaagaccaccacaaccctctgtctacattaccttgcccaggctctccaagctcagccattgggaccccagctcagagacctctgctctctggctgctgagggcatctggcaaaaaaagacccttttcagtccagatgacctcaggaagcatgggttagatggggccatcatctccaccttcttgaagatgggtattcttcaagagcaccccatccctctgagctacagcttcattcacctctgtttccaagagttctttgcagcaatgtcctatgtcttggaggatgagaaggggagaggtaaacattctaattgcatcatagatttggaaaagacgctagaagcatatggaatacatggcctgtttggggcatcaaccacacgtttcctattgggcctgttaagtgatgagggggagagagagatggagaacatctttcactgccggctgtctcaggggaggaacctgatgcagtgggtcccgtccctgcagctgctgctgcagccacactctctggagtccctccactgcttgtacgagactcggaacaaaacgttcctgacacaagtgatggcccatttcgaagaaatgggcatgtgtgtagaaacagacatggagctcttagtgtgcactttctgcattaaattcagccgccacgtgaagaagcttcagctgattgagggcaggcagcacagatcaacatggagccccaccatggtagtcctgttcaggtgggtcccagtcacagatgcctattggcagattctcttctccgtcctcaaggtcaccagaaacctgaaggagctggacctaagtggaaactcgctgagccactctgcagtgaagagtctttgtaagaccctgagacgccctcgctgcctcctggagaccctgcggttggctggctgtggcctcacagctgaggactgcaaggaccttgcctttgggctgagagccaaccagaccctgaccgagctggacctgagcttcaatgtgctcacggatgctggagccaaacacctttgccagagactgagacagccgagctgcaagctacagcgactgcagctggtcagctgtggcctcacgtctgactgctgccaggacctggcctctgtgcttagtgccagccccagcctgaaggagctagacctgcagcagaacaacctggatgacgttggcgtgcgactgctctgtgaggggctcaggcatcctgcctgcaaactcatacgcctggggctggaccagacaactctgagtgatgagatgaggcaggaactgagggccctggagcaggagaaacctcagctgctcatcttcagcagacggaaaccaagtgtgatgacccctactgagggcctggatacgggagagatgagtaatagcacatcctcactcaagcggcagagactcggatcagagagggcggcttcccatgttgctcaggctaatctcaaactcctggacgtgagcaagatcttcccaattgctgagattgcagaggaaagctccccagaggtagtaccggtggaactcttgtgcgtgccttctcctgcctctcaaggggacctgcatacgaagcctttggggactgacgatgacttctggggccccacggggcctgtggctactgaggtagttgacaaagaaaagaacttgtaccgagttcacttccctgtagctggctcctaccgctggcccaacacgggtctctgctttgtgatgagagaagcggtgaccgttgagattgaattctgtgtgtgggaccagttcctgggtgagatcaacccacagcacagctggatggtggcagggcctctgctggacatcaaggctgagcctggagctgtggaagctgtgcacctccctcactttgtggctctccaagggggccatgtggacacatccctgttccaaatggcccactttaaagaggaggggatgctcctggagaagccagccagggtggagctgcatcacatagttctggaaaaccccagcttctcccccttgggagtcctcctgaaaatgatccataatgccctgcgcttcattcccgtcacctctgtggtgttgctttaccaccgcgtccatcctgaggaagtcaccttccacctctacctgatcccaagtgactgctccattcggaaggaactggagctctgctatcgaagccctggagaagaccagctgttctcggagttctacgttggccacttgggatcagggatcaggctgcaagtgaaagacaagaaagatgagactctggtgtgggaggccttggtgaaaccaggagatctcatgcctgcaactactctgatccctccagcccgcatagccgtaccttcacctctggatgccccgcagttgctgcactttgtggaccagtatcgagagcagctgatagcccgagtgacatcggtggaggttgtcttggacaaactgcatggacaggtgctgagccaggagcagtacgagagggtgctggctgagaacacgaggcccagccagatgcggaagctgttcagcttgagccagtcctgggaccggaagtgcaaagatggactctaccaagccctgaaggagacccatcctcacctcattatggaactctgggagaagggcagcaaaaagggactcctgccactcagcagctgaagtatcaacaccagcccttgacccttgagtcctggctttggctgacccttctttgggtctcagtttctttctctgcaaacaagttgccatctggtttgccttccagcactaaagtaatggaactttgatgatgcctttgctgggcattatgtgtccatgccagggatgccacagggggccccagtccaggtggcctaacagcatctcagggaatgtccatctggagctggcaagacccctgcagacctcatagagcctcatctggtggccacagcagccaagcctagagccctccggatcccatccaggcgcaaagaggaataggagggacatggaaccatttgcctctggctgtgtcacagggtgagccccaaaattggggttcagcgtgggaggccacgtggattcttggctttgtacaggaagatctacaagagcaagccaacagagtaaagtggaaggaagtttattcagaaaataaaggagtatcacagctcttttagaatttgtctagcaggctttccagtttttaccagaaaacccctataaattaaaaattttttacttaaatttaagaatt

SEQ ID NO: 354418 - DNA, 7038 bp, Homo sapiens
acgtttccttcctgctcttgttgactaggcgctgttcttgcttggctggtgccccagggcctggagaggtctgaagaaacctgggagccagcagcccggggctccactctgggttctgaaagcccattccctgctctgcggctcctcccaccccacctcttctcagccttgcagctcaagggttgatctcaggagtccaggacccaggagagggaagaatctgaggaacacagaacagtgagcgttgcccacaccccatctcccgtcaccacatctcccctcaccctcaccctccctgcctggccctggaccccatcccaggacctccctatcagctgacttcttccagtgtcttgcaggcccctctgggctcctccctcccctggcttttcctaccactccccctctatcggcgtctatctgtaggtgccctgggatttataaaactgggttccgaatgctgaataagagacggtaagagccaaggcaaaggacagcactgttctctgcctgcctgataccctcaccacctgggaacatcccccagacaccctcttaactccgggacagagatggctggcggagcctggggccgcctggcctgttacttggagttcctgaagaaggaggagctgaaggagttccagcttctgctcgccaataaagcgcactccaggagctcttcgggtgagacacccgctcagccagagaagacgagtggcatggaggtggcctcgtacctggtggctcagtatggggagcagcgggcctgggacctagccctccatacctgggagcagatggggctgaggtcactgtgcgcccaagcccaggaaggggcaggccactctccctcattcccctacagcccaagtgaaccccacctggggtctcccagccaacccacctccaccgcagtgctaatgccctggatccatgaattgccggcggggtgcacccagggctcagagagaagggttttgagacagctgcctgacacatctggacgccgctggagagaaatctctgcctcactcctctaccaagctcttccaagctccccagaccatgagtctccaagccaggagtcacccaacgcccccacatccacagcagtgctggggagctggggatccccacctcagcccagcctagcacccagagagcaggaggctcctgggacccaatggcctctggatgaaacgtcaggaatttactacacagaaatcagagaaagagagagagagaaatcagagaaaggcaggcccccatgggcagcggtggtaggaacgcccccacaggcgcacaccagcctacagccccaccaccacccatgggagccttctgtgagagagagcctctgttccacatggccctggaaaaatgaggattttaaccaaaaattcacacagctgctacttctacaaagacctcaccccagaagccaagatcccctggtcaagagaagctggcctgattatgtggaggagaatcgaggacatttaattgagatcagagacttatttggcccaggcctggatacccaagaacctcgcatagtcatactgcagggggctgctggaattgggaagtcaacactggccaggcaggtgaaggaagcctgggggagaggccagctgtatggggaccgcttccagcatgtcttctacttcagctgcagagagctggcccagtccaaggtggtgagtctcgctgagctcatcggaaaagatgggacagccactccggctcccattagacagatcctgtctaggccagagcggctgctcttcatcctcgatggtgtagatgagccaggatgggtcttgcaggagccgagttctgagctctgtctgcactggagccagccacagccggcggatgcactgctgggcagtttgctggggaaaactatacttcccgaggcatccttcctgatcacggctcggaccacagctctgcagaacctcattccttctttggagcaggcacgttgggtagaggtcctggggttctctgagtccagcaggaaggaatatttctacagatatttcacagatgaaaggcaagcaattagagcctttaggttggtcaaatcaaacaaagagctctgggccctgtgtcttgtgccctgggtgtcctggctggcctgcacttgcctgatgcagcagatgaagcggaaggaaaaactcacactgacttccaagaccaccacaaccctctgtctacattaccttgcccaggctctccaagctcagccattgggaccccagctcagagacctctgctctctggctgctgagggcatctggcaaaaaaagacccttttcagtccagatgacctcaggaagcatgggttagatggggccatcatctccaccttcttgaagatgggtattcttcaagagcaccccatccctctgagctacagcttcattcacctctgtttccaagagttctttgcagcaatgtcctatgtcttggaggatgagaaggggagaggtaaacattctaattgcatcatagatttggaaaagacgctagaagcatatggaatacatggcctgtttggggcatcaaccacacgtttcctattgggcctgttaagtgatgagggggagagagagatggagaacatctttcactgccggctgtctcaggggaggaacctgatgcagtgggtcccgtccctgcagctgctgctgcagccacactctctggagtccctccactgcttgtacgagactcggaacaaaacgttcctgacacaagtgatggcccatttcgaagaaatgggcatgtgtgtagaaacagacatggagctcttagtgtgcactttctgcattaaattcagccgccacgtgaagaagcttcagctgattgagggcaggcagcacagatcaacatggagccccaccatggtagtcctgttcaggtgggtcccagtcacagatgcctattggcagattctcttctccgtcctcaaggtcaccagaaacctgaaggagctggacctaagtggaaactcgctgagccactctgcagtgaagagtctttgtaagaccctgagacgccctcgctgcctcctggagaccctgcggttggctggctgtggcctcacagctgaggactgcaaggaccttgcctttgggctgagagccaaccagaccctgaccgagctggacctgagcttcaatgtgctcacggatgctggagccaaacacctttgccagagactgagacagccgagctgcaagctacagcgactgcagctggtcagctgtggcctcacgtctgactgctgccaggacctggcctctgtgcttagtgccagccccagcctgaaggagctagacctgcagcagaacaacctggatgacgttggcgtgcgactgctctgtgaggggctcaggcatcctgcctgcaaactcatacgcctggggctggaccagacaactctgagtgatgagatgaggcaggaactgagggccctggagcaggagaaacctcagctgctcatcttcagcagacggaaaccaagtgtgatgacccctactgagggcctggatacgggagagatgagtaatagcacatcctcactcaagcggcagagactcggatcagagagggcggcttcccatgttgctcaggctaatctcaaactcctggacgtgagcaagatcttcccaattgctgagattgcagaggaaagctccccagaggtagtaccggtggaactcttgtgcgtgccttctcctgcctctcaaggggacctgcatacgaagcctttggggactgacgatgacttctggggccccacggggcctgtggctactgaggtagttgacaaagaaaagaacttgtaccgagttcacttccctgtagctggctcctaccgctggcccaacacgggtctctgctttgtgatgagagaagcggtgaccgttgagattgaattctgtgtgtgggaccagttcctgggtgagatcaacccacagcacagctggatggtggcagggcctctgctggacatcaaggctgagcctggagctgtggaagctgtgcacctccctcactttgtggctctccaagggggccatgtggacacatccctgttccaaatggcccactttaaagaggaggggatgctcctggagaagccagccagggtggagctgcatcacatagttctggaaaaccccagcttctcccccttgggagtcctcctgaaaatgatccataatgccctgcgcttcattcccgtcacctctgtggtgttgctttaccaccgcgtccatcctgaggaagtcaccttccacctctacctgatcccaagtgactgctccattcggaaggccatagatgatctagaaatgaaattccagtttgtgcgaatccacaagccacccccgctgaccccactttatatgggctgtcgttacactgtgtctgggtctggttcagggatgctggaaatactccccaaggaactggagctctgctatcgaagccctggagaagaccagctgttctcggagttctacgttggccacttgggatcagggatcaggctgcaagtgaaagacaagaaagatgagactctggtgtgggaggccttggtgaaaccaggagatctcatgcctgcaactactctgatccctccagcccgcataggaaggaacaccagccagccgtggaacctcaggtgcaacagagacgccaggagatactagtgcccagcagcctgcggcagtaccaatgaagccagagagggcttggtggatgacaaggaggcctgagtagaccgcaggtgggtctgagaaatgggcttaggtgaggcaggtctttgaaggatttgttcttaatcatatgcgagatgctcaaaaggctggatgcctgcttttgtgggtgaagagcaagaagagaaaacaggttgtacacatacagatgcagatggagagacagagaaaaaaaaggaagaaggcagagaaatgcaccaattcttgagctgtattatctctggaccttgggattgtgggaggctttattttactactgattttgcctacactgttttctcaatttctagttttctacaaagatgatgtgttagctttttcacgcattaagattaaaatttaaaacagaccacacaataaatatttcttttaaaaggagaaatatgccctggggaagctccccacgcagctgagagcctggctggttgcatttcggcttcttaggtgccaagcctactagtgccccggggtcccagccagcggctcgcgtttcctcccccttgcgccgccagtctggttgccatggagacaaaccttgctgcgcagagactgccgagccgcaggcagcggagctggaacccggcgagccagcctctgcaacaggctgggggcggaaggaggagccaggcgaagcggcgcctcagctgagaggaccggcggaccctgcagaggccccctgcccctctggctccgcccccacccgggtcgctagaaatacagccgtagccccgcccaccgcccactgcgctctgacccagacccggctgacccacctacccgcgatcctgcccatggctgacgggctctttcggcgcagaccctggggtctcgagcagattcgcccggaccccgagtccgaaggcctgtttgacaagcctcccccggaagaccctcccgctgcccgcgggcccaggtcggcgtcggccgcgggcaagaaggctggtcggcgcgcgggcgggagggcgcaggggggccgcgccgggcagcccccgaaggccgcatcgcgccccccgcccaagaaggaggcgcctccactggacgagggctgctatctcgaccattttccgcacctctccatcttcatctacgcagccatcgccttctccatcacctcctgcatctttacctatatccatttacagcttgcctgagtggccagcgcgggacggggtgggcgcaggaccgagcggggagggaaagggaaaacggggctcggcattttgtgttttagaacagcgctgcacccccttcatgtagctttcgatgcttgtttctttccgtctttgttgtcactatctttgtctatcagtacgaaagtacaaagtagctgccggcaatgaaataggggtgctgtttgcacctgcaggttaggggtggaggcgtttagaattttggggtgtgattgagccccgtttataattagaatgcccctggacccctaccactctgtgacgtgggggcacgcgcagggatcccatcattttgtgtttggggagctcagagtgcgcccaatcttggaatctttaagggatgagccagacccagacccgcggccttctagagagggtccggcagggagggtcggcgccctggcccggggtgggccggagccctgtgatgctgcatcgcccccaggaggagccagctgtgccccagagttggcgcggccgagagaggacaagagcgcgcagcaggcgaagctggagggcgggactcgactttgttgtcgctgcccggaggagtcgagactggtacccggaggagctgtctcaccaggagaccacgtcctggaagtgtccgggactcgcgggacctgtggctgcagaccccgccggcacgcaggcccagagctggcgcactcctgaggatgagactctgggggccctagccggggtccacgggagggctgtccttggggactctaggatggcttcgttctggcccggctcacttctggagctgtgagacccaagacaaaaggggctgagggatttctcattgacaagagttcgtgcgggaaaaccacctgatccctagggatttgtcatcttaagactcaaaaggcttaataccaggaaccaccttggcaagatatttacccaccggccatctctgtttactcatgaatgttaaatgttaaaacgcagcgctctaaccctgcatattatttacttgcaaatgtctgtaatctgtaattgtgatgcctctgatggaataaattatctttttcagtctcctc

SEQ ID NO: 354419 - DNA, 4143 bp, Homo sapiens
tttaaaatgtatttttcaagtttcacaaaactaagttcaggtgggtcccagtcacagatgcctattggcagattctcttctccgtcctcaaggtcaccagaaacctgaaggagctggacctaagtggaaactcgctgagccactctgcagtgaagagtctttgtaagaccctgagacgccctcgctgcctcctggagaccctgcggttggctggctgtggcctcacagctgaggactgcaaggaccttgcctttgggctgagagccaaccagaccctgaccgagctggacctgagcttcaatgtgctcacggatgctggagccaaacacctttgccagagactgagacagccgagctgcaagctacagcgactgcagctggtcagctgtggcctcacgtctgactgctgccaggacctggcctctgtgcttagtgccagccccagcctgaaggagctagacctgcagcagaacaacctggatgacgttggcgtgcgactgctctgtgaggggctcaggcatcctgcctgcaaactcatacgcctggggctggaccagacaactctgagtgatgagatgaggcaggaactgagggccctggagcaggagaaacctcagctgctcatcttcagcagacggaaaccaagtgtgatgacccctactgagggcctggatacgggagagatgagtaatagcacatcctcactcaagcggcagagactcggatcagagagggcggcttcccatgttgctcaggctaatctcaaactcctggacgtgagcaagatcttcccaattgctgagattgcagaggaaagctccccagaggtagtaccggtggaactcttgtgcgtgccttctcctgcctctcaaggggacctgcatacgaagcctttggggactgacgatgacttctggggccccacggggcctgtggctactgaggtagttgacaaagaaaagaacttgtaccgagttcacttccctgtagctggctcctaccgctggcccaacacgggtctctgctttgtgatgagagaagcggtgaccgttgagattgaattctgtgtgtgggaccagttcctgggtgagatcaacccacagcacagctggatggtggcagggcctctgctggacatcaaggctgagcctggagctgtggaagctgtgcacctccctcactttgtggctctccaagggggccatgtggacacatccctgttccaaatggcccactttaaagaggaggggatgctcctggagaagccagccagggtggagctgcatcacatagttctggaaaaccccagcttctcccccttgggagtcctcctgaaaatgatccataatgccctgcgcttcattcccgtcacctctgtggtgttgctttaccaccgcgtccatcctgaggaagtcaccttccacctctacctgatcccaagtgactgctccattcggaaggccatagatgatctagaaatgaaattccagtttgtgcgaatccacaagccacccccgctgaccccactttatatgggctgtcgttacactgtgtctgggtctggttcagggatgctggaaatactccccaaggaactggagctctgctatcgaagccctggagaagaccagctgttctcggagttctacgttggccacttgggatcagggatcaggctgcaagtgaaagacaagaaagatgagactctggtgtgggaggccttggtgaaaccaggagatctcatgcctgcaactactctgatccctccagcccgcataggaaggaacaccagccagccgtggaacctcaggtgcaacagagacgccaggagatactagtgcccagcagcctgcggcagtaccaatgaagccagagagggcttggtggatgacaaggaggcctgagtagaccgcaggtgggtctgagaaatgggcttaggtgaggcaggtctttgaaggatttgttcttaatcatatgcgagatgctcaaaaggctggatgcctgcttttgtgggtgaagagcaagaagagaaaacaggttgtacacatacagatgcagatggagagacagagaaaaaaaaggaagaaggcagagaaatgcaccaattcttgagctgtattatctctggaccttgggattgtgggaggctttattttactactgattttgcctacactgttttctcaatttctagttttctacaaagatgatgtgttagctttttcacgcattaagattaaaatttaaaacagaccacacaataaatatttcttttaaaaggagaaatatgccctggggaagctccccacgcagctgagagcctggctggttgcatttcggcttcttaggtgccaagcctactagtgccccggggtcccagccagcggctcgcgtttcctcccccttgcgccgccagtctggttgccatggagacaaaccttgctgcgcagagactgccgagccgcaggcagcggagctggaacccggcgagccagcctctgcaacaggctgggggcggaaggaggagccaggcgaagcggcgcctcagctgagaggaccggcggaccctgcagaggccccctgcccctctggctccgcccccacccgggtcgctagaaatacagccgtagccccgcccaccgcccactgcgctctgacccagacccggctgacccacctacccgcgatcctgcccatggctgacgggctctttcggcgcagaccctggggtctcgagcagattcgcccggaccccgagtccgaaggcctgtttgacaagcctcccccggaagaccctcccgctgcccgcgggcccaggtcggcgtcggccgcgggcaagaaggctggtcggcgcgcgggcgggagggcgcaggggggccgcgccgggcagcccccgaaggccgcatcgcgccccccgcccaagaaggaggcgcctccactggacgagggctgctatctcgaccattttccgcacctctccatcttcatctacgcagccatcgccttctccatcacctcctgcatctttacctatatccatttacagcttgcctgagtggccagcgcgggacggggtgggcgcaggaccgagcggggagggaaagggaaaacggggctcggcattttgtgttttagaacagcgctgcacccccttcatgtagctttcgatgcttgtttctttccgtctttgttgtcactatctttgtctatcagtacgaaagtacaaagtagctgccggcaatgaaataggggtgctgtttgcacctgcaggttaggggtggaggcgtttagaattttggggtgtgattgagccccgtttataattagaatgcccctggacccctaccactctgtgacgtgggggcacgcgcagggatcccatcattttgtgtttggggagctcagagtgcgcccaatcttggaatctttaagggatgagccagacccagacccgcggccttctagagagggtccggcagggagggtcggcgccctggcccggggtgggccggagccctgtgatgctgcatcgcccccaggaggagccagctgtgccccagagttggcgcggccgagagaggacaagagcgcgcagcaggcgaagctggagggcgggactcgactttgttgtcgctgcccggaggagtcgagactggtacccggaggagctgtctcaccaggagaccacgtcctggaagtgtccgggactcgcgggacctgtggctgcagaccccgccggcacgcaggcccagagctggcgcactcctgaggatgagactctgggggccctagccggggtccacgggagggctgtccttggggactctaggatggcttcgttctggcccggctcacttctggagctgtgagacccaagacaaaaggggctgagggatttctcattgacaagagttcgtgcgggaaaaccacctgatccctagggatttgtcatcttaagactcaaaaggcttaataccaggaaccaccttggcaagatatttacccaccggccatctctgtttactcatgaatgttaaatgttaaaacgcagcgctctaaccctgcatattatttacttgcaaatgtctgtaatctgtaattgtgatgcctctgatggaataaattatctttttcagtctcctc

SEQ ID NO: 354420 - DNA, 2144 bp, Homo sapiens
acgtttccttcctgctcttgttgactaggcgctgttcttgcttggctggtgccccagggcctggagaggtctgaagaaacctgggagccagcagcccggggctccactctgggttctgaaagcccattccctgctctgcggctcctcccaccccacctcttctcagccttgcagctcaagggttgatctcaggagtccaggacccaggagagggaagaatctgaggaacacagaacagtgagcgttgcccacaccccatctcccgtcaccacatctcccctcaccctcaccctccctgcctggccctggaccccatcccaggacctccctatcagctgacttcttccagtgtcttgcaggcccctctgggctcctccctcccctggcttttcctaccactcccccttgcgccgccagtctggttgccatggagacaaaccttgctgcgcagagactgccgagccgcaggcagcggagctggaacccggcgagccagcctctgcaacaggctgggggcggaaggaggagccaggcgaagcggcgcctcagctgagaggaccggcggaccctgcagaggccccctgcccctctggctccgcccccacccgggtcgctagaaatacagccgtagccccgcccaccgcccactgcgctctgacccagacccggctgacccacctacccgcgatcctgcccatggctgacgggctctttcggcgcagaccctggggtctcgagcagattcgcccggaccccgagtccgaaggcctgtttgacaagcctcccccggaagaccctcccgctgcccgcgggcccaggtcggcgtcggccgcgggcaagaaggctggtcggcgcgcgggcgggagggcgcaggggggccgcgccgggcagcccccgaaggccgcatcgcgccccccgcccaagaaggaggcgcctccactggacgagggctgctatctcgaccattttccgcacctctccatcttcatctacgcagccatcgccttctccatcacctcctgcatctttacctatatccatttacagcttgcctgagtggccagcgcgggacggggtgggcgcaggaccgagcggggagggaaagggaaaacggggctcggcattttgtgttttagaacagcgctgcacccccttcatgtagctttcgatgcttgtttctttccgtctttgttgtcactatctttgtctatcagtacgaaagtacaaagtagctgccggcaatgaaataggggtgctgtttgcacctgcaggttaggggtggaggcgtttagaattttggggtgtgattgagccccgtttataattagaatgcccctggacccctaccactctgtgacgtgggggcacgcgcagggatcccatcattttgtgtttggggagctcagagtgcgcccaatcttggaatctttaagggatgagccagacccagacccgcggccttctagagagggtccggcagggagggtcggcgccctggcccggggtgggccggagccctgtgatgctgcatcgcccccaggaggagccagctgtgccccagagttggcgcggccgagagaggacaagagcgcgcagcaggcgaagctggagggcgggactcgactttgttgtcgctgcccggaggagtcgagactggtacccggaggagctgtctcaccaggagaccacgtcctggaagtgtccgggactcgcgggacctgtggctgcagaccccgccggcacgcaggcccagagctggcgcactcctgaggatgagactctgggggccctagccggggtccacgggagggctgtccttggggactctaggatggcttcgttctggcccggctcacttctggagctgtgagacccaagacaaaaggggctgagggatttctcattgacaagagttcgtgcgggaaaaccacctgatccctagggatttgtcatcttaagactcaaaaggcttaataccaggaaccaccttggcaagatatttacccaccggccatctctgtttactcatgaatgttaaatgttaaaacgcagcgctctaaccctgcatattatttacttgcaaatgtctgtaatctgtaattgtgatgcctctgatggaataaattatctttttcagtctcctc

SEQ ID NO: 354421 - DNA, 5640 bp, Homo sapiens
acgtttccttcctgctcttgttgactaggcgctgttcttgcttggctggtgccccagggcctggagaggtctgaagaaacctgggagccagcagcccggggctccactctgggttctgaaagcccattccctgctctgcggctcctcccaccccacctcttctcagccttgcagctcaagggttgatctcaggagtccaggacccaggagagggaagaatctgaggaacacagaacagtgagcgttgcccacaccccatctcccgtcaccacatctcccctcaccctcaccctccctgcctggccctggaccccatcccaggacctccctatcagctgacttcttccagtgtcttgcaggcccctctgggctcctccctcccctggcttttcctaccactccccctctatcggcgtctatctgtaggtgccctgggatttataaaactgggttccgaatgctgaataagagacggtaagagccaaggcaaaggacagcactgttctctgcctgcctgataccctcaccacctgggaacatcccccagacaccctcttaactccgggacagagatggctggcggagcctggggccgcctggcctgttacttggagttcctgaagaaggaggagctgaaggagttccagcttctgctcgccaataaagcgcactccaggagctcttcgggtgagacacccgctcagccagagaagacgagtggcatggaggtggcctcgtacctggtggctcagtatggggagcagcgggcctgggacctagccctccatacctgggagcagatggggctgaggtcactgtgcgcccaagcccaggaaggggcaggccactctccctcattcccctacagcccaagtgaaccccacctggggtctcccagccaacccacctccaccgcagtgctaatgccctggatccatgaattgccggcggggtgcacccagggctcagagagaagggttttgagacagctgcctgacacatctggacgccgctggagagaaatctctgcctcactcctctaccaagctcttccaagctccccagaccatgagtctccaagccaggagtcacccaacgcccccacatccacagcagtgctggggagctggggatccccacctcagcccagcctagcacccagagagcaggaggctcctgggacccaatggcctctggatgaaacgtcaggaatttactacacagaaatcagagaaagagagagagagaaatcagagaaaggcaggcccccatgggcagcggtggtaggaacgcccccacaggcgcacaccagcctacagccccaccaccacccatgggagccttctgtgagagagagcctctgttccacatggccctggaaaaatgaggattttaaccaaaaattcacacagctgctacttctacaaagacctcaccccagaagccaagatcccctggtcaagagaagctggcctgattatgtggaggagaatcgaggacatttaattgagatcagagacttatttggcccaggcctggatacccaagaacctcgcatagtcatactgcagggggctgctggaattgggaagtcaacactggccaggcaggtgaaggaagcctgggggagaggccagctgtatggggaccgcttccagcatgtcttctacttcagctgcagagagctggcccagtccaaggtggtgagtctcgctgagctcatcggaaaagatgggacagccactccggctcccattagacagatcctgtctaggccagagcggctgctcttcatcctcgatggtgtagatgagccaggatgggtcttgcaggagccgagttctgagctctgtctgcactggagccagccacagccggcggatgcactgctgggcagtttgctggggaaaactatacttcccgaggcatccttcctgatcacggctcggaccacagctctgcagaacctcattccttctttggagcaggcacgttgggtagaggtcctggggttctctgagtccagcaggaaggaatatttctacagatatttcacagatgaaaggcaagcaattagagcctttaggttggtcaaatcaaacaaagagctctgggccctgtgtcttgtgccctgggtgtcctggctggcctgcacttgcctgatgcagcagatgaagcggaaggaaaaactcacactgacttccaagaccaccacaaccctctgtctacattaccttgcccaggctctccaagctcagccattgggaccccagctcagagacctctgctctctggctgctgagggcatctggcaaaaaaagacccttttcagtccagatgacctcaggaagcatgggttagatggggccatcatctccaccttcttgaagatgggtattcttcaagagcaccccatccctctgagctacagcttcattcacctctgtttccaagagttctttgcagcaatgtcctatgtcttggaggatgagaaggggagaggtaaacattctaattgcatcatagatttggaaaagacgctagaagcatatggaatacatggcctgtttggggcatcaaccacacgtttcctattgggcctgttaagtgatgagggggagagagagatggagaacatctttcactgccggctgtctcaggggaggaacctgatgcagtgggtcccgtccctgcagctgctgctgcagccacactctctggagtccctccactgcttgtacgagactcggaacaaaacgttcctgacacaagtgatggcccatttcgaagaaatgggcatgtgtgtagaaacagacatggagctcttagtgtgcactttctgcattaaattcagccgccacgtgaagaagcttcagctgattgagggcaggcagcacagatcaacatggagccccaccatggtagtcctgttcaggtgggtcccagtcacagatgcctattggcagattctcttctccgtcctcaaggtcaccagaaacctgaaggagctggacctaagtggaaactcgctgagccactctgcagtgaagagtctttgtaagaccctgagacgccctcgctgcctcctggagaccctgcggttggctggctgtggcctcacagctgaggactgcaaggaccttgcctttgggctgagagccaaccagaccctgaccgagctggacctgagcttcaatgtgctcacggatgctggagccaaacacctttgccagagactgagacagccgagctgcaagctacagcgactgcagctggtcagctgtggcctcacgtctgactgctgccaggacctggcctctgtgcttagtgccagccccagcctgaaggagctagacctgcagcagaacaacctggatgacgttggcgtgcgactgctctgtgaggggctcaggcatcctgcctgcaaactcatacgcctggggctggaccagacaactctgagtgatgagatgaggcaggaactgagggccctggagcaggagaaacctcagctgctcatcttcagcagacggaaaccaagtgtgatgacccctactgagggcctggatacgggagagatgagtaatagcacatcctcactcaagcggcagagactcggatcagagagggcggcttcccatgttgctcaggctaatctcaaactcctggacgtgagcaagatcttcccaattgctgagattgcagaggaaagctccccagaggtagtaccggtggaactcttgtgcgtgccttctcctgcctctcaaggggacctgcatacgaagcctttggggactgacgatgacttctggggccccacggggcctgtggctactgaggtagttgacaaagaaaagaacttgtaccgagttcacttccctgtagctggctcctaccgctggcccaacacgggtctctgctttgtgatgagagaagcggtgaccgttgagattgaattctgtgtgtgggaccagttcctgggtgagatcaacccacagcacagctggatggtggcagggcctctgctggacatcaaggctgagcctggagctgtggaagctgtgcacctccctcactttgtggctctccaagggggccatgtggacacatccctgttccaaatggcccactttaaagaggaggggatgctcctggagaagccagccagggtggagctgcatcacatagttctggaaaaccccagcttctcccccttgggagtcctcctgaaaatgatccataatgccctgcgcttcattcccgtcacctctgtggtgttgctttaccaccgcgtccatcctgaggaagtcaccttccacctctacctgatcccaagtgactgctccattcggaaggccatagatgatctagaaatgaaattccagtttgtgcgaatccacaagccacccccgctgaccccactttatatgggctgtcgttacactgtgtctgggtctggttcagggatgctggaaatactccccaaggaactggagctctgctatcgaagccctggagaagaccagctgttctcggagttctacgttggccacttgggatcagggatcaggctgcaagtgaaagacaagaaagatgagactctggtgtgggaggccttggtgaaaccaggagatctcatgcctgcaactactctgatccctccagcccgcatagccgtaccttcacctctggatgccccgcagttgctgcactttgtggaccagtatcgagagcagctgatagcccgagtgacatcggtggaggttgtcttggacaaactgcatggacaggtgctgagccaggagcagtacgagagggtgctggctgagaacacgaggcccagccagatgcggaagctgttcagcttgagccagtcctgggaccggaagtgcaaagatggactctaccaagccctgaaggagacccatcctcacctcattatggaactctgggagaagggcagcaaaaagggactcctgccactcagcagctgaagtatcaacaccagcccttgacccttgagtcctggctttggctgacccttctttgggtctcagtttctttctctgcaaacaagttgccatctggtttgccttccagcactaaagtaatggaactttgatgatgcctttgctgggcattatgtgtccatgccagggatgccacagggggccccagtccaggtggcctaacagcatctcagggaatgtccatctggagctggcaagacccctgcagacctcatagagcctcatctggtggccacagcagccaagcctagagccctccggatcccatccaggcgcaaagaggaataggagggacatggaaccatttgcctctggctgtgtcacagggtgagccccaaaattggggttcagcgtgggaggccacgtggattcttggctttgtacaggaagatctacaagagcaagccaacagagtaaagtggaaggaagtttattcagaaaataaaggagtatcacagctcttttagaatttgtctagcaggctttccagtttttaccagaaaacccctataaattaaaaattttttacttaaatttaagaattaaaaaaatacaaaaaagaaaaaatgaaaataaaggaataagaagttacctactccaaaaaaaaaaa

SEQ ID NO: 354422 - DNA, 5550 bp, Homo sapiens
acgtttccttcctgctcttgttgactaggcgctgttcttgcttggctggtgccccagggcctggagaggtctgaagaaacctgggagccagcagcccggggctccactctgggttctgaaagcccattccctgctctgcggctcctcccaccccacctcttctcagccttgcagctcaagggttgatctcaggagtccaggacccaggagagggaagaatctgaggaacacagaacagtgagcgttgcccacaccccatctcccgtcaccacatctcccctcaccctcaccctccctgcctggccctggaccccatcccaggacctccctatcagctgacttcttccagtgtcttgcaggcccctctgggctcctccctcccctggcttttcctaccactccccctctatcggcgtctatctgtaggtgccctgggatttataaaactgggttccgaatgctgaataagagacggtaagagccaaggcaaaggacagcactgttctctgcctgcctgataccctcaccacctgggaacatcccccagacaccctcttaactccgggacagagatggctggcggagcctggggccgcctggcctgttacttggagttcctgaagaaggaggagctgaaggagttccagcttctgctcgccaataaagcgcactccaggagctcttcgggtgagacacccgctcagccagagaagacgagtggcatggaggtggcctcgtacctggtggctcagtatggggagcagcgggcctgggacctagccctccatacctgggagcagatggggctgaggtcactgtgcgcccaagcccaggaaggggcaggccactctccctcattcccctacagcccaagtgaaccccacctggggtctcccagccaacccacctccaccgcagtgctaatgccctggatccatgaattgccggcggggtgcacccagggctcagagagaagggttttgagacagctgcctgacacatctggacgccgctggagagaaatctctgcctcactcctctaccaagctcttccaagctccccagaccatgagtctccaagccaggagtcacccaacgcccccacatccacagcagtgctggggagctggggatccccacctcagcccagcctagcacccagagagcaggaggctcctgggacccaatggcctctggatgaaacgtcaggaatttactacacagaaatcagagaaagagagagagagaaatcagagaaaggcaggcccccatgggcagcggtggtaggaacgcccccacaggcgcacaccagcctacagccccaccaccacccatgggagccttctgtgagagagagcctctgttccacatggccctggaaaaatgaggattttaaccaaaaattcacacagctgctacttctacaaagacctcaccccagaagccaagatcccctggtcaagagaagctggcctgattatgtggaggagaatcgaggacatttaattgagatcagagacttatttggcccaggcctggatacccaagaacctcgcatagtcatactgcagggggctgctggaattgggaagtcaacactggccaggcaggtgaaggaagcctgggggagaggccagctgtatggggaccgcttccagcatgtcttctacttcagctgcagagagctggcccagtccaaggtggtgagtctcgctgagctcatcggaaaagatgggacagccactccggctcccattagacagatcctgtctaggccagagcggctgctcttcatcctcgatggtgtagatgagccaggatgggtcttgcaggagccgagttctgagctctgtctgcactggagccagccacagccggcggatgcactgctgggcagtttgctggggaaaactatacttcccgaggcatccttcctgatcacggctcggaccacagctctgcagaacctcattccttctttggagcaggcacgttgggtagaggtcctggggttctctgagtccagcaggaaggaatatttctacagatatttcacagatgaaaggcaagcaattagagcctttaggttggtcaaatcaaacaaagagctctgggccctgtgtcttgtgccctgggtgtcctggctggcctgcacttgcctgatgcagcagatgaagcggaaggaaaaactcacactgacttccaagaccaccacaaccctctgtctacattaccttgcccaggctctccaagctcagccattgggaccccagctcagagacctctgctctctggctgctgagggcatctggcaaaaaaagacccttttcagtccagatgacctcaggaagcatgggttagatggggccatcatctccaccttcttgaagatgggtattcttcaagagcaccccatccctctgagctacagcttcattcacctctgtttccaagagttctttgcagcaatgtcctatgtcttggaggatgagaaggggagaggtaaacattctaattgcatcatagatttggaaaagacgctagaagcatatggaatacatggcctgtttggggcatcaaccacacgtttcctattgggcctgttaagtgatgagggggagagagagatggagaacatctttcactgccggctgtctcaggggaggaacctgatgcagtgggtcccgtccctgcagctgctgctgcagccacactctctggagtccctccactgcttgtacgagactcggaacaaaacgttcctgacacaagtgatggcccatttcgaagaaatgggcatgtgtgtagaaacagacatggagctcttagtgtgcactttctgcattaaattcagccgccacgtgaagaagcttcagctgattgagggcaggcagcacagatcaacatggagccccaccatggtagtcctgttcaggtgggtcccagtcacagatgcctattggcagattctcttctccgtcctcaaggtcaccagaaacctgaaggagctggacctaagtggaaactcgctgagccactctgcagtgaagagtctttgtaagaccctgagacgccctcgctgcctcctggagaccctgcggttggctggctgtggcctcacagctgaggactgcaaggaccttgcctttgggctgagagccaaccagaccctgaccgagctggacctgagcttcaatgtgctcacggatgctggagccaaacacctttgccagagactgagacagccgagctgcaagctacagcgactgcagctggtcagctgtggcctcacgtctgactgctgccaggacctggcctctgtgcttagtgccagccccagcctgaaggagctagacctgcagcagaacaacctggatgacgttggcgtgcgactgctctgtgaggggctcaggcatcctgcctgcaaactcatacgcctggggaaaccaagtgtgatgacccctactgagggcctggatacgggagagatgagtaatagcacatcctcactcaagcggcagagactcggatcagagagggcggcttcccatgttgctcaggctaatctcaaactcctggacgtgagcaagatcttcccaattgctgagattgcagaggaaagctccccagaggtagtaccggtggaactcttgtgcgtgccttctcctgcctctcaaggggacctgcatacgaagcctttggggactgacgatgacttctggggccccacggggcctgtggctactgaggtagttgacaaagaaaagaacttgtaccgagttcacttccctgtagctggctcctaccgctggcccaacacgggtctctgctttgtgatgagagaagcggtgaccgttgagattgaattctgtgtgtgggaccagttcctgggtgagatcaacccacagcacagctggatggtggcagggcctctgctggacatcaaggctgagcctggagctgtggaagctgtgcacctccctcactttgtggctctccaagggggccatgtggacacatccctgttccaaatggcccactttaaagaggaggggatgctcctggagaagccagccagggtggagctgcatcacatagttctggaaaaccccagcttctcccccttgggagtcctcctgaaaatgatccataatgccctgcgcttcattcccgtcacctctgtggtgttgctttaccaccgcgtccatcctgaggaagtcaccttccacctctacctgatcccaagtgactgctccattcggaaggccatagatgatctagaaatgaaattccagtttgtgcgaatccacaagccacccccgctgaccccactttatatgggctgtcgttacactgtgtctgggtctggttcagggatgctggaaatactccccaaggaactggagctctgctatcgaagccctggagaagaccagctgttctcggagttctacgttggccacttgggatcagggatcaggctgcaagtgaaagacaagaaagatgagactctggtgtgggaggccttggtgaaaccaggagatctcatgcctgcaactactctgatccctccagcccgcatagccgtaccttcacctctggatgccccgcagttgctgcactttgtggaccagtatcgagagcagctgatagcccgagtgacatcggtggaggttgtcttggacaaactgcatggacaggtgctgagccaggagcagtacgagagggtgctggctgagaacacgaggcccagccagatgcggaagctgttcagcttgagccagtcctgggaccggaagtgcaaagatggactctaccaagccctgaaggagacccatcctcacctcattatggaactctgggagaagggcagcaaaaagggactcctgccactcagcagctgaagtatcaacaccagcccttgacccttgagtcctggctttggctgacccttctttgggtctcagtttctttctctgcaaacaagttgccatctggtttgccttccagcactaaagtaatggaactttgatgatgcctttgctgggcattatgtgtccatgccagggatgccacagggggccccagtccaggtggcctaacagcatctcagggaatgtccatctggagctggcaagacccctgcagacctcatagagcctcatctggtggccacagcagccaagcctagagccctccggatcccatccaggcgcaaagaggaataggagggacatggaaccatttgcctctggctgtgtcacagggtgagccccaaaattggggttcagcgtgggaggccacgtggattcttggctttgtacaggaagatctacaagagcaagccaacagagtaaagtggaaggaagtttattcagaaaataaaggagtatcacagctcttttagaatttgtctagcaggctttccagtttttaccagaaaacccctataaattaaaaattttttacttaaatttaagaattaaaaaaatacaaaaaagaaaaaatgaaaataaaggaataagaagttacctactccaaaaaaaaaaa

SEQ ID NO: 354423 - DNA, 6304 bp, Homo sapiens
acgtttccttcctgctcttgttgactaggcgctgttcttgcttggctggtgccccagggcctggagaggtctgaagaaacctgggagccagcagcccggggctccactctgggttctgaaagcccattccctgctctgcggctcctcccaccccacctcttctcagccttgcagctcaagggttgatctcaggagtccaggacccaggagagggaagaatctgaggaacacagaacagtgagcgttgcccacaccccatctcccgtcaccacatctcccctcaccctcaccctccctgcctggccctggaccccatcccaggacctccctatcagctgacttcttccagtgtcttgcaggcccctctgggctcctccctcccctggcttttcctaccactccccctctatcggcgtctatctgtaggtgccctgggatttataaaactgggttccgaatgctgaataagagacggtaagagccaaggcaaaggacagcactgttctctgcctgcctgataccctcaccacctgggaacatcccccagacaccctcttaactccgggacagagatggctggcggagcctggggccgcctggcctgttacttggagttcctgaagaaggaggagctgaaggagttccagcttctgctcgccaataaagcgcactccaggagctcttcgggtgagacacccgctcagccagagaagacgagtggcatggaggtggcctcgtacctggtggctcagtatggggagcagcgggcctgggacctagccctccatacctgggagcagatggggctgaggtcactgtgcgcccaagcccaggaaggggcaggccactctccctcattcccctacagcccaagtgaaccccacctggggtctcccagccaacccacctccaccgcagtgctaatgccctggatccatgaattgccggcggggtgcacccagggctcagagagaagggttttgagacagctgcctgacacatctggacgccgctggagagaaatctctgcctcactcctctaccaagctcttccaagctccccagaccatgagtctccaagccaggagtcacccaacgcccccacatccacagcagtgctggggagctggggatccccacctcagcccagcctagcacccagagagcaggaggctcctgggacccaatggcctctggatgaaacgtcaggaatttactacacagaaatcagagaaagagagagagagaaatcagagaaaggcaggcccccatgggcagcggtggtaggaacgcccccacaggcgcacaccagcctacagccccaccaccacccatgggagccttctgtgagagagagcctctgttccacatggccctggaaaaatgaggattttaaccaaaaattcacacagctgctacttctacaaagacctcaccccagaagccaagatcccctggtcaagagaagctggcctgattatgtggaggagaatcgaggacatttaattgagatcagagacttatttggcccaggcctggatacccaagaacctcgcatagtcatactgcagggggctgctggaattgggaagtcaacactggccaggcaggtgaaggaagcctgggggagaggccagctgtatggggaccgcttccagcatgtcttctacttcagctgcagagagctggcccagtccaaggtggtgagtctcgctgagctcatcggaaaagatgggacagccactccggctcccattagacagatcctgtctaggccagagcggctgctcttcatcctcgatggtgtagatgagccaggatgggtcttgcaggagccgagttctgagctctgtctgcactggagccagccacagccggcggatgcactgctgggcagtttgctggggaaaactatacttcccgaggcatccttcctgatcacggctcggaccacagctctgcagaacctcattccttctttggagcaggcacgttgggtagaggtcctggggttctctgagtccagcaggaaggaatatttctacagatatttcacagatgaaaggcaagcaattagagcctttaggttggtcaaatcaaacaaagagctctgggccctgtgtcttgtgccctgggtgtcctggctggcctgcacttgcctgatgcagcagatgaagcggaaggaaaaactcacactgacttccaagaccaccacaaccctctgtctacattaccttgcccaggctctccaagctcagccattgggaccccagctcagagacctctgctctctggctgctgagggcatctggcaaaaaaagacccttttcagtccagatgacctcaggaagcatgggttagatggggccatcatctccaccttcttgaagatgggtattcttcaagagcaccccatccctctgagctacagcttcattcacctctgtttccaagagttctttgcagcaatgtcctatgtcttggaggatgagaaggggagaggtaaacattctaattgcatcatagatttggaaaagacgctagaagcatatggaatacatggcctgtttggggcatcaaccacacgtttcctattgggcctgttaagtgatgagggggagagagagatggagaacatctttcactgccggctgtctcaggggaggaacctgatgcagtgggtcccgtccctgcagctgctgctgcagccacactctctggagtccctccactgcttgtacgagactcggaacaaaacgttcctgacacaagtgatggcccatttcgaagaaatgggcatgtgtgtagaaacagacatggagctcttagtgtgcactttctgcattaaattcagccgccacgtgaagaagcttcagctgattgagggcaggcagcacagatcaacatggagccccaccatggtagtcctgttcaggtgggtcccagtcacagatgcctattggcagattctcttctccgtcctcaaggtcaccagaaacctgaaggagctggacctaagtggaaactcgctgagccactctgcagtgaagagtctttgtaagaccctgagacgccctcgctgcctcctggagaccctgcggttggctggctgtggcctcacagctgaggactgcaaggaccttgcctttgggctgagagccaaccagaccctgaccgagctggacctgagcttcaatgtgctcacggatgctggagccaaacacctttgccagagactgagacagccgagctgcaagctacagcgactgcagctggtcagctgtggcctcacgtctgactgctgccaggacctggcctctgtgcttagtgccagccccagcctgaaggagctagacctgcagcagaacaacctggatgacgttggcgtgcgactgctctgtgaggggctcaggcatcctgcctgcaaactcatacgcctggggctggaccagacaactctgagtgatgagatgaggcaggaactgagggccctggagcaggagaaacctcagctgctcatcttcagcagacggaaaccaagtgtgatgacccctactgagggcctggatacgggagagatgagtaatagcacatcctcactcaagcggcagagactcggatcagagagggcggcttcccatgttgctcaggctaatctcaaactcctggacgtgagcaagatcttcccaattgctgagattgcagaggaaagctccccagaggtagtaccggtggaactcttgtgcgtgccttctcctgcctctcaaggggacctgcatacgaagcctttggggactgacgatgacttctggggccccacggggcctgtggctactgaggtagttgacaaagaaaagaacttgtaccgagttcacttccctgtagctggctcctaccgctggcccaacacgggtctctgctttgtgatgagagaagcggtgaccgttgagattgaattctgtgtgtgggaccagttcctgggtgagatcaacccacagcacagctggatggtggcagggcctctgctggacatcaaggctgagcctggagctgtggaagctgtgcacctccctcactttgtggctctccaagggggccatgtggacacatccctgttccaaatggcccactttaaagaggaggggatgctcctggagaagccagccagggtggagctgcatcacatagttctggaaaaccccagcttctcccccttgggagtcctcctgaaaatgatccataatgccctgcgcttcattcccgtcacctctgtggtgttgctttaccaccgcgtccatcctgaggaagtcaccttccacctctacctgatcccaagtgactgctccattcggaaggccatagatgatctagaaatgaaattccagtttgtgcgaatccacaagccacccccgctgaccccactttatatgggctgtcgttacactgtgtctgggtctggttcagggatgctggaaatactccccaaggaactggagctctgctatcgaagccctggagaagaccagctgttctcggagttctacgttggccacttgggatcagggatcaggctgcaagtgaaagacaagaaagatgagactctggtgtgggaggccttggtgaaaccaggaaggaacaccagccagccgtggaacctcaggtgcaacagagacgccaggagatactagtgcccagcagcctgcggcagtaccaatgaagccagagagggcttggtggatgacaaggaggcctgagtagaccgcaggtgggtctgagaaatgggcttaggtgaggcaggtctttgaaggatttgttcttaatcatatgcgagatgctcaaaaggctggatgcctgcttttgtgggtgaagagcaagaagagaaaacaggttgtacacatacagatgcagatggagagacagagaaaaaaaaggaagaaggcagagaaatgcaccaattcttgagctgtattatctctggaccttgggattgtgggaggctttattttactactgattttgcctacactgttttctcaatttctagttttctacaaagatgatgtgttagctttttcacgcattaagattaaaatttaaaacagaccacacaataaatatttcttttaaaaggagaaatatgccctggggaagctccccacgcagctgagagcctggctggttgcatttcggcttcttaggtgccaagcctactagtgccccggggtcccagccagcggctcgcgtttcctcccccttgcgccgccagtctggttgccatggagacaaaccttgctgcgcagagactgccgagccgcaggcagcggagctggaacccggcgagccagcctctgcaacaggctgggggcggaaggaggagccaggcgaagcggcgcctcagctgagaggaccggcggaccctgcagaggccccctgcccctctggctccgcccccacccgggtcgctagaaatacagccgtagccccgcccaccgcccactgcgctctgacccagacccggctgacccacctacccgcgatcctgcccatggctgacgggctctttcggcgcagaccctggggtctcgagcagattcgcccggaccccgagtccgaaggcctgtttgacaagcggtccggcagggagggtcggcgccctggcccggggtgggccggagccctgtgatgctgcatcgcccccaggaggagccagctgtgccccagagttggcgcggccgagagaggacaagagcgcgcagcaggcgaagctggagggcgggactcgactttgttgtcgctgcccggaggagtcgagactggtacccggaggagctgtctcaccaggagaccacgtcctggaagtgtccgggactcgcgggacctgtggctgcagaccccgccggcacgcaggcccagagctggcgcactcctgaggatgagactctgggggccctagccggggtccacgggagggctgtccttggggactctaggatggcttcgttctggcccggctcacttctggagctgtgagacccaagacaaaaggggctgagggatttctcattgacaagagttcgtgcgggaaaaccacctgatccctagggatttgtcatcttaagactcaaaaggcttaataccaggaaccaccttggcaagatatttacccaccggccatctctgtttactcatgaatgttaaatgttaaaacgcagcgctctaaccctgcatattatttacttgcaaatgtctgtaatctgtaattgtgatgcctctgatggaataaattatctttttcagtctcctc

SEQ ID NO: 354424 - DNA, 6189 bp, Homo sapiens
acgtttccttcctgctcttgttgactaggcgctgttcttgcttggctggtgccccagggcctggagaggtctgaagaaacctgggagccagcagcccggggctccactctgggttctgaaagcccattccctgctctgcggctcctcccaccccacctcttctcagccttgcagctcaagggttgatctcaggagtccaggacccaggagagggaagaatctgaggaacacagaacagtgagcgttgcccacaccccatctcccgtcaccacatctcccctcaccctcaccctccctgcctggccctggaccccatcccaggacctccctatcagctgacttcttccagtgtcttgcaggcccctctgggctcctccctcccctggcttttcctaccactccccctctatcggcgtctatctgtaggtgccctgggatttataaaactgggttccgaatgctgaataagagacggtaagagccaaggcaaaggacagcactgttctctgcctgcctgataccctcaccacctgggaacatcccccagacaccctcttaactccgggacagagatggctggcggagcctggggccgcctggcctgttacttggagttcctgaagaaggaggagctgaaggagttccagcttctgctcgccaataaagcgcactccaggagctcttcgggtgagacacccgctcagccagagaagacgagtggcatggaggtggcctcgtacctggtggctcagtatggggagcagcgggcctgggacctagccctccatacctgggagcagatggggctgaggtcactgtgcgcccaagcccaggaaggggcaggccactctccctcattcccctacagcccaagtgaaccccacctggggtctcccagccaacccacctccaccgcagtgctaatgccctggatccatgaattgccggcggggtgcacccagggctcagagagaagggttttgagacagctgcctgacacatctggacgccgctggagagaaatctctgcctcactcctctaccaagctcttccaagctccccagaccatgagtctccaagccaggagtcacccaacgcccccacatccacagcagtgctggggagctggggatccccacctcagcccagcctagcacccagagagcaggaggctcctgggacccaatggcctctggatgaaacgtcaggaatttactacacagaaatcagagaaagagagagagagaaatcagagaaaggcaggcccccatgggcagcggtggtaggaacgcccccacaggcgcacaccagcctacagccccaccaccacccatgggagccttctgtgagagagagcctctgttccacatggccctggaaaaatgaggattttaaccaaaaattcacacagctgctacttctacaaagacctcaccccagaagccaagatcccctggtcaagagaagctggcctgattatgtggaggagaatcgaggacatttaattgagatcagagacttatttggcccaggcctggatacccaagaacctcgcatagtcatactgcagggggctgctggaattgggaagtcaacactggccaggcaggtgaaggaagcctgggggagaggccagctgtatggggaccgcttccagcatgtcttctacttcagctgcagagagctggcccagtccaaggtggtgagtctcgctgagctcatcggaaaagatgggacagccactccggctcccattagacagatcctgtctaggccagagcggctgctcttcatcctcgatggtgtagatgagccaggatgggtcttgcaggagccgagttctgagctctgtctgcactggagccagccacagccggcggatgcactgctgggcagtttgctggggaaaactatacttcccgaggcatccttcctgatcacggctcggaccacagctctgcagaacctcattccttctttggagcaggcacgttgggtagaggtcctggggttctctgagtccagcaggaaggaatatttctacagatatttcacagatgaaaggcaagcaattagagcctttaggttggtcaaatcaaacaaagagctctgggccctgtgtcttgtgccctgggtgtcctggctggcctgcacttgcctgatgcagcagatgaagcggaaggaaaaactcacactgacttccaagaccaccacaaccctctgtctacattaccttgcccaggctctccaagctcagccattgggaccccagctcagagacctctgctctctggctgctgagggcatctggcaaaaaaagacccttttcagtccagatgacctcaggaagcatgggttagatggggccatcatctccaccttcttgaagatgggtattcttcaagagcaccccatccctctgagctacagcttcattcacctctgtttccaagagttctttgcagcaatgtcctatgtcttggaggatgagaaggggagaggtaaacattctaattgcatcatagatttggaaaagacgctagaagcatatggaatacatggcctgtttggggcatcaaccacacgtttcctattgggcctgttaagtgatgagggggagagagagatggagaacatctttcactgccggctgtctcaggggaggaacctgatgcagtgggtcccgtccctgcagctgctgctgcagccacactctctggagtccctccactgcttgtacgagactcggaacaaaacgttcctgacacaagtgatggcccatttcgaagaaatgggcatgtgtgtagaaacagacatggagctcttagtgtgcactttctgcattaaattcagccgccacgtgaagaagcttcagctgattgagggcaggcagcacagatcaacatggagccccaccatggtagtcctgttcaggtgggtcccagtcacagatgcctattggcagattctcttctccgtcctcaaggtcaccagaaacctgaaggagctggacctaagtggaaactcgctgagccactctgcagtgaagagtctttgtaagaccctgagacgccctcgctgcctcctggagaccctgcggttggctggctgtggcctcacagctgaggactgcaaggaccttgcctttgggctgagagccaaccagaccctgaccgagctggacctgagcttcaatgtgctcacggatgctggagccaaacacctttgccagagactgagacagccgagctgcaagctacagcgactgcagctggtcagctgtggcctcacgtctgactgctgccaggacctggcctctgtgcttagtgccagccccagcctgaaggagctagacctgcagcagaacaacctggatgacgttggcgtgcgactgctctgtgaggggctcaggcatcctgcctgcaaactcatacgcctggggctggaccagacaactctgagtgatgagatgaggcaggaactgagggccctggagcaggagaaacctcagctgctcatcttcagcagacggaaaccaagtgtgatgacccctactgagggcctggatacgggagagatgagtaatagcacatcctcactcaagcggcagagactcggatcagagagggcggcttcccatgttgctcaggctaatctcaaactcctggacgtgagcaagatcttcccaattgctgagattgcagaggaaagctccccagaggtagtaccggtggaactcttgtgcgtgccttctcctgcctctcaaggggacctgcatacgaagcctttggggactgacgatgacttctggggccccacggggcctgtggctactgaggtagttgacaaagaaaagaacttgtaccgagttcacttccctgtagctggctcctaccgctggcccaacacgggtctctgctttgtgatgagagaagcggtgaccgttgagattgaattctgtgtgtgggaccagttcctgggtgagatcaacccacagcacagctggatggtggcagggcctctgctggacatcaaggctgagcctggagctgtggaagctgtgcacctccctcactttgtggctctccaagggggccatgtggacacatccctgttccaaatggcccactttaaagaggaggggatgctcctggagaagccagccagggtggagctgcatcacatagttctggaaaaccccagcttctcccccttgggagtcctcctgaaaatgatccataatgccctgcgcttcattcccgtcacctctgtggtgttgctttaccaccgcgtccatcctgaggaagtcaccttccacctctacctgatcccaagtgactgctccattcggaaggccatagatgatctagaaatgaaattccagtttgtgcgaatccacaagccacccccgctgaccccactttatatgggctgtcgttacactgtgtctgggtctggttcagggatgctggaaatactccccaaggaactggagctctgctatcgaagccctggagaagaccagctgttctcggagttctacgttggccacttgggatcagggatcaggctgcaagtgaaagacaagaaagatgagactctggtgtgggaggccttggtgaaaccaggaaggaacaccagccagccgtggaacctcaggtgcaacagagacgccaggagatactagtgcccagcagcctgcggcagtaccaatgaagccagagagggcttggtggatgacaaggaggcctgagtagaccgcaggtgggtctgagaaatgggcttaggtgaggcaggtctttgaaggatttgttcttaatcatatgcgagatgctcaaaaggctggatgcctgcttttgtgggtgaagagcaagaagagaaaacaggttgtacacatacagatgcagatggagagacagagaaaaaaaaggaagaaggcagagaaatgcaccaattcttgagctgtattatctctggaccttgggattgtgggaggctttattttactactgattttgcctacactgttttctcaatttctagttttctacaaagatgatgtgttagctttttcacgcattaagattaaaatttaaaacagaccacacaataaatatttcttttaaaaggagaaatatgccctggggaagctccccacgcagctgagagcctggctggttgcatttcggcttcttaggtgccaagcctactagtgccccggggtcccagccagcggctcgcgtttcctcccccttgcgccgccagtctggttgccatggagacaaaccttgctgcgcagagactgccgagccgcaggcagcggagctggaacccggcgagccagcctctgcaacaggctgggggcggaaggaggagccaggcgaagcggcgcctcagctgagaggaccggcggaccctgcagaggccccctgcccctctggctccgcccccacccgggtcgctagaaatacagccgtagccccgcccaccgcccactgcgctctgacccagacccggctgacccacctacccgcgatcctgcccatggctgacgggctctttcggcgcagaccctggggtctcgagcagattcgcccggaccccgagtccgaaggcctgtttgacaagcctcccccggaagaccctcccgctgcccgcgggcccagactttgttgtcgctgcccggaggagtcgagactggtacccggaggagctgtctcaccaggagaccacgtcctggaagtgtccgggactcgcgggacctgtggctgcagaccccgccggcacgcaggcccagagctggcgcactcctgaggatgagactctgggggccctagccggggtccacgggagggctgtccttggggactctaggatggcttcgttctggcccggctcacttctggagctgtgagacccaagacaaaaggggctgagggatttctcattgacaagagttcgtgcgggaaaaccacctgatccctagggatttgtcatcttaagactcaaaaggcttaataccaggaaccaccttggcaagatatttacccaccggccatctctgtttactcatgaatgttaaatgttaaaacgcagcgctctaaccctgcatattatttacttgcaaatgtctgtaatctgtaattgtgatgcctctgatggaataaattatctttttcagtctcctc

SEQ ID NO: 354425 - DNA, 529 bp, Homo sapiens
tggtgctgcggtcgtctagaggatcccttaaggcgaatctggtacccggaggagctgtctcaccaggagaccacgtcctggaagtgtccgggactcgcgggacctgtggctgcagaccccgccggcacgcaggcccagagctggcgcactcctgaggatgagactctgggggccctagccggggtccacgggagggctgtccttggggactctaggatggcttcgttctggcccggctcacttctggagctgtgagacccaagacaaaaggggctgagggatttctcattgacaagagttcgtgcgggaaaaccacctgatccctagggatttgtcatcttaagactcaaaaggcttaataccaggaaccaccttggcaagatatttacccaccggccatctctgtttactcatgaatgttaaatgttaaaacgcagcgctctaaccctgcatattatttacttgcaaatgtctgtaatctgtaattgtgatgcctctgatggaataaattatctttttcagtctcctc

SEQ ID NO: 354426 - DNA, 283 bp, Homo sapiens
tgagaaagggtaggtgctggcatcctgaggggttccgtggctgcaagaggaaagtgaaaatctctcaggttaccgcaagccaggaaagtttgtatcttctctgcatgtcatcccagaccctcaaaaggccacagatgctgagaaggaagatcagaccctagttaccctgaagagcgagcccttaggacaatgacctgggctggcgtgtatctttcctgcaggctggtcagctgtggcctcacgtctgactgctgccaggacctggcctctgtgcttagtgcca

SEQ ID NO: 354427 - DNA, 384 bp, Homo sapiens
cggccgctgcctcagaaggtgacaggtcccaggattctgggccctggggacctggggaccacatgggggatcccaggaggacccggctccctttgtgctttcaggctggaccagacaactctgagtgatgagatgaggcaggaactgagggccctggagcaggagaaacctcagctgctcatcttcagcagacggtaaggggggacccagaactccctctggctgacccaggcccagggctgagcaggagacagggaaagagccatggggtgagagacaaacacagccagggagaaacccagacaccacagcagccagagtgaggtgcacttgtcagtgcaagtagaatcaaatccccccttgcttcaactcttaacgttagac

SEQ ID NO: 354428 - DNA, 5175 bp, Homo sapiens
acgtttccttcctgctcttgttgactaggcgctgttcttgcttggctggtgccccagggcctggagaggtctgaagaaacctgggagccagcagcccggggctccactctgggttctgaaagcccattccctgctctgcggctcctcccaccccacctcttctcagccttgcagctcaagggttgatctcaggagtccaggacccaggagagggaagaatctgaggaacacagaacaagatggctggcggagcctggggccgcctggcctgttacttggagttcctgaagaaggaggagctgaaggagttccagcttctgctcgccaataaagcgcactccaggagctcttcgggtgagacacccgctcagccagagaagacgagtggcatggaggtggcctcgtacctggtggctcagtatggggagcagcgggcctgggacctagccctccatacctgggagcagatggggctgaggtcactgtgcgcccaagcccaggaaggggcaggccactctccctcattcccctacagcccaagtgaaccccacctggggtctcccagccaacccacctccaccgcagtgctaatgccctggatccatgaattgccggcggggtgcacccagggctcagagagaagggttttgagacagctgcctgacacatctggacgccgctggagagaaatctctgcctcactcctctaccaagctcttccaagctccccagaccatgagtctccaagccaggagtcacccaacgcccccacatccacagcagtgctggggagctggggatccccacctcagcccagcctagcacccagagagcaggaggctcctgggacccaatggcctctggatgaaacgtcaggaatttactacacagaaatcagagaaagagagagagagaaatcagagaaaggcaggcccccatgggcagcggtggtaggaacgcccccacaggcgcacaccagcctacagccccaccaccacccatgggagccttctgtgagagagagcctctgttccacatggccctggaaaaatgaggattttaaccaaaaattcacacagctgctacttctacaaagacctcaccccagaagccaagatcccctggtcaagagaagctggcctgattatgtggaggagaatcgaggacatttaattgagatcagagacttatttggcccaggcctggatacccaagaacctcgcatagtcatactgcagggggctgctggaattgggaagtcaacactggccaggcaggtgaaggaagcctgggggagaggccagctgtatggggaccgcttccagcatgtcttctacttcagctgcagagagctggcccagtccaaggtggtgagtctcgctgagctcatcggaaaagatgggacagccactccggctcccattagacagatcctgtctaggccagagcggctgctcttcatcctcgatggtgtagatgagccaggatgggtcttgcaggagccgagttctgagctctgtctgcactggagccagccacagccggcggatgcactgctgggcagtttgctggggaaaactatacttcccgaggcatccttcctgatcacggctcggaccacagctctgcagaacctcattccttctttggagcaggcacgttgggtagaggtcctggggttctctgagtccagcaggaaggaatatttctacagatatttcacagatgaaaggcaagcaattagagcctttaggttggtcaaatcaaacaaagagctctgggccctgtgtcttgtgccctgggtgtcctggctggcctgcacttgcctgatgcagcagatgaagcggaaggaaaaactcacactgacttccaagaccaccacaaccctctgtctacattaccttgcccaggctctccaagctcagccattgggaccccagctcagagacctctgctctctggctgctgagggcatctggcaaaaaaagacccttttcagtccagatgacctcaggaagcatgggttagatggggccatcatctccaccttcttgaagatgggtattcttcaagagcaccccatccctctgagctacagcttcattcacctctgtttccaagagttctttgcagcaatgtcctatgtcttggaggatgagaaggggagaggtaaacattctaattgcatcatagatttggaaaagacgctagaagcatatggaatacatggcctgtttggggcatcaaccacacgtttcctattgggcctgttaagtgatgagggggagagagagatggagaacatctttcactgccggctgtctcaggggaggaacctgatgcagtgggtcccgtccctgcagctgctgctgcagccacactctctggagtccctccactgcttgtacgagactcggaacaaaacgttcctgacacaagtgatggcccatttcgaagaaatgggcatgtgtgtagaaacagacatggagctcttagtgtgcactttctgcattaaattcagccgccacgtgaagaagcttcagctgattgagggcaggcagcacagatcaacatggagccccaccatggtagtcctgttcaggtgggtcccagtcacagatgcctattggcagattctcttctccgtcctcaaggtcaccagaaacctgaaggagctggacctaagtggaaactcgctgagccactctgcagtgaagagtctttgtaagaccctgagacgccctcgctgcctcctggagaccctgcggttggctggctgtggcctcacagctgaggactgcaaggaccttgcctttgggctgagagccaaccagaccctgaccgagctggacctgagcttcaatgtgctcacggatgctggagccaaacacctttgccagagactgagacagccgagctgcaagctacagcgactgcagctggtcagctgtggcctcacgtctgactgctgccaggacctggcctctgtgcttagtgccagccccagcctgaaggagctagacctgcagcagaacaacctggatgacgttggcgtgcgactgctctgtgaggggctcaggcatcctgcctgcaaactcatacgcctggggctggaccagacaactctgagtgatgagatgaggcaggaactgagggccctggagcaggagaaacctcagctgctcatcttcagcagacggaaaccaagtgtgatgacccctactgagggcctggatacgggagagatgagtaatagcacatcctcactcaagcggcagagactcggatcagagagggcggcttcccatgttgctcaggctaatctcaaactcctggacgtgagcaagatcttcccaattgctgagattgcagaggaaagctccccagaggtagtaccggtggaactcttgtgcgtgccttctcctgcctctcaaggggacctgcatacgaagcctttggggactgacgatgacttctggggccccacggggcctgtggctactgaggtagttgacaaagaaaagaacttgtaccgagttcacttccctgtagctggctcctaccgctggcccaacacgggtctctgctttgtgatgagagaagcggtgaccgttgagattgaattctgtgtgtgggaccagttcctgggtgagatcaacccacagcacagctggatggtggcagggcctctgctggacatcaaggctgagcctggagctgtggaagctgtgcacctccctcactttgtggctctccaagggggccatgtggacacatccctgttccaaatggcccactttaaagaggaggggatgctcctggagaagccagccagggtggagctgcatcacatagttctggaaaaccccagcttctcccccttgggagtcctcctgaaaatgatccataatgccctgcgcttcattcccgtcacctctgtggtgttgctttaccaccgcgtccatcctgaggaagtcaccttccacctctacctgatcccaagtgactgctccattcggaaggaactggagctctgctatcgaagccctggagaagaccagctgttctcggagttctacgttggccacttgggatcagggatcaggctgcaagtgaaagacaagaaagatgagactctggtgtgggaggccttggtgaaaccaggagatctcatgcctgcaactactctgatccctccagcccgcatagccgtaccttcacctctggatgccccgcagttgctgcactttgtggaccagtatcgagagcagctgatagcccgagtgacatcggtggaggttgtcttggacaaactgcatggacaggtgctgagccaggagcagtacgagagggtgctggctgagaacacgaggcccagccagatgcggaagctgttcagcttgagccagtcctgggaccggaagtgcaaagatggactctaccaagccctgaaggagacccatcctcacctcattatggaactctgggagaagggcagcaaaaagggactcctgccactcagcagctgaagtatcaacaccagcccttgacccttgagtcctggctttggctgacccttctttgggtctcagtttctttctctgcaaacaagttgccatctggtttgccttccagcactaaagtaatggaactttgatgatgcctttgctgggcattatgtgtccatgccagggatgccacagggggccccagtccaggtggcctaacagcatctcagggaatgtccatctggagctggcaagacccctgcagacctcatagagcctcatctggtggccacagcagccaagcctagagccctccggatcccatccaggcgcaaagaggaataggagggacatggaaccatttgcctctggctgtgtcacagggtgagccccaaaattggggttcagcgtgggaggccacgtggattcttggctttgtacaggaagatctacaagagcaagccaacagagtaaagtggaaggaagtttattcagaaaataaaggagtatcacagctcttttagaatttgtctagcaggctttccagtttttaccagaaaacccctataaattaaaaattttttacttaaatttaagaattaaaaaaatacaaaaaagaaaaaatgaaaataaaggaataagaagttacctactccaaaaaaaaaaa

SEQ ID NO: 354429 - DNA, 6993 bp, Homo sapiens
acgtttccttcctgctcttgttgactaggcgctgttcttgcttggctggtgccccagggcctggagaggtctgaagaaacctgggagccagcagcccggggctccactctgggttctgaaagcccattccctgctctgcggctcctcccaccccacctcttctcagccttgcagctcaagggttgatctcaggagtccaggacccaggagagggaagaatctgaggaacacagaacagtgagcgttgcccacaccccatctcccgtcaccacatctcccctcaccctcaccctccctgcctggccctggaccccatcccaggacctccctatcagctgacttcttccagtgtcttgcaggcccctctgggctcctccctcccctggcttttcctaccactccccctctatcggcgtctatctgtaggtgccctgggatttataaaactgggttccgaatgctgaataagagacggtaagagccaaggcaaaggacagcactgttctctgcctgcctgataccctcaccacctgggaacatcccccagacaccctcttaactccgggacagagatggctggcggagcctggggccgcctggcctgttacttggagttcctgaagaaggaggagctgaaggagttccagcttctgctcgccaataaagcgcactccaggagctcttcgggtgagacacccgctcagccagagaagacgagtggcatggaggtggcctcgtacctggtggctcagtatggggagcagcgggcctgggacctagccctccatacctgggagcagatggggctgaggtcactgtgcgcccaagcccaggaaggggcaggccactctccctcattcccctacagcccaagtgaaccccacctggggtctcccagccaacccacctccaccgcagtgctaatgccctggatccatgaattgccggcggggtgcacccagggctcagagagaagggttttgagacagctgcctgacacatctggacgccgctggagagaaatctctgcctcactcctctaccaagctcttccaagctccccagaccatgagtctccaagccaggagtcacccaacgcccccacatccacagcagtgctggggagctggggatccccacctcagcccagcctagcacccagagagcaggaggctcctgggacccaatggcctctggatgaaacgtcaggaatttactacacagaaatcagagaaagagagagagagaaatcagagaaaggcaggcccccatgggcagcggtggtaggaacgcccccacaggcgcacaccagcctacagccccaccaccacccatgggagccttctgtgagagagagcctctgttccacatggccctggaaaaatgaggattttaaccaaaaattcacacagctgctacttctacaaagacctcaccccagaagccaagatcccctggtcaagagaagctggcctgattatgtggaggagaatcgaggacatttaattgagatcagagacttatttggcccaggcctggatacccaagaacctcgcatagtcatactgcagggggctgctggaattgggaagtcaacactggccaggcaggtgaaggaagcctgggggagaggccagctgtatggggaccgcttccagcatgtcttctacttcagctgcagagagctggcccagtccaaggtggtgagtctcgctgagctcatcggaaaagatgggacagccactccggctcccattagacagatcctgtctaggccagagcggctgctcttcatcctcgatggtgtagatgagccaggatgggtcttgcaggagccgagttctgagctctgtctgcactggagccagccacagccggcggatgcactgctgggcagtttgctggggaaaactatacttcccgaggcatccttcctgatcacggctcggaccacagctctgcagaacctcattccttctttggagcaggcacgttgggtagaggtcctggggttctctgagtccagcaggaaggaatatttctacagatatttcacagatgaaaggcaagcaattagagcctttaggttggtcaaatcaaacaaagagctctgggccctgtgtcttgtgccctgggtgtcctggctggcctgcacttgcctgatgcagcagatgaagcggaaggaaaaactcacactgacttccaagaccaccacaaccctctgtctacattaccttgcccaggctctccaagctcagccattgggaccccagctcagagacctctgctctctggctgctgagggcatctggcaaaaaaagacccttttcagtccagatgacctcaggaagcatgggttagatggggccatcatctccaccttcttgaagatgggtattcttcaagagcaccccatccctctgagctacagcttcattcacctctgtttccaagagttctttgcagcaatgtcctatgtcttggaggatgagaaggggagaggtaaacattctaattgcatcatagatttggaaaagacgctagaagcatatggaatacatggcctgtttggggcatcaaccacacgtttcctattgggcctgttaagtgatgagggggagagagagatggagaacatctttcactgccggctgtctcaggggaggaacctgatgcagtgggtcccgtccctgcagctgctgctgcagccacactctctggagtccctccactgcttgtacgagactcggaacaaaacgttcctgacacaagtgatggcccatttcgaagaaatgggcatgtgtgtagaaacagacatggagctcttagtgtgcactttctgcattaaattcagccgccacgtgaagaagcttcagctgattgagggcaggcagcacagatcaacatggagccccaccatggtagtcctgttcaggtgggtcccagtcacagatgcctattggcagattctcttctccgtcctcaaggtcaccagaaacctgaaggagctggacctaagtggaaactcgctgagccactctgcagtgaagagtctttgtaagaccctgagacgccctcgctgcctcctggagaccctgcggttggctggctgtggcctcacagctgaggactgcaaggaccttgcctttgggctgagagccaaccagaccctgaccgagctggacctgagcttcaatgtgctcacggatgctggagccaaacacctttgccagagactgagacagccgagctgcaagctacagcgactgcagctggtcagctgtggcctcacgtctgactgctgccaggacctggcctctgtgcttagtgccagccccagcctgaaggagctagacctgcagcagaacaacctggatgacgttggcgtgcgactgctctgtgaggggctcaggcatcctgcctgcaaactcatacgcctggggctggaccagacaactctgagtgatgagatgaggcaggaactgagggccctggagcaggagaaacctcagctgctcatcttcagcagacggaaaccaagtgtgatgacccctactgagggcctggatacgggagagatgagtaatagcacatcctcactcaagcggcagagactcggatcagagagggcggcttcccatgttgctcaggctaatctcaaactcctggacgtgagcaagatcttcccaattgctgagattgcagaggaaagctccccagaggtagtaccggtggaactcttgtgcgtgccttctcctgcctctcaaggggacctgcatacgaagcctttggggactgacgatgacttctggggccccacggggcctgtggctactgaggtagttgacaaagaaaagaacttgtaccgagttcacttccctgtagctggctcctaccgctggcccaacacgggtctctgctttgtgatgagagaagcggtgaccgttgagattgaattctgtgtgtgggaccagttcctgggtgagatcaacccacagcacagctggatggtggcagggcctctgctggacatcaaggctgagcctggagctgtggaagctgtgcacctccctcactttgtggctctccaagggggccatgtggacacatccctgttccaaatggcccactttaaagaggaggggatgctcctggagaagccagccagggtggagctgcatcacatagttctggaaaaccccagcttctcccccttgggagtcctcctgaaaatgatccataatgccctgcgcttcattcccgtcacctctgtggtgttgctttaccaccgcgtccatcctgaggaagtcaccttccacctctacctgatcccaagtgactgctccattcggaaggccatagatgatctagaaatgaaattccagtttgtgcgaatccacaagccacccccgctgaccccactttatatgggctgtcgttacactgtgtctgggtctggttcagggatgctggaaatactccccaaggaactggagctctgctatcgaagccctggagaagaccagctgttctcggagttctacgttggccacttgggatcagggatcaggctgcaagtgaaagacaagaaagatgagactctggtgtgggaggccttggtgaaaccaggaaggaacaccagccagccgtggaacctcaggtgcaacagagacgccaggagatactagtgcccagcagcctgcggcagtaccaatgaagccagagagggcttggtggatgacaaggaggcctgagtagaccgcaggtgggtctgagaaatgggcttaggtgaggcaggtctttgaaggatttgttcttaatcatatgcgagatgctcaaaaggctggatgcctgcttttgtgggtgaagagcaagaagagaaaacaggttgtacacatacagatgcagatggagagacagagaaaaaaaaggaagaaggcagagaaatgcaccaattcttgagctgtattatctctggaccttgggattgtgggaggctttattttactactgattttgcctacactgttttctcaatttctagttttctacaaagatgatgtgttagctttttcacgcattaagattaaaatttaaaacagaccacacaataaatatttcttttaaaaggagaaatatgccctggggaagctccccacgcagctgagagcctggctggttgcatttcggcttcttaggtgccaagcctactagtgccccggggtcccagccagcggctcgcgtttcctcccccttgcgccgccagtctggttgccatggagacaaaccttgctgcgcagagactgccgagccgcaggcagcggagctggaacccggcgagccagcctctgcaacaggctgggggcggaaggaggagccaggcgaagcggcgcctcagctgagaggaccggcggaccctgcagaggccccctgcccctctggctccgcccccacccgggtcgctagaaatacagccgtagccccgcccaccgcccactgcgctctgacccagacccggctgacccacctacccgcgatcctgcccatggctgacgggctctttcggcgcagaccctggggtctcgagcagattcgcccggaccccgagtccgaaggcctgtttgacaagcctcccccggaagaccctcccgctgcccgcgggcccaggtcggcgtcggccgcgggcaagaaggctggtcggcgcgcgggcgggagggcgcaggggggccgcgccgggcagcccccgaaggccgcatcgcgccccccgcccaagaaggaggcgcctccactggacgagggctgctatctcgaccattttccgcacctctccatcttcatctacgcagccatcgccttctccatcacctcctgcatctttacctatatccatttacagcttgcctgagtggccagcgcgggacggggtgggcgcaggaccgagcggggagggaaagggaaaacggggctcggcattttgtgttttagaacagcgctgcacccccttcatgtagctttcgatgcttgtttctttccgtctttgttgtcactatctttgtctatcagtacgaaagtacaaagtagctgccggcaatgaaataggggtgctgtttgcacctgcaggttaggggtggaggcgtttagaattttggggtgtgattgagccccgtttataattagaatgcccctggacccctaccactctgtgacgtgggggcacgcgcagggatcccatcattttgtgtttggggagctcagagtgcgcccaatcttggaatctttaagggatgagccagacccagacccgcggccttctagagagggtccggcagggagggtcggcgccctggcccggggtgggccggagccctgtgatgctgcatcgcccccaggaggagccagctgtgccccagagttggcgcggccgagagaggacaagagcgcgcagcaggcgaagctggagggcgggactcgactttgttgtcgctgcccggaggagtcgagactggtacccggaggagctgtctcaccaggagaccacgtcctggaagtgtccgggactcgcgggacctgtggctgcagaccccgccggcacgcaggcccagagctggcgcactcctgaggatgagactctgggggccctagccggggtccacgggagggctgtccttggggactctaggatggcttcgttctggcccggctcacttctggagctgtgagacccaagacaaaaggggctgagggatttctcattgacaagagttcgtgcgggaaaaccacctgatccctagggatttgtcatcttaagactcaaaaggcttaataccaggaaccaccttggcaagatatttacccaccggccatctctgtttactcatgaatgttaaatgttaaaacgcagcgctctaaccctgcatattatttacttgcaaatgtctgtaatctgtaattgtgatgcctctgatggaataaattatctttttcagtctcctc

SEQ ID NO: 354430 - DNA, 3671 bp, Homo sapiens
cggccgctgcctcagaaggtgacaggtcccaggattctgggccctggggacctggggaccacatgggggatcccaggaggacccggctccctttgtgctttcaggctggaccagacaactctgagtgatgagatgaggcaggaactgagggccctggagcaggagaaacctcagctgctcatcttcagcagacggaaaccaagtgtgatgacccctactgagggcctggatacgggagagatgagtaatagcacatcctcactcaagcggcagagactcggatcagagagggcggcttcccatgttgctcaggctaatctcaaactcctggacgtgagcaagatcttcccaattgctgagattgcagaggaaagctccccagaggtagtaccggtggaactcttgtgcgtgccttctcctgcctctcaaggggacctgcatacgaagcctttggggactgacgatgacttctggggccccacggggcctgtggctactgagagttcacttccctgtagctggctcctaccgctggcccaacacgggtctctgctttgtgatgagagaagcggtgaccgttgagattgaattctgtgtgtgggaccagttcctgggtgagatcaacccacagcacagctggatggtggcagggcctctgctggacatcaaggctgagcctggagctgtggaagctgtgcacctccctcactttgtggctctccaagggggccatgtggacacatccctgttccaaatggcccactttaaagaggaggggatgctcctggagaagccagccagggtggagctgcatcacatagttctggaaaaccccagcttctcccccttgggagtcctcctgaaaatgatccataatgccctgcgcttcattcccgtcacctctgtggtgttgctttaccaccgcgtccatcctgaggaagtcaccttccacctctacctgatcccaagtgactgctccattcggaaggccatagatgatctagaaatgaaattccagtttgtgcgaatccacaagccacccccgctgaccccactttatatgggctgtcgttacactgtgtctgggtctggttcagggatgctggaaatactccccaaggaactggagctctgctatcgaagccctggagaagaccagctgttctcggagttctacgttggccacttgggatcagggatcaggctgcaagtgaaagacaagaaagatgagactctggtgtgggaggccttggtgaaaccaggagatctcatgcctgcaactactctgatccctccagcccgcataggaaggaacaccagccagccgtggaacctcaggtgcaacagagacgccaggagatactagtgcccagcagcctgcggcagtaccaatgaagccagagagggcttggtggatgacaaggaggcctgagtagaccgcaggtgggtctgagaaatgggcttaggtgaggcaggtctttgaaggatttgttcttaatcatatgcgagatgctcaaaaggctggatgcctgcttttgtgggtgaagagcaagaagagaaaacaggttgtacacatacagatgcagatggagagacagagaaaaaaaaggaagaaggcagagaaatgcaccaattcttgagctgtattatctctggaccttgggattgtgggaggctttattttactactgattttgcctacactgttttctcaatttctagttttctacaaagatgatgtgttagctttttcacgcattaagattaaaatttaaaacagaccacacaataaatatttcttttaaaaggagaaatatgccctggggaagctccccacgcagctgagagcctggctggttgcatttcggcttcttaggtgccaagcctactagtgccccggggtcccagccagcggctcgcgtttcctcccccttgcgccgccagtctggttgccatggagacaaaccttgctgcgcagagactgccgagccgcaggcagcggagctggaacccggcgagccagcctctgcaacaggctgggggcggaaggaggagccaggcgaagcggcgcctcagctgagaggaccggcggaccctgcagaggccccctgcccctctggctccgcccccacccgggtcgctagaaatacagccgtagccccgcccaccgcccactgcgctctgacccagacccggctgacccacctacccgcgatcctgcccatggctgacgggctctttcggcgcagaccctggggtctcgagcagattcgcccggaccccgagtccgaaggcctgtttgacaagcctcccccggaagaccctcccgctgcccgcgggcccaggtcggcgtcggccgcgggcaagaaggctggtcggcgcgcgggcgggagggcgcaggggggccgcgccgggcagcccccgaaggccgcatcgcgccccccgcccaagaaggaggcgcctccactggacgagggctgctatctcgaccattttccgcacctctccatcttcatctacgcagccatcgccttctccatcacctcctgcatctttacctatatccatttacagcttgcctgagtggccagcgcgggacggggtgggcgcaggaccgagcggggagggaaagggaaaacggggctcggcattttgtgttttagaacagcgctgcacccccttcatgtagctttcgatgcttgtttctttccgtctttgttgtcactatctttgtctatcagtacgaaagtacaaagtagctgccggcaatgaaataggggtgctgtttgcacctgcaggttaggggtggaggcgtttagaattttggggtgtgattgagccccgtttataattagaatgcccctggacccctaccactctgtgacgtgggggcacgcgcagggatcccatcattttgtgtttggggagctcagagtgcgcccaatcttggaatctttaagggatgagccagacccagacccgcggccttctagagagggtccggcagggagggtcggcgccctggcccggggtgggccggagccctgtgatgctgcatcgcccccaggaggagccagctgtgccccagagttggcgcggccgagagaggacaagagcgcgcagcaggcgaagctggagggcgggactcgactttgttgtcgctgcccggaggagtcgagactggtacccggaggagctgtctcaccaggagaccacgtcctggaagtgtccgggactcgcgggacctgtggctgcagaccccgccggcacgcaggcccagagctggcgcactcctgaggatgagactctgggggccctagccggggtccacgggagggctgtccttggggactctaggatggcttcgttctggcccggctcacttctggagctgtgagacccaagacaaaaggggctgagggatttctcattgacaagagttcgtgcgggaaaaccacctgatccctagggatttgtcatcttaagactcaaaaggcttaataccaggaaccaccttggcaagatatttacccaccggccatctctgtttactcatgaatgttaaatgttaaaacgcagcgctctaaccctgcatattatttacttgcaaatgtctgtaatctgtaattgtgatgcctctgatggaataaattatctttttcagtctcctc

SEQ ID NO: 354431 - DNA, 5495 bp, Homo sapiens
acgtttccttcctgctcttgttgactaggcgctgttcttgcttggctggtgccccagggcctggagaggtctgaagaaacctgggagccagcagcccggggctccactctgggttctgaaagcccattccctgctctgcggctcctcccaccccacctcttctcagccttgcagctcaagggttgatctcaggagtccaggacccaggagagggaagaatctgaggaacacagaacagtgagcgttgcccacaccccatctcccgtcaccacatctcccctcaccctcaccctccctgcctggccctggaccccatcccaggacctccctatcagctgacttcttccagtgtcttgcaggcccctctgggctcctccctcccctggcttttcctaccactccccctctatcggcgtctatctgtaggtgccctgggatttataaaactgggttccgaatgctgaataagagacggtaagagccaaggcaaaggacagcactgttctctgcctgcctgataccctcaccacctgggaacatcccccagacaccctcttaactccgggacagagatggctggcggagcctggggccgcctggcctgttacttggagttcctgaagaaggaggagctgaaggagttccagcttctgctcgccaataaagcgcactccaggagctcttcgggtgagacacccgctcagccagagaagacgagtggcatggaggtggcctcgtacctggtggctcagtatggggagcagcgggcctgggacctagccctccatacctgggagcagatggggctgaggtcactgtgcgcccaagcccaggaaggggcaggccactctccctcattcccctacagcccaagtgaaccccacctggggtctcccagccaacccacctccaccgcagtgctaatgccctggatccatgaattgccggcggggtgcacccagggctcagagagaagggttttgagacagctgcctgacacatctggacgccgctggagagaaatctctgcctcactcctctaccaagctcttccaagctccccagaccatgagtctccaagccaggagtcacccaacgcccccacatccacagcagtgctggggagctggggatccccacctcagcccagcctagcacccagagagcaggaggctcctgggacccaatggcctctggatgaaacgtcaggaatttactacacagaaatcagagaaagagagagagagaaatcagagaaaggcaggcccccatgggcagcggtggtaggaacgcccccacaggcgcacaccagcctacagccccaccaccacccatgggagccttctgtgagagagagcctctgttccacatggccctggaaaaatgaggattttaaccaaaaattcacacagctgctacttctacaaagacctcaccccagaagccaagatcccctggtcaagagaagctggcctgattatgtggaggagaatcgaggacatttaattgagatcagagacttatttggcccaggcctggatacccaagaacctcgcatagtcatactgcagggggctgctggaattgggaagtcaacactggccaggcaggtgaaggaagcctgggggagaggccagctgtatggggaccgcttccagcatgtcttctacttcagctgcagagagctggcccagtccaaggtggtgagtctcgctgagctcatcggaaaagatgggacagccactccggctcccattagacagatcctgtctaggccagagcggctgctcttcatcctcgatggtgtagatgagccaggatgggtcttgcaggagccgagttctgagctctgtctgcactggagccagccacagccggcggatgcactgctgggcagtttgctggggaaaactatacttcccgaggcatccttcctgatcacggctcggaccacagctctgcagaacctcattccttctttggagcaggcacgttgggtagaggtcctggggttctctgagtccagcaggaaggaatatttctacagatatttcacagatgaaaggcaagcaattagagcctttaggttggtcaaatcaaacaaagagctctgggccctgtgtcttgtgccctgggtgtcctggctggcctgcacttgcctgatgcagcagatgaagcggaaggaaaaactcacactgacttccaagaccaccacaaccctctgtctacattaccttgcccaggctctccaagctcagccattgggaccccagctcagagacctctgctctctggctgctgagggcatctggcaaaaaaagacccttttcagtccagatgacctcaggaagcatgggttagatggggccatcatctccaccttcttgaagatgggtattcttcaagagcaccccatccctctgagctacagcttcattcacctctgtttccaagagttctttgcagcaatgtcctatgtcttggaggatgagaaggggagaggtaaacattctaattgcatcatagatttggaaaagacgctagaagcatatggaatacatggcctgtttggggcatcaaccacacgtttcctattgggcctgttaagtgatgagggggagagagagatggagaacatctttcactgccggctgtctcaggggaggaacctgatgcagtgggtcccgtccctgcagctgctgctgcagccacactctctggagtccctccactgcttgtacgagactcggaacaaaacgttcctgacacaagtgatggcccatttcgaagaaatgggcatgtgtgtagaaacagacatggagctcttagtgtgcactttctgcattaaattcagccgccacgtgaagaagcttcagctgattgagggcaggcagcacagatcaacatggagccccaccatggtagtcctgttcaggtgggtcccagtcacagatgcctattggcagattctcttctccgtcctcaaggtcaccagaaacctgaaggagctggacctaagtggaaactcgctgagccactctgcagtgaagagtctttgtaagaccctgagacgccctcgctgcctcctggagaccctgcggttggctggctgtggcctcacagctgaggactgcaaggaccttgcctttgggctgagagccaaccagaccctgaccgagctggacctgagcttcaatgtgctcacggatgctggagccaaacacctttgccagagactgagacagccgagctgcaagctacagcgactgcagctggtcagctgtggcctcacgtctgactgctgccaggacctggcctctgtgcttagtgccagccccagcctgaaggagctagacctgcagcagaacaacctggatgacgttggcgtgcgactgctctgtgaggggctcaggcatcctgcctgcaaactcatacgcctggggctggaccagacaactctgagtgatgagatgaggcaggaactgagggccctggagcaggagaaacctcagctgctcatcttcagcagacggaaaccaagtgtgatgacccctactgagggcctggatacgggagagatgagtaatagcacatcctcactcaagcggcagagactcggatcagagagggcggcttcccatgttgctcaggctaatctcaaactcctggacgtgagcaagatcttcccaattgctgagattgcagaggaaagctccccagaggtagtaccggtggaactcttgtgcgtgccttctcctgcctctcaaggggacctgcatacgaagcctttggggactgacgatgacttctggggccccacggggcctgtggctactgaggtagttgacaaagaaaagaacttgtaccgagttcacttccctgtagctggctcctaccgctggcccaacacgggtctctgctttgtgatgagagaagcggtgaccgttgagattgaattctgtgtgtgggaccagttcctgggtgagatcaacccacagcacagctggatggtggcagggcctctgctggacatcaaggctgagcctggagctgtggaagctgtgcacctccctcactttgtggctctccaagggggccatgtggacacatccctgttccaaatggcccactttaaagaggaggggatgctcctggagaagccagccagggtggagctgcatcacatagttctggaaaaccccagcttctcccccttgggagtcctcctgaaaatgatccataatgccctgcgcttcattcccgtcacctctgtggtgttgctttaccaccgcgtccatcctgaggaagtcaccttccacctctacctgatcccaagtgactgctccattcggaaggccatagatgatctagaaatgaaattccagtttgtgcgaatccacaagccacccccgctgaccccactttatatgggctgtcgttacactgtgtctgggtctggttcagggatgctggaaatactccccaaggaactggagctctgctatcgaagccctggagaagaccagctgttctcggagttctacgttggccacttgggatcagggatcaggctgcaagtgaaagacaagaaagatgagactctggtgtgggaggccttggtgaaaccaggagatctcatgcctgcaactactctgatccctccagcccgcatagccgtaccttcacctctggatgccccgcagttgctgcactttgtggaccagtatcgagagcagctgatagcccgagtgacatcggtggaggttgtcttggacaaactgcatggacaggtgctgagccaggagcagtacgagagggtgctggctgagaacacgaggcccagccagatgcggaagctgttcagcttgagccagtcctgggaccggaagtgcaaagatggactctaccaagccctgaaggagacccatcctcacctcattatggaactctgggagaagggcagcaaaaagggactcctgccactcagcagctgaagtatcaacaccagcccttgacccttgagtcctggctttggctgacccttctttgggtctcagtttctttctctgcaaacaagttgccatctggtttgccttccagcactaaagtaatggaactttgatgatgcctttgctgggcattatgtgtccatgccagggatgccacagggggccccagtccaggtggcctaacagcatctcagggaatgtccatctggagctggcaagacccctgcagacctcatagagcctcatctggtggccacagcagccaagcctagagccctccggatcccatccaggcgcaaagaggaataggagggacatggaaccatttgcctctggctgtgtcacagggtgagccccaaaattggggttcagcgtgggaggccacgtggattcttggctttgtacaggaagatctacaagagcaagccaacagagtaaagtggaaggaagtttattcagaaaataaaggagtatcacagctctttt

SEQ ID NO: 354432 - DNA, 7263 bp, Homo sapiens
acgtttccttcctgctcttgttgactaggcgctgttcttgcttggctggtgccccagggcctggagaggtctgaagaaacctgggagccagcagcccggggctccactctgggttctgaaagcccattccctgctctgcggctcctcccaccccacctcttctcagccttgcagctcaagggttgatctcaggagtccaggacccaggagagggaagaatctgaggaacacagaacagtgagcgttgcccacaccccatctcccgtcaccacatctcccctcaccctcaccctccctgcctggccctggaccccatcccaggacctccctatcagctgacttcttccagtgtcttgcaggcccctctgggctcctccctcccctggcttttcctaccactccccctctatcggcgtctatctgtaggtgccctgggatttataaaactgggttccgaatgctgaataagagacggtaagagccaaggcaaaggacagcactgttctctgcctgcctgataccctcaccacctgggaacatcccccagacaccctcttaactccgggacagagatggctggcggagcctggggccgcctggcctgttacttggagttcctgaagaaggaggagctgaaggagttccagcttctgctcgccaataaagcgcactccaggagctcttcgggtgagacacccgctcagccagagaagacgagtggcatggaggtggcctcgtacctggtggctcagtatggggagcagcgggcctgggacctagccctccatacctgggagcagatggggctgaggtcactgtgcgcccaagcccaggaaggggcaggccactctccctcattcccctacagcccaagtgaaccccacctggggtctcccagccaacccacctccaccgcagtgctaatgccctggatccatgaattgccggcggggtgcacccagggctcagagagaagggttttgagacagctgcctgacacatctggacgccgctggagagaaatctctgcctcactcctctaccaagctcttccaagctccccagaccatgagtctccaagccaggagtcacccaacgcccccacatccacagcagtgctggggagctggggatccccacctcagcccagcctagcacccagagagcaggaggctcctgggacccaatggcctctggatgaaacgtcaggaatttactacacagaaatcagagaaagagagagagagaaatcagagaaaggcaggcccccatgggcagcggtggtaggaacgcccccacaggcgcacaccagcctacagccccaccaccacccatgggagccttctgtgagagagagcctctgttccacatggccctggaaaaatgaggattttaaccaaaaattcacacagctgctacttctacaaagacctcaccccagaagccaagatcccctggtcaagagaagctggcctgattatgtggaggagaatcgaggacatttaattgagatcagagacttatttggcccaggcctggatacccaagaacctcgcatagtcatactgcagggggctgctggaattgggaagtcaacactggccaggcaggtgaaggaagcctgggggagaggccagctgtatggggaccgcttccagcatgtcttctacttcagctgcagagagctggcccagtccaaggtggtgagtctcgctgagctcatcggaaaagatgggacagccactccggctcccattagacagatcctgtctaggccagagcggctgctcttcatcctcgatggtgtagatgagccaggatgggtcttgcaggagccgagttctgagctctgtctgcactggagccagccacagccggcggatgcactgctgggcagtttgctggggaaaactatacttcccgaggcatccttcctgatcacggctcggaccacagctctgcagaacctcattccttctttggagcaggcacgttgggtagaggtcctggggttctctgagtccagcaggaaggaatatttctacagatatttcacagatgaaaggcaagcaattagagcctttaggttggtcaaatcaaacaaagagctctgggccctgtgtcttgtgccctgggtgtcctggctggcctgcacttgcctgatgcagcagatgaagcggaaggaaaaactcacactgacttccaagaccaccacaaccctctgtctacattaccttgcccaggctctccaagctcagccattgggaccccagctcagagacctctgctctctggctgctgagggcatctggcaaaaaaagacccttttcagtccagatgacctcaggaagcatgggttagatggggccatcatctccaccttcttgaagatgggtattcttcaagagcaccccatccctctgagctacagcttcattcacctctgtttccaagagttctttgcagcaatgtcctatgtcttggaggatgagaaggggagaggtaaacattctaattgcatcatagatttggaaaagacgctagaagcatatggaatacatggcctgtttggggcatcaaccacacgtttcctattgggcctgttaagtgatgagggggagagagagatggagaacatctttcactgccggctgtctcaggggaggaacctgatgcagtgggtcccgtccctgcagctgctgctgcagccacactctctggagtccctccactgcttgtacgagactcggaacaaaacgttcctgacacaagtgatggcccatttcgaagaaatgggcatgtgtgtagaaacagacatggagctcttagtgtgcactttctgcattaaattcagccgccacgtgaagaagcttcagctgattgagggcaggcagcacagatcaacatggagccccaccatggtagtcctgttcaggtgggtcccagtcacagatgcctattggcagattctcttctccgtcctcaaggtcaccagaaacctgaaggagctggacctaagtggaaactcgctgagccactctgcagtgaagagtctttgtaagaccctgagacgccctcgctgcctcctggagaccctgcggttggctggctgtggcctcacagctgaggactgcaaggaccttgcctttgggctgagagccaaccagaccctgaccgagctggacctgagcttcaatgtgctcacggatgctggagccaaacacctttgccagagactgagacagccgagctgcaagctacagcgactgcagctggtcagctgtggcctcacgtctgactgctgccaggacctggcctctgtgcttagtgccagccccagcctgaaggagctagacctgcagcagaacaacctggatgacgttggcgtgcgactgctctgtgaggggctcaggcatcctgcctgcaaactcatacgcctggggctggaccagacaactctgagtgatgagatgaggcaggaactgagggccctggagcaggagaaacctcagctgctcatcttcagcagacggaaaccaagtgtgatgacccctactgagggcctggatacgggagagatgagtaatagcacatcctcactcaagcggcagagactcggatcagagagggcggcttcccatgttgctcaggctaatctcaaactcctggacgtgagcaagatcttcccaattgctgagattgcagaggaaagctccccagaggtagtaccggtggaactcttgtgcgtgccttctcctgcctctcaaggggacctgcatacgaagcctttggggactgacgatgacttctggggccccacggggcctgtggctactgaggtagttgacaaagaaaagaacttgtaccgagttcacttccctgtagctggctcctaccgctggcccaacacgggtctctgctttgtgatgagagaagcggtgaccgttgagattgaattctgtgtgtgggaccagttcctgggtgagatcaacccacagcacagctggatggtggcagggcctctgctggacatcaaggctgagcctggagctgtggaagctgtgcacctccctcactttgtggctctccaagggggccatgtggacacatccctgttccaaatggcccactttaaagaggaggggatgctcctggagaagccagccagggtggagctgcatcacatagttctggaaaaccccagcttctcccccttgggagtcctcctgaaaatgatccataatgccctgcgcttcattcccgtcacctctgtggtgttgctttaccaccgcgtccatcctgaggaagtcaccttccacctctacctgatcccaagtgactgctccattcggaaggccatagatgatctagaaatgaaattccagtttgtgcgaatccacaagccacccccgctgaccccactttatatgggctgtcgttacactgtgtctgggtctggttcagggatgctggaaatactccccaaggaactggagctctgctatcgaagccctggagaagaccagctgttctcggagttctacgttggccacttgggatcagggatcaggctgcaagtgaaagacaagaaagatgagactctggtgtgggaggccttggtgaaaccaggaaggaacaccagccagccgtggaacctcaggtgcaacagagacgccaggagatactagtgcccagcagcctgcggcagtaccaatgaagccagagagggcttggtggatgacaaggaggcctgagtagaccgcaggtgggtctgagaaatgggcttaggtgaggcaggtctttgaaggatttgttcttaatcatatgcgagatgctcaaaaggctggatgcctgcttttgtgggtgaagagcaagaagagaaaacaggttgtacacatacagatgcagatggagagacagagaaaaaaaaggaagaaggcagagaaatgcaccaattcttgagctgtattatctctggaccttgggattgtgggaggctttattttactactgattttgcctacactgttttctcaatttctagttttctacaaagatgatgtgttagctttttcacgcattaagattaaaatttaaaacagaccacacaataaatatttcttttaaaaggagaaatatgccctggggaagctccccacgcagctgagagcctggctggttgcatttcggcttcttaggtgccaagcctactagtgccccggggtcccagccagcggctcgcgtttcctcccccttgcgccgccagtctggttgccatggagacaaaccttgctgcgcagagactgccgagccgcaggcagcggagctggaacccggcgagccagcctctgcaacaggctgggggcggaaggaggagccaggcgaagcggcgcctcagctgagaggaccggcggaccctgcagaggccccctgcccctctggctccgcccccacccgggtcgctagaaatacagccgtagccccgcccaccgcccactgcgctctgacccagacccggctgacccacctacccgcgatcctgcccatggctgacgggctctttcggcgcagaccctggggtctcgagcagattcgcccggaccccgagtccgaaggcctgtttgacaagcctcccccggaagaccctcccgctgcccgcgggcccaggtcggcgtcggccgcgggcaagaaggctggtcggcgcgcgggcgggagggcgcaggggggccgcgccgggcagcccccgaaggccgcatcgcgccccccgcccaagaaggaggcgcctccactggacgagggctgctatctcgaccattttccgcacctctccatcttcatctacgcagccatcgccttctccatcacctcctgcatctttacctatatccatttacagcttgcctgagtggccagcgcgggacggggtgggcgcaggaccgagcggggagggaaagggaaaacggggctcggcattttgtgttttagaacagcgctgcacccccttcatgtagctttcgatgcttgtttctttccgtctttgttgtcactatctttgtctatcagtacgaaagtacaaagtagctgccggcaatgaaataggggtgctgtttgcacctgcaggttaggggtggaggcgtttagaattttggggtgtgattgagccccgtttataattagaatgcccctggacccctaccactctgtgacgtgggggcacgcgcagggatcccatcattttgtgtttggggagctcagagtgcgcccaatcttggaatctttaagggatgagccagacccagacccgcggccttctagagagggtccggcagggagggtcggcgccctggcccggggtgggccggagccctgtgatgctgcatcgcccccaggaggagccagctgtgccccagagttggcgcggccgagagaggacaagagcgcgcagcaggcgaagctggagggcgggactcgactttgttgtcgctgcccggaggagtcgagactggtacccggaggagctgtctcaccaggagaccacgtcctggaagtgtccgggactcgcgggacctgtggctgcagaccccgccggcacgcaggcccagagctggcgcactcctgaggatgagactctgggggccctagccggggtccacgggagggctgtccttggggactctaggatggcttcgttctggcccggctcacttctggagctgtgagacccaagacaaaaggggctgagggatttctcattgacaagagttcgtgcgggaaaaccacctgatccctagggatttgtcatcttaagactcaaaaggcttaataccaggaaccaccttggcaagatatttacccaccggccatctctgtttactcatgaatgttaaatgttaaaacgcagcgctctaaccctgcatattatttacttgcaaatgtctgtaatctgtaattgtgatgcctctgatggaataaattatctttttcagtctcctcactcccctcgcgtttgatctaccccggaaaagacttttctcattcttaaaggtatgcccataggtcggggatggccttccgaaaagcttcagggtcatttattttggcccagagcggcctcccacgccccgaaatgcttccgataccgaaggaatgaatctcactgtgttgccgaacgtcgacgccgtctccggagaagcctttgatcactggccccgcacggcactgacacgccgtggaagggacctccctccgcccgggtggcacgcg

SEQ ID NO: 354433 - DNA, 5418 bp, Homo sapiens
acgtttccttcctgctcttgttgactaggcgctgttcttgcttggctggtgccccagggcctggagaggtctgaagaaacctgggagccagcagcccggggctccactctgggttctgaaagcccattccctgctctgcggctcctcccaccccacctcttctcagccttgcagctcaagggttgatctcaggagtccaggacccaggagagggaagaatctgaggaacacagaacagtgagcgttgcccacaccccatctcccgtcaccacatctcccctcaccctcaccctccctgcctggccctggaccccatcccaggacctccctatcagctgacttcttccagtgtcttgcaggcccctctgggctcctccctcccctggcttttcctaccactccccctctatcggcgtctatctgtaggtgccctgggatttataaaactgggttccgaatgctgaataagagacggtaagagccaaggcaaaggacagcactgttctctgcctgcctgataccctcaccacctgggaacatcccccagacaccctcttaactccgggacagagatggctggcggagcctggggccgcctggcctgttacttggagttcctgaagaaggaggagctgaaggagttccagcttctgctcgccaataaagcgcactccaggagctcttcgggtgagacacccgctcagccagagaagacgagtggcatggaggtggcctcgtacctggtggctcagtatggggagcagcgggcctgggacctagccctccatacctgggagcagatggggctgaggtcactgtgcgcccaagcccaggaaggggcaggccactctccctcattcccctacagcccaagtgaaccccacctggggtctcccagccaacccacctccaccgcagtgctaatgccctggatccatgaattgccggcggggtgcacccagggctcagagagaagggttttgagacagctgcctgacacatctggacgccgctggagagaaatctctgcctcactcctctaccaagctcttccaagctccccagaccatgagtctccaagccaggagtcacccaacgcccccacatccacagcagtgctggggagctggggatccccacctcagcccagcctagcacccagagagcaggaggctcctgggacccaatggcctctggatgaaacgtcaggaatttactacacagaaatcagagaaagagagagagagaaatcagagaaaggcaggcccccatgggcagcggtggtaggaacgcccccacaggcgcacaccagcctacagccccaccaccacccatgggagccttctgtgagagagagcctctgttccacatggccctggaaaaatgaggattttaaccaaaaattcacacagctgctacttctacaaagacctcaccccagaagccaagatcccctggtcaagagaagctggcctgattatgtggaggagaatcgaggacatttaattgagatcagagacttatttggcccaggcctggatacccaagaacctcgcatagtcatactgcagggggctgctggaattgggaagtcaacactggccaggcaggtgaaggaagcctgggggagaggccagctgtatggggaccgcttccagcatgtcttctacttcagctgcagagagctggcccagtccaaggtggtgagtctcgctgagctcatcggaaaagatgggacagccactccggctcccattagacagatcctgtctaggccagagcggctgctcttcatcctcgatggtgtagatgagccaggatgggtcttgcaggagccgagttctgagctctgtctgcactggagccagccacagccggcggatgcactgctgggcagtttgctggggaaaactatacttcccgaggcatccttcctgatcacggctcggaccacagctctgcagaacctcattccttctttggagcaggcacgttgggtagaggtcctggggttctctgagtccagcaggaaggaatatttctacagatatttcacagatgaaaggcaagcaattagagcctttaggttggtcaaatcaaacaaagagctctgggccctgtgtcttgtgccctgggtgtcctggctggcctgcacttgcctgatgcagcagatgaagcggaaggaaaaactcacactgacttccaagaccaccacaaccctctgtctacattaccttgcccaggctctccaagctcagccattgggaccccagctcagagacctctgctctctggctgctgagggcatctggcaaaaaaagacccttttcagtccagatgacctcaggaagcatgggttagatggggccatcatctccaccttcttgaagatgggtattcttcaagagcaccccatccctctgagctacagcttcattcacctctgtttccaagagttctttgcagcaatgtcctatgtcttggaggatgagaaggggagaggtaaacattctaattgcatcatagatttggaaaagacgctagaagcatatggaatacatggcctgtttggggcatcaaccacacgtttcctattgggcctgttaagtgatgagggggagagagagatggagaacatctttcactgccggctgtctcaggggaggaacctgatgcagtgggtcccgtccctgcagctgctgctgcagccacactctctggagtccctccactgcttgtacgagactcggaacaaaacgttcctgacacaagtgatggcccatttcgaagaaatgggcatgtgtgtagaaacagacatggagctcttagtgtgcactttctgcattaaattcagccgccacgtgaagaagcttcagctgattgagggcaggcagcacagatcaacatggagccccaccatggtagtcctgttcaggtgggtcccagtcacagatgcctattggcagattctcttctccgtcctcaaggtcaccagaaacctgaaggagctggacctaagtggaaactcgctgagccactctgcagtgaagagtctttgtaagaccctgagacgccctcgctgcctcctggagaccctgcggttggctggctgtggcctcacagctgaggactgcaaggaccttgcctttgggctgagagccaaccagaccctgaccgagctggacctgagcttcaatgtgctcacggatgctggagccaaacacctttgccagagactgagacagccgagctgcaagctacagcgactgcagctggtcagctgtggcctcacgtctgactgctgccaggacctggcctctgtgcttagtgccagccccagcctgaaggagctagacctgcagcagaacaacctggatgacgttggcgtgcgactgctctgtgaggggctcaggcatcctgcctgcaaactcatacgcctggggaaaccaagtgtgatgacccctactgagggcctggatacgggagagatgagtaatagcacatcctcactcaagcggcagagactcggatcagagagggcggcttcccatgttgctcaggctaatctcaaactcctggacgtgagcaagatcttcccaattgctgagattgcagaggaaagctccccagaggtagtaccggtggaactcttgtgcgtgccttctcctgcctctcaaggggacctgcatacgaagcctttggggactgacgatgacttctggggccccacggggcctgtggctactgaggtagttgacaaagaaaagaacttgtaccgagttcacttccctgtagctggctcctaccgctggcccaacacgggtctctgctttgtgatgagagaagcggtgaccgttgagattgaattctgtgtgtgggaccagttcctgggtgagatcaacccacagcacagctggatggtggcagggcctctgctggacatcaaggctgagcctggagctgtggaagctgtgcacctccctcactttgtggctctccaagggggccatgtggacacatccctgttccaaatggcccactttaaagaggaggggatgctcctggagaagccagccagggtggagctgcatcacatagttctggaaaaccccagcttctcccccttgggagtcctcctgaaaatgatccataatgccctgcgcttcattcccgtcacctctgtggtgttgctttaccaccgcgtccatcctgaggaagtcaccttccacctctacctgatcccaagtgactgctccattcggaaggaactggagctctgctatcgaagccctggagaagaccagctgttctcggagttctacgttggccacttgggatcagggatcaggctgcaagtgaaagacaagaaagatgagactctggtgtgggaggccttggtgaaaccaggagatctcatgcctgcaactactctgatccctccagcccgcatagccgtaccttcacctctggatgccccgcagttgctgcactttgtggaccagtatcgagagcagctgatagcccgagtgacatcggtggaggttgtcttggacaaactgcatggacaggtgctgagccaggagcagtacgagagggtgctggctgagaacacgaggcccagccagatgcggaagctgttcagcttgagccagtcctgggaccggaagtgcaaagatggactctaccaagccctgaaggagacccatcctcacctcattatggaactctgggagaagggcagcaaaaagggactcctgccactcagcagctgaagtatcaacaccagcccttgacccttgagtcctggctttggctgacccttctttgggtctcagtttctttctctgcaaacaagttgccatctggtttgccttccagcactaaagtaatggaactttgatgatgcctttgctgggcattatgtgtccatgccagggatgccacagggggccccagtccaggtggcctaacagcatctcagggaatgtccatctggagctggcaagacccctgcagacctcatagagcctcatctggtggccacagcagccaagcctagagccctccggatcccatccaggcgcaaagaggaataggagggacatggaaccatttgcctctggctgtgtcacagggtgagccccaaaattggggttcagcgtgggaggccacgtggattcttggctttgtacaggaagatctacaagagcaagccaacagagtaaagtggaaggaagtttattcagaaaataaaggagtatcacagctcttttagaatttgtctagcaggctttccagtttttaccagaaaacccctataaattaaaaattttttacttaaatttaagaattaaaaaaatacaaaaaagaaaaaatgaaaataaaggaataagaagttacctactccaaaaaaaaaaa

SEQ ID NO: 354434 - DNA, 5782 bp, Homo sapiens
acgtttccttcctgctcttgttgactaggcgctgttcttgcttggctggtgccccagggcctggagaggtctgaagaaacctgggagccagcagcccggggctccactctgggttctgaaagcccattccctgctctgcggctcctcccaccccacctcttctcagccttgcagctcaagggttgatctcaggagtccaggacccaggagagggaagaatctgaggaacacagaacagtgagcgttgcccacaccccatctcccgtcaccacatctcccctcaccctcaccctccctgcctggccctggaccccatcccaggacctccctatcagctgacttcttccagtgtcttgcaggcccctctgggctcctccctcccctggcttttcctaccactccccctctatcggcgtctatctgtaggtgccctgggatttataaaactgggttccgaatgctgaataagagacggtaagagccaaggcaaaggacagcactgttctctgcctgcctgataccctcaccacctgggaacatcccccagacaccctcttaactccgggacagagatggctggcggagcctggggccgcctggcctgttacttggagttcctgaagaaggaggagctgaaggagttccagcttctgctcgccaataaagcgcactccaggagctcttcgggtgagacacccgctcagccagagaagacgagtggcatggaggtggcctcgtacctggtggctcagtatggggagcagcgggcctgggacctagccctccatacctgggagcagatggggctgaggtcactgtgcgcccaagcccaggaaggggcaggccactctccctcattcccctacagcccaagtgaaccccacctggggtctcccagccaacccacctccaccgcagtgctaatgccctggatccatgaattgccggcggggtgcacccagggctcagagagaagggttttgagacagctgcctgacacatctggacgccgctggagagaaatctctgcctcactcctctaccaagctcttccaagctccccagaccatgagtctccaagccaggagtcacccaacgcccccacatccacagcagtgctggggagctggggatccccacctcagcccagcctagcacccagagagcaggaggctcctgggacccaatggcctctggatgaaacgtcaggaatttactacacagaaatcagagaaagagagagagagaaatcagagaaaggcaggcccccatgggcagcggtggtaggaacgcccccacaggcgcacaccagcctacagccccaccaccacccatgggagccttctgtgagagagagcctctgttccacatggccctggaaaaatgaggattttaaccaaaaattcacacagctgctacttctacaaagacctcaccccagaagccaagatcccctggtcaagagaagctggcctgattatgtggaggagaatcgaggacatttaattgagatcagagacttatttggcccaggcctggatacccaagaacctcgcatagtcatactgcagggggctgctggaattgggaagtcaacactggccaggcaggtgaaggaagcctgggggagaggccagctgtatggggaccgcttccagcatgtcttctacttcagctgcagagagctggcccagtccaaggtggtgagtctcgctgagctcatcggaaaagatgggacagccactccggctcccattagacagatcctgtctaggccagagcggctgctcttcatcctcgatggtgtagatgagccaggatgggtcttgcaggagccgagttctgagctctgtctgcactggagccagccacagccggcggatgcactgctgggcagtttgctggggaaaactatacttcccgaggcatccttcctgatcacggctcggaccacagctctgcagaacctcattccttctttggagcaggcacgttgggtagaggtcctggggttctctgagtccagcaggaaggaatatttctacagatatttcacagatgaaaggcaagcaattagagcctttaggttggtcaaatcaaacaaagagctctgggccctgtgtcttgtgccctgggtgtcctggctggcctgcacttgcctgatgcagcagatgaagcggaaggaaaaactcacactgacttccaagaccaccacaaccctctgtctacattaccttgcccaggctctccaagctcagccattgggaccccagctcagagacctctgctctctggctgctgagggcatctggcaaaaaaagacccttttcagtccagatgacctcaggaagcatgggttagatggggccatcatctccaccttcttgaagatgggtattcttcaagagcaccccatccctctgagctacagcttcattcacctctgtttccaagagttctttgcagcaatgtcctatgtcttggaggatgagaaggggagaggtaaacattctaattgcatcatagatttggaaaagacgctagaagcatatggaatacatggcctgtttggggcatcaaccacacgtttcctattgggcctgttaagtgatgagggggagagagagatggagaacatctttcactgccggctgtctcaggggaggaacctgatgcagtgggtcccgtccctgcagctgctgctgcagccacactctctggagtccctccactgcttgtacgagactcggaacaaaacgttcctgacacaagtgatggcccatttcgaagaaatgggcatgtgtgtagaaacagacatggagctcttagtgtgcactttctgcattaaattcagccgccacgtgaagaagcttcagctgattgagggcaggcagcacagatcaacatggagccccaccatggtagtcctgttcaggtgggtcccagtcacagatgcctattggcagattctcttctccgtcctcaaggtcaccagaaacctgaaggagctggacctaagtggaaactcgctgagccactctgcagtgaagagtctttgtaagaccctgagacgccctcgctgcctcctggagaccctgcggttggctggctgtggcctcacagctgaggactgcaaggaccttgcctttgggctgagagccaaccagaccctgaccgagctggacctgagcttcaatgtgctcacggatgctggagccaaacacctttgccagagactgagacagccgagctgcaagctacagcgactgcagctggtcagctgtggcctcacgtctgactgctgccaggacctggcctctgtgcttagtgccagccccagcctgaaggagctagacctgcagcagaacaacctggatgacgttggcgtgcgactgctctgtgaggggctcaggcatcctgcctgcaaactcatacgcctggggctggaccagacaactctgagtgatgagatgaggcaggaactgagggccctggagcaggagaaacctcagctgctcatcttcagcagacggaaaccaagtgtgatgacccctactgagggcctggatacgggagagatgagtaatagcacatcctcactcaagcggcagagactcggatcagagagggcggcttcccatgttgctcaggctaatctcaaactcctggacgtgagcaagatcttcccaattgctgagattgcagaggaaagctccccagaggtagtaccggtggaactcttgtgcgtgccttctcctgcctctcaaggggacctgcatacgaagcctttggggactgacgatgacttctggggccccacggggcctgtggctactgaggtagttgacaaagaaaagaacttgtaccgagttcacttccctgtagctggctcctaccgctggcccaacacgggtctctgctttgtgatgagagaagcggtgaccgttgagattgaattctgtgtgtgggaccagttcctgggtgagatcaacccacagcacagctggatggtggcagggcctctgctggacatcaaggctgagcctggagctgtggaagctgtgcacctccctcactttgtggctctccaagggggccatgtggacacatccctgttccaaatggcccactttaaagaggaggggatgctcctggagaagccagccagggtggagctgcatcacatagttctggaaaaccccagcttctcccccttgggagtcctcctgaaaatgatccataatgccctgcgcttcattcccgtcacctctgtggtgttgctttaccaccgcgtccatcctgaggaagtcaccttccacctctacctgatcccaagtgactgctccattcggaaggccatagatgatctagaaatgaaattccagtttgtgcgaatccacaagccacccccgctgaccccactttatatgggctgtcgttacactgtgtctgggtctggttcagggatgctggaaatactccccaaggaactggagctctgctatcgaagccctggagaagaccagctgttctcggagttctacgttggccacttgggatcagggatcaggctgcaagtgaaagacaagaaagatgagactctggtgtgggaggccttggtgaaaccaggaaggaacaccagccagccgtggaacctcaggtgcaacagagacgccaggagatactagtgcccagcagcctgcggcagtaccaatgaagccagagagggcttggtggatgacaaggaggcctgagtagaccgcaggtgggtctgagaaatgggcttaggtgaggcaggtctttgaaggatttgttcttaatcatatgcgagatgctcaaaaggctggatgcctgcttttgtgggtgaagagcaagaagagaaaacaggttgtacacatacagatgcagatggagagacagagaaaaaaaaggaagaaggcagagaaatgcaccaattcttgagctgtattatctctggaccttgggattgtgggaggctttattttactactgattttgcctacactgttttctcaatttctagttttctacaaagatgatgtgttagctttttcacgcattaagattaaaatttaaaacagaccacacaataaatatttcttttaaaaggagaaatatgccctggggaagctccccacgcagctgagagcctggctggttgcatttcggcttcttaggtgccaagcctactagtgccccggggtcccagccagcggctcgcgtttcctcccccttgcgccgccagtctggttgccatggagacaaaccttgctgcgcagagactgccgagccgcaggcagcggagctggaacccggcgagccagcctctgcaacaggctgggggcggaaggaggagccaggcgaagcggcgcctcagctgagaggaccggcggaccctgcagaggccccctgcccctctggctccgcccccacccgggtcgctagaaatacagccgtagccccgcccaccgcccactgcgctctgacccagacccggctgacccacctacccgcgatcctgcccatggctgacgggctctttcggcgcagaccctggggtctcgagcagattcgcccggaccccgagtccgaaggcctgtttgacaagcctcccccggaagaccctcccgctgcccgcgggcccaggtcggcgtcggccgcgggcaagaaggctggtcggcgcgcgggcgggaggtcactattttacctattcgtgttccttgctacttatccactttaagatttcgttattgttctttca

SEQ ID NO: 354435 - DNA, 1199 bp, Homo sapiens
taatcattgttccctatgttctgtaggccatagatgatctagaaatgaaattccagtttgtgcgaatccacaagccacccccgctgaccccactttatatgggctgtcgttacactgtgtctggatcaggctgcaagtgaaagacaagaaagatgagactctggtgtgggaggccttggtgaaaccaggagatctcatgcctgcaactactctgatccctccagcccgcatagccgtaccttcacctctggatgccccgcagttgctgcactttgtggaccagtatcgagagcagctgatagcccgagtgacatcggtggaggttgtcttggacaaactgcatggacaggtgctgagccaggagcagtacgagagggtgctggctgagaacacgaggcccagccagatgcggaagctgttcagcttgagccagtcctgggaccggaagtgcaaagatggactctaccaagccctgaaggagacccatcctcacctcattatggaactctgggagaagggcagcaaaaagggactcctgccactcagcagctgaagtatcaacaccagcccttgacccttgagtcctggctttggctgacccttctttgggtctcagtttctttctctgcaaacaagttgccatctggtttgccttccagcactaaagtaatggaactttgatgatgcctttgctgggcattatgtgtccatgccagggatgccacagggggccccagtccaggtggcctaacagcatctcagggaatgtccatctggagctggcaagacccctgcagacctcatagagcctcatctggtggccacagcagccaagcctagagccctccggatcccatccaggcgcaaagaggaataggagggacatggaaccatttgcctctggctgtgtcacagggtgagccccaaaattggggttcagcgtgggaggccacgtggattcttggctttgtacaggaagatctacaagagcaagccaacagagtaaagtggaaggaagtttattcagaaaataaaggagtatcacagctcttttagaatttgtctagcaggctttccagtttttaccagaaaacccctataaattaaaaattttttacttaaatttaagaattaaaaaaatacaaaaaagaaaaaatgaaaataaaggaataagaagttacctactccaaaaaaaaaaa

SEQ ID NO: 354436 - DNA, 375 bp, Homo sapiens
agaagagttcttaggaccaagacttcctagcctgggagttttaagaggttaagtgttaccattgttaagtgtacagccttttgattttcctttttcatcattgtgcaggacaactggtcagccagttgaccagtcattagttctggccatcacctagtcagtcatgtgacatttgacaagagtgggtagtgcatcacccaaattgtttgggaaattttaataatatgtcatttttattgttttcaaagttgtccattgacatctgcaatattgttttcatgttttatcaaagtgggtaaaaaaatctacaacaggcccatctggattctggcagcatcgctggattttaatctaatctacgatcttttttttttt

SEQ ID NO: 354437 - DNA, 189 bp, Homo sapiens
gcaccagtagcaacaccacagcacccatagccttgggtggggtggggggggggctttggatgccaggaaccaagcaaagaaccgagcaagagtggggggccctggagtgcaacagggatattgcatgcctgctgggaactgcaaacaggggtggagaatgcagtggggccaggaaaacctgcagcccct

SEQ ID NO: 354438 - DNA, 3038 bp, Homo sapiens
gggagtccgtggaggggcatggcccctcggcgcctcctgttggttggggaggggaatttctccttcgccgccgctctgagcgaaaccctggatcagagcactcaacttaccgccacctgcctccagcgcccggccgagttggctcgggatccactggcctgggagaatctgcagtgcctgcgcgagcgaggtatcgatgtacgtttcggtgtggactgcacccagctggcagatgtctttgaactgcacgagagagaatttgatcaaatttatttcaacttcccgcattgtggacgcaaagctggcgtagctaagaacagggaactgcttgccaaatttttccaaagctgtgcagacgttcttgcagaggaaggagaagtccacgtggcattatgtagaggacaaggtggaactcctgcggataagccccagagagaatggcacaacagttggcaagtggttgccatggcagccctgggggggctcattttaagcgacgtgtatccattcagctgtaaggctgtggcagggtacaagtgcactggatataggagtcaagataagtcctttcatgtagaaggtgctttgaaccatatcttcaccaggagcttaccttttgaaggttctcaacccagaatcttcaggatcaaactgggtaaccagtggttttcctttccagaaccagaagcacttgtaggaaagttgaacaggggtttcctggaagcaccttcatgtcatcctatcaaaaccataaatgagaaactcattgctgaattaggcaaagttttcccgctaaaaaggctgaagtgttcctaccctttgctgccacaggaaggtaccagtgttcttcctttctggaattgtgactttctgtcagctgctttttggattagtctccatgaagataactcaaattctgagtccctgactggtgggacatcacaagatgtggaagactttctagtgtcattttcagaacttagccttctcaagaatcctggaagagatggtaaagaagaagcttgtgaaggaacctgtggccaggccaagatctgccttagaccttctctcctagtgcatgttcaggatgtcatcgaagtaccagacttcctctcaggcttgccatggctagtcgaggggctcggcagcgcctgaagggcagcggggccagcagtggggatacggccccggctgcggacaagctgcgggagctgctgggcagccgagaggcgggcggcgcggagcaccggaccgagttatctgggaacaaagcaggacaagtctgggcacctgaaggatctactgctttcaagtgtctgctttcagcaaggttatgtgctgctctcctgagcaacatctctgactgtgatgaaacattcaactactgggagccaacacactacctcatctatggggaagggtttcagacttgggaatattccccagcatatgccattcgctcctatgcttacctgttgcttcatgcctggccagctgcatttcatgcaagaattctacaaactaataagattcttgtgttttactttttgcgatgtcttctggcttttgtgagctgtatttgtgaactttacttttacaaggctgtgtgcaagaagtttgggttgcacgtgagtcgaatgatgctagccttcttggttctcagcactggcatgttttgctcatcatcagcattccttcctagtagcttctgtatgtacactacgttgatagccatgactggatggtatatggacaagacttccattgctgtgctgggagtagcagctggggctatcttaggctggccattcagtgcagctcttggtttacccattgcctttgatttgctggtcatgaaacacaggtggaagagtttctttcattggtcgctgatggccctcatactatttctggtgcctgtggtggtcattgacagctactattatgggaagttggtgattgcaccactcaacattgtttgtataatgtctttactcctcatggacctgatctttatggtacagaaccctggtatttctatttaattaatggatttctgaatttcaatgtagcctttgctttggctctcctagtcctaccactgacttctcttatggaatacctgctgcagagatttcatgttcagaatttaggccacccgtattggcttaccttggctccaatgtatatttggtttataattttcttcatccagcctcacaaagaggagagatttcttttccctgtgtatccacttatatgtctctgtggcgctgtggctctctctgcacttcagaaatgttaccactttgtgtttcaacgatatcgcctggagcactatactgtgacatcgaattggctggcattaggaactgtcttcctgtttgggctcttgtcattttctcgctctgtggcactgttcagaggatatcacgggccccttgatttgtatccagaattttaccgaattgctacagacccaaccatccacactgtcccagaaggcagacctgtgaatgtctgtgtgggaaaagagtggtatcgatttcccagcagcttccttcttcctgacaattggcagcttcagttcattccatcagagttcagaggtcagttaccaaaaccttttgcagaaggacctctggccacccggattgttcctactgacatgaatgaccagaatctagaagagccatccagatatattgatatcagtaaatgccattatttagtggatttggacaccatgagagaaacaccccgggagccaaaatattcatcccaataaagaagaatggatcagcttggcctatagaccattccttgatgcttctaggctcaatttgttgcccaggctgggctcaactcctgggctcaagcaatcctcgcacttcagcctctcaaaatattgggattacaggcctgagccaaccgtgcctggccataactctctcctggactgggatcttccaaagtgctgcgggattcttgtcccttctgccagatcagatacgcggccgtaatacacatcctaaacc

SEQ ID NO: 354439 - DNA, 2999 bp, Homo sapiens
gggagtccgtggaggggcatggcccctcggcgcctcctgttggttggggaggggaatttctccttcgccgccgctctgagcgaaaccctggatcagagcactcaacttaccgccacctgcctccagcgcccggccgagttggctcgggatccactggcctgggagaatctgcagtgcctgcgcgagcgaggtatcgatgtacgtttcggtgtggactgcacccagctggcagatgtctttgaactgcacgagagagaatttgatcaaatttatttcaacttcccgcattgtggacgcaaagctggcgtagctaagaacagggaactgcttgccaaatttttccaaagctgtgcagacgttcttgcagaggaaggagaagtccacgtggcattatgtagaggacaaggtggaactcctgcggataagccccagagagaatggcacaacagttggcaagtggttgccatggcagccctgggggggctcattttaagcgacgtgtatccattcagctgtaaggctgtggcagggtacaagtgcactggatataggagtcaagataagtcctttcatgtagaaggtgctttgaaccatatcttcaccaggagcttaccttttgaaggttctcaacccagaatcttcaggatcaaactgggtaaccagtggttttcctttccagaaccagaagcacttgtaggaaagttgaacaggggtttcctggaagcaccttcatgtcatcctatcaaaaccataaatgagaaactcattgctgaattaggcaaagttttcccgctaaaaaggctgaagtgttcctaccctttgctgccacaggaaggtaccagtgttcttcctttctggaattgtgactttctgtcagctgctttttggattagtctccatgaagataactcaaattctgagtccctgactggtgggacatcacaagatgtggaagactttctagtgtcattttcagaacttagccttctcaagaatcctggaagagatggtaaagaagaagcttgtgaaggaacctgtggccaggccaagatctgccttagaccttctctcctagtgcatgttcaggatgtcatcgaagtaccagacttcctctcaggcttgccatggctagtcgaggggctcggcagcgcctgaagggcagcggggccagcagtggggatacggccccggctgcggacaagctgcgggagctgctgggcagccgagaggcgggcggcgcggagcaccggaccgagttatctgggaacaaagcaggacaagtctgggcacctgaaggatctactgctttcaagtgtctgctttcagcaaggttatgtgctgctctcctgagcaacatctctgactgtgatgaaacattcaactactgggagccaacacactacctcatctatggggaagggtttcagacttgggaatattccccagcatatgccattcgctcctatgcttacctgttgcttcatgcctggccagctgcatttcatgcaagaattctacaaactaataagattcttgtgttttactttttgcgatgtcttctggcttttgtgagctgtatttgtgaactttacttttacaaggctgtgtgcaagaagtttgggttgcacgtgagtcgaatgatgctagccttcttggttctcagcactggcatgttttgctcatcatcagcattccttcctagtagcttctgtatgtacactacgttgatagccatgactggatggtatatggacaagacttccattgctgtgctgggagtagcagctggggctatcttaggctggccattcagtgcagctcttggtttacccattgcctttgatttgctggtcatgaaacacaggtggaagagtttctttcattggtcgctgatggccctcatactatttctggtgcctgtggtggtcattgacagctactattatgggaagttggtgattgcaccactcaacattgtttgtataatgtctttactcctcatggacctgatctttatggtacagaaccctggtatttctatttaattaatggatttctgaatttcaatgtagcctttgctttggctctcctagtcctaccactgacttctcttatggaatacctgctgcagagatttcatgttcagaatttaggccacccgtattggcttaccttggctccaatgtatatttggtttataattttcttcatccagcctcacaaagaggagagatttcttttccctgtgtatccacttatatgtctctgtggcgctgtggctctctctgcacttcagcacagttttctgtacttccagaaatgttaccactttgtgtttcaacgatatcgcctggagcactatactgtgacatcgaattggctggcattaggaactgtcttcctgtttgggctcttgtcattttctcgctctgtggcactgttcagaggatatcacgggccccttgatttgtatccagaattttaccgaattgctacagacccaaccatccacactgtcccagaaggcagacctgtgaatgtctgtgtgggaaaagagtggtatcgatttcccagcagcttccttcttcctgacaattggcagcttcagttcattccatcagagttcagaggtcagttaccaaaaccttttgcagaaggacctctggccacccggattgttcctactgacatgaatgaccagaatctagaagagccatccagatatattgatatcagtaaatgccattatttagtggatttggacaccatgagagaaacaccccgggagccaaaatattcatcccaataaagaagaatggatcagcttggcctatagaccattccttgatgcttctaggatcttcaaagctgctgccggggctttctatgttccccttcctggtcagatcagttatacagtgtacgttaactacaccttcttcaaacccggaaagcaaggcaatccagaaaaaagtggggtttgcacaaccttggcccaa

SEQ ID NO: 354440 - DNA, 1923 bp, Homo sapiens
aacatatggaattggagtaggctatgtaccttgcacctaggcttctatctgaacataagggggaatgaataaagccatcaaaagcaatgaccttgttaagaaaagaaagaaaaggagaatgacagctttgtggccttcaagttatctgggaacaaagcaggacaagtctgggcacctgaaggatctactgctttcaagtgtctgctttcagcaaggttatgtgctgctctcctgagcaacatctctgactgtgatgaaacattcaactactgggagccaacacactacctcatctatggggaagggtttcagacttgggaatattccccagcatatgccattcgctcctatgcttacctgttgcttcatgcctggccagctgcatttcatgcaagaattctacaaactaataagattcttgtgttttactttttgcgatgtcttctggcttttgtgagctgtatttgtgaactttacttttacaaggctgtgtgcaagaagtttgggttgcacgtgagtcgaatgatgctagccttcttggttctcagcactggcatgttttgctcatcatcagcattccttcctagtagcttctgtatgtacactacgttgatagccatgactggatggtatatggacaagacttccattgctgtgctgggagtagcagctggggctatcttaggctggccattcagtgcagctcttggtttacccattgcctttgatttgctggtcatgaaacacaggtggaagagtttctttcattggtcgctgatggccctcatactatttctggtgcctgtggtggtcattgacagctactattatgggaagttggtgattgcaccactcaacattgtttgtataatgtctttactcctcatggacctgatctttatggtacagaaccctggtatttctatttaattaatggatttctgaatttcaatgtagcctttgctttggctctcctagtcctaccactgacttctcttatggaatacctgctgcagagatttcatgttcagaatttaggccacccgtattggcttaccttggctccaatgtatatttggtttataattttcttcatccagcctcacaaagaggagagatttcttttccctgtgtatccacttatatgtctctgtggcgctgtggctctctctgcacttcagaaatgttaccactttgtgtttcaacgatatcgcctggagcactatactgtgacatcgaattggctggcattaggaactgtcttcctgtttgggctcttgtcattttctcgctctgtggcactgttcagaggatatcacgggccccttgatttgtatccagaattttaccgaattgctacagacccaaccatccacactgtcccagaaggcagacctgtgaatgtctgtgtgggaaaagagtggtatcgatttcccagcagcttccttcttcctgacaattggcagcttcagttcattccatcagagttcagaggtcagttaccaaaaccttttgcagaaggacctctggccacccggattgttcctactgacatgaatgaccagaatctagaagagccatccagatatattgatatcagtaaatgccattatttagtggatttggacaccatgagagaaacaccccgggagccaaaatattcatcccaataaagaagaatggatcagcttggcctatagaccattccttgatgcttctaggctcaatttgttgcccaggctgggctcaactcctgggctcaagcaatcctcgcacttcagcctctcaaaatattgggattacaggcctgagccaaccgtgcctggccataactctctcctggactgggatcttccaaagtgctgcgggattcttgtcccttctgccagatcagatacgcggccgtaatacacatcctaaacc

SEQ ID NO: 354441 - DNA, 1473 bp, Homo sapiens
gggagtccgtggaggggcatggcccctcggcgcctcctgttggttggggaggggaatttctccttcgccgccgctctgagcgaaaccctggatcagagcactcaacttaccgccacctgcctccagcgcccggccgagttggctcgggatccactggcctgggagaatctgcagtgcctgcgcgagcgaggtatcgatgtacgtttcggtgtggactgcacccagctggcagatgtctttgaactgcacgagagagaatttgatcaaatttatttcaacttcccgcattgtggacgcaaagctggcgtagctaagaacagggaactgcttgccaaatttttccaaagctgtgcagacgttcttgcagaggaaggagaagtccacgtggcattatgtagaggacaaggtggaactcctgcggataagccccagagagaatggcacaacagttggcaagtggttgccatggcagccctgggggggctcattttaagcgacgtgtatccattcagctgtaaggctgtggcagggtacaagtgcactggatataggagtcaagataagtcctttcatgtagaaggtgctttgaaccatatcttcaccaggagcttaccttttgaaggttctcaacccagaatcttcaggatcaaactgggtaaccagtggttttcctttccagaaccagaagcacttgtaggaaagttgaacaggggtttcctggaagcaccttcatgtcatcctatcaaaaccataaatgagaaactcattgctgaattaggcaaagttttcccgctaaaaaggctgaagtgttcctaccctttgctgccacaggaaggtaccagtgttcttcctttctggaattgtgactttctgtcagctgctttttggattagtctccatgaagataactcaaattctgagtccctgactggtgggacatcacaagatgtggaagactttctagtgtcattttcagaacttagccttctcaagaatcctggaagagatggtaaagaagaagcttgtgaaggaacctgtggccaggccaagatctgccttagaccttctctcctagtgcatgttcaggatgtcatcgaagtaccagacttcctctcaggttctctgcacatcctcagtggacctgtctttcagaagtgccacattttgcctttcacaatgccagcatttcatgaaactttatttatccttggggttaatcaaaatctgaaggatggctgtcttcaatcactgctggatcatctgaagggcattctagatagcctgctgacccagacattgccggagagctctaagctgagcagtttagtcaaatttgtccttcagtcaaatggaaaggattatatgattcgtgtgaagactcataattttagcccagattgtactgaggatctaattattgggtctgttatcacatctgccactagtgttatacataaagaccagtgttttgtg

SEQ ID NO: 354442 - DNA, 2459 bp, Homo sapiens
acagataagttgaaggcatcttttcatacagagcctctgaaccctttgctgagtttaaaaaaacctcactgcctattaattgtggttgttttgtagttgatactgatttttcttccctactgattcagactttctgcagcagaagaggcagatctgcatttttgttcagagttactagaaacactttaatcaattgtttctgttccagagaccctgtactctgtcctctgctgtataaaacaaggttgaggtagatggaactaattagggggctatttaaaggccagattatctgtgtcagcaggtggagagtgcaaagcattgctgccatacaatatctggcccttgaggaggctttctagaatttccggggctagaggttaggaccaggacagtctcagaggaccaatggaagataagcttcttcagaagtaaattgtcagcaatggctctaagtcttttaaagcatattcccttcctggaaatataatcatggggtgttcctggggagcgtggaattctatgagtttttgatttgaggtgtaggctgggagaggaattacatggttagaattgtataattgggttggtacctaaaaaaacaggaaggagaggccaggtgcggtggttcacgcctgtaatcccggtactttgggaggccgagacaggcagatcacgaggtcaagagctcgagaccagcctggccaacatggtgaaaccccgtctctactaaaaatacaaaaattagctgggtgtggtggcacgtgcctgtaatcccagctactcggtaggctcagtcaagagaatcgcttgaaccagggaatcaggttgcagtgagctgagatcccaccactgcactccagcctggtgatagagcaagactccgtctaaaaaaaaaaaccaggagtgagaaaaataagagtcattgaacttcatttttttaaaaaagaatatcactttgctgtcctttctaatatagcatttccccaattatgtacctgtttattgacattttataatgtaggtaaatttttaatcagtttttaattgatacctaattaacctcgagctcttgtcctcctgccttttttcacttctttactcttgcagcattccttcctagtagcttctgtatgtacactacgttgatagccatgactggatggtatatggacaagacttccattgctgtgctgggagtagcagctggggctatcttaggctggccattcagtgcagctcttggtttacccattgcctttgatttgctggtcatgaaacacaggtggaagagtttctttcattggtcgctgatggccctcatactatttctggtgcctgtggtggtcattgacagctactattatgggaagttggtgattgcaccactcaacattgtttgtataatgtctttactcctcatggacctgatctttatggtacagaaccctggtatttctatttaattaatggatttctgaatttcaatgtagcctttgctttggctctcctagtcctaccactgacttctcttatggaatacctgctgcagagatttcatgttcagaatttaggccacccgtattggcttaccttggctccaatgtatatttggtttataattttcttcatccagcctcacaaagaggagagatttcttttccctgtgtatccacttatatgtctctgtggcgctgtggctctctctgcacttcagaaatgttaccactttgtgtttcaacgatatcgcctggagcactatactgtgacatcgaattggctggcattaggaactgtcttcctgtttgggctcttgtcattttctcgctctgtggcactgttcagaggatatcacgggccccttgatttgtatccagaattttaccgaattgctacagacccaaccatccacactgtcccagaaggcagacctgtgaatgtctgtgtgggaaaagagtggtatcgatttcccagcagcttccttcttcctgacaattggcagcttcagttcattccatcagagttcagaggtcagttaccaaaaccttttgcagaaggacctctggccacccggattgttcctactgacatgaatgaccagaatctagaagagccatccagatatattgatatcagtaaatgccattatttagtggatttggacaccatgagagaaacaccccgggagccaaaatattcatcccaataaagaagaatggatcagcttggcctatagaccattccttgatgcttctaggctcaatttgttgcccaggctgggctcaactcctgggctcaagcaatcctcgcacttcagcctctcaaaatattgggattacaggcctgagccaaccgtgcctggccataactctctcctggactgggatcttccaaagtgctgcgggattcttgtcccttctgccagatcagatacgcggccgtaatacacatcctaaacc

SEQ ID NO: 354443 - DNA, 391 bp, Homo sapiens
aagtaccagacttcctctcaggttctctgcacatcctcagtggacctgtctttcagaagtgccacattttgcctttcacaatgccagcatttcatgaaactttatttatccttggggttaatcaaaatctgaaggatggctgtcttcaatcactgctggatcatctgaagggcattctagatagcctgctgacccagacattgccggagagctctaagctgagcagtttagtcaaatttgtccttcagtcaaatggaaaggattatatgattcgtgtgaagactcataattttagcccagattgtactgaggatctaattattgggtctgttatcacatctgccactagtgttatacataaagaccagtgttttgtgtttgtgtctatgaa

SEQ ID NO: 354444 - DNA, 523 bp, Homo sapiens
ttaagcatctctagaattataaatggtcacattttctgatatattgtagggatggtggctgtcagagttctgaaatacacgtctgtttctccttatggtagatgatttctttgtttcctttcaagatcaatttaaagataattcttttctgtccagctatttgtatttttaattctagctacattataattatttactatcttaagttagaaaagttatttttgtgtgtgtttaaacaggggtttcctggaagcaccttcatgtcatcctatcaaaaccataaatgagaaactcattgctgaattaggcaaagttttcccgctaaaaaggctgaagtgttcctaccctttgctgccacaggaaggtaccagtgttcttcctttctggaattgtgactttctgtcagctgctttttggattagtctccatgaagataactcaaattctgagtccctgactggtgggacatcacaagatgtggaagactttctagtgtcattttcagaacttagccttctcaaga

SEQ ID NO: 354445 - DNA, 2615 bp, Homo sapiens
gggagtccgtggaggggcatggcccctcggcgcctcctgttggttggggaggggaatttctccttcgccgccgctctgagcgaaaccctggatcagagcactcaacttaccgccacctgcctccagcgcccggccgagttggctcgggatccactggcctgggagaatctgcagtgcctgcgcgagcgaggtatcgatgtacgtttcggtgtggactgcacccagctggcagatgtctttgaactgcacgagagagaatttgatcaaatttatttcaacttcccgcattgtggacgcaaagctggcgtagctaagaacagggaactgcttgccaaatttttccaaagctgtgcagacgttcttgcagaggaaggagaagtccacgtggcattatgtagaggacaaggtggaactcctgcggataagccccagagagaatggcacaacagttggcaagtggttgccatggcagccctgggggggctcattttaagcgacgtgtatccattcagctgtaaggctgtggcagggtacaagtgcactggatataggagtcaagataagtcctttcatgtagaaggtgctttgaaccatatcttcaccaggagcttaccttttgaaggttctcaacccagaatcttcaggatcaaactgggtaaccagtggttttcctttccagaaccagaagcacttgtaggaaagttgaacaggggtttcctggaagcaccttcatgtcatcctatcaaaaccataaatgagaaactcattgctgaattaggcaaagttttcccgctaaaaaggctgaagtgttcctaccctttgctgccacaggaaggtaccagtgttcttcctttctggaattgtgactttctgtcagctgctttttggattagtctccatgaagataactcaaattctgagtccctgactggtgggacatcacaagatgtggaagactttctagtgtcattttcagaacttagccttctcaagaatcctggaagagatggtaaagaagaagcttgtgaaggaacctgtggccaggccaagatctgccttagaccttctctcctagtgcatgttcaggatgtcatcgaagtaccagacttcctctcaggttctctgcacatcctcagtggacctgtctttcagaagtgccacattttgcctttcacaatgccagcatttcatgaaactttatttatccttggggttaatcaaaatctgaaggatggctgtcttcaatcactgctggatcatctgaagggcattctagatagcctgctgacccagacattgccggagagctctaagctgagcagtttagtcaaatttgtccttcagtcaaatggaaaggattatatgattcgtgtgaagactcataattttagcccagattgtactgaggatctaattattgggtctgttatcacatctgccactagtgttatacataaagaccagtgttttgtgtttgtgtctatgaacttggacttattagccatgcttgtctggtgtatctctgactggagaatgttgtggacgtttgataaccgtttcctgaaaaattttgtccctggcaaaatagaaccctttaaaagtcattctctgtatcctccatgttatgtgcatgatgttagtttttggatagatcagaagaaaggatttgatgaactagagtttcacactgtggcccgagcagtgtctcaggacactattatatccatacagtttcttagccgtttccagcatccaaagactcaacaggtcagtctctgctatagattgacctaccagacctgtgacaaggccctcacccagcagcaagtagcatcaatgcagtcccagtttaggaaggagattcaacaacacctatatgttatacctcggtagtttggtaaatccttttctgcagtgtgatccttcattgcgggggatgtggaggaaaattaccaacttgcaaccagtagtcctttctggatttttgtttttgtaaaatcttttactttgtgaccatagctactgttcgttgatctttttttttttttttttttgagacggagtcttgctctgccgcccaggcgggagtgcagtggcagtggcatgatatcagctcactataagctccacctcccaggttcatgccattctcctgcctcagcctcccgagtagctgggactacaggcacctgccaccacgcctggctaatttttttttttgtatttttagtagagacgaggtttcaccgtgttagccaggatggtctcaatctcccggcctcgtgatctgcctgcgtcggcctcccaaagtgctgggattatagatgtgagccaccgcgcccggcctactgttagttgatcttaaagataccttgactctattactgaaacttatagattataatgtgattggtgacatttggagttgtgtaatattttggtcccgagaagtgactaaaacaataaacaaaacagcatcttgtactttagatgctctattgttgaacaggcagtagaacttaagtgtctcatcaaatataaatatgttttccacactgtcaattactcttcccttaactttgttgtatcatttcattaaatcaccttatgagagt

SEQ ID NO: 354446 - DNA, 1982 bp, Homo sapiens
agccaaagctatgtctgcgcgctcaccgacttcatagggtgccgaattcttttttccccaggcttgccatggctagtcgaggggctcggcagcgcctgaagggcagcggggccagcagtggggatacggccccggctgcggacaagctgcgggagctgctgggcagccgagaggcgggcggcgcggagcaccggaccgagttatctgggaacaaagcaggacaagtctgggcacctgaaggatctactgctttcaagtgtctgctttcagcaaggttatgtgctgctctcctgagcaacatctctgactgtgatgaaacattcaactactgggagccaacacactacctcatctatggggaagggtttcagacttgggaatattccccagcatatgccattcgctcctatgcttacctgttgcttcatgcctggccagctgcatttcatgcaagaattctacaaactaataagattcttgtgttttactttttgcgatgtcttctggcttttgtgagctgtatttgtgaactttacttttacaaggctgtgtgcaagaagtttgggttgcacgtgagtcgaatgatgctagccttcttggttctcagcactggcatgttttgctcatcatcagcattccttcctagtagcttctgtatgtacactacgttgatagccatgactggatggtatatggacaagacttccattgctgtgctgggagtagcagctggggctatcttaggctggccattcagtgcagctcttggtttacccattgcctttgatttgctggtcatgaaacacaggtggaagagtttctttcattggtcgctgatggccctcatactatttctggtgcctgtggtggtcattgacagctactattatgggaagttggtgattgcaccactcaacattgtttgtataatgtctttactcctcatggacctgatctttatggtacagaaccctggtatttctatttaattaatggatttctgaatttcaatgtagcctttgctttggctctcctagtcctaccactgacttctcttatggaatacctgctgcagagatttcatgttcagaatttaggccacccgtattggcttaccttggctccaatgtatatttggtttataattttcttcatccagcctcacaaagaggagagatttcttttccctgtgtatccacttatatgtctctgtggcgctgtggctctctctgcacttcagaaatgttaccactttgtgtttcaacgatatcgcctggagcactatactgtgacatcgaattggctggcattaggaactgtcttcctgtttgggctcttgtcattttctcgctctgtggcactgttcagaggatatcacgggccccttgatttgtatccagaattttaccgaattgctacagacccaaccatccacactgtcccagaaggcagacctgtgaatgtctgtgtgggaaaagagtggtatcgatttcccagcagcttccttcttcctgacaattggcagcttcagttcattccatcagagttcagaggtcagttaccaaaaccttttgcagaaggacctctggccacccggattgttcctactgacatgaatgaccagaatctagaagagccatccagatatattgatatcagtaaatgccattatttagtggatttggacaccatgagagaaacaccccgggagccaaaatattcatcccaataaagaagaatggatcagcttggcctatagaccattccttgatgcttctaggctcaatttgttgcccaggctgggctcaactcctgggctcaagcaatcctcgcacttcagcctctcaaaatattgggattacaggcctgagccaaccgtgcctggccataactctctcctggactgggatcttccaaagtgctgcgggattcttgtcccttctgccagatcagatacgcggccgtaatacacatcctaaacc

SEQ ID NO: 354447 - DNA, 2225 bp, Homo sapiens
  misc_feature (2021)..(2021): n is a, c, g, or t
  misc_feature (2032)..(2032): n is a, c, g, or t
  misc_feature (2035)..(2036): n is a, c, g, or t
  misc_feature (2046)..(2046): n is a, c, g, or t
  misc_feature (2050)..(2050): n is a, c, g, or t
  misc_feature (2054)..(2054): n is a, c, g, or t
  misc_feature (2062)..(2062): n is a, c, g, or t
  misc_feature (2071)..(2071): n is a, c, g, or t
  misc_feature (2082)..(2083): n is a, c, g, or t
  misc_feature (2088)..(2089): n is a, c, g, or t
  misc_feature (2101)..(2101): n is a, c, g, or t
  misc_feature (2106)..(2106): n is a, c, g, or t
gggagtccgtggaggggcatggcccctcggcgcctcctgttggttggggaggggaatttctccttcgccgccgctctgagcgaaaccctggatcagagcactcaacttaccgccacctgcctccagcgcccggccgagttggctcgggatccactggcctgggagaatctgcagtgcctgcgcgagcgaggtatcgatgtacgtttcggtgtggactgcacccagctggcagatgtctttgaactgcacgagagagaatttgatcaaatttatttcaacttcccgcattgtggacgcaaagctggcgtagctaagaacagggaactgcttgccaaatttttccaaagctgtgcagacgttcttgcagaggaaggagaagtccacgtggcattatgtagaggacaaggtggaactcctgcggataagccccagagagaatggcacaacagttggcaagtggttgccatggcagccctgggggggctcattttaagcgacgtgtatccattcagctgtaaggctgtggcagggtacaagtgcactggatataggagtcaagataagtcctttcatgtagaaggtgctttgaaccatatcttcaccaggagcttaccttttgaaggttctcaacccagaatcttcaggatcaaactgggtaaccagtggttttcctttccagaaccagaagcacttgtaggaaagttgaacaggggtttcctggaagcaccttcatgtcatcctatcaaaaccataaatgagaaactcattgctgaattaggcaaagttttcccgctaaaaaggctgaagtgttcctaccctttgctgccacaggaaggtaccagtgttcttcctttctggaattgtgactttctgtcagctgctttttggattagtctccatgaagataactcaaattctgagtccctgactggtgggacatcacaagatgtggaagactttctagtgtcattttcagaacttagccttctcaagaatcctggaagagatggtaaagaagaagcttgtgaaggaacctgtggccaggccaagatctgccttagaccttctctcctagtgcatgttcaggatgtcatcgaagtaccagacttcctctcaggcttgccatggctagtcgaggggctcggcagcgcctgaagggcagcggggccagcagtggggatacggccccggctgcggacaagctgcgggagctgctgggcagccgagaggcgggcggcgcggagcaccggaccgagttatctgggaacaaagcaggacaagtctgggcacctgaaggatctactgctttcaagtgtctgctttcagcaaggttatgtgctgctctcctgagcaacatctctgactgtgatgaaacattcaactactgggagccaacacactacctcatctatggggaagggtttcagacttgggaatattccccagcatatgccattcgctcctatgcttacctgttgcttcatgcctggccagctgcatttcatgcaagaattctacaaactaataagattcttgtgttttactttttgcgatgtcttctggcttttgtgagctgtatttgtgaactttacttttacaaggctgtgtgcaagaagtttgggttgcacgtgagtcgaatgatgctagccttcttggttctcagcactggcatgttttgctcatcatcagcattccttcctagtagcttctgtatgtacactacgttgatagccatgactggatggtatatggacaagacttccattgctgtgctgggagtagcagctggggctatcttaggctggccattcagtgcagctcttggtttacccattgcctttgatttgctggtcatgaaacacaggtggaagagtttctttcattggtcgctgatggccctcatactatttctggtgcctgtggtggtcattgacagctactattatgggaagttggtgattgcaccactcaacattgtttgtataatgtctttactcctcatggacctgatctttatggtncagaacctggnttnnatttaattangggnttcngatttcangtgccttgnttgggctcctnntctanncgggttctttgnaacgnggggatttgttgagtttgggccgcgtggttccgggcgcagttttggaaaattcgcccaacggggccggcacaaaatgggggcctgtaaaaagtgtccgaagcaggtgaaagttctgcga

SEQ ID NO: 354448 - DNA, 2758 bp, Homo sapiens
gggagtccgtggaggggcatggcccctcggcgcctcctgttggttggggaggggaatttctccttcgccgccgctctgagcgaaaccctggatcagagcactcaacttaccgccacctgcctccagcgcccggccgagttggctcgggatccactggcctgggagaatctgcagtgcctgcgcgagcgaggtatcgatgtacgtttcggtgtggactgcacccagctggcagatgtctttgaactgcacgagagagaatttgatcaaatttatttcaacttcccgcattgtggacgcaaagctggcgtagctaagaacagggaactgcttgccaaatttttccaaagctgtgcagacgttcttgcagaggaaggagaagtccacgtggcattatgtagaggacaaggtggaactcctgcggataagccccagagagaatggcacaacagttggcaagtggttgccatggcagccctgggggggctcattttaagcgacgtgtatccattcagctgtaaggctgtggcagggtacaagtgcactggatataggagtcaagataagtcctttcatgtagaaggtgctttgaaccatatcttcaccaggagcttaccttttgaaggttctcaacccagaatcttcaggatcaaactgggtaaccagtggttttcctttccagaaccagaagcacttgtaggaaagttgaacaggggtttcctggaagcaccttcatgtcatcctatcaaaaccataaatgagaaactcattgctgaattaggcaaagttttcccgctaaaaaggctgaagtgttcctaccctttgctgccacaggaaggtaccagtgttcttcctttctggaattgtgactttctgtcagctgctttttggattagtctccatgaagataactcaaattctgagtccctgactggtgggacatcacaagatgtggaagactttctagtgtcattttcagaacttagccttctcaagaatcctggaagagatggtaaagaagaagcttgtgaaggaacctgtggccaggccaagatctgccttagaccttctctcctagtgcatgttcaggatgtcatcgaagtaccagacttcctctcaggttctctgcacatcctcagtggacctgtctttcagaagtgccacattttgcctttcacaatgccagcatttcatgaaactttatttatccttggggttaatcaaaatctgaaggatggctgtcttcaatcactgctggatcatctgaagggcattctagatagcctgctgacccagacattgccggagagctctaagctgagcagtttagtcaaatttgtccttcagtcaaatggaaaggattatatgattcgtgtgaagactcataattttagcccagattgtactgaggatctaattattgggtctgttatcacatctgccactagtgttatacataaagaccagtgttttgtgtttgtgtctatgaacttggacttattagccatgcttgtctggtgtatctctgactggagaatgttgtggacgtttgataaccgtttcctgaaaaattttgtccctggcaaaatagaaccctttaaaagtcattctctgtatcctccatgttatgtgcatgatgttagtttttggatagatcagaagaaaggatttgatgaactagagtttcacactgtggcccgagcagtgtctcaggacactattatatccatacagtttcttagccgtttccagcatccaaagactcaacaggtcagtctctgctatagattgacctaccagacctgtgacaaggccctcacccagcagcaagtagcatcaatgcagtcccagtttaggaaggagattcaacaacacctatatgttatacctcggtagtttggtaaatccttttctgcagtgtgatccttcattgcgggggatgtggaggaaaattaccaacttgcaaccagtagtcctttctggatttttgtttttgtaaaatcttttactttgtgaccatagctactgttcgttgatctttttttttttttttttttgagacggagtcttgctctgccgcccaggcgggagtgcagtggcagtggcatgatatcagctcactataagctccacctcccaggttcatgccattctcctgcctcagcctcccgagtagctgggactacaggcacctgccaccacgcctggctaatttttttttttgtatttttagtagagacgaggtttcaccgtgttagccaggatggtctcaatctcccggcctcgtgatctgcctgcgtcggcctcccaaagtgctgggattatagatgtgagccaccgcgcccggcctactgttagttgatcttaaagataccttgactctattactgaaacttatagattataatgtgattggtgacatttggagttgtgtaatattttggtcccgagaagtgactaaaacaataaacaaaacagcatcttgtactttagatgctctattgttgaacaggcagtagaacttaagtgtctcatcaaatataaatatgttttccacactgtcaattactcttcccttaactttgttgtatcatttcattaaatcaccttatgagagtagtttttggcatcagactaacatttattagcttgggaaattgcaaatattccacattaattttggtattattattataatcatcaccattttaattctgtggttgaaagtcatggaacgaataaagtgtcagatttagggtta

SEQ ID NO: 354449 - DNA, 383 bp, Homo sapiens
caattttctaaagggattgtttgcttctttactgttgagttttgagagttctttttatattgtagatactagccttttgtcgaatatgtcatttacaaatattttctcgcagcctatagcttgtcttttcacagagcaaaagtttctaatgatcaaatttcccgtttatgaattgtggtttttatcttctgaattctttttgcctagtcttaatcccaaatatatagtcctaggtttttccctagaagcattatagttttacacttcacatttaagtcaatgatccatccatttggagttaatttttgtactaagtgtgatttaggtccaggttccttttttggtttttgtttgtttgtttttgctattggatgtcctatggc

SEQ ID NO: 354450 - DNA, 382 bp, Homo sapiens
tttttttttttcataaagacagggtcttgctatgttccccaggctggacttgaactctcagactcctgcctcagcctcccaagtagctgggactacaggtgtgcactacttttgttgttttttttgttgttgtagagatgatgtcttgctatgttgcccaggctgatctccaactcctgttctcaaatgatcctcccaacgtggcctcccaaagagctgagattgcagatatgagccaccttgctcagtcctcagacttctttgctttttatttcacctgatgctgttgttgttttcaaatagatgagtttaatccatttcacttggagttatgttactatcttattcagtattttgtctactattttttctgtattttttt

SEQ ID NO: 354451 - DNA, 1169 bp, Homo sapiens
gcagcagcagcagctgatgatgaagagagaggcagtggcagagggggggcaccttttatttctatttttaaagggacaggacactaattctaccccacttcaaccttgaattcaggggggtggggggaaggcggctgagttccttcccccaccctccagccctgagccctgagagggggattgagcctgagagaggagaaggagtttcttcttcttcgaaaacccccatccacgactcctaccccctcacccctccaactcgcctccctccctccaccctcctcctctttggccgtgagaggaggagagaaagaaaccaaaagcctcttagcaacacagaccctttgctgctgctgttgctgctgctgctgctgttgctgctgctgctgctactgctgctgctgctactgctgctgcttggccctggctggagacatctcactacacccaggagcagccacttccccagctctcctcctcctccttcgcctcctcctcctccactccccccctttattaccctttgtgtcatcctccacagctccagggaaggcactcaaaagtggggggcaggaaaggatcgttaaacaccagttcagcgggagttggagggctgacgacactacagaatctggactctatgacttgttttgggagtaacaggagggtgtgatgaggaatttctgtgaaggtgacttctggatcctcagcttcaattactgaaactatggagagacatgaaagcaccccaccctggctcaggtcaggaaagaattaggaaaggggacttctgactggttaggtgaaattgaggaagggttagaagttcaggaaagtaatacttaaaagtagcagattgtatagacactcttgttctgaagtaccttgaaatggatttggagaagaaccaccatcaggccatcatggatgatctttctcaggagaaagatgagaaccagtttacaacaggccatctagtttaacagctttcactcttgtacctgtacacacgttacacacttatgcatactcatgtacatcatacacacaaacactcgttattctaaagcaagtaagatgatgcagagattgattactggggcaaaagaaggttctgccttggtcttcactgcctttcttctgctttccacccatctttcctctctcca

SEQ ID NO: 354452 - DNA, 749 bp, Homo sapiens
aacctccgggcttaagtgatcctctaacctcagcctcctgggactaaaggctcatgccaccatgcccagcttatttattgaagtccagccagtatcgagaattactgtgctagggctatgatcccctgtgttaacattttcttaccttgctcttgaaggatcgttaaacaccagttcagcgggagttggagggctgacgacactacagaatctggactctatgacttgttttgggagtaacaggagggtgtgatgaggaatttctgtgaaggtgacttctggatcctcagcttcaattactgaaactatggagagacatgaaagcaccccaccctggctcaggtcaggaaagaattaggaaaggggacttctgactggttaggtgaaattgaggaagggttagaagttcaggaaagtaatacttaaaagtagcagattgtatagacactcttgttctgaagtaccttgaaatggatttggagaagaaccaccatcaggccatcatggatgatctttctcaggagaaagatgagaaccagtttacaacaggccatctagtttaacagctttcactcttgtacctgtacacacgttacacacttatgcatactcatgtacatcatacacacaaacactcgttattctaaagcaagtaagatgatgcagagattgattactggggcaaaagaaggttctgccttggtcttcactgcctttcttctgctttccacccatctttcctctctcca

SEQ ID NO: 354453 - DNA, 694 bp, Homo sapiens
gcagcagcagcagctgatgatgaagagagaggcagtggcagagggggggcaccttttatttctatttttaaagggacaggacactaattctaccccacttcaaccttgaattcaggggggtggggggaaggcggctgagttccttcccccaccctccagccctgagccctgagagggggattgagcctgagagaggagaaggagtttcttcttcttcgaaaacccccatccacgactcctaccccctcacccctccaactcgcctccctccctccaccctcctcctctttggccgtgagaggaggagagaaagaaaccaaaagcctcttagcaacacagaccctttgctgctgctgttgctgctgctgctgctgttgctgctgctgctgctactgctgctgctgctactgctgctgcttggccctggctggagacatctcactacacccaggagcagccacttccccagctctcctcctcctccttcgcctcctcctcctccactccccccctttattaccctttgtgtcatcctccacagctccagggaaggcactcaaaagtggggggcaggaaagatgtacattgaagatgtcagtttctacatgtgggaagtagacattgaaggctttatggtttacagacaagatctttagaagataagcactaaaggtaagtagtaactatagcccca

SEQ ID NO: 354454 - DNA, 1173 bp, Homo sapiens
gcagcagcagcagctgatgatgaagagagaggcagtggcagagggggggcaccttttatttctatttttaaagggacaggacactaattctaccccacttcaaccttgaattcaggggggtggggggaaggcggctgagttccttcccccaccctccagccctgagccctgagagggggattgagcctgagagaggagaaggagtttcttcttcttcgaaaacccccatccacgactcctaccccctcacccctccaactcgcctccctccctccaccctcctcctctttggccgtgagaggaggagagaaagaaaccaaaagcctcttagcaacacagaccctttgctgctgctgttgctgctgctgctgctgttgctgctgctgctgctactgctgctgctgctactgctgctgcttggccctggctggagacatctcactacacccaggagcagccacttccccagctctcctcctcctccttcgcctcctcctcctccactccccccctttattaccctttgtgtcatcctccacagctccagggaaggcactcaaaagtggggggcaggaaagacaattatcaactttccagttttctatggatatgaagatttactcctagtcatcagtgggacccccatgaagtcagccagaaagcctatatccaacttatgtacctttgcaaacttgtctggattttgactgtatgtgcaaaacagattgtacttagcgattcattaaacatcttttgatcatctgctgtctgccaggcactgtgctaggcatctgaaaaacaaagatggtccctgcagtttaatgtgaagagctatcttaattgtattccacaagtgtattggtcgtatctttgttttggtgtttctacctaaataaattttatattaactaaatggatactgttaggtggaaaaatgcatgtttaagaaagatattgctgttattttattaaaatacaaatatataaagaaaaattttccacttaatactgtattctagggatttatattctgtatatagttaacacattttagacaatgaaaatagcctatgtggttgcctttgctggatttttattgctaaccgtaattcttttaagatgaccaacaatgttcattaagttatctcattaaatttttccaaaaaaaaaaaa

SEQ ID NO: 354455 - DNA, 518 bp, Homo sapiens
gaataagcaataatgatccaacacattccagttaaaaatatacttgtaaaaattgttcaggatgcacttaaatttcattgaccggtgcaataggttgttggaatgattaggccgcttttaccagctctataaaacaagtgctacttaggtgacatgtttccctgactttgtttttttggtccttacccagacaattatcaactttccagttttctatggatatgaagatttactcctagtcatcagtgggacccccatgaagtcagccagaaagcctatatccaacttatgtacctttgcaaacttgtctggattttgactgtatgtgcaaaacagattgtacttagcgattcattaaacatcttttgatcatctgctgtctgccaggcactgtgctaggcatctgaaaaacaaagatggtccctgcagtttaatgtgaagagctatcttaattgtattccacaagtgtattggtcgtatctttgttttggtgtttctacctaaataaattttatatt

SEQ ID NO: 354456 - DNA, 208 bp, Homo sapiens
ccgcccagcccaaccctggggctggggcatggcgtgcagcgagagtcttattgaaccttctgggtactttcccctttgttcctccccgatctagagaggcccaaattctggctgtgatccagctctcatgcccctcctagccctgctcctgctgtgtgaccctgggagagtgacctaacctctctgagccacaaatgggataatagca

SEQ ID NO: 354457 - DNA, 331 bp, Homo sapiens
gaaacactgccatctcctggggagatcaagcaattgacagcttgtgcaacatggcagtttttgttcagcactacaaaagactgctgtctctttcaaatcccagtgtctgtaagaaactgtgggaacttttctgtatacttactacaaccaactcagggatgtatgggctactgtgcggaagggttctttgccaagattgtaaagtccccccacacgtgaaagcatcaaaacagacatctcacatttttccactggacataatgattgagtgtgttaaaaattctttggtttcctcaagtccattcctgttttaattaaaggatgaagaagg

SEQ ID NO: 354458 - DNA, 483 bp, Homo sapiens
tttcacctcttttgcctgtttggaaataattatcacaatcattactgaattatacaataaaataaaacttttcttggtctaaaggtaggcaagctttttctgtaaaggctcagatggtaagtgttttaggctttgcaggctatatgttttttgttgtaactactcaaacctgttattgtagcgaaaaaaagtatataggcaatacataaatgaatgagttccaaaaatacttaatggaaaccaaaaatttgaatttgatacaatttccatgtgccatgatatattgttcttttttaaattttttgacatttttggggggagaatcagggacagactggaaatttttcaaccatttaaaaatgtagaaactatggggcatggtagtccatgtctgtgatcccatgggaagatcgcttgaggctgggagtttgagagcagcctgggaaccatagcaagtcccctcctctaccaaaaaaaaaaaaa

SEQ ID NO: 354459 - DNA, 6795 bp, Homo sapiens
ccgccgaactcagaggccggccccagaaaacccgagcgagtagggggcggcgcgcaggagggaggagaactgggggcgcgggaggctggtgggtgtcgggggtggagatgtagaagatgtgacgccgcggcccggcgggtgccagattagcggacgcggtgcccgcggttgcaacgggatcccgggcgctgcagcttgggaggcggctctccccaggcggcgtccgcggagacacccatccgtgaaccccaggtcccgggccgccggctcgccgcgcaccaggggccggcggacagaagagcggccgagcggctcgaggctgggggaccgcgggcgcggccgcgcgctgccgggcgggaggctggggggccggggccggggccgtgccccggagcgggtcggaggccggggccggggccgggggacggcggctccccgcgcggctccagcggctcggggatcccggccgggccccgcagggaccatggcagccgggagcatcaccacgctgcccgccttgcccgaggatggcggcagcggcgccttcccgcccggccacttcaaggaccccaagcggctgtactgcaaaaacgggggcttcttcctgcgcatccaccccgacggccgagttgacggggtccgggagaagagcgaccctcacatcaagctacaacttcaagcagaagagagaggagttgtgtctatcaaaggagtgtgtgctaaccgttacctggctatgaaggaagatggaagattactggcttctaaatgtgttacggatgagtgtttcttttttgaacgattggaatctaataactacaatacttaccggtcaaggaaatacaccagttggtatgtggcactgaaacgaactgggcagtataaacttggatccaaaacaggacctgggcagaaagctatactttttcttccaatgtctgctaagagctgattttaatggccacatctaatctcatttcacatgaaagaagaagtatattttagaaatttgttaatgagagtaaaagaaaataaatgtgtatagctcagtttggataattggtcaaacaattttttatccagtagtaaaatatgtaaccattgtcccagtaaagaaaaataacaaaagttgtaaaatgtatattctcccttttatattgcatctgctgttacccagtgaagcttacctagagcaatgatctttttcacgcatttgctttattcgaaaagaggcttttaaaatgtgcatgtttagaaacaaaatttcttcatggaaatcatatacattagaaaatcacagtcagatgtttaatcaatccaaaatgtccactatttcttatgtcattcgttagtctacatgtttctaaacatataaatgtgaatttaatcaattcctttcatagttttataattctctggcagttccttatgatagagtttataaaacagtcctgtgtaaactgctggaagttcttccacagtcaggtcaattttgtcaaacccttctctgtacccatacagcagcagcctagcaactctgctggtgatgggagttgtattttcagtcttcgccaggtcattgagatccatccactcacatcttaagcattcttcctggcaaaaatttatggtgaatgaatatggctttaggcggcagatgatatacatatctgacttcccaaaagctccaggatttgtgtgctgttgccgaatactcaggacggacctgaattctgattttataccagtctcttcaaaaacttctcgaaccgctgtgtctcctacgtaaaaaaagagatgtacaaatcaataataattacacttttagaaactgtatcatcaaagattttcagttaaagtagcattatgtaaaggctcaaaacattaccctaacaaagtaaagttttcaatacaaattctttgccttgtggatatcaagaaatcccaaaatattttcttaccactgtaaattcaagaagcttttgaaatgctgaatatttctttggctgctacttggaggcttatctacctgtacatttttggggtcagctctttttaacttcttgctgctctttttcccaaaaggtaaaaatatagattgaaaagttaaaacattttgcatggctgcagttcctttgtttcttgagataagattccaaagaacttagattcatttcttcaacaccgaaatgctggaggtgtttgatcagttttcaagaaacttggaatataaataattttataattcaacaaaggttttcacattttataaggttgatttttcaattaaatgcaaatttgtgtggcaggatttttattgccattaacatatttttgtggctgctttttctacacatccagatggtccctctaactgggctttctctaattttgtgatgttctgtcattgtctcccaaagtatttaggagaagccctttaaaaagctgccttcctctaccactttgctggaaagcttcacaattgtcacagacaaagatttttgttccaatactcgttttgcctctatttttcttgtttgtcaaatagtaaatgatatttgcccttgcagtaattctactggtgaaaaacatgcaaagaagaggaagtcacagaaacatgtctcaattcccatgtgctgtgactgtagactgtcttaccatagactgtcttacccatcccctggatatgctcttgttttttccctctaatagctatggaaagatgcatagaaagagtataatgttttaaaacataaggcattcgtctgccatttttcaattacatgctgacttcccttacaattgagatttgcccataggttaaacatggttagaaacaactgaaagcataaaagaaaaatctaggccgggtgcagtggctcatgcctatattccctgcactttgggaggccaaagcaggaggatcgcttgagcccaggagttcaagaccaacctggtgaaaccccgtctctacaaaaaaacacaaaaaatagccaggcatggtggcgtgtacatgtggtctcagatacttgggaggctgaggtgggagggttgatcacttgaggctgagaggtcaaggttgcagtgagccataatcgtgccactgcagtccagcctaggcaacagagtgagactttgtctcaaaaaaagagaaattttccttaataagaaaagtaatttttactctgatgtgcaatacatttgttattaaatttattatttaagatggtagcactagtcttaaattgtataaaatatcccctaacatgtttaaatgtccatttttattcattatgctttgaaaaataattatggggaaatacatgtttgttattaaatttattattaaagatagtagcactagtcttaaatttgatataacatctcctaacttgtttaaatgtccatttttattctttatgtttgaaaataaattatggggatcctatttagctcttagtaccactaatcaaaagttcggcatgtagctcatgatctatgctgtttctatgtcgtggaagcaccggatgggggtagtgagcaaatctgccctgctcagcagtcaccatagcagctgactgaaaatcagcactgcctgagtagttttgatcagtttaacttgaatcactaactgactgaaaattgaatgggcaaataagtgcttttgtctccagagtatgcgggagacccttccacctcaagatggatatttcttccccaaggatttcaagatgaattgaaatttttaatcaagatagtgtgctttattctgttgtattttttattattttaatatactgtaagccaaactgaaataacatttgctgttttataggtttgaagaacataggaaaaactaagaggttttgtttttatttttgctgatgaagagatatgtttaaatatgttgtattgttttgtttagttacaggacaataatgaaatggagtttatatttgttatttctattttgttatatttaataatagaattagattgaaataaaatataatgggaaataatctgcagaatgtgggttttcctggtgtttccctctgactctagtgcactgatgatctctgataaggctcagctgctttatagttctctggctaatgcagcagatactcttcctgccagtggtaatacgattttttaagaaggcagtttgtcaattttaatcttgtggatacctttatactcttagggtattattttatacaaaagccttgaggattgcattctattttctatatgaccctcttgatatttaaaaaacactatggataacaattcttcatttacctagtattatgaaagaatgaaggagttcaaacaaatgtgtttcccagttaactagggtttactgtttgagccaatataaatgtttaactgtttgtgatggcagtattcctaaagtacattgcatgttttcctaaatacagagtttaaataatttcagtaattcttagatgattcagcttcatcattaagaatatcttttgttttatgttgagttagaaatgccttcatatagacatagtctttcagacctctactgtcagttttcatttctagctgctttcagggttttatgaattttcaggcaaagctttaatttatactaagcttaggaagtatggctaatgccaacggcagtttttttcttcttaattccacatgactgaggcatatatgatctctgggtaggtgagttgttgtgacaaccacaagcactttttttttttttaaagaaaaaaaggtagtgaatttttaatcatctggactttaagaaggattctggagtatacttaggcctgaaattatatatatttggcttggaaatgtgtttttcttcaattacatctacaagtaagtacagctgaaattcagaggacccataagagttcacatgaaaaaaatcaattcatttgaaaaggcaagatgcaggagagaggaagccttgcaaacctgcagactgctttttgcccaatatagattgggtaaggctgcaaaacataagcttaattagctcacatgctctgctctcacgtggcaccagtggatagtgtgagagaattaggctgtagaacaaatggccttctctttcagcattcacaccactacaaaatcatcttttatatcaacagaagaataagcataaactaagcaaaaggtcaataagtacctgaaaccaagattggctagagatatatcttaatgcaatccattttctgatggattgttacgagttggctatataatgtatgtatggtattttgatttgtgtaaaagttttaaaaatcaagctttaagtacatggacatttttaaataaaatatttaaagacaatttagaaaattgccttaatatcattgttggctaaatagaataggggacatgcatattaaggaaaaggtcatggagaaataatattggtatcaaacaaatacattgatttgtcatgatacacattgaatttgatccaatagtttaaggaataggtaggaaaatttggtttctatttttcgatttcctgtaaatcagtgacataaataattcttagcttattttatatttccttgtcttaaatactgagctcagtaagttgtgttaggggattatttctcagttgagactttcttatatgacattttactatgttttgacttcctgactattaaaaataaatagtagatacaattttcataaagtgaagaattatataatcactgctttataactgactttattatatttatttcaaagttcatttaaaggctactattcatcctctgtgatggaatggtcaggaatttgttttctcatagtttaattccaacaacaatattagtcgtatccaaaataacctttaatgctaaactttactgatgtatatccaaagcttctccttttcagacagattaatccagaagcagtcataaacagaagaataggtggtatgttcctaatgatattatttctactaatggaataaactgtaatattagaaattatgctgctaattatatcagctctgaggtaatttctgaaatgttcagactcagtcggaacaaattggaaaatttaaatttttattcttagctataaagcaagaaagtaaacacattaatttcctcaacatttttaagccaattaaaaatataaaagatacacaccaatatcttcttcaggctctgacaggcctcctggaaacttccacatatttttcaactgcagtataaagtcagaaaataaagttaacataactttcactaacacacacatatgtagatttcacaaaatccacctataattggtcaaagtggttgagaatatattttttagtaattgcatgcaaaatttttctagcttccatcctttctccctcgtttcttctttttttgggggagctggtaactgatgaaatcttttcccaccttttctcttcaggaaatataagtggttttgtttggttaacgtgatacattctgtatgaatgaaacattggagggaaacatctactgaatttctgtaatttaaaatattttgctgctagttaactatgaacagatagaagaatcttacagatgctgctataaataagtagaaaatataaatttcatcactaaaatatgctattttaaaatctatttcctatattgtatttctaatcagatgtattactcttattatttctattgtatgtgttaatgattttatgtaaaaatgtaattgcttttcatgagtagtatgaataaaattgattagtttgtgttttcttgtctcccattt

SEQ ID NO: 354460 - DNA, 223 bp, Homo sapiens
taccttgtgacgctctagagatcccccggctgtactgcaaaaacgggggcttcttcctgcgcatccaccccgacggccgagttgacggggtccgggagaagagcgaccctcacatcaagctacaacttcaagcagaagagagaggagttgtgtctatcaaaggagtgtgtgctaaccgttacctggctatgaaggaagggggatcctctagagtcatccacag

SEQ ID NO: 354461 - DNA, 6247 bp, Homo sapiens
taccttgtgacgctctagagatcccccggctgtactgcaaaaacgggggcttcttcctgcgcatccaccccgacggccgagttgacggggtccgggagaagagcgaccctcacatcaagctacaacttcaagcagaagagagaggagttgtgtctatcaaaggagtgtgtgctaaccgttacctggctatgaaggaagatggaagattactggcttctaaatgtgttacggatgagtgtttcttttttgaacgattggaatctaataactacaatacttaccggtcaaggaaatacaccagttggtatgtggcactgaaacgaactgggcagtataaacttggatccaaaacaggacctgggcagaaagctatactttttcttccaatgtctgctaagagctgattttaatggccacatctaatctcatttcacatgaaagaagaagtatattttagaaatttgttaatgagagtaaaagaaaataaatgtgtatagctcagtttggataattggtcaaacaattttttatccagtagtaaaatatgtaaccattgtcccagtaaagaaaaataacaaaagttgtaaaatgtatattctcccttttatattgcatctgctgttacccagtgaagcttacctagagcaatgatctttttcacgcatttgctttattcgaaaagaggcttttaaaatgtgcatgtttagaaacaaaatttcttcatggaaatcatatacattagaaaatcacagtcagatgtttaatcaatccaaaatgtccactatttcttatgtcattcgttagtctacatgtttctaaacatataaatgtgaatttaatcaattcctttcatagttttataattctctggcagttccttatgatagagtttataaaacagtcctgtgtaaactgctggaagttcttccacagtcaggtcaattttgtcaaacccttctctgtacccatacagcagcagcctagcaactctgctggtgatgggagttgtattttcagtcttcgccaggtcattgagatccatccactcacatcttaagcattcttcctggcaaaaatttatggtgaatgaatatggctttaggcggcagatgatatacatatctgacttcccaaaagctccaggatttgtgtgctgttgccgaatactcaggacggacctgaattctgattttataccagtctcttcaaaaacttctcgaaccgctgtgtctcctacgtaaaaaaagagatgtacaaatcaataataattacacttttagaaactgtatcatcaaagattttcagttaaagtagcattatgtaaaggctcaaaacattaccctaacaaagtaaagttttcaatacaaattctttgccttgtggatatcaagaaatcccaaaatattttcttaccactgtaaattcaagaagcttttgaaatgctgaatatttctttggctgctacttggaggcttatctacctgtacatttttggggtcagctctttttaacttcttgctgctctttttcccaaaaggtaaaaatatagattgaaaagttaaaacattttgcatggctgcagttcctttgtttcttgagataagattccaaagaacttagattcatttcttcaacaccgaaatgctggaggtgtttgatcagttttcaagaaacttggaatataaataattttataattcaacaaaggttttcacattttataaggttgatttttcaattaaatgcaaatttgtgtggcaggatttttattgccattaacatatttttgtggctgctttttctacacatccagatggtccctctaactgggctttctctaattttgtgatgttctgtcattgtctcccaaagtatttaggagaagccctttaaaaagctgccttcctctaccactttgctggaaagcttcacaattgtcacagacaaagatttttgttccaatactcgttttgcctctatttttcttgtttgtcaaatagtaaatgatatttgcccttgcagtaattctactggtgaaaaacatgcaaagaagaggaagtcacagaaacatgtctcaattcccatgtgctgtgactgtagactgtcttaccatagactgtcttacccatcccctggatatgctcttgttttttccctctaatagctatggaaagatgcatagaaagagtataatgttttaaaacataaggcattcgtctgccatttttcaattacatgctgacttcccttacaattgagatttgcccataggttaaacatggttagaaacaactgaaagcataaaagaaaaatctaggccgggtgcagtggctcatgcctatattccctgcactttgggaggccaaagcaggaggatcgcttgagcccaggagttcaagaccaacctggtgaaaccccgtctctacaaaaaaacacaaaaaatagccaggcatggtggcgtgtacatgtggtctcagatacttgggaggctgaggtgggagggttgatcacttgaggctgagaggtcaaggttgcagtgagccataatcgtgccactgcagtccagcctaggcaacagagtgagactttgtctcaaaaaaagagaaattttccttaataagaaaagtaatttttactctgatgtgcaatacatttgttattaaatttattatttaagatggtagcactagtcttaaattgtataaaatatcccctaacatgtttaaatgtccatttttattcattatgctttgaaaaataattatggggaaatacatgtttgttattaaatttattattaaagatagtagcactagtcttaaatttgatataacatctcctaacttgtttaaatgtccatttttattctttatgtttgaaaataaattatggggatcctatttagctcttagtaccactaatcaaaagttcggcatgtagctcatgatctatgctgtttctatgtcgtggaagcaccggatgggggtagtgagcaaatctgccctgctcagcagtcaccatagcagctgactgaaaatcagcactgcctgagtagttttgatcagtttaacttgaatcactaactgactgaaaattgaatgggcaaataagtgcttttgtctccagagtatgcgggagacccttccacctcaagatggatatttcttccccaaggatttcaagatgaattgaaatttttaatcaagatagtgtgctttattctgttgtattttttattattttaatatactgtaagccaaactgaaataacatttgctgttttataggtttgaagaacataggaaaaactaagaggttttgtttttatttttgctgatgaagagatatgtttaaatatgttgtattgttttgtttagttacaggacaataatgaaatggagtttatatttgttatttctattttgttatatttaataatagaattagattgaaataaaatataatgggaaataatctgcagaatgtgggttttcctggtgtttccctctgactctagtgcactgatgatctctgataaggctcagctgctttatagttctctggctaatgcagcagatactcttcctgccagtggtaatacgattttttaagaaggcagtttgtcaattttaatcttgtggatacctttatactcttagggtattattttatacaaaagccttgaggattgcattctattttctatatgaccctcttgatatttaaaaaacactatggataacaattcttcatttacctagtattatgaaagaatgaaggagttcaaacaaatgtgtttcccagttaactagggtttactgtttgagccaatataaatgtttaactgtttgtgatggcagtattcctaaagtacattgcatgttttcctaaatacagagtttaaataatttcagtaattcttagatgattcagcttcatcattaagaatatcttttgttttatgttgagttagaaatgccttcatatagacatagtctttcagacctctactgtcagttttcatttctagctgctttcagggttttatgaattttcaggcaaagctttaatttatactaagcttaggaagtatggctaatgccaacggcagtttttttcttcttaattccacatgactgaggcatatatgatctctgggtaggtgagttgttgtgacaaccacaagcactttttttttttttaaagaaaaaaaggtagtgaatttttaatcatctggactttaagaaggattctggagtatacttaggcctgaaattatatatatttggcttggaaatgtgtttttcttcaattacatctacaagtaagtacagctgaaattcagaggacccataagagttcacatgaaaaaaatcaattcatttgaaaaggcaagatgcaggagagaggaagccttgcaaacctgcagactgctttttgcccaatatagattgggtaaggctgcaaaacataagcttaattagctcacatgctctgctctcacgtggcaccagtggatagtgtgagagaattaggctgtagaacaaatggccttctctttcagcattcacaccactacaaaatcatcttttatatcaacagaagaataagcataaactaagcaaaaggtcaataagtacctgaaaccaagattggctagagatatatcttaatgcaatccattttctgatggattgttacgagttggctatataatgtatgtatggtattttgatttgtgtaaaagttttaaaaatcaagctttaagtacatggacatttttaaataaaatatttaaagacaatttagaaaattgccttaatatcattgttggctaaatagaataggggacatgcatattaaggaaaaggtcatggagaaataatattggtatcaaacaaatacattgatttgtcatgatacacattgaatttgatccaatagtttaaggaataggtaggaaaatttggtttctatttttcgatttcctgtaaatcagtgacataaataattcttagcttattttatatttccttgtcttaaatactgagctcagtaagttgtgttaggggattatttctcagttgagactttcttatatgacattttactatgttttgacttcctgactattaaaaataaatagtagatacaattttcataaagtgaagaattatataatcactgctttataactgactttattatatttatttcaaagttcatttaaaggctactattcatcctctgtgatggaatggtcaggaatttgttttctcatagtttaattccaacaacaatattagtcgtatccaaaataacctttaatgctaaactttactgatgtatatccaaagcttctccttttcagacagattaatccagaagcagtcataaacagaagaataggtggtatgttcctaatgatattatttctactaatggaataaactgtaatattagaaattatgctgctaattatatcagctctgaggtaatttctgaaatgttcagactcagtcggaacaaattggaaaatttaaatttttattcttagctataaagcaagaaagtaaacacattaatttcctcaacatttttaagccaattaaaaatataaaagatacacaccaatatcttcttcaggctctgacaggcctcctggaaacttccacatatttttcaactgcagtataaagtcagaaaataaagttaacataactttcactaacacacacatatgtagatttcacaaaatccacctataattggtcaaagtggttgagaatatattttttagtaattgcatgcaaaatttttctagcttccatcctttctccctcgtttcttctttttttgggggagctggtaactgatgaaatcttttcccaccttttctcttcaggaaatataagtggttttgtttggttaacgtgatacattctgtatgaatgaaacattggagggaaacatctactgaatttctgtaatttaaaatattttgctgctagttaactatgaacagatagaagaatcttacagatgctgctataaataagtagaaaatataaatttcatcactaaaatatgctattttaaaatctatttcctatattgtatttctaatcagatgtattactcttattatttctattgtatgtgttaatgattttatgtaaaaatgtaattgcttttcatgagtagtatgaataaaattgattagtttgtgttttcttgtctcccattt

SEQ ID NO: 354462 - DNA, 6249 bp, Homo sapiens
gattgacgaattgcgagctcggtgaccccggctgtactgcaaaaacgggggcttcttcctgcgcatccaccccgacggccgagttgacggggtccgggagaagagcgaccctcacatcaagctacaacttcaagcagaagagagaggagttgtgtctatcaaaggagtgtgtgctaaccgttacctggctatgaaggaagatggaagattactggcttctaaatgtgttacggatgagtgtttcttttttgaacgattggaatctaataactacaatacttaccggtcaaggaaatacaccagttggtatgtggcactgaaacgaactgggcagtataaacttggatccaaaacaggacctgggcagaaagctatactttttcttccaatgtctgctaagagctgattttaatggccacatctaatctcatttcacatgaaagaagaagtatattttagaaatttgttaatgagagtaaaagaaaataaatgtgtatagctcagtttggataattggtcaaacaattttttatccagtagtaaaatatgtaaccattgtcccagtaaagaaaaataacaaaagttgtaaaatgtatattctcccttttatattgcatctgctgttacccagtgaagcttacctagagcaatgatctttttcacgcatttgctttattcgaaaagaggcttttaaaatgtgcatgtttagaaacaaaatttcttcatggaaatcatatacattagaaaatcacagtcagatgtttaatcaatccaaaatgtccactatttcttatgtcattcgttagtctacatgtttctaaacatataaatgtgaatttaatcaattcctttcatagttttataattctctggcagttccttatgatagagtttataaaacagtcctgtgtaaactgctggaagttcttccacagtcaggtcaattttgtcaaacccttctctgtacccatacagcagcagcctagcaactctgctggtgatgggagttgtattttcagtcttcgccaggtcattgagatccatccactcacatcttaagcattcttcctggcaaaaatttatggtgaatgaatatggctttaggcggcagatgatatacatatctgacttcccaaaagctccaggatttgtgtgctgttgccgaatactcaggacggacctgaattctgattttataccagtctcttcaaaaacttctcgaaccgctgtgtctcctacgtaaaaaaagagatgtacaaatcaataataattacacttttagaaactgtatcatcaaagattttcagttaaagtagcattatgtaaaggctcaaaacattaccctaacaaagtaaagttttcaatacaaattctttgccttgtggatatcaagaaatcccaaaatattttcttaccactgtaaattcaagaagcttttgaaatgctgaatatttctttggctgctacttggaggcttatctacctgtacatttttggggtcagctctttttaacttcttgctgctctttttcccaaaaggtaaaaatatagattgaaaagttaaaacattttgcatggctgcagttcctttgtttcttgagataagattccaaagaacttagattcatttcttcaacaccgaaatgctggaggtgtttgatcagttttcaagaaacttggaatataaataattttataattcaacaaaggttttcacattttataaggttgatttttcaattaaatgcaaatttgtgtggcaggatttttattgccattaacatatttttgtggctgctttttctacacatccagatggtccctctaactgggctttctctaattttgtgatgttctgtcattgtctcccaaagtatttaggagaagccctttaaaaagctgccttcctctaccactttgctggaaagcttcacaattgtcacagacaaagatttttgttccaatactcgttttgcctctatttttcttgtttgtcaaatagtaaatgatatttgcccttgcagtaattctactggtgaaaaacatgcaaagaagaggaagtcacagaaacatgtctcaattcccatgtgctgtgactgtagactgtcttaccatagactgtcttacccatcccctggatatgctcttgttttttccctctaatagctatggaaagatgcatagaaagagtataatgttttaaaacataaggcattcgtctgccatttttcaattacatgctgacttcccttacaattgagatttgcccataggttaaacatggttagaaacaactgaaagcataaaagaaaaatctaggccgggtgcagtggctcatgcctatattccctgcactttgggaggccaaagcaggaggatcgcttgagcccaggagttcaagaccaacctggtgaaaccccgtctctacaaaaaaacacaaaaaatagccaggcatggtggcgtgtacatgtggtctcagatacttgggaggctgaggtgggagggttgatcacttgaggctgagaggtcaaggttgcagtgagccataatcgtgccactgcagtccagcctaggcaacagagtgagactttgtctcaaaaaaagagaaattttccttaataagaaaagtaatttttactctgatgtgcaatacatttgttattaaatttattatttaagatggtagcactagtcttaaattgtataaaatatcccctaacatgtttaaatgtccatttttattcattatgctttgaaaaataattatggggaaatacatgtttgttattaaatttattattaaagatagtagcactagtcttaaatttgatataacatctcctaacttgtttaaatgtccatttttattctttatgtttgaaaataaattatggggatcctatttagctcttagtaccactaatcaaaagttcggcatgtagctcatgatctatgctgtttctatgtcgtggaagcaccggatgggggtagtgagcaaatctgccctgctcagcagtcaccatagcagctgactgaaaatcagcactgcctgagtagttttgatcagtttaacttgaatcactaactgactgaaaattgaatgggcaaataagtgcttttgtctccagagtatgcgggagacccttccacctcaagatggatatttcttccccaaggatttcaagatgaattgaaatttttaatcaagatagtgtgctttattctgttgtattttttattattttaatatactgtaagccaaactgaaataacatttgctgttttataggtttgaagaacataggaaaaactaagaggttttgtttttatttttgctgatgaagagatatgtttaaatatgttgtattgttttgtttagttacaggacaataatgaaatggagtttatatttgttatttctattttgttatatttaataatagaattagattgaaataaaatataatgggaaataatctgcagaatgtgggttttcctggtgtttccctctgactctagtgcactgatgatctctgataaggctcagctgctttatagttctctggctaatgcagcagatactcttcctgccagtggtaatacgattttttaagaaggcagtttgtcaattttaatcttgtggatacctttatactcttagggtattattttatacaaaagccttgaggattgcattctattttctatatgaccctcttgatatttaaaaaacactatggataacaattcttcatttacctagtattatgaaagaatgaaggagttcaaacaaatgtgtttcccagttaactagggtttactgtttgagccaatataaatgtttaactgtttgtgatggcagtattcctaaagtacattgcatgttttcctaaatacagagtttaaataatttcagtaattcttagatgattcagcttcatcattaagaatatcttttgttttatgttgagttagaaatgccttcatatagacatagtctttcagacctctactgtcagttttcatttctagctgctttcagggttttatgaattttcaggcaaagctttaatttatactaagcttaggaagtatggctaatgccaacggcagtttttttcttcttaattccacatgactgaggcatatatgatctctgggtaggtgagttgttgtgacaaccacaagcactttttttttttttaaagaaaaaaaggtagtgaatttttaatcatctggactttaagaaggattctggagtatacttaggcctgaaattatatatatttggcttggaaatgtgtttttcttcaattacatctacaagtaagtacagctgaaattcagaggacccataagagttcacatgaaaaaaatcaattcatttgaaaaggcaagatgcaggagagaggaagccttgcaaacctgcagactgctttttgcccaatatagattgggtaaggctgcaaaacataagcttaattagctcacatgctctgctctcacgtggcaccagtggatagtgtgagagaattaggctgtagaacaaatggccttctctttcagcattcacaccactacaaaatcatcttttatatcaacagaagaataagcataaactaagcaaaaggtcaataagtacctgaaaccaagattggctagagatatatcttaatgcaatccattttctgatggattgttacgagttggctatataatgtatgtatggtattttgatttgtgtaaaagttttaaaaatcaagctttaagtacatggacatttttaaataaaatatttaaagacaatttagaaaattgccttaatatcattgttggctaaatagaataggggacatgcatattaaggaaaaggtcatggagaaataatattggtatcaaacaaatacattgatttgtcatgatacacattgaatttgatccaatagtttaaggaataggtaggaaaatttggtttctatttttcgatttcctgtaaatcagtgacataaataattcttagcttattttatatttccttgtcttaaatactgagctcagtaagttgtgttaggggattatttctcagttgagactttcttatatgacattttactatgttttgacttcctgactattaaaaataaatagtagatacaattttcataaagtgaagaattatataatcactgctttataactgactttattatatttatttcaaagttcatttaaaggctactattcatcctctgtgatggaatggtcaggaatttgttttctcatagtttaattccaacaacaatattagtcgtatccaaaataacctttaatgctaaactttactgatgtatatccaaagcttctccttttcagacagattaatccagaagcagtcataaacagaagaataggtggtatgttcctaatgatattatttctactaatggaataaactgtaatattagaaattatgctgctaattatatcagctctgaggtaatttctgaaatgttcagactcagtcggaacaaattggaaaatttaaatttttattcttagctataaagcaagaaagtaaacacattaatttcctcaacatttttaagccaattaaaaatataaaagatacacaccaatatcttcttcaggctctgacaggcctcctggaaacttccacatatttttcaactgcagtataaagtcagaaaataaagttaacataactttcactaacacacacatatgtagatttcacaaaatccacctataattggtcaaagtggttgagaatatattttttagtaattgcatgcaaaatttttctagcttccatcctttctccctcgtttcttctttttttgggggagctggtaactgatgaaatcttttcccaccttttctcttcaggaaatataagtggttttgtttggttaacgtgatacattctgtatgaatgaaacattggagggaaacatctactgaatttctgtaatttaaaatattttgctgctagttaactatgaacagatagaagaatcttacagatgctgctataaataagtagaaaatataaatttcatcactaaaatatgctattttaaaatctatttcctatattgtatttctaatcagatgtattactcttattatttctattgtatgtgttaatgattttatgtaaaaatgtaattgcttttcatgagtagtatgaataaaattgattagtttgtgttttcttgtctcccattt

SEQ ID NO: 354463 - DNA, 1934 bp, Homo sapiens
ccgccgaactcagaggccggccccagaaaacccgagcgagtagggggcggcgcgcaggagggaggagaactgggggcgcgggaggctggtgggtgtcgggggtggagatgtagaagatgtgacgccgcggcccggcgggtgccagattagcggacgcggtgcccgcggttgcaacgggatcccgggcgctgcagcttgggaggcggctctccccaggcggcgtccgcggagacacccatccgtgaaccccaggtcccgggccgccggctcgccgcgcaccaggggccggcggacagaagagcggccgagcggctcgaggctgggggaccgcgggcgcggccgcgcgctgccgggcgggaggctggggggccggggccggggccgtgccccggagcgggtcggaggccggggccggggccgggggacggcggctccccgcgcggctccagcggctcggggatcccggccgggccccgcagggaccatggcagccgggagcatcaccacgctgcccgccttgcccgaggatggcggcagcggcgccttcccgcccggccacttcaaggaccccaagcggctgtactgcaaaaacgggggcttcttcctgcgcatccaccccgacggccgagttgacggggtccgggagaagagcgaccctcacatcaagctacaacttcaagcagaagagagaggagttgtgtctatcaaaggagtgtgtgctaaccgttacctggctatgaaggaagatggaagattactggcttctaaatgtgttacggatgagtgtttcttttttgaacgattggaatctaataactacaatacttaccggtcaaggaaatacaccagttggtatgtggcactgaaacgaactgggcagtataaacttggatccaaaacaggacctgggcagaaagctatactttttcttccaatgtctgctaagagctgattttaatggccacatctaatctcatttcacatgaaagaagaagtatattttagaaatttgttaatgagagtaaaagaaaataaatgtgtatagctcagtttggataattggtcaaacaattttttatccagtagtaaaatatgtaaccattgtcccagtaaagaaaaataacaaaagttgtaaaatgtatattctcccttttatattgcatctgctgttacccagtgaagcttacctagagcaatgatctttttcacgcatttgctttattcgaaaagaggcttttaaaatgtgcatgtttagaaacaaaatttcttcatggaaatcatatacattagaaaatcacagtcagatgtttaatcaatccaaaatgtccactatttcttatgtcattcgttagtctacatgtttctaaacatataaatgtgaatttaatcaattcctttcatagttttataattctctggcagttccttatgatagagtttataaaacagtcctgtgtaaactgctggaagttcttccacagtcaggtcaattttgtcaaacccttctctgtacccatacagcagcagcctagcaactctgctggtgatgggagttgtattttcagtcttcgccaggtcattgagatccatccactcacatcttaagcattcttcctggcaaaaatttatggtgaatgaatatggctttaggcggcagatgatatacatatctgacttcccaaaagctccaggatttgtgtgctgttgccgaatactcaggacggacctgaattctgattttataccagtctcttcaaaaacttctcgaaccgctgtgtctccaatatcttcttcaggctctgacaggcctcctggaaacttccacatatttttcaacgggcccggtggttaatataaaaagtccttgcacgttaagtaggaaaatggtggtgtcaaaaccctggactgggttagcatgtgacctgggaaagcgc

SEQ ID NO: 354464 - DNA, 6083 bp, Homo sapiens
actgtttgtttgcctttagtatagatgttatggaaagatacactgtatatatctaaatgtgttacggatgagtgtttcttttttgaacgattggaatctaataactacaatacttaccggtcaaggaaatacaccagttggtatgtggcactgaaacgaactgggcagtataaacttggatccaaaacaggacctgggcagaaagctatactttttcttccaatgtctgctaagagctgattttaatggccacatctaatctcatttcacatgaaagaagaagtatattttagaaatttgttaatgagagtaaaagaaaataaatgtgtatagctcagtttggataattggtcaaacaattttttatccagtagtaaaatatgtaaccattgtcccagtaaagaaaaataacaaaagttgtaaaatgtatattctcccttttatattgcatctgctgttacccagtgaagcttacctagagcaatgatctttttcacgcatttgctttattcgaaaagaggcttttaaaatgtgcatgtttagaaacaaaatttcttcatggaaatcatatacattagaaaatcacagtcagatgtttaatcaatccaaaatgtccactatttcttatgtcattcgttagtctacatgtttctaaacatataaatgtgaatttaatcaattcctttcatagttttataattctctggcagttccttatgatagagtttataaaacagtcctgtgtaaactgctggaagttcttccacagtcaggtcaattttgtcaaacccttctctgtacccatacagcagcagcctagcaactctgctggtgatgggagttgtattttcagtcttcgccaggtcattgagatccatccactcacatcttaagcattcttcctggcaaaaatttatggtgaatgaatatggctttaggcggcagatgatatacatatctgacttcccaaaagctccaggatttgtgtgctgttgccgaatactcaggacggacctgaattctgattttataccagtctcttcaaaaacttctcgaaccgctgtgtctcctacgtaaaaaaagagatgtacaaatcaataataattacacttttagaaactgtatcatcaaagattttcagttaaagtagcattatgtaaaggctcaaaacattaccctaacaaagtaaagttttcaatacaaattctttgccttgtggatatcaagaaatcccaaaatattttcttaccactgtaaattcaagaagcttttgaaatgctgaatatttctttggctgctacttggaggcttatctacctgtacatttttggggtcagctctttttaacttcttgctgctctttttcccaaaaggtaaaaatatagattgaaaagttaaaacattttgcatggctgcagttcctttgtttcttgagataagattccaaagaacttagattcatttcttcaacaccgaaatgctggaggtgtttgatcagttttcaagaaacttggaatataaataattttataattcaacaaaggttttcacattttataaggttgatttttcaattaaatgcaaatttgtgtggcaggatttttattgccattaacatatttttgtggctgctttttctacacatccagatggtccctctaactgggctttctctaattttgtgatgttctgtcattgtctcccaaagtatttaggagaagccctttaaaaagctgccttcctctaccactttgctggaaagcttcacaattgtcacagacaaagatttttgttccaatactcgttttgcctctatttttcttgtttgtcaaatagtaaatgatatttgcccttgcagtaattctactggtgaaaaacatgcaaagaagaggaagtcacagaaacatgtctcaattcccatgtgctgtgactgtagactgtcttaccatagactgtcttacccatcccctggatatgctcttgttttttccctctaatagctatggaaagatgcatagaaagagtataatgttttaaaacataaggcattcgtctgccatttttcaattacatgctgacttcccttacaattgagatttgcccataggttaaacatggttagaaacaactgaaagcataaaagaaaaatctaggccgggtgcagtggctcatgcctatattccctgcactttgggaggccaaagcaggaggatcgcttgagcccaggagttcaagaccaacctggtgaaaccccgtctctacaaaaaaacacaaaaaatagccaggcatggtggcgtgtacatgtggtctcagatacttgggaggctgaggtgggagggttgatcacttgaggctgagaggtcaaggttgcagtgagccataatcgtgccactgcagtccagcctaggcaacagagtgagactttgtctcaaaaaaagagaaattttccttaataagaaaagtaatttttactctgatgtgcaatacatttgttattaaatttattatttaagatggtagcactagtcttaaattgtataaaatatcccctaacatgtttaaatgtccatttttattcattatgctttgaaaaataattatggggaaatacatgtttgttattaaatttattattaaagatagtagcactagtcttaaatttgatataacatctcctaacttgtttaaatgtccatttttattctttatgtttgaaaataaattatggggatcctatttagctcttagtaccactaatcaaaagttcggcatgtagctcatgatctatgctgtttctatgtcgtggaagcaccggatgggggtagtgagcaaatctgccctgctcagcagtcaccatagcagctgactgaaaatcagcactgcctgagtagttttgatcagtttaacttgaatcactaactgactgaaaattgaatgggcaaataagtgcttttgtctccagagtatgcgggagacccttccacctcaagatggatatttcttccccaaggatttcaagatgaattgaaatttttaatcaagatagtgtgctttattctgttgtattttttattattttaatatactgtaagccaaactgaaataacatttgctgttttataggtttgaagaacataggaaaaactaagaggttttgtttttatttttgctgatgaagagatatgtttaaatatgttgtattgttttgtttagttacaggacaataatgaaatggagtttatatttgttatttctattttgttatatttaataatagaattagattgaaataaaatataatgggaaataatctgcagaatgtgggttttcctggtgtttccctctgactctagtgcactgatgatctctgataaggctcagctgctttatagttctctggctaatgcagcagatactcttcctgccagtggtaatacgattttttaagaaggcagtttgtcaattttaatcttgtggatacctttatactcttagggtattattttatacaaaagccttgaggattgcattctattttctatatgaccctcttgatatttaaaaaacactatggataacaattcttcatttacctagtattatgaaagaatgaaggagttcaaacaaatgtgtttcccagttaactagggtttactgtttgagccaatataaatgtttaactgtttgtgatggcagtattcctaaagtacattgcatgttttcctaaatacagagtttaaataatttcagtaattcttagatgattcagcttcatcattaagaatatcttttgttttatgttgagttagaaatgccttcatatagacatagtctttcagacctctactgtcagttttcatttctagctgctttcagggttttatgaattttcaggcaaagctttaatttatactaagcttaggaagtatggctaatgccaacggcagtttttttcttcttaattccacatgactgaggcatatatgatctctgggtaggtgagttgttgtgacaaccacaagcactttttttttttttaaagaaaaaaaggtagtgaatttttaatcatctggactttaagaaggattctggagtatacttaggcctgaaattatatatatttggcttggaaatgtgtttttcttcaattacatctacaagtaagtacagctgaaattcagaggacccataagagttcacatgaaaaaaatcaattcatttgaaaaggcaagatgcaggagagaggaagccttgcaaacctgcagactgctttttgcccaatatagattgggtaaggctgcaaaacataagcttaattagctcacatgctctgctctcacgtggcaccagtggatagtgtgagagaattaggctgtagaacaaatggccttctctttcagcattcacaccactacaaaatcatcttttatatcaacagaagaataagcataaactaagcaaaaggtcaataagtacctgaaaccaagattggctagagatatatcttaatgcaatccattttctgatggattgttacgagttggctatataatgtatgtatggtattttgatttgtgtaaaagttttaaaaatcaagctttaagtacatggacatttttaaataaaatatttaaagacaatttagaaaattgccttaatatcattgttggctaaatagaataggggacatgcatattaaggaaaaggtcatggagaaataatattggtatcaaacaaatacattgatttgtcatgatacacattgaatttgatccaatagtttaaggaataggtaggaaaatttggtttctatttttcgatttcctgtaaatcagtgacataaataattcttagcttattttatatttccttgtcttaaatactgagctcagtaagttgtgttaggggattatttctcagttgagactttcttatatgacattttactatgttttgacttcctgactattaaaaataaatagtagatacaattttcataaagtgaagaattatataatcactgctttataactgactttattatatttatttcaaagttcatttaaaggctactattcatcctctgtgatggaatggtcaggaatttgttttctcatagtttaattccaacaacaatattagtcgtatccaaaataacctttaatgctaaactttactgatgtatatccaaagcttctccttttcagacagattaatccagaagcagtcataaacagaagaataggtggtatgttcctaatgatattatttctactaatggaataaactgtaatattagaaattatgctgctaattatatcagctctgaggtaatttctgaaatgttcagactcagtcggaacaaattggaaaatttaaatttttattcttagctataaagcaagaaagtaaacacattaatttcctcaacatttttaagccaattaaaaatataaaagatacacaccaatatcttcttcaggctctgacaggcctcctggaaacttccacatatttttcaactgcagtataaagtcagaaaataaagttaacataactttcactaacacacacatatgtagatttcacaaaatccacctataattggtcaaagtggttgagaatatattttttagtaattgcatgcaaaatttttctagcttccatcctttctccctcgtttcttctttttttgggggagctggtaactgatgaaatcttttcccaccttttctcttcaggaaatataagtggttttgtttggttaacgtgatacattctgtatgaatgaaacattggagggaaacatctactgaatttctgtaatttaaaatattttgctgctagttaactatgaacagatagaagaatcttacagatgctgctataaataagtagaaaatataaatttcatcactaaaatatgctattttaaaatctatttcctatattgtatttctaatcagatgtattactcttattatttctattgtatgtgttaatgattttatgtaaaaatgtaattgcttttcatgagtagtatgaataaaattgattagtttgtgttttcttgtctcccattt

SEQ ID NO: 354465 - DNA, 5642 bp, Homo sapiens
atattgaagtattgggccggtaatgttcatttcgtacgcggcggttgttcggcctcctgcggcttttattcgaaaagaggcttttaaaatgtgcatgtttagaaacaaaatttcttcatggaaatcatatacattagaaaatcacagtcagatgtttaatcaatccaaaatgtccactatttcttatgtcattcgttagtctacatgtttctaaacatataaatgtgaatttaatcaattcctttcatagttttataattctctggcagttccttatgatagagtttataaaacagtcctgtgtaaactgctggaagttcttccacagtcaggtcaattttgtcaaacccttctctgtacccatacagcagcagcctagcaactctgctggtgatgggagttgtattttcagtcttcgccaggtcattgagatccatccactcacatcttaagcattcttcctggcaaaaatttatggtgaatgaatatggctttaggcggcagatgatatacatatctgacttcccaaaagctccaggatttgtgtgctgttgccgaatactcaggacggacctgaattctgattttataccagtctcttcaaaaacttctcgaaccgctgtgtctcctacgtaaaaaaagagatgtacaaatcaataataattacacttttagaaactgtatcatcaaagattttcagttaaagtagcattatgtaaaggctcaaaacattaccctaacaaagtaaagttttcaatacaaattctttgccttgtggatatcaagaaatcccaaaatattttcttaccactgtaaattcaagaagcttttgaaatgctgaatatttctttggctgctacttggaggcttatctacctgtacatttttggggtcagctctttttaacttcttgctgctctttttcccaaaaggtaaaaatatagattgaaaagttaaaacattttgcatggctgcagttcctttgtttcttgagataagattccaaagaacttagattcatttcttcaacaccgaaatgctggaggtgtttgatcagttttcaagaaacttggaatataaataattttataattcaacaaaggttttcacattttataaggttgatttttcaattaaatgcaaatttgtgtggcaggatttttattgccattaacatatttttgtggctgctttttctacacatccagatggtccctctaactgggctttctctaattttgtgatgttctgtcattgtctcccaaagtatttaggagaagccctttaaaaagctgccttcctctaccactttgctggaaagcttcacaattgtcacagacaaagatttttgttccaatactcgttttgcctctatttttcttgtttgtcaaatagtaaatgatatttgcccttgcagtaattctactggtgaaaaacatgcaaagaagaggaagtcacagaaacatgtctcaattcccatgtgctgtgactgtagactgtcttaccatagactgtcttacccatcccctggatatgctcttgttttttccctctaatagctatggaaagatgcatagaaagagtataatgttttaaaacataaggcattcgtctgccatttttcaattacatgctgacttcccttacaattgagatttgcccataggttaaacatggttagaaacaactgaaagcataaaagaaaaatctaggccgggtgcagtggctcatgcctatattccctgcactttgggaggccaaagcaggaggatcgcttgagcccaggagttcaagaccaacctggtgaaaccccgtctctacaaaaaaacacaaaaaatagccaggcatggtggcgtgtacatgtggtctcagatacttgggaggctgaggtgggagggttgatcacttgaggctgagaggtcaaggttgcagtgagccataatcgtgccactgcagtccagcctaggcaacagagtgagactttgtctcaaaaaaagagaaattttccttaataagaaaagtaatttttactctgatgtgcaatacatttgttattaaatttattatttaagatggtagcactagtcttaaattgtataaaatatcccctaacatgtttaaatgtccatttttattcattatgctttgaaaaataattatggggaaatacatgtttgttattaaatttattattaaagatagtagcactagtcttaaatttgatataacatctcctaacttgtttaaatgtccatttttattctttatgtttgaaaataaattatggggatcctatttagctcttagtaccactaatcaaaagttcggcatgtagctcatgatctatgctgtttctatgtcgtggaagcaccggatgggggtagtgagcaaatctgccctgctcagcagtcaccatagcagctgactgaaaatcagcactgcctgagtagttttgatcagtttaacttgaatcactaactgactgaaaattgaatgggcaaataagtgcttttgtctccagagtatgcgggagacccttccacctcaagatggatatttcttccccaaggatttcaagatgaattgaaatttttaatcaagatagtgtgctttattctgttgtattttttattattttaatatactgtaagccaaactgaaataacatttgctgttttataggtttgaagaacataggaaaaactaagaggttttgtttttatttttgctgatgaagagatatgtttaaatatgttgtattgttttgtttagttacaggacaataatgaaatggagtttatatttgttatttctattttgttatatttaataatagaattagattgaaataaaatataatgggaaataatctgcagaatgtgggttttcctggtgtttccctctgactctagtgcactgatgatctctgataaggctcagctgctttatagttctctggctaatgcagcagatactcttcctgccagtggtaatacgattttttaagaaggcagtttgtcaattttaatcttgtggatacctttatactcttagggtattattttatacaaaagccttgaggattgcattctattttctatatgaccctcttgatatttaaaaaacactatggataacaattcttcatttacctagtattatgaaagaatgaaggagttcaaacaaatgtgtttcccagttaactagggtttactgtttgagccaatataaatgtttaactgtttgtgatggcagtattcctaaagtacattgcatgttttcctaaatacagagtttaaataatttcagtaattcttagatgattcagcttcatcattaagaatatcttttgttttatgttgagttagaaatgccttcatatagacatagtctttcagacctctactgtcagttttcatttctagctgctttcagggttttatgaattttcaggcaaagctttaatttatactaagcttaggaagtatggctaatgccaacggcagtttttttcttcttaattccacatgactgaggcatatatgatctctgggtaggtgagttgttgtgacaaccacaagcactttttttttttttaaagaaaaaaaggtagtgaatttttaatcatctggactttaagaaggattctggagtatacttaggcctgaaattatatatatttggcttggaaatgtgtttttcttcaattacatctacaagtaagtacagctgaaattcagaggacccataagagttcacatgaaaaaaatcaattcatttgaaaaggcaagatgcaggagagaggaagccttgcaaacctgcagactgctttttgcccaatatagattgggtaaggctgcaaaacataagcttaattagctcacatgctctgctctcacgtggcaccagtggatagtgtgagagaattaggctgtagaacaaatggccttctctttcagcattcacaccactacaaaatcatcttttatatcaacagaagaataagcataaactaagcaaaaggtcaataagtacctgaaaccaagattggctagagatatatcttaatgcaatccattttctgatggattgttacgagttggctatataatgtatgtatggtattttgatttgtgtaaaagttttaaaaatcaagctttaagtacatggacatttttaaataaaatatttaaagacaatttagaaaattgccttaatatcattgttggctaaatagaataggggacatgcatattaaggaaaaggtcatggagaaataatattggtatcaaacaaatacattgatttgtcatgatacacattgaatttgatccaatagtttaaggaataggtaggaaaatttggtttctatttttcgatttcctgtaaatcagtgacataaataattcttagcttattttatatttccttgtcttaaatactgagctcagtaagttgtgttaggggattatttctcagttgagactttcttatatgacattttactatgttttgacttcctgactattaaaaataaatagtagatacaattttcataaagtgaagaattatataatcactgctttataactgactttattatatttatttcaaagttcatttaaaggctactattcatcctctgtgatggaatggtcaggaatttgttttctcatagtttaattccaacaacaatattagtcgtatccaaaataacctttaatgctaaactttactgatgtatatccaaagcttctccttttcagacagattaatccagaagcagtcataaacagaagaataggtggtatgttcctaatgatattatttctactaatggaataaactgtaatattagaaattatgctgctaattatatcagctctgaggtaatttctgaaatgttcagactcagtcggaacaaattggaaaatttaaatttttattcttagctataaagcaagaaagtaaacacattaatttcctcaacatttttaagccaattaaaaatataaaagatacacaccaatatcttcttcaggctctgacaggcctcctggaaacttccacatatttttcaactgcagtataaagtcagaaaataaagttaacataactttcactaacacacacatatgtagatttcacaaaatccacctataattggtcaaagtggttgagaatatattttttagtaattgcatgcaaaatttttctagcttccatcctttctccctcgtttcttctttttttgggggagctggtaactgatgaaatcttttcccaccttttctcttcaggaaatataagtggttttgtttggttaacgtgatacattctgtatgaatgaaacattggagggaaacatctactgaatttctgtaatttaaaatattttgctgctagttaactatgaacagatagaagaatcttacagatgctgctataaataagtagaaaatataaatttcatcactaaaatatgctattttaaaatctatttcctatattgtatttctaatcagatgtattactcttattatttctattgtatgtgttaatgattttatgtaaaaatgtaattgcttttcatgagtagtatgaataaaattgattagtttgtgttttcttgtctcccattt

SEQ ID NO: 354466 - DNA, 1244 bp, Homo sapiens
atattgaagtattgggccggtaatgttcatttcgtacgcggcggttgttcggcctcctgcggcttttattcgaaaagaggcttttaaaatgtgcatgtttagaaacaaaatttcttcatggaaatcatatacattagaaaatcacagtcagatgtttaatcaatccaaaatgtccactatttcttatgtcattcgttagtctacatgtttctaaacatataaatgtgaatttaatcaattcctttcatagttttataattctctggcagttccttatgatagagtttataaaacagtcctgtgtaaactgctggaagttcttccacagtcaggtcaattttgtcaaacccttctctgtacccatacagcagcagcctagcaactctgctggtgatgggagttgtattttcagtcttcgccaggtcattgagatccatccactcacatcttaagcattcttcctggcaaaaatttatggtgaatgaatatggctttaggcggcagatgatatacatatctgacttcccaaaagctccaggatttgtgtgctgttgccgaatactcaggacggacctgaattctgattttataccagtctcttcaaaaacttctcgaaccgctgtgtctccaatatcttcttcaggctctgacaggcctcctggaaacttccacatatttttcaactgcagtataaagtcagaaaataaagttaacataactttcactaacacacacatatgtagatttcacaaaatccacctataattggtcaaagtggttgagaatatattttttagtaattgcatgcaaaatttttctagcttccatcctttctccctcgtttcttctttttttgggggagctggtaactgatgaaatcttttcccaccttttctcttcaggaaatataagtggttttgtttggttaacgtgatacattctgtatgaatgaaacattggagggaaacatctactgaatttctgtaatttaaaatattttgctgctagttaactatgaacagatagaagaatcttacagatgctgctataaataagtagaaaatataaatttcatcactaaaatatgctattttaaaatctatttcctatattgtatttctaatcagatgtattactcttattatttctattgtatgtgttaatgattttatgtaaaaatgtaattgcttttcatgagtagtatgaataaaattgattagtttgtgttttcttgtctcccattt

SEQ ID NO: 354467 - DNA, 781 bp, Homo sapiens
atattgaagtattgggccggtaatgttcatttcgtacgcggcggttgttcggcctcctgcggcttttattcgaaaagaggcttttaaaatgtgcatgtttagaaacaaaatttcttcatggaaatcatatacattagaaaatcacagtcagatgtttaatcaatccaaaatgtccactatttcttatgtcattcgttagtctacatgtttctaaacatataaatgtgaatttaatcaattcctttcatagttttataattctctggcagttccttatgatagagtttataaaacagtcctgtgtaaactgctggaagttcttccacagtcaggtcaattttgtcaaacccttctctgtacccatacagcagcagcctagcaactctgctggtgatgggagttgtattttcagtcttcgccaggtcattgagatccatccactcacatcttaagcattcttcctggcaaaaatttatggtgaatgaatatggctttaggcggcagatgatatacatatctgacttcccaaaagctccaggatttgtgtgctgttgccgaatactcaggacggacctgaattctgattttataccagtctcttcaaaaacttctcgaaccgctgtgtctccaatatcttcttcaggctctgacaggcctcctggaaacttccacatatttttcaacgggcccggtggttaatataaaaagtccttgcacgttaagtaggaaaatggtggtgtcaaaaccctggactgggttagcatgtgacctgggaaagcgc

SEQ ID NO: 354468 - DNA, 6502 bp, Homo sapiens
gtcatgtattaagacgagcaaattactaatggaagtttatcccggatcatcgaactatttccgtattcacgcgaccgtctctgacagttatttcataagacagattatgggtataagatggttgtacatttagaaatgtcgtgggtagtacggctaaggtatatattaataatactactacgaataattaatgctgtgtgatggtggatagatataagaaattaattgtatatagtaatatttattgtcacgtaggggagggataggggtgggcgcgtgtggggtagttgggtgaggttttgaaatgtttgttgagtttgtgcagtgtgatggatattggtaggggcggtttgcccagtggagttggtgttgggacgcggggggcggtgtggcgcgggggggaggggctcgaggaggctagagtaataaggttaaagtacgatgttgtggcggtggtttatgattgtcgtgtggataaaggtaggtatggaatgtgagtaaggatacaggggggatgcggaagtttatcagataaataatattgtgataatcaggtaaatagcgggtaaaggtggacgggacaagagagcatggacgagaagaggagtatttttctaggaaagtgacgatggttagttggatgtgctttagatagggtggagtaaaagggggatctaatctcatttcacatgaaagaagaagtatattttagaaatttgttaatgagagtaaaagaaaataaatgtgtatagctcagtttggataattggtcaaacaattttttatccagtagtaaaatatgtaaccattgtcccagtaaagaaaaataacaaaagttgtaaaatgtatattctcccttttatattgcatctgctgttacccagtgaagcttacctagagcaatgatctttttcacgcatttgctttattcgaaaagaggcttttaaaatgtgcatgtttagaaacaaaatttcttcatggaaatcatatacattagaaaatcacagtcagatgtttaatcaatccaaaatgtccactatttcttatgtcattcgttagtctacatgtttctaaacatataaatgtgaatttaatcaattcctttcatagttttataattctctggcagttccttatgatagagtttataaaacagtcctgtgtaaactgctggaagttcttccacagtcaggtcaattttgtcaaacccttctctgtacccatacagcagcagcctagcaactctgctggtgatgggagttgtattttcagtcttcgccaggtcattgagatccatccactcacatcttaagcattcttcctggcaaaaatttatggtgaatgaatatggctttaggcggcagatgatatacatatctgacttcccaaaagctccaggatttgtgtgctgttgccgaatactcaggacggacctgaattctgattttataccagtctcttcaaaaacttctcgaaccgctgtgtctcctacgtaaaaaaagagatgtacaaatcaataataattacacttttagaaactgtatcatcaaagattttcagttaaagtagcattatgtaaaggctcaaaacattaccctaacaaagtaaagttttcaatacaaattctttgccttgtggatatcaagaaatcccaaaatattttcttaccactgtaaattcaagaagcttttgaaatgctgaatatttctttggctgctacttggaggcttatctacctgtacatttttggggtcagctctttttaacttcttgctgctctttttcccaaaaggtaaaaatatagattgaaaagttaaaacattttgcatggctgcagttcctttgtttcttgagataagattccaaagaacttagattcatttcttcaacaccgaaatgctggaggtgtttgatcagttttcaagaaacttggaatataaataattttataattcaacaaaggttttcacattttataaggttgatttttcaattaaatgcaaatttgtgtggcaggatttttattgccattaacatatttttgtggctgctttttctacacatccagatggtccctctaactgggctttctctaattttgtgatgttctgtcattgtctcccaaagtatttaggagaagccctttaaaaagctgccttcctctaccactttgctggaaagcttcacaattgtcacagacaaagatttttgttccaatactcgttttgcctctatttttcttgtttgtcaaatagtaaatgatatttgcccttgcagtaattctactggtgaaaaacatgcaaagaagaggaagtcacagaaacatgtctcaattcccatgtgctgtgactgtagactgtcttaccatagactgtcttacccatcccctggatatgctcttgttttttccctctaatagctatggaaagatgcatagaaagagtataatgttttaaaacataaggcattcgtctgccatttttcaattacatgctgacttcccttacaattgagatttgcccataggttaaacatggttagaaacaactgaaagcataaaagaaaaatctaggccgggtgcagtggctcatgcctatattccctgcactttgggaggccaaagcaggaggatcgcttgagcccaggagttcaagaccaacctggtgaaaccccgtctctacaaaaaaacacaaaaaatagccaggcatggtggcgtgtacatgtggtctcagatacttgggaggctgaggtgggagggttgatcacttgaggctgagaggtcaaggttgcagtgagccataatcgtgccactgcagtccagcctaggcaacagagtgagactttgtctcaaaaaaagagaaattttccttaataagaaaagtaatttttactctgatgtgcaatacatttgttattaaatttattatttaagatggtagcactagtcttaaattgtataaaatatcccctaacatgtttaaatgtccatttttattcattatgctttgaaaaataattatggggaaatacatgtttgttattaaatttattattaaagatagtagcactagtcttaaatttgatataacatctcctaacttgtttaaatgtccatttttattctttatgtttgaaaataaattatggggatcctatttagctcttagtaccactaatcaaaagttcggcatgtagctcatgatctatgctgtttctatgtcgtggaagcaccggatgggggtagtgagcaaatctgccctgctcagcagtcaccatagcagctgactgaaaatcagcactgcctgagtagttttgatcagtttaacttgaatcactaactgactgaaaattgaatgggcaaataagtgcttttgtctccagagtatgcgggagacccttccacctcaagatggatatttcttccccaaggatttcaagatgaattgaaatttttaatcaagatagtgtgctttattctgttgtattttttattattttaatatactgtaagccaaactgaaataacatttgctgttttataggtttgaagaacataggaaaaactaagaggttttgtttttatttttgctgatgaagagatatgtttaaatatgttgtattgttttgtttagttacaggacaataatgaaatggagtttatatttgttatttctattttgttatatttaataatagaattagattgaaataaaatataatgggaaataatctgcagaatgtgggttttcctggtgtttccctctgactctagtgcactgatgatctctgataaggctcagctgctttatagttctctggctaatgcagcagatactcttcctgccagtggtaatacgattttttaagaaggcagtttgtcaattttaatcttgtggatacctttatactcttagggtattattttatacaaaagccttgaggattgcattctattttctatatgaccctcttgatatttaaaaaacactatggataacaattcttcatttacctagtattatgaaagaatgaaggagttcaaacaaatgtgtttcccagttaactagggtttactgtttgagccaatataaatgtttaactgtttgtgatggcagtattcctaaagtacattgcatgttttcctaaatacagagtttaaataatttcagtaattcttagatgattcagcttcatcattaagaatatcttttgttttatgttgagttagaaatgccttcatatagacatagtctttcagacctctactgtcagttttcatttctagctgctttcagggttttatgaattttcaggcaaagctttaatttatactaagcttaggaagtatggctaatgccaacggcagtttttttcttcttaattccacatgactgaggcatatatgatctctgggtaggtgagttgttgtgacaaccacaagcactttttttttttttaaagaaaaaaaggtagtgaatttttaatcatctggactttaagaaggattctggagtatacttaggcctgaaattatatatatttggcttggaaatgtgtttttcttcaattacatctacaagtaagtacagctgaaattcagaggacccataagagttcacatgaaaaaaatcaattcatttgaaaaggcaagatgcaggagagaggaagccttgcaaacctgcagactgctttttgcccaatatagattgggtaaggctgcaaaacataagcttaattagctcacatgctctgctctcacgtggcaccagtggatagtgtgagagaattaggctgtagaacaaatggccttctctttcagcattcacaccactacaaaatcatcttttatatcaacagaagaataagcataaactaagcaaaaggtcaataagtacctgaaaccaagattggctagagatatatcttaatgcaatccattttctgatggattgttacgagttggctatataatgtatgtatggtattttgatttgtgtaaaagttttaaaaatcaagctttaagtacatggacatttttaaataaaatatttaaagacaatttagaaaattgccttaatatcattgttggctaaatagaataggggacatgcatattaaggaaaaggtcatggagaaataatattggtatcaaacaaatacattgatttgtcatgatacacattgaatttgatccaatagtttaaggaataggtaggaaaatttggtttctatttttcgatttcctgtaaatcagtgacataaataattcttagcttattttatatttccttgtcttaaatactgagctcagtaagttgtgttaggggattatttctcagttgagactttcttatatgacattttactatgttttgacttcctgactattaaaaataaatagtagatacaattttcataaagtgaagaattatataatcactgctttataactgactttattatatttatttcaaagttcatttaaaggctactattcatcctctgtgatggaatggtcaggaatttgttttctcatagtttaattccaacaacaatattagtcgtatccaaaataacctttaatgctaaactttactgatgtatatccaaagcttctccttttcagacagattaatccagaagcagtcataaacagaagaataggtggtatgttcctaatgatattatttctactaatggaataaactgtaatattagaaattatgctgctaattatatcagctctgaggtaatttctgaaatgttcagactcagtcggaacaaattggaaaatttaaatttttattcttagctataaagcaagaaagtaaacacattaatttcctcaacatttttaagccaattaaaaatataaaagatacacaccaatatcttcttcaggctctgacaggcctcctggaaacttccacatatttttcaactgcagtataaagtcagaaaataaagttaacataactttcactaacacacacatatgtagatttcacaaaatccacctataattggtcaaagtggttgagaatatattttttagtaattgcatgcaaaatttttctagcttccatcctttctccctcgtttcttctttttttgggggagctggtaactgatgaaatcttttcccaccttttctcttcaggaaatataagtggttttgtttggttaacgtgatacattctgtatgaatgaaacattggagggaaacatctactgaatttctgtaatttaaaatattttgctgctagttaactatgaacagatagaagaatcttacagatgctgctataaataagtagaaaatataaatttcatcactaaaatatgctattttaaaatctatttcctatattgtatttctaatcagatgtattactcttattatttctattgtatgtgttaatgattttatgtaaaaatgtaattgcttttcatgagtagtatgaataaaattgattagtttgtgttttcttgtctcccattt

SEQ ID NO: 354469 - DNA, 771 bp, Homo sapiens
ccgccgaactcagaggccggccccagaaaacccgagcgagtagggggcggcgcgcaggagggaggagaactgggggcgcgggaggctggtgggtgtcgggggtggagatgtagaagatgtgacgccgcggcccggcgggtgccagattagcggacgcggtgcccgcggttgcaacgggatcccgggcgctgcagcttgggaggcggctctccccaggcggcgtccgcggagacacccatccgtgaaccccaggtcccgggccgccggctcgccgcgcaccaggggccggcggacagaagagcggccgagcggctcgaggctgggggaccgcgggcgcggccgcgcgctgccgggcgggaggctggggggccggggccggggccgtgccccggagcgggtcggaggccggggccggggccgggggacggcggctccccgcgcggctccagcggctcggggatcccggccgggccccgcagggaccatggcagccgggagcatcaccacgctgcccgccttgcccgaggatggcggcagcggcgccttcccgcccggccacttcaaggaccccaagcggctgtactgcaaaaacgggggcttcttcctgcgcatccaccccgacggccgagttgacggggtccgggagaagagcgaccctcacatcaagctacaacttcaagcagaagagagaggagttgtgtctatcaaaggagtgtgtgctaaccgttacctggctatgaaggaagggggatcctctagagtcatccacag

SEQ ID NO: 354470 - DNA, 457 bp, Homo sapiens
tgtaatcctttgtggaagcctccctgtttcccttctctgatctgccccggagattcctgtgtgtcccagtctctagggagggaggcttagctggagaggttcagggcaggagaaagcaggagaatgcagaggccgcggggagaggacagaaagtatatcatttataactaacctttagcctttagccactcaaaaatatttcctaatagcctaagggttcttggcaggtctttccccacatcagcaagaaatcttgggagttgggaagagtcagaccttgttccctgaacaagctttctgctttggccaagagttgttaggagattaatgcctgtccccgaaaggcacaggttggagtgtttacttcttcctctcctttcctctctccccccttagagatcgtgacccttcctgcttgcctccctggtgggctctttcaggctggacacagggttta

SEQ ID NO: 354471 - DNA, 1043 bp, Homo sapiens
ggagggtcagctcgttgcaccctggcccggcctcttttcgaccctgcggagcatccgcttccggttcccagactgaattgtcagtgagcggagtctgaggtcgctgtggactgcccactgggccttgcccgagatggacagccggattccttatgatgactacccggtggttttcttgcctgcctatgagaatcctccagcatggattcctcctcatgagagggtacaccacccggactacaacaatgagttgacccagtttctgccccgaaccatcacactgaagaagcctcctggagctcagttgggatttaacatccgaggaggaaaggcctcccagctaggcatcttcatctccaaggtgattcctgactctgatgcacatagagcaggactgcaggaaggggaccaagttctagctgtgaatgatgtggatttccaagatattgagcacagcaaggctgttgagatcctgaagacagctcgtgaaatcagcatgcgtgtgcgcttctttccctacaattatcatcgccaaaaagagaggactgtgcactagaaagttgcagcccacagcccttcatgtggactctgtcatgacatgctaactagacttcaggggagccacttctgttttcagcccctccctggaatagtgagttgggaggatggggagacagctaaccaactgcattacccaaaccatattgcacttttagttccctagttttctaggtgagcttcattccctgaaaggaggatgatgatatctaggcataacctagcctgtgaggaacctagttaggaaagacaactgacatttattgaatatcatgcactagtcccttacatatgtcatattttaattatagaaatcagtagcaaaaagaatcttggggattttccatctgacttccctggccatcttatcccatccttgcactaccagaagattcatacacttttgagactccagtgagacgctgttttcaccccttcctcctcctagcctctctcccaaaaagtaaaacacaatgctgaagaaa

SEQ ID NO: 354472 - DNA, 1166 bp, Homo sapiens
cgtggtcgtataggtcgctgggttcgtctgaggtcgctgtggactgcccactgggccttgcccgagatggacagccggattccttatgatgactacccggtggttttcttgcctgcctatgagaatcctccagcatggattcctcctcatgagagggtacaccacccggactacaacaatgagttgacccagtttctgccccgaaccatcacactgaagaagcctcctggagctcagttgggatttaacatccgaggaggaaaggcctcccagctaggcatcttcatctccaaggtgattcctgactctgatgcacatagagcaggactgcaggaaggggaccaagttctagctgtgaatgatgtggatttccaagatattgagcacagcaaggctgttgagatcctgaagacagctcgtgaaatcagcatgcgtgtgcgcttctttccctacaattatcatcgccaaaaagagaggactgtgcactagaaagttgcagcccacagcccttcatgtggactctgtcatgacatgctaactagacttcaggggagccacttctgttttcagcccctccctggaatagtgagttgggaggatggggagacagctaaccaactgcattacccaaaccatattgcacttttagttccctagttttctaggtgagcttcattccctgaaaggaggatgatgatatctaggcataacctagcctgtgaggaacctagttaggaaagacaactgacatttattgaatatcatgcactagtcccttacatatgtcatattttaattatagaaatcagtagcaaaaagaatcttggggattttccatctgacttccctggccatcttatcccatccttgcactaccagaagattcatacacttttgagactccagtgagacgctgttttcaccccttcctcctcctagcctctctcccaaaaagtaaaacacaatgctgaagaaaacaacacaatccaaccacaccgccacacacaaaaaagggggggggtaaaaatacccacggggggccaacgttcactggcccacttttttggcaacaggggccctaaggggggctttaacacaaacgcgggggttaacacggtcgatggaaaagtgcttttggtttgggaggcccttgggggggaattggc

SEQ ID NO: 354473 - DNA, 1233 bp, Homo sapiens
ggagggtcagctcgttgcaccctggcccggcctcttttcgaccctgcggagcatccgcttccggttcccagactgaattgtcagtgagcggagtctgaggtcgctgtggactgcccactgggccttgcccgagatggacagccggattccttatgatgactacccggtggttttcttgcctgcctatgagaatcctccagcatggattcctcctcatgagagggtacaccacccggactacaacaatgagttgacccagtttctgccccgaaccatcacactgaagaagcctcctggagctcagttgggatttaacatccgaggaggaaaggcctcccagctaggcatcttcatctccaaggtgattcctgactctgatgcacatagagcaggactgcaggaaggggaccaagttctagctgtgaatgatgtggatttccaagatattgagcacagcaaggctgttgagatcctgaagacagctcgtgaaatcagcatgcgtgtgcgcttctttccctacaattatcatcgccaaaaagagaggactgtgcactagaaagttgcagcccacagcccttcatgtggactctgtcatgacatgctaactagacttcaggggagccacttctgttttcagcccctccctggaatagtgagttgggaggatggggagacagctaaccaactgcattacccaaaccatattgcacttttagttccctagttttctaggtgagcttcattccctgaaaggaggatgatgatatctaggcataacctagcctgtgaggaacctagttaggaaagacaactgacatttattgaatatcatgcactagtcccttacatatgtcatattttaattatagaaatcagtagcaaaaagaatcttggggattttccatctgacttccctggccatcttatcccatccttgcactaccagaagattcatacacttttgagactccagtgagacgctgttttcaccccttcctcctcctagcctctctcccaaaaagtaaaacacaatgctgaagaaaacaacacaatccaaccacaccgccacacacaaaaaagggggggggtaaaaatacccacggggggccaacgttcactggcccacttttttggcaacaggggccctaaggggggctttaacacaaacgcgggggttaacacggtcgatggaaaagtgcttttggtttgggaggcccttgggggggaattggc

SEQ ID NO: 354474 - DNA, 1282 bp, Homo sapiens
ggagggtcagctcgttgcaccctggcccggcctcttttcgaccctgcggagcatccgcttccggttcccagactgaattgtcagtgagcggagtctgaggtcgctgtggactgcccactggattgtgaaaaatgaggtcctctttctagagtacctgacaggttgcttggcatccagaagatgtttagctaagttaagagttttcttctgtcttccttctctcctccaaccttaacacctagatatgggctgggcctgtagactgactgccttggaatgggttggagctgctgtctgaaacttgctgggctgctctcccttttgaaccactttttgtctgttctgattcactcttccagggccttgcccgagatggacagccggattccttatgatgactacccggtggttttcttgcctgcctatgagaatcctccagcatggattcctcctcatgagagggtacaccacccggactacaacaatgagttgacccagtttctgccccgaaccatcacactgaagaagcctcctggagctcagttgggatttaacatccgaggaggaaaggcctcccagctaggcatcttcatctccaaggtgattcctgactctgatgcacatagagcaggactgcaggaaggggaccaagttctagctgtgaatgatgtggatttccaagatattgagcacagcaaggctgttgagatcctgaagacagctcgtgaaatcagcatgcgtgtgcgcttctttccctacaattatcatcgccaaaaagagaggactgtgcactagaaagttgcagcccacagcccttcatgtggactctgtcatgacatgctaactagacttcaggggagccacttctgttttcagcccctccctggaatagtgagttgggaggatggggagacagctaaccaactgcattacccaaaccatattgcacttttagttccctagttttctaggtgagcttcattccctgaaaggaggatgatgatatctaggcataacctagcctgtgaggaacctagttaggaaagacaactgacatttattgaatatcatgcactagtcccttacatatgtcatattttaattatagaaatcagtagcaaaaagaatcttggggattttccatctgacttccctggccatcttatcccatccttgcactaccagaagattcatacacttttgagactccagtgagacgctgttttcaccccttcctcctcctagcctctctcccaaaaagtaaaacacaatgctgaagaaa

SEQ ID NO: 354475 - DNA, 1034 bp, Homo sapiens
agagggcgacaacgcagcgccactcttacgggaattcccttcacctcttccttcatgatcctatctcagcaccgtctctgcgagggggaaaaagaaggctcgctgatgaatggccttgcccgagatggacagccggattccttatgatgactacccggtggttttcttgcctgcctatgagaatcctccagcatggattcctcctcatgagagggtacaccacccggactacaacaatgagttgacccagtttctgccccgaaccatcacactgaagaagcctcctggagctcagttgggatttaacatccgaggaggaaaggcctcccagctaggcatcttcatctccaaggtgattcctgactctgatgcacatagagcaggactgcaggaaggggaccaagttctagctgtgaatgatgtggatttccaagatattgagcacagcaaggctgttgagatcctgaagacagctcgtgaaatcagcatgcgtgtgcgcttctttccctacaattatcatcgccaaaaagagaggactgtgcactagaaagttgcagcccacagcccttcatgtggactctgtcatgacatgctaactagacttcaggggagccacttctgttttcagcccctccctggaatagtgagttgggaggatggggagacagctaaccaactgcattacccaaaccatattgcacttttagttccctagttttctaggtgagcttcattccctgaaaggaggatgatgatatctaggcataacctagcctgtgaggaacctagttaggaaagacaactgacatttattgaatatcatgcactagtcccttacatatgtcatattttaattatagaaatcagtagcaaaaagaatcttggggattttccatctgacttccctggccatcttatcccatccttgcactaccagaagattcatacacttttgagactccagtgagacgctgttttcaccccttcctcctcctagcctctctcccaaaaagtaaaacacaatgctgaagaaa

SEQ ID NO: 354476 - DNA, 1045 bp, Homo sapiens
ggagggtcagctcgttgcaccctggcccggcctcttttcgaccctgcggagcatccgcttccggttcccagactgaattgtcagtgagcggagtctgaggtcgctgtggactgcccactgggccttgcccgagatggacagccggattccttatgatgactacccggtggttttcttgcctgcctatgagaatcctccagcatggattcctcctcatgagagggtacaccacccggactacaacaatgagttgacccagtttctgccccgaaccatcacactgaagaagcctcctggagctcagttgggatttaacatccgaggaggaaaggcctcccagctaggcatcttcatctccaaggtgattcctgactctgatgcacatagagcaggactgcaggaaggggaccaagttctagctgtgaatgatgtggatttccaagatattgagcacagcaaggctgttgagatcctgaagacagctcgtgaaatcagcatgcgtgtgcgcttctttccctacaattatcatcgccaaaaagagaggactgtgcactagaaagttgcagcccacagcccttcatgtggactctgtcatgacatgctaactagacttcaggggagccacttctgttttcagcccctccctggaatagtgagttgggaggatggggagacagctaaccaactgcattacccaaaccatattgcacttttagttccctagttttctaggtgagcttcattccctgaaaggaggatgatgatatctaggcataacctagcctgtgaggaacctagttaggaaagacaactgacatttattgaatatcatgcactagtcccttacatatgtcatattttaattatagaaatcagtagcaaaaagaatcttggggattttccatctgacttccctggccatcttatcccatccttgcactaccagaagattcatacacttttgagactcaggtggtgtgcacaccacctgagtcctcaggaaactcacttaagggggtttgcctttgcctagtgaagcaattat

SEQ ID NO: 354477 - DNA, 1026 bp, Homo sapiens
aaaaaaaaaaaggtgaagaaatggggagctactgggctgccccagtgctatccatctactcatttagtctgtgttatctgttctacttaaattaagtctatgacctttccttttcctgacttcagggtaattcattagtgtttcagatgaaggtaggtgtgaagtaagactggtaaaatttctggggttgctgtgtcttgcagagggtacaccacccggactacaacaatgagttgacccagtttctgccccgaaccatcacactgaagaagcctcctggagctcagttgggatttaacatccgaggaggaaaggcctcccagctaggcatcttcatctccaaggtgattcctgactctgatgcacatagagcaggactgcaggaaggggaccaagttctagctgtgaatgatgtggatttccaagatattgagcacagcaaggctgttgagatcctgaagacagctcgtgaaatcagcatgcgtgtgcgcttctttccctacaattatcatcgccaaaaagagaggactgtgcactagaaagttgcagcccacagcccttcatgtggactctgtcatgacatgctaactagacttcaggggagccacttctgttttcagcccctccctggaatagtgagttgggaggatggggagacagctaaccaactgcattacccaaaccatattgcacttttagttccctagttttctaggtgagcttcattccctgaaaggaggatgatgatatctaggcataacctagcctgtgaggaacctagttaggaaagacaactgacatttattgaatatcatgcactagtcccttacatatgtcatattttaattatagaaatcagtagcaaaaagaatcttggggattttccatctgacttccctggccatcttatcccatccttgcactaccagaagattcatacacttttgagactccagtgagacgctgttttcaccccttcctcctcctagcctctctcccaaaaagtaaaacacaatgctgaagaaa

SEQ ID NO: 354478 - DNA, 976 bp, Homo sapiens
cgtggtcgtataggtcgctgggttcgtctgaggtcgctgtggactgcccactgggccttgcccgagatggacagccggattccttatgatgactacccggtggttttcttgcctgcctatgagaatcctccagcatggattcctcctcatgagagggtacaccacccggactacaacaatgagttgacccagtttctgccccgaaccatcacactgaagaagcctcctggagctcagttgggatttaacatccgaggaggaaaggcctcccagctaggcatcttcatctccaaggtgattcctgactctgatgcacatagagcaggactgcaggaaggggaccaagttctagctgtgaatgatgtggatttccaagatattgagcacagcaaggctgttgagatcctgaagacagctcgtgaaatcagcatgcgtgtgcgcttctttccctacaattatcatcgccaaaaagagaggactgtgcactagaaagttgcagcccacagcccttcatgtggactctgtcatgacatgctaactagacttcaggggagccacttctgttttcagcccctccctggaatagtgagttgggaggatggggagacagctaaccaactgcattacccaaaccatattgcacttttagttccctagttttctaggtgagcttcattccctgaaaggaggatgatgatatctaggcataacctagcctgtgaggaacctagttaggaaagacaactgacatttattgaatatcatgcactagtcccttacatatgtcatattttaattatagaaatcagtagcaaaaagaatcttggggattttccatctgacttccctggccatcttatcccatccttgcactaccagaagattcatacacttttgagactccagtgagacgctgttttcaccccttcctcctcctagcctctctcccaaaaagtaaaacacaatgctgaagaaa

SEQ ID NO: 354479 - DNA, 1115 bp, Homo sapiens
ggagggtcagctcgttgcaccctggcccggcctcttttcgaccctgcggagcatccgcttccggttcccagactgaattgtcagtgagcggagtctgaggtcgctgtggactgcccactggattgtgaaaaatgaggtcctctttctagagtacctgacaggttgcttggcatccagaagatgtttagctaaggccttgcccgagatggacagccggattccttatgatgactacccggtggttttcttgcctgcctatgagaatcctccagcatggattcctcctcatgagagggtacaccacccggactacaacaatgagttgacccagtttctgccccgaaccatcacactgaagaagcctcctggagctcagttgggatttaacatccgaggaggaaaggcctcccagctaggcatcttcatctccaaggtgattcctgactctgatgcacatagagcaggactgcaggaaggggaccaagttctagctgtgaatgatgtggatttccaagatattgagcacagcaaggctgttgagatcctgaagacagctcgtgaaatcagcatgcgtgtgcgcttctttccctacaattatcatcgccaaaaagagaggactgtgcactagaaagttgcagcccacagcccttcatgtggactctgtcatgacatgctaactagacttcaggggagccacttctgttttcagcccctccctggaatagtgagttgggaggatggggagacagctaaccaactgcattacccaaaccatattgcacttttagttccctagttttctaggtgagcttcattccctgaaaggaggatgatgatatctaggcataacctagcctgtgaggaacctagttaggaaagacaactgacatttattgaatatcatgcactagtcccttacatatgtcatattttaattatagaaatcagtagcaaaaagaatcttggggattttccatctgacttccctggccatcttatcccatccttgcactaccagaagattcatacacttttgagactccagtgagacgctgttttcaccccttcctcctcctagcctctctcccaaaaagtaaaacacaatgctgaagaaa

SEQ ID NO: 354480 - DNA, 1021 bp, Homo sapiens
ttgagacggtaacatctgttttgcaggattgtgaaaaatgaggtcctctttctagagtacctgacaggttgcttggcatccagaagatgtttagctaaggccttgcccgagatggacagccggattccttatgatgactacccggtggttttcttgcctgcctatgagaatcctccagcatggattcctcctcatgagagggtacaccacccggactacaacaatgagttgacccagtttctgccccgaaccatcacactgaagaagcctcctggagctcagttgggatttaacatccgaggaggaaaggcctcccagctaggcatcttcatctccaaggtgattcctgactctgatgcacatagagcaggactgcaggaaggggaccaagttctagctgtgaatgatgtggatttccaagatattgagcacagcaaggctgttgagatcctgaagacagctcgtgaaatcagcatgcgtgtgcgcttctttccctacaattatcatcgccaaaaagagaggactgtgcactagaaagttgcagcccacagcccttcatgtggactctgtcatgacatgctaactagacttcaggggagccacttctgttttcagcccctccctggaatagtgagttgggaggatggggagacagctaaccaactgcattacccaaaccatattgcacttttagttccctagttttctaggtgagcttcattccctgaaaggaggatgatgatatctaggcataacctagcctgtgaggaacctagttaggaaagacaactgacatttattgaatatcatgcactagtcccttacatatgtcatattttaattatagaaatcagtagcaaaaagaatcttggggattttccatctgacttccctggccatcttatcccatccttgcactaccagaagattcatacacttttgagactccagtgagacgctgttttcaccccttcctcctcctagcctctctcccaaaaagtaaaacacaatgctgaagaaa

SEQ ID NO: 354481 - DNA, 977 bp, Homo sapiens
ggagggtcagctcgttgcaccctggcccggcctcttttcgaccctgcggagcatccgcttccggttcccagactgaattgtcagtgagcggagtctgaggtcgctgtggactgcccactgggccttgcccgagatggacagccggattccttatgatgactacccggtggttttcttgcctgcctatgagaatcctccagcatggattcctcctcatgagagggtacaccacccggactacaacaatgagttgacccagtttctgccccgaaccatcacactgaagaagcctcctggagctcagttgggatttaacatccgaggaggaaaggcctcccagctaggcatcttcatctccaaggtgattcctgactctgatgcacatagagcaggactgcaggaaggggaccaagttctagctgtgaatgatgtggatttccaagatattgagcacagcaaggctgttgagatcctgaagacagctcgtgaaatcagcatgcgtgtgcgcttctttccctacatctgtcatgacatgctaactagacttcaggggagccacttctgttttcagcccctccctggaatagtgagttgggaggatggggagacagctaaccaactgcattacccaaaccatattgcacttttagttccctagttttctaggtgagcttcattccctgaaaggaggatgatgatatctaggcataacctagcctgtgaggaacctagttaggaaagacaactgacatttattgaatatcatgcactagtcccttacatatgtcatattttaattatagaaatcagtagcaaaaagaatcttggggattttccatctgacttccctggccatcttatcccatccttgcactaccagaagattcatacacttttgagactccagtgagacgctgttttcaccccttcctcctcctagcctctctcccaaaaagtaaaacacaatgctgaagaaa

SEQ ID NO: 354482 - DNA, 2065 bp, Homo sapiens
tgcgcctgcgcggagggagccgcgagacaggtgcgcatgcgcagtgcgcgtctgcgagaccgacttggacggagccgagctgaggctcggcttcctgctgatggtcagggttttggcaactccccggtgtgagaggggtagggagtgctcccggcggcgacgggaccttaaggcctctgtgtggcagaaggatcagctggtgacacagccgcactggcaagaaaatggacccaccttttccagcacaccttaccgctaccaggcctgcaggtttgggcaggttccagaccagcctgctggcctgcgactcttcacagtgcaaattccccacaagcgccgggcgccagagctgtaccgggctccgttcccgttgtacgcgcttcaggtcgaccccagcactgggctgctcatcgctgcgggcggaggaggcgccgccaagacaggcataaagaatggcgtgcactttctgcagctagagctgattaatgggcgcttgagtgcctccttgctgcactcccatgacacagagacacgggccaccatgaacttggcactggctggtgacatccttgctgcagggcaggatgcccactgtcagctcctgcgcttccaggcacatcaacagcagggcaacaaggcagagaaggccggttccaaggagcaggggcctcgacaaaggaagggagcagccccagcagagaagaaatgtggagcggaaacccagcacgaggggctagaactcagggtagagaatttgcagggcggtgcagacagactttagctccgatccactgcagaaagttgtgtgcttcaaccacgataataccctgcttgccactggaggaacagatggctacgtccgtgtctggaaggtgcccagcctggagaaggttctggagttcaaagcccacgaaggggagattgaagacctggctttagggcctgatggcaagttggtaaccgtgggccgggaccttaaggccccctccctgctacctcacagcctgggatggctccaacttcttgccccttcggaccaagtcctgtggccatgaagtcgtctcctgcctcgatgtcagtgaatccggcaccttcctaggcctgggcacagtcactggctctgttgccatctacatagctttctctctccagtgcctctactacgtgagggaggcccatggcattgtggtgacggatgtggcctttctacctgagaagggtcgtggtccagagctccttgggtcccatgaaactgccctgttctctgtggctgtggacagtcgttgccagctgcatctgttgccctcacggcggagtgttcctgtgtggctcctgctcctgctgtgtgtcgggcttattattgtgaccatcctgctgctccagagtgcctttccaggtttcctttagcttccctgcttcctgggaatcaggagcctggacactgccatctctagagcagagtggaggcctggactccctttgctcactccattcgggtccacagctgaggttgcctctgacaagatgaatgggcactgcctgcccttctagtgaaaaggcttggctatggccctgtgtgactccaggtcccaggaaccttgccttcgtcatctgtggatccatccagaacagcggtatctgaagcccaggccatactccctgcctcctttcttctgcctaccagaggctccagagttgagcttgtccttatctagaaacatgtgaagatgcccaagagcctggaggcactgctgtccttcctgcagaaacagtttctcctcctcccctcagccttgtggccagttcctcttcacatgaagcccctggcatttgctggggaagggactggcctggtacttgctgttagggcaggaaggggcaaaaggaagacttgggtagtaatctgggggttcagatgggtagcactaagccagctggcctaaagatgcaataagttcctaggtagtctacccttaccttgaggaatgggaaaatgaacctcagcccattaggcaggaaaagttgatatttaataaacaaggaaagagtgaactgagaccccaaa

SEQ ID NO: 354483 - DNA, 2196 bp, Homo sapiens
tgcgcctgcgcggagggagccgcgagacaggtgcgcatgcgcagtgcgcgtctgcgagaccgacttggacggagccgagctgaggctcggcttcctgctgatggtcagggttttggcaactccccggtgtgagaggggtagggagtgctcccggcggcgacggggccgagttcaccagccgccggggcagtagtcgaaggcccggcgcggcatgtcctgggtgccgcggtgcgggcagtgaacgcgcgccgggcgggatgggccggcgccgggcgccagagctgtaccgggctccgttcccgttgtacgcgcttcaggtcgaccccagcactgggctgctcatcgctgcgggcggaggaggcgccgccaagacaggcataaagaatggcgtgcactttctgcagctagagctgattaatgggcgcttgagtgcctccttgctgcactcccatgacacagagacacgggccaccatgaacttggcactggctggtgacatccttgctgcagggcaggatgcccactgtcagctcctgcgcttccaggcacatcaacagcagggcaacaaggcagagaaggccggttccaaggagcaggggcctcgacaaaggaagggagcagccccagcagagaagaaatgtggagcggaaacccagcacgaggggctagaactcagggtagagaatttgcagggcggtgcagacagactttagctccgatccactgcagaaagttgtgtgcttcaaccacgataataccctgcttgccactggaggaacagatggctacgtccgtgtctggaaggtgcccagcctggagaaggttctggagttcaaagcccacgaaggggagattgaagacctggctttagggcctgatggcaagttggtaaccgtgggccgggaccttaaggcctctgtgtggcagaaggatcagctggtgacacagctgcactggcaagaaaatggacccaccttttccagcacaccttaccgctaccaggcctgcaggtttgggcaggttccagaccagcctgctggcctgcgactcttcacagtgcaaattccccacaagcgcctgcgccagccccctccctgctacctcacagcctgggatggctccaacttcttgccccttcggaccaagtcctgtggccatgaagtcgtctcctgcctcgatgtcaggtgtgagacattgctgccttggctagtgaatccggcaccttcctaggcctgggcacagtcactggctctgttgccatctacatagctttctctctccagtgcctctactacgtgagggaggcccatggcattgtggtgacggatgtggcctttctacctgagaagggtcgtggtccagagctccttgggtcccatgaaactgccctgttctctgtggctgtggacagtcgttgccagctgcatctgttgccctcacggcggagtgttcctgtgtggctcctgctcctgctgtgtgtcgggcttattattgtgaccatcctgctgctccagagtgcctttccaggtttcctttagcttccctgcttcctgggaatcaggagcctggacactgccatctctagagcagagtggaggcctggactccctttgctcactccattcgggtccacagctgaggttgcctctgacaagatgaatgggcactgcctgcccttctagtgaaaaggcttggctatggccctgtgtgactccaggtcccaggaaccttgccttcgtcatctgtggatccatccagaacagcggtatctgaagcccaggccatactccctgcctcctttcttctgcctaccagaggctccagagttgagcttgtccttatctagaaacatgtgaagatgcccaagagcctggaggcactgctgtccttcctgcagaaacagtttctcctcctcccctcagccttgtggccagttcctcttcacatgaagcccctggcatttgctggggaagggactggcctggtacttgctgttagggcaggaaggggcaaaaggaagacttgggtagtaatctgggggttcagatgggtagcactaagccagctggcctaaagatgcaataagttcctaggtagtctacccttaccttgaggaatgggaaaatgaacctcagcccattaggcaggaaaagttgatatttaataaacaaggaaagagtgaactgagaccccaaa

SEQ ID NO: 354484 - DNA, 2306 bp, Homo sapiens
tgcgcctgcgcggagggagccgcgagacaggtgcgcatgcgcagtgcgcgtctgcgagaccgacttggacggagccgagctgaggctcggcttcctgctgatggtcagggttttggcaactccccggtgtgagaggggtagggagtgctcccggcggcgacggggccgagttcaccagccgccggggcagtagtcgaaggcccggcgcggcatgtcctgggtgccgcggtgcgggcagtgaacgcgcgccgggcgggatgggccggcgccgggcgccagagctgtaccgggctccgttcccgttgtacgcgcttcaggtcgaccccagcactgggctgctcatcgctgcgggcggaggaggcgccgccaagacaggcataaagaatggcgtgcactttctgcagctagagctgattaatgggcgcttgagtgcctccttgctgcactcccatgacacagagacacgggccaccatgaacttggcactggctggtgacatccttgctgcagggcaggatgcccactgtcagctcctgcgcttccaggcacatcaacagcagggcaacaaggcagagaaggccggttccaaggagcaggggcctcgacaaaggaagggagcagccccagcagagaagaaatgtggagcggaaacccagcacgaggggctagaactcagggtagagaatttgcagggcggtgcagacagactttagctccgatccactgcagaaagttgtgtgcttcaaccacgataataccctgcttgccactggaggaacagatggctacgtccgtgtctggaaggtgcccagcctggagaaggttctggagttcaaagcccacgaaggggagattgaagacctggctttagggcctgatggcaagttggtaaccgtgggccgggaccttaaggcctctgtgtggcagaaggatcagctggtgacacagctgcactggcaagaaaatggacccaccttttccagcacaccttaccgctaccaggcctgcaggtttgggcaggttccagaccagcctgctggcctgcgactcttcacagtgcaaattccccacaagcgcctgcgccagccccctccctgctacctcacagcctgggatggctccaacttcttgccccttcggaccaagtcctgtggccatgaagtcgtctcctgcctcgatgtcagtgaatccggcaccttcctaggcctgggcacagtcactggctctgttgccatctacatagctttctctctccagtgcctctactacgtgagggaggcccatggcattgtggtgacggatgtggcctttctacctgagaagggtcgtggtccagagctccttgggtcccatgaaactgccctgttctctgtggctgtggacagtcgttgccagctgcatctgttgccctcacggcggagtgttcctgtgtggctcctgctcctgctgtgtgtcgggcttattattgtgaccatcctgctgctccagagtgcctttccaggtttcctttagcttccctgcttcctgggaatcaggagcctggacactgccatctctagagcagagtggaggcctggactccctttgctcactccattcgggtccacagctgaggttgcctctgacaagatgaatgggcactgcctgcccttctagtgaaaaggcttggctatggccctgtgtgactccaggtcccaggaaccttgccttcgtcatctgtggatccatccagaacagcggtatctgaagcccaggccatactccctgcctcctttcttctgcctaccagaggctccagagttgagcttgtccttatctagaaacatgtgaagatgcccaagagcctggaggcactgctgtccttcctgcagaaacagtttctcctcctcccctcagccttgtggccagttcctcttcacatgaagcccctggcatttgctggggaagggactggcctggtacttgctgttagggcaggaaggggcaaaaggaagacttgggtagtaatctgggggttcagatgggtagcactaagccagctggcctaaagatgcaataagttcctaggtagtctacccttaccttgaggaatgggaaaatgaacctcagcccattaggcaggaaaagttgatatttaataaacaaggaaagagtgaactgagaccccaaaaaacacaacactctaaccaaactccgagggactcaatgtcgggtgcgggccacacgacgcctactcgcacggccctgtggcctatagtgttccgtgccccagtttcgtgcccaacgggtacatctcccggtcccct

SEQ ID NO: 354485 - DNA, 1996 bp, Homo sapiens
tgcgcctgcgcggagggagccgcgagacaggtgcgcatgcgcagtgcgcgtctgcgagaccgacttggacggagccgagctgaggctcggcttcctgctgatggtcagggttttggcaactccccggtgtgagaggggtagggagtgctcccggcggcgacggggccgagttcaccagccgccggggcagtagtcgaaggcccggcgcggcatgtcctgggtgccgcggtgcgggcagtgaacgcgcgccgggcgggatgggccggcgccgggcgccagagctgtaccgggctccgttcccgttgtacgcgcttcaggtcgaccccagcactgggctgctcatcgctgcgggcggaggaggcgccgccaagacaggcataaagaatggcgtgcactttctgcagctagagctgattaatgggcgcttgagtgcctccttgctgcactcccatgacacagagacacgggccaccatgaacttggcactggctggtgacatccttgctgcagggcaggatgcccactgtcagctcctgcgcttccaggcacatcaacagcagggcaacaaggcagagaaggccggttccaaggagcaggggcctcgacaaaggaagggagcagccccagcagagaagaaatgtggagcggaaacccagcacgaggggctagaactcagggtagagaatttgcagggcggtgcagacagactttagctccgatccactgcagaaagttgtgtgcttcaaccacgataataccctgcttgccactggaggaacagatggctacgtccgtgtctggaaggtgcccagcctggagaaggttctggagttcaaagcccacgaaggggagattgaagacctggctttagggcctgatggcaagttggtaaccgtgggccgggaccttaaggcctctgtgtggcagaaggatcagctggtgacacagctgcactggcaagaaaatggacccaccttttccagcacaccttaccgctaccaggcctgcagtgaatccggcaccttcctaggcctgggcacagtcactggctctgttgccatctacatagctttctctctccagtgcctctactacgtgagggaggcccatggcattgtggtgacggatgtggcctttctacctgagaagggtcgtggtccagagctccttgggtcccatgaaactgccctgttctctgtggctgtggacagtcgttgccagctgcatctgttgccctcacggcggagtgttcctgtgtggctcctgctcctgctgtgtgtcgggcttattattgtgaccatcctgctgctccagagtgcctttccaggtttcctttagcttccctgcttcctgggaatcaggagcctggacactgccatctctagagcagagtggaggcctggactccctttgctcactccattcgggtccacagctgaggttgcctctgacaagatgaatgggcactgcctgcccttctagtgaaaaggcttggctatggccctgtgtgactccaggtcccaggaaccttgccttcgtcatctgtggatccatccagaacagcggtatctgaagcccaggccatactccctgcctcctttcttctgcctaccagaggctccagagttgagcttgtccttatctagaaacatgtgaagatgcccaagagcctggaggcactgctgtccttcctgcagaaacagtttctcctcctcccctcagccttgtggccagttcctcttcacatgaagcccctggcatttgctggggaagggactggcctggtacttgctgttagggcaggaaggggcaaaaggaagacttgggtagtaatctgggggttcagatgggtagcactaagccagctggcctaaagatgcaataagttcctaggtagtctacccttaccttgaggaatgggaaaatgaacctcagcccattaggcaggaaaagttgatatttaataaacaaggaaagagtgaactgagaccccaaa

SEQ ID NO: 354486 - DNA, 2735 bp, Homo sapiens
tgcgcctgcgcggagggagccgcgagacaggtgcgcatgcgcagtgcgcgtctgcgagaccgacttggacggagccgagctgaggctcggcttcctgctgatggtcagggttttggcaactccccggtgtgagaggggtagggagtgctcccggcggcgacggggccgagttcaccagccgccggggcagtagtcgaaggcccggcgcggcatgtcctgggtgccgcggtgcgggcagtgaacgcgcgccgggcgggatgggccggcgccgggcgccagagctgtaccgggctccgttcccgttgtacgcgcttcaggtcgaccccagcactgggctgctcatcgctgcgggcggaggaggcgccgccaagacaggcataaagaatggcgtggtgagagcgcagggccactggggctgggtcttgctgcgggctggcggcgattccagggtggccggggggtcgcggggcgggccacactccagcttcgggccctgcccacttctgttgggaagacccgcttgcctgacgcccaggggcgaatttcagtcgagaactcagcgggcggaggagaggcttttaaggtaaagtgaaaactgcacacagctgcagagtcgccaggaacgcttcagctccgcctcagagcagctccaggggtcttatactggccttttccgggaggtcttgcctgccctctagcagcggcgagagtggtgcatttgggtttaggctaagttccttccctctcctgagcttcaccctgttctgtaaaatagaggtaataatcccagtcctgctcactgtgtagatttgtgaggcccaaatgagagaaaaaagactcgagaaacccttgtgaactagaacgtgcagaaagcaaaggggtaagacatcagactcttccctaaacgtgctctctgggcacccctgaacttgctcatccgggttccccctcccacagcactttctgcagctagagctgattaatgggcgcttgagtgcctccttgctgcactcccatgacacagagacacgggccaccatgaacttggcactggctggtgacatccttgctgcagggcaggatgcccactgtcagctcctgcgcttccaggcacatcaacagcagggcaacaaggcagagaaggccggttccaaggagcaggggcctcgacaaaggaagggagcagccccagcagagaagaaatgtggagcggaaacccagcacgaggggctagaactcagggtagagaatttgcagggcggtgcagacagactttagctccgatccactgcagaaagttgtgtgcttcaaccacgataataccctgcttgccactggaggaacagatggctacgtccgtgtctggaaggtgcccagcctggagaaggttctggagttcaaagcccacgaaggggagattgaagacctggctttagggcctgatggcaagttggtaaccgtgggccgggaccttaaggcctctgtgtggcagaaggatcagctggtgacacagctgcactggcaagaaaatggacccaccttttccagcacaccttaccgctaccaggcctgcaggtttgggcaggttccagaccagcctgctggcctgcgactcttcacagtgcaaattccccacaagcgcctgcgccagccccctccctgctacctcacagcctgggatggctccaacttcttgccccttcggaccaagtcctgtggccatgaagtcgtctcctgcctcgatgtcagtgaatccggcaccttcctaggcctgggcacagtcactggctctgttgccatctacatagctttctctctccagtgcctctactacgtgagggaggcccatggcattgtggtgacggatgtggcctttctacctgagaagggtcgtggtccagagctccttgggtcccatgaaactgccctgttctctgtggctgtggacagtcgttgccagctgcatctgttgccctcacggcggagtgttcctgtgtggctcctgctcctgctgtgtgtcgggcttattattgtgaccatcctgctgctccagagtgcctttccaggtttcctttagcttccctgcttcctgggaatcaggagcctggacactgccatctctagagcagagtggaggcctggactccctttgctcactccattcgggtccacagctgaggttgcctctgacaagatgaatgggcactgcctgcccttctagtgaaaaggcttggctatggccctgtgtgactccaggtcccaggaaccttgccttcgtcatctgtggatccatccagaacagcggtatctgaagcccaggccatactccctgcctcctttcttctgcctaccagaggctccagagttgagcttgtccttatctagaaacatgtgaagatgcccaagagcctggaggcactgctgtccttcctgcagaaacagtttctcctcctcccctcagccttgtggccagttcctcttcacatgaagcccctggcatttgctggggaagggactggcctggtacttgctgttagggcaggaaggggcaaaaggaagacttgggtagtaatctgggggttcagatgggtagcactaagccagctggcctaaagatgcaataagttcctaggtagtctacccttaccttgaggaatgggaaaatgaacctcagcccattaggcaggaaaagttgatatttaataaacaaggaaagagtgaactgagaccccaaa

SEQ ID NO: 354487 - DNA, 2103 bp, Homo sapiens
tgcgcctgcgcggagggagccgcgagacaggtgcgcatgcgcagtgcgcgtctgcgagaccgacttggacggagccgagctgaggctcggcttcctgctgatggtcagggttttggcaactccccggtgtgagaggggtagggagtgctcccggcggcgacggggccgagttcaccagccgccggggcagtagtcgaaggcccggcgcggcatgtcctgggtgccgcggtgcgggcagtgaacgcgcgccgggcgggatgggccggcgccgggcgccagagctgtaccgggctccgttcccgttgtacgcgcttcaggtcgaccccagcactgggctgctcatcgctgcgggcggaggaggcgccgccaagacaggcataaagaatggcgtgagacacgggccaccatgaacttggcactggctggtgacatccttgctgcagggcaggatgcccactgtcagctcctgcgcttccaggcacatcaacagcagggcaacaaggcagagaaggccggttccaaggagcaggggcctcgacaaaggaagggagcagccccagcagagaagaaatgtggagcggaaacccagcacgaggggctagaactcagggtagagaatttgcagggcggtgcagacagactttagctccgatccactgcagaaagttgtgtgcttcaaccacgataataccctgcttgccactggaggaacagatggctacgtccgtgtctggaaggtgcccagcctggagaaggttctggagttcaaagcccacgaaggggagattgaagacctggctttagggcctgatggcaagttggtaaccgtgggccgggaccttaaggcctctgtgtggcagaaggatcagctggtgacacagctgcactggcaagaaaatggacccaccttttccagcacaccttaccgctaccaggcctgcaggtttgggcaggttccagaccagcctgctggcctgcgactcttcacagtgcaaattccccacaagcgcctgcgccagccccctccctgctacctcacagcctgggatggctccaacttcttgccccttcggaccaagtcctgtggccatgaagtcgtctcctgcctcgatgtcagtgaatccggcaccttcctaggcctgggcacagtcactggctctgttgccatctacatagctttctctctccagtgcctctactacgtgagggaggcccatggcattgtggtgacggatgtggcctttctacctgagaagggtcgtggtccagagctccttgggtcccatgaaactgccctgttctctgtggctgtggacagtcgttgccagctgcatctgttgccctcacggcggagtgttcctgtgtggctcctgctcctgctgtgtgtcgggcttattattgtgaccatcctgctgctccagagtgcctttccaggtttcctttagcttccctgcttcctgggaatcaggagcctggacactgccatctctagagcagagtggaggcctggactccctttgctcactccattcgggtccacagctgaggttgcctctgacaagatgaatgggcactgcctgcccttctagtgaaaaggcttggctatggccctgtgtgactccaggtcccaggaaccttgccttcgtcatctgtggatccatccagaacagcggtatctgaagcccaggccatactccctgcctcctttcttctgcctaccagaggctccagagttgagcttgtccttatctagaaacatgtgaagatgcccaagagcctggaggcactgctgtccttcctgcagaaacagtttctcctcctcccctcagccttgtggccagttcctcttcacatgaagcccctggcatttgctggggaagggactggcctggtacttgctgttagggcaggaaggggcaaaaggaagacttgggtagtaatctgggggttcagatgggtagcactaagccagctggcctaaagatgcaataagttcctaggtagtctacccttaccttgaggaatgggaaaatgaacctcagcccattaggcaggaaaagttgatatttaataaacaaggaaagagtgaactgagaccccaaa

SEQ ID NO: 354488 - DNA, 1093 bp, Homo sapiens
tgcgcctgcgcggagggagccgcgagacaggtgcgcatgcgcagtgcgcgtctgcgagaccgacttggacggagccgagctgaggctcggcttcctgctgatggtcagggttttggcaactccccggtgtgagaggggtagggagtgctcccggcggcgacggggccgagttcaccagccgccggggcagtagtcgaaggcccggcgcggcatgtcctgggtgccgcggtgcgggcagtgaacgcgcgccgggcgggatgggccggcgccgggcgccagagctgtaccgggctccgttcccgttgtacgcgcttcaggtcgaccccagcactgggctgctcatcgctgcgggcggaggaggcgccgccaagacaggcataaagaatggcgtgcactttctgcagctagagctgattaatgggcgcttgagtgcctccttgctgcactcccatgacacagagacacgggccaccatgaacttggcactggctggtgacatccttgctgcagggcaggatgcccactgtcagctcctgcgcttccaggcacatcaacagcagggcaacaaggcagagaaggccggttccaaggagcaggggcctcgacaaaggaagggagcagccccagcagagaagaaatgtggagcggaaacccagcacgaggggctagaactcagggtagagaatttgcagggcggtgcagacagactttagctccgatccactgcagaaagttgtgtgcttcaaccacgataataccctgcttgccactggaggaacagatggctacgtccgtgtctggaaggtgcccagcctggagaaggttctggagttcaaagcccacgaaggggagattgaagacctggctttagggcctgatggcaagttggtaaccgtgggccgggaccttaaggcctctgtgtggcagaaggatcagctggtgacacagctgcactggcaagaaaatggacccacctttctgcagtggatcggagctaaagtctgtctgcaccgcctgcaaattctctaccctgagttctagcccctcgtgctgggtttccgctccacatttcttcgtcgacgcggccgcgaat

SEQ ID NO: 354489 - DNA, 1679 bp, Homo sapiens
tgcgcctgcgcggagggagccgcgagacaggtgcgcatgcgcagtgcgcgtctgcgagaccgacttggacggagccgagctgaggctcggcttcctgctgatggtcagggttttggcaactccccggtgtgagaggggtagggagtgctcccggcggcgacggggccgagttcaccagccgccggggcagtagtcgaaggcccggcgcggcatgtcctgggtgccgcggtgcgggcagtgaacgcgcgccgggcgggatgggccggcgccgggcgccagagctgtaccgggctccgttcccgttgtacgcgcttcaggtcgaccccagcactgggctgctcatcgctgcgggcggaggaggcgccgccaagacaggcataaagaatggcgtgcactttctgcagctagagctgattaatgggcgcttgagtgcctccttgctgcactcccatgacacagagacacgggccaccatgaacttggcactggctggtgacatccttgctgcagggcaggatgcccactgtcagctcctgcgcttccaggcacatcaacagcagggcaacaaggcagagaaggccggttccaaggagcaggggcctcgacaaaggaagggagcagccccagcagagaagaaatgtggagcggaaacccagcacgaggggctagaactcagggtagagaatttgcagggcggtgcagacagactttagctccgatccactgcagaaagttgtgtgcttcaaccacgataataccctgcttgccactggaggaacagatggctacgtccgtgtctggaaggtgcccagcctggagaaggttctggagttcaaagcccacgaaggggagattgaagacctggctttagggcctgatggcaagcttccctgcttcctgggaatcaggagcctggacactgccatctctagagcagagtggaggcctggactccctttgctcactccattcgggtccacagctgaggttgcctctgacaagatgaatgggcactgcctgcccttctagtgaaaaggcttggctatggccctgtgtgactccaggtcccaggaaccttgccttcgtcatctgtggatccatccagaacagcggtatctgaagcccaggccatactccctgcctcctttcttctgcctaccagaggctccagagttgagcttgtccttatctagaaacatgtgaagatgcccaagagcctggaggcactgctgtccttcctgcagaaacagtttctcctcctcccctcagccttgtggccagttcctcttcacatgaagcccctggcatttgctggggaagggactggcctggtacttgctgttagggcaggaaggggcaaaaggaagacttgggtagtaatctgggggttcagatgggtagcactaagccagctggcctaaagatgcaataagttcctaggtagtctacccttaccttgaggaatgggaaaatgaacctcagcccattaggcaggaaaagttgatatttaataaacaaggaaagagtgaactgagaccccaaaaaacacaacactctaaccaaactccgagggactcaatgtcgggtgcgggccacacgacgcctactcgcacggccctgtggcctatagtgttccgtgccccagtttcgtgcccaacgggtacatctcccggtcccct

SEQ ID NO: 354490 - DNA, 2170 bp, Homo sapiens
tgcgcctgcgcggagggagccgcgagacaggtgcgcatgcgcagtgcgcgtctgcgagaccgacttggacggagccgagctgaggctcggcttcctgctgatggtcagggttttggcaactccccggtgtgagaggggtagggagtgctcccggcggcgacggggccgagttcaccagccgccggggcagtagtcgaaggcccggcgcggcatgtcctgggtgccgcggtgcgggcagtgaacgcgcgccgggcgggatgggccggcgccgggcgccagagctgtaccgggctccgttcccgttgtacgcgcttcaggtcgaccccagcactgggctgctcatcgctgcgggcggaggaggcgccgccaagacaggcataaagaatggcgtgcactttctgcagctagagctgattaatgggcgcttgagtgcctccttgctgcactcccatgacacagagacacgggccaccatgaacttggcactggctggtgacatccttgctgcagggcaggatgcccactgtcagctcctgcgcttccaggcacatcaacagcagggcaacaaggcagagaaggccggttccaaggagcaggggcctcgacaaaggaagggagcagccccagcagagaagaaatgtggagcggaaacccagcacgaggggctagaactcagggtagagaatttgcagggcggtgcagacagactttagctccgatccactgcagaaagttgtgtgcttcaaccacgataataccctgcttgccactggaggaacagatggctacgtccgtgtctggaaggtgcccagcctggagaaggttctggagttcaaagcccacgaaggggagattgaagacctggctttagggcctgatggcaagttggtaaccgtgggccgggaccttaaggcctctgtgtggcagaaggatcagctggtgacacagctgcactggcaagaaaatggacccaccttttccagcacaccttaccgctaccaggcctgcaggtttgggcaggttccagaccagcctgctggcctgcgactcttcacagtgcaaattccccacaagcgcctgcgccagccccctccctgctacctcacagcctgggatggctccaacttcttgccccttcggaccaagtcctgtggccatgaagtcgtctcctgcctcgatgtcagtgaatccggcaccttcctaggcctgggcacagtcactggctctgttgccatctacatagctttctctctccagtgcctctactacgtgagggaggcccatggcattgtggtgacggatgtggcctttctacctgagaagggtcgtggtccagagctccttgggtcccatgaaactgccctgttctctgtggctgtggacagtcgttgccagctgcatctgttgccctcacggcggagtgttcctgtgtggctcctgctcctgctgtgtgtcgggcttattattgtgaccatcctgctgctccagagtgcctttccaggtttcctttagcttccctgcttcctgggaatcaggagcctggacactgccatctctagagcagagtggaggcctggactccctttgctcactccattcgggtccacagctgaggttgcctctgacaagatgaatgggcactgcctgcccttctagtgaaaaggcttggctatggccctgtgtgactccaggtcccaggaaccttgccttcgtcatctgtggatccatccagaacagcggtatctgaagcccaggccatactccctgcctcctttcttctgcctaccagaggctccagagttgagcttgtccttatctagaaacatgtgaagatgcccaagagcctggaggcactgctgtccttcctgcagaaacagtttctcctcctcccctcagccttgtggccagttcctcttcacatgaagcccctggcatttgctggggaagggactggcctggtacttgctgttagggcaggaaggggcaaaaggaagacttgggtagtaatctgggggttcagatgggtagcactaagccagctggcctaaagatgcaataagttcctaggtagtctacccttaccttgaggaatgggaaaatgaacctcagcccattaggcaggaaaagttgatatttaataaacaaggaaagagtgaactgagaccccaaa

SEQ ID NO: 354491 - DNA, 2302 bp, Homo sapiens
tgcgcctgcgcggagggagccgcgagacaggtgcgcatgcgcagtgcgcgtctgcgagaccgacttggacggagccgagctgaggctcggcttcctgctgatggtcagggttttggcaactccccggtgtgagaggggtagggagtgctcccggcggcgacggggccgagttcaccagccgccggggcagtagtcgaaggcccggcgcggcatgtcctgggtgccgcggtgcgggcagtgaacgcgcgccgggcgggatgggccggcgccgggcgccagagctgtaccgggctccgttcccgttgtacgcgcttcaggtcgaccccagcactgggctgctcatcgctgcgggcggaggaggcgccgccaagacaggcataaagaatggcgtggtgagagcgcagggccactggggctgggtcttgctgcgggctggcggcgattccagggtggccggggggtcgcggggcgggccacactccagcttcgggccctgcccacttctgttgggaagacccgcttgcctgacgcccaggggcgaatttcagtcgagaactcagcgggcggaggagaggcttttaaggtaaagtgaaaactgcacacagctgcagagtcgccaggaacgcttcagctccgcctcagagcagctccaggggtcttatactggccttttccgggaggtcttgcctgccctctagcagcggcgagagtggtgcatttgggtttaggctaagttccttccctctcctgagcttcaccctgttctgtaaaatagaggtaataatcccagtcctgctcactgtgtagatttgtgaggcccaaatgagagaaaaaagactcgagaaacccttgtgaactagaacgtgcagaaagcaaaggggtaagacatcagactcttccctaaacgtgctctctgggcacccctgaacttgctcatccgggttccccctcccacagcactttctgcagctagagctgattaatgggcgcttgagtgcctccttgctgcactcccatgacacagagacacgggccaccatgaacttggcactggctggtgacatccttgctgcagggcaggatgcccactgtcagctcctgcgcttccaggcacatcaacagcagggcaacaaggcagagaaggccggtgaggagctccctctctacccccttggggaaagggttgaacgagtaaggtcactcttggtgtctctaaagaagtgggtctggaagtagggttttggtagcaagctagaagttgtatgggcacctgccatggagagaggggccagtactccttactgtagaagcctggaacctggccaagtgtttgtgttacaggttccaaggagcaggggcctcgacaaaggaagggagcagccccagcagagaagaaatgtggagcggaaacccagcacgaggggctagaactcagggtagagaatttgcagggcggtgcagacagactttagctccgatccactgcagaaagttgtgtgcttcaaccacgataataccctgcttgccactggaggaacagatggctacgtccgtgtctggaaggtgcccagcctggagaaggttctggagttcaaagcccacgaaggggagattgaagacctggctttagggcctgatggcaagcttccctgcttcctgggaatcaggagcctggacactgccatctctagagcagagtggaggcctggactccctttgctcactccattcgggtccacagctgaggttgcctctgacaagatgaatgggcactgcctgcccttctagtgaaaaggcttggctatggccctgtgtgactccaggtcccaggaaccttgccttcgtcatctgtggatccatccagaacagcggtatctgaagcccaggccatactccctgcctcctttcttctgcctaccagaggctccagagttgagcttgtccttatctagaaacatgtgaagatgcccaagagcctggaggcactgctgtccttcctgcagaaacagtttctcctcctcccctcagccttgtggccagttcctcttcacatgaagcccctggcatttgctggggaagggactggcctggtacttgctgttagggcaggaaggggcaaaaggaagacttgggtagtaatctgggggttcagatgggtagcactaagccagctggcctaaagatgcaataagttcctaggtagtctacccttaccttgaggaatgggaaaatgaacctcagcccattaggcaggaaaagttgatatttaataaacaaggaaagagtgaactgagaccccaaa

SEQ ID NO: 354492 - DNA, 2603 bp, Homo sapiens
  misc_feature (2171)..(2171): n is a, c, g, or t
tgcgcctgcgcggagggagccgcgagacaggtgcgcatgcgcagtgcgcgtctgcgagaccgacttggacggagccgagctgaggctcggcttcctgctgatggtcagggttttggcaactccccggtgtgagaggggtagggagtgctcccggcggcgacggggccgagttcaccagccgccggggcagtagtcgaaggcccggcgcggcatgtcctgggtgccgcggtgcgggcagtgaacgcgcgccgggcgggatgggccggcgccgggcgccagagctgtaccgggctccgttcccgttgtacgcgcttcaggtcgaccccagcactgggctgctcatcgctgcgggcggaggaggcgccgccaagacaggcataaagaatggcgtgcactttctgcagctagagctgattaatgggcgcttgagtgcctccttgctgcactcccatgacacagagacacgggccaccatgaacttggcactggctggtgacatccttgctgcagggcaggatgcccactgtcagctcctgcgcttccaggcacatcaacagcagggcaacaaggcagagaaggccggttccaaggagcaggggcctcgacaaaggaagggagcagccccagcagagaagaaatgtggagcggaaacccagcacgaggggctagaactcagggtagagaatttgcagggcggtgcagacagactttagctccgatccactgcagaaagttgtgtgcttcaaccacgataataccctgcttgccactggaggaacagatggctacgtccgtgtctggaaggtgcccagcctggagaaggttctggagttcaaagcccacgaaggggagattgaagacctggctttagggcctgatggcaagttggtaaccgtgggccgggaccttaaggcctctgtgtggcagaaggatcagctggtgacacagctgcactggcaagaaaatggacccaccttttccagcacaccttaccgctaccaggcctgcaggtttgggcaggttccagaccagcctgctggcctgcgactcttcacagtgcaaattccccacaagcgcctgcgccagccccctccctgctacctcacagcctgggatggctccaacttcttgccccttcggaccaagtcctgtggccatgaagtcgtctcctgcctcgatgtcagtgaatccggcaccttcctaggcctgggcacagtcactggctctgttgccatctacatagctttctctctccagtgcctctactacgtgagggaggcccatggcattgtggtgacggatgtggcctttctacctgagaagggtcgtggtccagagctccttgggtcccatgaaactgccctgttctctgtggctgtggacagtcgttgccagctgcatctgttgccctcacggcggagtgttcctgtgtggctcctgctcctgctgtgtgtcgggcttattattgtgaccatcctgctgctccagagtgcctttccaggtttcctttagcttccctgcttcctgggaatcaggagcctggacactgccatctctagagcagagtggaggcctggactccctttgctcactccattcgggtccacagctgaggttgcctctgacaagatgaatgggcactgcctgcccttctagtgaaaaggcttggctatggccctgtgtgactccaggtcccaggaaccttgccttcgtcatctgtggatccatccagaacagcggtatctgaagcccaggccatactccctgcctcctttcttctgcctaccagaggctccagagttgagcttgtccttatctagaaacatgtgaagatgcccaagagcctggaggcactgctgtccttcctgcagaaacagtttctcctcctcccctcagccttgtggccagttcctcttcacatgaagcccctggcatttgctggggaagggactggcctggtacttgctgttagggcaggaaggggcaaaaggaagacttgggtagtaatctgggggttcagatgggtagcactaagccagctggcctaaagatgcaataagttcctaggtagtctacccttaccttgaggaatgggaaaatgaacctcagcccattaggcaggaaaagttgatatttaataaacaaggaaagagtgaactgagaccccaaanaaaaaaaaaaaaaaaaaaaaaaaaaaaaacaacacgtggtgggcgcgcggcccggggcccccggaagaacagcttcctcaagaaccaatcgcgggggggcgcgcgcgggggcccaagggaggaaaggggcaacacgggcggcaataaggagggtcccataaagagagaacaccggagggacaaggagacaaggcggcgcgggagaatctctcccaccaaaataaacaagacgcgcccggagggcgaaccccgagagggcgctgcggagagacacaaactctccaaagcagggagggcggttcacccgaggggggcgcaacacagaggggggcgccctataacataaagcgagggaggagcccacaaaaagagcagaaggctcacaaaatatatcaaaaatatatcggcgcccccgcacccgcgggggggggg

SEQ ID NO: 354493 - DNA, 2238 bp, Homo sapiens
tgcgcctgcgcggagggagccgcgagacaggtgcgcatgcgcagtgcgcgtctgcgagaccgacttggacggagccgagctgaggctcggcttcctgctgatggtcagggttttggcaactccccggtgtgagaggggtagggagtgctcccggcggcgacgggaccttaaggcctctgtgtggcagaaggatcagctggtgacacagccgcactggcaagaaaatggacccaccttttccagcacaccttaccgctaccaggcctgcaggtttgggcaggttccagaccagcctgctggcctgcgactcttcacagtgcaaattccccacaagcgccgggcgccagagctgtaccgggctccgttcccgttgtacgcgcttcaggtcgaccccagcactgggctgctcatcgctgcgggcggaggaggcgccgccaagacaggcataaagaatggcgtgcactttctgcagctagagctgattaatgggcgcttgagtgcctccttgctgcactcccatgacacagagacacgggccaccatgaacttggcactggctggtgacatccttgctgcagggcaggatgcccactgtcagctcctgcgcttccaggcacatcaacagcagggcaacaaggcagagaaggccggttccaaggagcaggggcctcgacaaaggaagggagcagccccagcagagaagaaatgtggagcggaaacccagcacgaggggctagaactcagggtagagaatttgcagggcggtgcagacagactttagctccgatccactgcagaaagttgtgtgcttcaaccacgataataccctgcttgccactggaggaacagatggctacgtccgtgtctggaaggtgcccagcctggagaaggttctggagttcaaagcccacgaaggggagattgaagacctggctttagggcctgatggcaagttggtaaccgtgggccgggaccttaaggcctctgtgtggcagaaggatcagctggtgacacagctgcactggcaagaaaatggacccaccttttccagcacaccttaccgctaccaggcctgcaggtttgggcaggttccagaccagcctgctggcctgcgactcttcacagtgcaaattccccacaagcgcctgcgccagccccctccctgctacctcacagcctgggatggctccaacttcttgccccttcggaccaagtcctgtggccatgaagtcgtctcctgcctcgatgtcagtgaatccggcaccttcctaggcctgggcacagtcactggctctgttgccatctacatagctttctctctccagtgcctctactacgtgagggaggcccatggcattgtggtgacggatgtggcctttctacctgagaagggtcgtggtccagagctccttgggtcccatgaaactgccctgttctctgtggctgtggacagtcgttgccagctgcatctgttgccctcacggcggagtgttcctgtgtggctcctgctcctgctgtgtgtcgggcttattattgtgaccatcctgctgctccagagtgcctttccaggtttcctttagcttccctgcttcctgggaatcaggagcctggacactgccatctctagagcagagtggaggcctggactccctttgctcactccattcgggtccacagctgaggttgcctctgacaagatgaatgggcactgcctgcccttctagtgaaaaggcttggctatggccctgtgtgactccaggtcccaggaaccttgccttcgtcatctgtggatccatccagaacagcggtatctgaagcccaggccatactccctgcctcctttcttctgcctaccagaggctccagagttgagcttgtccttatctagaaacatgtgaagatgcccaagagcctggaggcactgctgtccttcctgcagaaacagtttctcctcctcccctcagccttgtggccagttcctcttcacatgaagcccctggcatttgctggggaagggactggcctggtacttgctgttagggcaggaaggggcaaaaggaagacttgggtagtaatctgggggttcagatgggtagcactaagccagctggcctaaagatgcaataagttcctaggtagtctacccttaccttgaggaatgggaaaatgaacctcagcccattaggcaggaaaagttgatatttaataaacaaggaaagagtgaactgagaccccaaa

SEQ ID NO: 354494 - DNA, 2929 bp, Homo sapiens
tgcgcctgcgcggagggagccgcgagacaggtgcgcatgcgcagtgcgcgtctgcgagaccgacttggacggagccgagctgaggctcggcttcctgctgatggtcagggttttggcaactccccggtgtgagaggggtagggagtgctcccggcggcgacggggccgagttcaccagccgccggggcagtagtcgaaggcccggcgcggcatgtcctgggtgccgcggtgcgggcagtgaacgcgcgccgggcgggatgggccggcgccgggcgccagagctgtaccgggctccgttcccgttgtacgcgcttcaggtcgaccccagcactgggctgctcatcgctgcgggcggaggaggcgccgccaagacaggcataaagaatggcgtggtgagagcgcagggccactggggctgggtcttgctgcgggctggcggcgattccagggtggccggggggtcgcggggcgggccacactccagcttcgggccctgcccacttctgttgggaagacccgcttgcctgacgcccaggggcgaatttcagtcgagaactcagcgggcggaggagaggcttttaaggtaaagtgaaaactgcacacagctgcagagtcgccaggaacgcttcagctccgcctcagagcagctccaggggtcttatactggccttttccgggaggtcttgcctgccctctagcagcggcgagagtggtgcatttgggtttaggctaagttccttccctctcctgagcttcaccctgttctgtaaaatagaggtaataatcccagtcctgctcactgtgtagatttgtgaggcccaaatgagagaaaaaagactcgagaaacccttgtgaactagaacgtgcagaaagcaaaggggtaagacatcagactcttccctaaacgtgctctctgggcacccctgaacttgctcatccgggttccccctcccacagcactttctgcagctagagctgattaatgggcgcttgagtgcctccttgctgcactcccatgacacagagacacgggccaccatgaacttggcactggctggtgacatccttgctgcagggcaggatgcccactgtcagctcctgcgcttccaggcacatcaacagcagggcaacaaggcagagaaggccggtgaggagctccctctctacccccttggggaaagggttgaacgagtaaggtcactcttggtgtctctaaagaagtgggtctggaagtagggttttggtagcaagctagaagttgtatgggcacctgccatggagagaggggccagtactccttactgtagaagcctggaacctggccaagtgtttgtgttacaggttccaaggagcaggggcctcgacaaaggaagggagcagccccagcagagaagaaatgtggagcggaaacccagcacgaggggctagaactcagggtagagaatttgcagggcggtgcagacagactttagctccgatccactgcagaaagttgtgtgcttcaaccacgataataccctgcttgccactggaggaacagatggctacgtccgtgtctggaaggtgcccagcctggagaaggttctggagttcaaagcccacgaaggggagattgaagacctggctttagggcctgatggcaagttggtaaccgtgggccgggaccttaaggcctctgtgtggcagaaggatcagctggtgacacagctgcactggcaagaaaatggacccaccttttccagcacaccttaccgctaccaggcctgcaggtttgggcaggttccagaccagcctgctggcctgcgactcttcacagtgcaaattccccacaagcgcctgcgccagccccctccctgctacctcacagcctgggatggctccaacttcttgccccttcggaccaagtcctgtggccatgaagtcgtctcctgcctcgatgtcagtgaatccggcaccttcctaggcctgggcacagtcactggctctgttgccatctacatagctttctctctccagtgcctctactacgtgagggaggcccatggcattgtggtgacggatgtggcctttctacctgagaagggtcgtggtccagagctccttgggtcccatgaaactgccctgttctctgtggctgtggacagtcgttgccagctgcatctgttgccctcacggcggagtgttcctgtgtggctcctgctcctgctgtgtgtcgggcttattattgtgaccatcctgctgctccagagtgcctttccaggtttcctttagcttccctgcttcctgggaatcaggagcctggacactgccatctctagagcagagtggaggcctggactccctttgctcactccattcgggtccacagctgaggttgcctctgacaagatgaatgggcactgcctgcccttctagtgaaaaggcttggctatggccctgtgtgactccaggtcccaggaaccttgccttcgtcatctgtggatccatccagaacagcggtatctgaagcccaggccatactccctgcctcctttcttctgcctaccagaggctccagagttgagcttgtccttatctagaaacatgtgaagatgcccaagagcctggaggcactgctgtccttcctgcagaaacagtttctcctcctcccctcagccttgtggccagttcctcttcacatgaagcccctggcatttgctggggaagggactggcctggtacttgctgttagggcaggaaggggcaaaaggaagacttgggtagtaatctgggggttcagatgggtagcactaagccagctggcctaaagatgcaataagttcctaggtagtctacccttaccttgaggaatgggaaaatgaacctcagcccattaggcaggaaaagttgatatttaataaacaaggaaagagtgaactgagaccccaaa

SEQ ID NO: 354495 - DNA, 847 bp, Homo sapiens
tgcgcctgcgcggagggagccgcgagacaggtgcgcatgcgcagtgcgcgtctgcgagaccgacttggacggagccgagctgaggctcggcttcctgctgatggtcagggttttggcaactccccggtgtgagaggggtagggagtgctcccggcggcgacggggccgagttcaccagccgccggggcagtagtcgaaggcccggcgcggcatgtcctgggtgccgcggtgcgggcagtgaacgcgcgccgggcgggatgggccggcgccgggcgccagagctgtaccgggctccgttcccgttgtacgcgcttcaggtcgaccccagcactgggctgctcatcgctgcgggcggaggaggcgccgccaagacaggcataaagaatggcgtgcactttctgcagctagagctgattaatgggcgcttgagtgcctccttgctgcactcccatgacacagagacacgggccaccatgaacttggcactggctggtgacatccttgctgcagggcaggatgcccactgtcagctcctgcgcttccaggcacatcaacagcagggcaacaaggcagagaaggccggttccaaggagcaggggcctcgacaaaggaagggagcagccccagcagagaagaaatgtggagcggaaacccagcacgaggggctagaactcagggtagagaatttgcagggcggtgcagacagactttagctccgatccactgcagaaaggtgggtccattttcttgccagtgcagctgtgtctccagctgatccttctgccacacagaggccttaaggtcccggcccacggttaccaacttgccatcaggcctaaagccaggt

SEQ ID NO: 354496 - DNA, 397 bp, Homo sapiens
tgaataaagccatatctaacacctctttccagctggcatgactgaacctgagtgtgaaaagcgtcagcattttaaaaagtcatcactttcttgtcactttctgggctctttccagctatttgggcttcatatgcaattgatttcttctaacggaatagtaaaatataaatgaaaaggttttagaaattactttttatgtatgccaaagcataactacactgcaagtttcaacactgtcatttagaaagccaaatgttctgtgttttattctcttgagagaattctcagtagggtgaataatgtgaacacataaacattaattttagaattttacagtgaaccatgaagcaaaagtgcaatcaaattatacaatttatgaaaaactgagctacttttt

SEQ ID NO: 354497 - DNA, 227 bp, Homo sapiens
ggttacattttcaggaattttgccagtcagtagtttaacaccaccattattaaaaattagattatgtaaatttacagtccaataaagtatatttttaaatattaataaatactcaaaactcctattttactgcattttgttcttatctgtgtttctgagattgtttccatctttgtgtctgtgtggtggaaatgccatataatgtactactgcacatctctttccaa

SEQ ID NO: 354498 - DNA, 303 bp, Homo sapiens
attatatctgcctctggtatgtacctgtaggactgcatgagtgagtatgatcatgtagtaatagaatgaccatctccattggtaaaggcaaaaaacattttgtatcttttatgagtattttaagcttggtgagaaatttacacatttttcttatagatatttgtgtaaagaactcaactgttatcacttgcttttgctattcatactcaagatccacgttaattttgtttaatgatcatgatgttagaagagataatgggtataaagaaaatacttatctaattgagggaaatgcattttttt

SEQ ID NO: 354499 - DNA, 4463 bp, Homo sapiens
  misc_feature (1348)..(1348): n is a, c, g, or t
  misc_feature (1387)..(1387): n is a, c, g, or t
ccgggagagacgtgagggagccgccgctgccacctctcacccctgagtgaagctgggctcgagagggcggccctgtgctccccgggccgactggccagcgggcgcggggcgggggcgggaacccgggctcgggcccggccgggcgccgggcggcggcggccgtggagcagcagcctcggtgcgacgtggagggctggaggcggcggcgatgcactaggcctcgctcagggcggctgccccgggacccgcagttgagtggtgattttatgcaatggcttcaagccacagttcttcaccagtgcctcaaggaagcagcagtgatgttttctttaaaatagaggtagatccgtcaaaacacattcgacctgtgccatcactgccagatgtgtgtcccaaggaacccacagttacagatcaacatagatggactgtatatcattccaaagtaaatctcccagcagcattaaacgatcctagattagcaaaaagagaatctgacttcttcacaaaaacatggggattggactttgtggacactgaagtcataccttcattctacctcccacagatcagcaaggaacattttacagtatatcaacaggaaatctctcagagagagaagattcatgagagatgcaagaatatttgtcctcctaaagataccttcgaaaggactcttttacatactcatgataaatccaggacagatctggagcaagtacctaagatttttatgaaaccagattttgccttggatgattccttaacttttaattcagttttaccatggtctcattttaatactgctggtggaaaaggaaatcgtgatgcagcttcctcaaagttgcttcaagaaaagctgagccattatctggatattgtggaagtaaacattgctcaccagatctctctacgttcagaagcattttttcatgcaatgacctctcaacacgagttgcaggactacctcaggaaaacttcccaggctgtaaaaatgcttcgagataaaattgcacagattgataaagtaatgtgtgaaggatcactccacattttaagactggcacttaccagaaataattgtgttaaagtatacaataagctgaagttaatggccactgtacaccagactcagcctacagtacaggtgttattatctacttctgaatttgttggagcattggacttaatagcaacaacacaagaggttctacagcaggaacttcagggcattcacagtttccggcatttgggatcacagctttgtgaattagaaaaactgatagataaaatgatgattgcagaattttctacttattctcacagtgacttaaatagaccactggangatgactgtcaagttttagaagaggaaagactaatatcncttgtatttggacttttaaaacaaagaaagcttaattttttagaaatctatggtgaaaaaatggttattacagcaaagaatatcattaaacagtgtgtgattaataaagtttcacaaacagaagaaatagacacagatgttgttgtgaagcttgcagatcagatgagaatgttgaattttccccagtggtttgatctgctcaaggatattttctctaagtttacaattttcctacagagagtgaaggcaacattaaatatcattcacagtgttgttctctcagttcttgacaaaaaccaaaggactagagaattggaagagatttcacaacagaagaatgctgcaaaagataattcactggacacagaggtggcttatttaatccatgaaggcatgtttataagtgatgcattcggtgagggtgagctaacacctatagcagttgacactacctctcaaagaaatgcatctccaaatagtgagccctgcagcagtgattctgtatccgagccagaatgtactactgattcttcatccagcaaagagcacacatcatcatctgctattccaggaggtgtggatattatggtcagtgaagatatgaaattaactgactcagagctaggaaagctggcaaataatatccaggaattattatatagtgcctcagatatatgccatgatcgagctgtcaaatttctcatgtcaagagcaaaggatggttttcttgagaagctaaattccatggaattcataacactttctagattaatggaaacattcattttagacaccgaacagatctgtggaagaaaaagcacgtcattacttggagcacttcagagccaagctattaagtttgtaaataggtttcatgaagagagaaaaaccaagctcagcctcctcttagacaatgagcgctggaagcaagcagatgttcctgcagaatttcaggatcttgttgattctctgtcagatgggaagattgctttacctgaaaaaaaatcaggagccacagaagaaaggaaaccagctgaagttcttattgtcgagggacaacagtatgcagttgttggaaccgtattgctgttaataagaattatccttgaatattgccagtgtgtggataacatcccatctgttactactgacatgcttactcgtctgtcagatttattgaagtacttcaattcaagaagttgccagttagttcttggagctggtgcactgcaagttgttggactaaaaacgataactacaaaaaatttggctctttcttcacgatgtttgcagttaattgtgcactacattcctgtgatccgggctcattttgaagctcgactaccacctaagcaatatagcatgcttaggcattttgatcatatcactaaggactaccatgatcacatagctgaaatatcagctaagcttgtagcgataatggatagcttatttgacaagctgttatctaagtatgaagtgaaggctcctgttccttctgcctgtttcaggaatatttgtaagcaaatgacaaaaatgcacgaagctatatttgatctccttccagaagaacaaacacagatgttatttttaagaattaatgcaagttataaactccacttgaaaaagcagttatctcacttaaatgtgataaatgatggaggacctcaaaatgggttggtcacagcagatgtagctttttacactggaaatcttcaagccttaaaaggccttaaagatttggacctaaatatggccgaaatttgggagcagaagaggtgatgtcatcctggaaaactgggtagttcatctgaccatgggatgtgtttgttatgaagaaaatctggatgcctgtgattcgagaattgaacctgaaacccaaagtgaactggggtgggggaagggaaaaaggaaagtatcaagtgttgggaaactggattcagtgggatctacaaggaatgtcatttttgtgcatcctacagtgaggagtaactgatcaggtgtctataacatttttcattctctctggaaacagactcaggtttctttggaccaaatccaaaagaacacatagctgtaacacagctgtagttgactagaatgctctgtatactttatattaaaaaatgctttgcatttcttccagtgcaatgaaattcatatggtgtcccaccttatttaatgatggtacaatttaaaatcttagtcaacttctgtagaaagttttctctatgaaagtaaagctgtttgaaaaattattatttttttacagatctttctataaaaaataaacatcttttgattgcttggatttaggaattcaatttttgtttcagtgaccaatgtcaagttgcaggctttgtgtgttgcatatttaatatttctactaccaccgtatgtcaactgggtaaagccttccagagctctctaaatacctgaaagacttaagcctttttttaagtaattaatacttaaaaaaaaagatcctggcatctatttatgcaactaaatacttttcagaaatggtatataaaaggctacagtttaatatctgtatttttataaaagtatgatgaagggtttggggtgtttttatttgtagcagaggtaagaatatgtattcatataatctgcctacttttgagttctcatattaacatttagataacatatgaagtatggcccccttggatccttgtttttaagttactttcgatgtgtatacgaacaaagaccagggagaaacagaacttttaaaactataggctgctgtgttggggccagaaataaggtgacaagtaaagacttttataatacctaccttcaaaattagaatcagcagcactgtacaaataaagtgcctgtgcttcacctcacaccaagaatcttgcctaaccctgtcagagtgcctaatatcctgtggtgattatgtataatgaaacagtcttattttgtgctctttggtttcttaaaaggaaagcttgttttctttcctttatcattacagaggtatgtctttggttcttaaactatctgtctaaaataaagctgtaaaaaattaacagacaaaaaaaaa

SEQ ID NO: 354500 - DNA, 3527 bp, Homo sapiens
  misc_feature (1348)..(1348): n is a, c, g, or t
  misc_feature (1387)..(1387): n is a, c, g, or t
ccgggagagacgtgagggagccgccgctgccacctctcacccctgagtgaagctgggctcgagagggcggccctgtgctccccgggccgactggccagcgggcgcggggcgggggcgggaacccgggctcgggcccggccgggcgccgggcggcggcggccgtggagcagcagcctcggtgcgacgtggagggctggaggcggcggcgatgcactaggcctcgctcagggcggctgccccgggacccgcagttgagtggtgattttatgcaatggcttcaagccacagttcttcaccagtgcctcaaggaagcagcagtgatgttttctttaaaatagaggtagatccgtcaaaacacattcgacctgtgccatcactgccagatgtgtgtcccaaggaacccacagttacagatcaacatagatggactgtatatcattccaaagtaaatctcccagcagcattaaacgatcctagattagcaaaaagagaatctgacttcttcacaaaaacatggggattggactttgtggacactgaagtcataccttcattctacctcccacagatcagcaaggaacattttacagtatatcaacaggaaatctctcagagagagaagattcatgagagatgcaagaatatttgtcctcctaaagataccttcgaaaggactcttttacatactcatgataaatccaggacagatctggagcaagtacctaagatttttatgaaaccagattttgccttggatgattccttaacttttaattcagttttaccatggtctcattttaatactgctggtggaaaaggaaatcgtgatgcagcttcctcaaagttgcttcaagaaaagctgagccattatctggatattgtggaagtaaacattgctcaccagatctctctacgttcagaagcattttttcatgcaatgacctctcaacacgagttgcaggactacctcaggaaaacttcccaggctgtaaaaatgcttcgagataaaattgcacagattgataaagtaatgtgtgaaggatcactccacattttaagactggcacttaccagaaataattgtgttaaagtatacaataagctgaagttaatggccactgtacaccagactcagcctacagtacaggtgttattatctacttctgaatttgttggagcattggacttaatagcaacaacacaagaggttctacagcaggaacttcagggcattcacagtttccggcatttgggatcacagctttgtgaattagaaaaactgatagataaaatgatgattgcagaattttctacttattctcacagtgacttaaatagaccactggangatgactgtcaagttttagaagaggaaagactaatatcncttgtatttggacttttaaaacaaagaaagcttaattttttagaaatctatggtgaaaaaatggttattacagcaaagaatatcattaaacagtgtgtgattaataaagtttcacaaacagaagaaatagacacagatgttgttgtgaagcttgcagatcagatgagaatgttgaattttccccagtggtttgatctgctcaaggatattttctctaagtttacaattttcctacagagagtgaaggcaacattaaatatcattcacagtgttgttctctcagttcttgacaaaaaccaaaggactagagaattggaagagatttcacaacagaagaatgctgcaaaagataattcactggacacagaggtggcttatttaatccatgaaggcatgtttataagtgatgcattcggtgagggtgagctaacacctatagcagttgacactacctctcaaagaaatgcatctccaaatagtgagccctgcagcagtgattctgtatccgagccagaatgtactactgattcttcatccagcaaagagcacacatcatcatctgctattccaggaggtgtggatattatggtcagtgaagatatgaaattaactgactcagagctaggaaagctggcaaataatatccaggaattattatatagtgcctcagatatatgccatgatcgagctgtcaaatttctcatgtcaagagcaaaggatggttttcttgagaagctaaattccatggaattcataacactttctagattaatggaaacattcattttagacaccgaacagatctgtggaagaaaaagcacgtcattacttggagcacttcagagccaagctattaagtttgtaaataggtttcatgaagagagaaaaaccaagctcagcctcctcttagacaatgagcgctggaagcaagcagatgttcctgcagaatttcaggatcttgttgattctctgtcagatgggaagattgctttacctgaaaaaaaatcaggagccacagaagaaaggaaaccagctgaagttcttattgtcgagggacaacagtatgcagttgttggaaccgtattgctgttaataagaattatccttgaatattgccagtgtgtggataacatcccatctgttactactgacatgcttactcgtctgtcagatttattgaagtacttcaattcaagaagttgccagttagttcttggagctggtgcactgcaagttgttggactaaaaacgataactacaaaaaatttggctctttcttcacgatgtttgcagttaattgtgcactacattcctgtgatccgggctcattttgaagctcgactaccacctaagcaatatagcatgcttaggcattttgatcatatcactaaggactaccatgatcacatagctgaaatatcagctaagcttgtagcgataatggatagcttatttgacaagctgttatctaagtatgaagtgaaggctcctgttccttctgcctgtttcaggaatatttgtaagcaaatgacaaaaatgcacgaagctatatttgatctccttccagaagaacaaacacagatgttatttttaagaattaatgcaagttataaactccacttgaaaaagcagttatctcacttaaatgtgataaatgatggaggacctcaaaatgggttggtcacagcagatgtagctttttacactggaaatcttcaagccttaaaaggccttaaagatttggacctaaatatggccgaaatttgggagcagaagaggtgatgtcatcctggaaaactgggtagttcatctgaccatgggatgtgtttgttatgaagaaaatctggatgcctgtgattcgagaattgaacctgaaacccaaagtgaactggggtgggggaagggaaaaaggaaagtatcaagtgttgggaaactggattcagtgggatctacaaggaatgtcatttttgtgcatcctacagtgaggagtaactgatcaggtgtctataacatttttcattctctctggaaacagactcaggtttctttggaccaaatccaaaagaacacatagctgtaacacagctgtagttgactagaatgctctgtatactttatattaaaaaatgctttgcatttc

SEQ ID NO: 354501 - DNA, 3628 bp, Homo sapiens
  misc_feature (1348)..(1348): n is a, c, g, or t
  misc_feature (1387)..(1387): n is a, c, g, or t
ccgggagagacgtgagggagccgccgctgccacctctcacccctgagtgaagctgggctcgagagggcggccctgtgctccccgggccgactggccagcgggcgcggggcgggggcgggaacccgggctcgggcccggccgggcgccgggcggcggcggccgtggagcagcagcctcggtgcgacgtggagggctggaggcggcggcgatgcactaggcctcgctcagggcggctgccccgggacccgcagttgagtggtgattttatgcaatggcttcaagccacagttcttcaccagtgcctcaaggaagcagcagtgatgttttctttaaaatagaggtagatccgtcaaaacacattcgacctgtgccatcactgccagatgtgtgtcccaaggaacccacagttacagatcaacatagatggactgtatatcattccaaagtaaatctcccagcagcattaaacgatcctagattagcaaaaagagaatctgacttcttcacaaaaacatggggattggactttgtggacactgaagtcataccttcattctacctcccacagatcagcaaggaacattttacagtatatcaacaggaaatctctcagagagagaagattcatgagagatgcaagaatatttgtcctcctaaagataccttcgaaaggactcttttacatactcatgataaatccaggacagatctggagcaagtacctaagatttttatgaaaccagattttgccttggatgattccttaacttttaattcagttttaccatggtctcattttaatactgctggtggaaaaggaaatcgtgatgcagcttcctcaaagttgcttcaagaaaagctgagccattatctggatattgtggaagtaaacattgctcaccagatctctctacgttcagaagcattttttcatgcaatgacctctcaacacgagttgcaggactacctcaggaaaacttcccaggctgtaaaaatgcttcgagataaaattgcacagattgataaagtaatgtgtgaaggatcactccacattttaagactggcacttaccagaaataattgtgttaaagtatacaataagctgaagttaatggccactgtacaccagactcagcctacagtacaggtgttattatctacttctgaatttgttggagcattggacttaatagcaacaacacaagaggttctacagcaggaacttcagggcattcacagtttccggcatttgggatcacagctttgtgaattagaaaaactgatagataaaatgatgattgcagaattttctacttattctcacagtgacttaaatagaccactggangatgactgtcaagttttagaagaggaaagactaatatcncttgtatttggacttttaaaacaaagaaagcttaattttttagaaatctatggtgaaaaaatggttattacagcaaagaatatcattaaacagtgtgtgattaataaagtttcacaaacagaagaaatagacacagatgttgttgtgaagcttgcagatcagatgagaatgttgaattttccccagtggtttgatctgctcaaggatattttctctaagtttacaattttcctacagagagtgaaggcaacattaaatatcattcacagtgttgttctctcagttcttgacaaaaaccaaaggactagagaattggaagagatttcacaacagaagaatgctgcaaaagataattcactggacacagaggtggcttatttaatccatgaaggcatgtttataagtgatgcattcggtgagggtgagctaacacctatagcagttgacactacctctcaaagaaatgcatctccaaatagtgagccctgcagcagtgattctgtatccgagccagaatgtactactgattcttcatccagcaaagagcacacatcatcatctgctattccaggaggtgtggatattatggtcagtgaagatatgaaattaactgactcagagctaggaaagctggcaaataatatccaggaattattatatagtgcctcagatatatgccatgatcgagctgtcaaatttctcatgtcaagagcaaaggatggttttcttgagaagctaaattccatggaattcataacactttctagattaatggaaacattcattttagacaccgaacagatctgtggaagaaaaagcacgtcattacttggagcacttcagagccaagctattaagtttgtaaataggtttcatgaagagagaaaaaccaagctcagcctcctcttagacaatgagcgctggaagcaagcagatgttcctgcagaatttcaggatcttgttgattctctgtcagatgggaagattgctttacctgaaaaaaaatcaggagccacagaagaaaggaaaccagctgaagttcttattgtcgagggacaacagtatgcagttgttggaaccgtattgctgttaataagaattatccttgaatattgccagtgtgtggataacatcccatctgttactactgacatgcttactcgtctgtcagatttattgaaggtgctgaacatgactgaggccacttaggtcaaaaaacctggactggcttcaaatgtgcatggaaggaattcactgaactttacaaaattcatctcactaagtacttcaattcaagaagttgccagttagttcttggagctggtgcactgcaagttgttggactaaaaacgataactacaaaaaatttggctctttcttcacgatgtttgcagttaattgtgcactacattcctgtgatccgggctcattttgaagctcgactaccacctaagcaatatagcatgcttaggcattttgatcatatcactaaggactaccatgatcacatagctgaaatatcagctaagcttgtagcgataatggatagcttatttgacaagctgttatctaagtatgaagtgaaggctcctgttccttctgcctgtttcaggaatatttgtaagcaaatgacaaaaatgcacgaagctatatttgatctccttccagaagaacaaacacagatgttatttttaagaattaatgcaagttataaactccacttgaaaaagcagttatctcacttaaatgtgataaatgatggaggacctcaaaatgggttggtcacagcagatgtagctttttacactggaaatcttcaagccttaaaaggccttaaagatttggacctaaatatggccgaaatttgggagcagaagaggtgatgtcatcctggaaaactgggtagttcatctgaccatgggatgtgtttgttatgaagaaaatctggatgcctgtgattcgagaattgaacctgaaacccaaagtgaactggggtgggggaagggaaaaaggaaagtatcaagtgttgggaaactggattcagtgggatctacaaggaatgtcatttttgtgcatcctacagtgaggagtaactgatcaggtgtctataacatttttcattctctctggaaacagactcaggtttctttggaccaaatccaaaagaacacatagctgtaacacagctgtagttgactagaatgctctgtatactttatattaaaaaatgctttgcatttc

SEQ ID NO: 354502 - DNA, 497 bp, Homo sapiens
gatgagtattatatctgcctctggtatgtacctgtaggactgcatgagtgagtatgatcatgtagtaatagaatgaccatctccattggtaaaggcaaaaaacattttgtatcttttatgagtattttaagcttggtgagaaatttacacatttttcttatagatatttgtgtaaagaactcaactgttatcacttgcttttgctattcatactcaagatccacgttaattttgtttaatgatcatgatgttagaagagataatgggtataaagaaaatacttatctaattgagggaaatgcatttttttaatagatttttatgaaaccagattttgccttggatgattccttaacttttaattcagttttaccatggtctcattttaatactgctggtggaaaaggaaatcgtgatgcagcttcctcaaagttgcttcaagaaaaggtaatttctttttgactttttccatgtaggaaactattctagttaagcgg

SEQ ID NO: 354503 - DNA, 3733 bp, Homo sapiens
  misc_feature (1384)..(1384): n is a, c, g, or t
  misc_feature (1423)..(1423): n is a, c, g, or t
ccgggagagacgtgagggagccgccgctgccacctctcacccctgagtgaagctgggctcgagagggcggccctgtgctccccgggccgactggccagcgggcgcggggcgggggcgggaacccgggctcgggcccggccgggcgccgggcggcggcggccgtggagcagcagcctcggtgcgacgtggagggctggaggcggcggcgatgcactaggcctcgctcagggcggctgccccgggacccgcagttgagtggtgattttatgcaatggcttcaagccacagttcttcaccagtgcctcaaggaagcagcagtgatgttttctttaaaatagaggtagatccgtcaaaacacattcgacctgtgccatcactgccagatgtgtgtcccaaggaacccacaggtgattcacatagtttatatgttgccccatctctagttacagatcaacatagatggactgtatatcattccaaagtaaatctcccagcagcattaaacgatcctagattagcaaaaagagaatctgacttcttcacaaaaacatggggattggactttgtggacactgaagtcataccttcattctacctcccacagatcagcaaggaacattttacagtatatcaacaggaaatctctcagagagagaagattcatgagagatgcaagaatatttgtcctcctaaagataccttcgaaaggactcttttacatactcatgataaatccaggacagatctggagcaagtacctaagatttttatgaaaccagattttgccttggatgattccttaacttttaattcagttttaccatggtctcattttaatactgctggtggaaaaggaaatcgtgatgcagcttcctcaaagttgcttcaagaaaagctgagccattatctggatattgtggaagtaaacattgctcaccagatctctctacgttcagaagcattttttcatgcaatgacctctcaacacgagttgcaggactacctcaggaaaacttcccaggctgtaaaaatgcttcgagataaaattgcacagattgataaagtaatgtgtgaaggatcactccacattttaagactggcacttaccagaaataattgtgttaaagtatacaataagctgaagttaatggccactgtacaccagactcagcctacagtacaggtgttattatctacttctgaatttgttggagcattggacttaatagcaacaacacaagaggttctacagcaggaacttcagggcattcacagtttccggcatttgggatcacagctttgtgaattagaaaaactgatagataaaatgatgattgcagaattttctacttattctcacagtgacttaaatagaccactggangatgactgtcaagttttagaagaggaaagactaatatcncttgtatttggacttttaaaacaaagaaagcttaattttttagaaatctatggtgaaaaaatggttattacagcaaagaatatcattaaacagtgtgtgattaataaagtttcacaaacagaagaaatagacacagatgttgttgtgaagcttgcagatcagatgagaatgttgaattttccccagtggtttgatctgctcaaggatattttctctaagtttacaattttcctacagagagtgaaggcaacattaaatatcattcacagtgttgttctctcagttcttgacaaaaaccaaaggactagagaattggaagagatttcacaacagaagaatgctgcaaaagataattcactggacacagaggtggcttatttaatccatgaaggcatgtttataagtgatgcattcggtgagggtgagctaacacctatagcagttgacactacctctcaaagaaatgcatctccaaatagtgagccctgcagcagtgattctgtatccgagccagaatgtactactgattcttcatccagcaaagagcacacatcatcatctgctattccaggaggtgtggatattatggtcagtgaagatatgaaattaactgactcagagctaggaaagctggcaaataatatccaggaattattatatagtgcctcagatatatgccatgatcgagctgtcaaatttctcatgtcaagagcaaaggatggttttcttgagaagctaaattccatggaattcataacactttctagattaatggaaacattcattttagacaccgaacagatctgtggaagaaaaagcacgtcattacttggagcacttcagagccaagctattaagtttgtaaataggtttcatgaagagagaaaaaccaagctcagcctcctcttagacaatgagcgctggaagcaagcagatgttcctgcagaatttcaggatcttgttgattctctgtcagatgggaagattgctttacctgaaaaaaaatcaggagccacagaagaaaggaaaccagctgaagttcttattgtcgagggacaacagtatgcagttgttggaaccgtattgctgttaataagaattatccttgaatattgccagtgtgtggataacatcccatctgttactactgacatgcttactcgtctgtcagatttattgaagtacttcaattcaagaagttgccagttagttcttggagctggtgcactgcaagttgttggactaaaaacgataactacaaaaaatttggctctttcttcacgatgtttgcagttaattgtgcactacattcctgtgatccgggctcattttgaagctcgactaccacctaagcaatatagcatgcttaggcattttgatcatatcactaaggactaccatgatcacatagctgaaatatcagctaagcttgtagcgataatggatagcttatttgacaagctgttatctaagtatgaagtgaaggctcctgttccttctgcctgtttcaggaatatttgtaagcaaatgacaaaaatgcacgaagctatatttgatctccttccagaagaacaaacacagatgttatttttaagaattaatgcaagttataaactccacttgaaaaagcagttatctcacttaaatgtgataaatgatggaggacctcaaaatgggttggtcacagcagatgtagctttttacactggaaatcttcaagccttaaaaggccttaaagatttggacctaaatatggccgaaatttgggagcagaagaggtgatgtcatcctggaaaactgggtagttcatctgaccatgggatgtgtttgttatgaagaaaatctggatgcctgtgattcgagaattgaacctgaaacccaaagtgaactggggtgggggaagggaaaaaggaaagtatcaagtgttgggaaactggattcagtgggatctacaaggaatgtcatttttgtgcatcctacagtgaggagtaactgatcaggtgtctataacatttttcattctctctggaaacagactcaggtttctttggaccaaatccaaaagaacacatagctgtaacacagctgtagttgactagaatgctctgtatactttatattaaaaaatgctttgcatttcttccagtgcaatgaaattcatatggtgtcccaccttatttaatgatggtacaatttaaaatcttagtcaacttctgtagaaagttttctctatgaaagtaaagctgtttgaaaaattattatttttttacagatctttctataaaaaataaacatcttttgattgcttgg

SEQ ID NO: 354504 - DNA, 3031 bp, Homo sapiens
cagctttctagatacataatatgtaaataaagactcaaactagaataaaacacagtttctttgtttttgtaatttttctaaagaggcttgtttttaaataaaaatttaggtacctcagagtttgacagttttaagaatttaataagttataattttataacttaaaaagaaatatgctcttactttacattaaatattatacagtaatatttcctctcgtgattttttgttctctcagttcttgacaaaaaccaaaggactagagaattggaagagatttcacaacagaagaatgctgcaaaagataattcactggacacagaggtggcttatttaatccatgaaggcatgtttataagtgatgcattcggtgagggtgagctaacacctatagcagttgacactacctctcaaagaaatgcatctccaaatagtgagccctgcagcagtgattctgtatccgagccagaatgtactactgattcttcatccagcaaagagcacacatcatcatctgctattccaggaggtgtggatattatggtcagtgaagatatgaaattaactgactcagagctaggaaagctggcaaataatatccaggaattattatatagtgcctcagatatatgccatgatcgagctgtcaaatttctcatgtcaagagcaaaggatggttttcttgagaagctaaattccatggaattcataacactttctagattaatggaaacattcattttagacaccgaacagatctgtggaagaaaaagcacgtcattacttggagcacttcagagccaagctattaagtttgtaaataggtttcatgaagagagaaaaaccaagctcagcctcctcttagacaatgagcgctggaagcaagcagatgttcctgcagaatttcaggatcttgttgattctctgtcagatgggaagattgctttacctgaaaaaaaatcaggagccacagaagaaaggaaaccagctgaagttcttattgtcgagggacaacagtatgcagttgttggaaccgtattgctgttaataagaattatccttgaatattgccagtgtgtggataacatcccatctgttactactgacatgcttactcgtctgtcagatttattgaagtacttcaattcaagaagttgccagttagttcttggagctggtgcactgcaagttgttggactaaaaacgataactacaaaaaatttggctctttcttcacgatgtttgcagttaattgtgcactacattcctgtgatccgggctcattttgaagctcgactaccacctaagcaatatagcatgcttaggcattttgatcatatcactaaggactaccatgatcacatagctgaaatatcagctaagcttgtagcgataatggatagcttatttgacaagctgttatctaagtatgaagtgaaggctcctgttccttctgcctgtttcaggaatatttgtaagcaaatgacaaaaatgcacgaagctatatttgatctccttccagaagaacaaacacagatgttatttttaagaattaatgcaagttataaactccacttgaaaaagcagttatctcacttaaatgtgataaatgatggaggacctcaaaatgggttggtcacagcagatgtagctttttacactggaaatcttcaagccttaaaaggccttaaagatttggacctaaatatggccgaaatttgggagcagaagaggtgatgtcatcctggaaaactgggtagttcatctgaccatgggatgtgtttgttatgaagaaaatctggatgcctgtgattcgagaattgaacctgaaacccaaagtgaactggggtgggggaagggaaaaaggaaagtatcaagtgttgggaaactggattcagtgggatctacaaggaatgtcatttttgtgcatcctacagtgaggagtaactgatcaggtgtctataacatttttcattctctctggaaacagactcaggtttctttggaccaaatccaaaagaacacatagctgtaacacagctgtagttgactagaatgctctgtatactttatattaaaaaatgctttgcatttcttccagtgcaatgaaattcatatggtgtcccaccttatttaatgatggtacaatttaaaatcttagtcaacttctgtagaaagttttctctatgaaagtaaagctgtttgaaaaattattatttttttacagatctttctataaaaaataaacatcttttgattgcttggatttaggaattcaatttttgtttcagtgaccaatgtcaagttgcaggctttgtgtgttgcatatttaatatttctactaccaccgtatgtcaactgggtaaagccttccagagctctctaaatacctgaaagacttaagcctttttttaagtaattaatacttaaaaaaaaagatcctggcatctatttatgcaactaaatacttttcagaaatggtatataaaaggctacagtttaatatctgtatttttataaaagtatgatgaagggtttggggtgtttttatttgtagcagaggtaagaatatgtattcatataatctgcctacttttgagttctcatattaacatttagataacatatgaagtatggcccccttggatccttgtttttaagttactttcgatgtgtatacgaacaaagaccagggagaaacagaacttttaaaactataggctgctgtgttggggccagaaataaggtgacaagtaaagacttttataatacctaccttcaaaattagaatcagcagcactgtacaaataaagtgcctgtgcttcacctcacaccaagaatcttgcctaaccctgtcagagtgcctaatatcctgtggtgattatgtataatgaaacagtcttattttgtgctctttggtttcttaaaaggaaagcttgttttctttcctttatcattacagaggtatgtctttggttcttaaactatctgtctaaaataaagctgtaaaaaattaacagacaaaaaaaaa

SEQ ID NO: 354505 - DNA, 4564 bp, Homo sapiens
  misc_feature (1348)..(1348): n is a, c, g, or t
  misc_feature (1387)..(1387): n is a, c, g, or t
ccgggagagacgtgagggagccgccgctgccacctctcacccctgagtgaagctgggctcgagagggcggccctgtgctccccgggccgactggccagcgggcgcggggcgggggcgggaacccgggctcgggcccggccgggcgccgggcggcggcggccgtggagcagcagcctcggtgcgacgtggagggctggaggcggcggcgatgcactaggcctcgctcagggcggctgccccgggacccgcagttgagtggtgattttatgcaatggcttcaagccacagttcttcaccagtgcctcaaggaagcagcagtgatgttttctttaaaatagaggtagatccgtcaaaacacattcgacctgtgccatcactgccagatgtgtgtcccaaggaacccacagttacagatcaacatagatggactgtatatcattccaaagtaaatctcccagcagcattaaacgatcctagattagcaaaaagagaatctgacttcttcacaaaaacatggggattggactttgtggacactgaagtcataccttcattctacctcccacagatcagcaaggaacattttacagtatatcaacaggaaatctctcagagagagaagattcatgagagatgcaagaatatttgtcctcctaaagataccttcgaaaggactcttttacatactcatgataaatccaggacagatctggagcaagtacctaagatttttatgaaaccagattttgccttggatgattccttaacttttaattcagttttaccatggtctcattttaatactgctggtggaaaaggaaatcgtgatgcagcttcctcaaagttgcttcaagaaaagctgagccattatctggatattgtggaagtaaacattgctcaccagatctctctacgttcagaagcattttttcatgcaatgacctctcaacacgagttgcaggactacctcaggaaaacttcccaggctgtaaaaatgcttcgagataaaattgcacagattgataaagtaatgtgtgaaggatcactccacattttaagactggcacttaccagaaataattgtgttaaagtatacaataagctgaagttaatggccactgtacaccagactcagcctacagtacaggtgttattatctacttctgaatttgttggagcattggacttaatagcaacaacacaagaggttctacagcaggaacttcagggcattcacagtttccggcatttgggatcacagctttgtgaattagaaaaactgatagataaaatgatgattgcagaattttctacttattctcacagtgacttaaatagaccactggangatgactgtcaagttttagaagaggaaagactaatatcncttgtatttggacttttaaaacaaagaaagcttaattttttagaaatctatggtgaaaaaatggttattacagcaaagaatatcattaaacagtgtgtgattaataaagtttcacaaacagaagaaatagacacagatgttgttgtgaagcttgcagatcagatgagaatgttgaattttccccagtggtttgatctgctcaaggatattttctctaagtttacaattttcctacagagagtgaaggcaacattaaatatcattcacagtgttgttctctcagttcttgacaaaaaccaaaggactagagaattggaagagatttcacaacagaagaatgctgcaaaagataattcactggacacagaggtggcttatttaatccatgaaggcatgtttataagtgatgcattcggtgagggtgagctaacacctatagcagttgacactacctctcaaagaaatgcatctccaaatagtgagccctgcagcagtgattctgtatccgagccagaatgtactactgattcttcatccagcaaagagcacacatcatcatctgctattccaggaggtgtggatattatggtcagtgaagatatgaaattaactgactcagagctaggaaagctggcaaataatatccaggaattattatatagtgcctcagatatatgccatgatcgagctgtcaaatttctcatgtcaagagcaaaggatggttttcttgagaagctaaattccatggaattcataacactttctagattaatggaaacattcattttagacaccgaacagatctgtggaagaaaaagcacgtcattacttggagcacttcagagccaagctattaagtttgtaaataggtttcatgaagagagaaaaaccaagctcagcctcctcttagacaatgagcgctggaagcaagcagatgttcctgcagaatttcaggatcttgttgattctctgtcagatgggaagattgctttacctgaaaaaaaatcaggagccacagaagaaaggaaaccagctgaagttcttattgtcgagggacaacagtatgcagttgttggaaccgtattgctgttaataagaattatccttgaatattgccagtgtgtggataacatcccatctgttactactgacatgcttactcgtctgtcagatttattgaaggtgctgaacatgactgaggccacttaggtcaaaaaacctggactggcttcaaatgtgcatggaaggaattcactgaactttacaaaattcatctcactaagtacttcaattcaagaagttgccagttagttcttggagctggtgcactgcaagttgttggactaaaaacgataactacaaaaaatttggctctttcttcacgatgtttgcagttaattgtgcactacattcctgtgatccgggctcattttgaagctcgactaccacctaagcaatatagcatgcttaggcattttgatcatatcactaaggactaccatgatcacatagctgaaatatcagctaagcttgtagcgataatggatagcttatttgacaagctgttatctaagtatgaagtgaaggctcctgttccttctgcctgtttcaggaatatttgtaagcaaatgacaaaaatgcacgaagctatatttgatctccttccagaagaacaaacacagatgttatttttaagaattaatgcaagttataaactccacttgaaaaagcagttatctcacttaaatgtgataaatgatggaggacctcaaaatgggttggtcacagcagatgtagctttttacactggaaatcttcaagccttaaaaggccttaaagatttggacctaaatatggccgaaatttgggagcagaagaggtgatgtcatcctggaaaactgggtagttcatctgaccatgggatgtgtttgttatgaagaaaatctggatgcctgtgattcgagaattgaacctgaaacccaaagtgaactggggtgggggaagggaaaaaggaaagtatcaagtgttgggaaactggattcagtgggatctacaaggaatgtcatttttgtgcatcctacagtgaggagtaactgatcaggtgtctataacatttttcattctctctggaaacagactcaggtttctttggaccaaatccaaaagaacacatagctgtaacacagctgtagttgactagaatgctctgtatactttatattaaaaaatgctttgcatttcttccagtgcaatgaaattcatatggtgtcccaccttatttaatgatggtacaatttaaaatcttagtcaacttctgtagaaagttttctctatgaaagtaaagctgtttgaaaaattattatttttttacagatctttctataaaaaataaacatcttttgattgcttggatttaggaattcaatttttgtttcagtgaccaatgtcaagttgcaggctttgtgtgttgcatatttaatatttctactaccaccgtatgtcaactgggtaaagccttccagagctctctaaatacctgaaagacttaagcctttttttaagtaattaatacttaaaaaaaaagatcctggcatctatttatgcaactaaatacttttcagaaatggtatataaaaggctacagtttaatatctgtatttttataaaagtatgatgaagggtttggggtgtttttatttgtagcagaggtaagaatatgtattcatataatctgcctacttttgagttctcatattaacatttagataacatatgaagtatggcccccttggatccttgtttttaagttactttcgatgtgtatacgaacaaagaccagggagaaacagaacttttaaaactataggctgctgtgttggggccagaaataaggtgacaagtaaagacttttataatacctaccttcaaaattagaatcagcagcactgtacaaataaagtgcctgtgcttcacctcacaccaagaatcttgcctaaccctgtcagagtgcctaatatcctgtggtgattatgtataatgaaacagtcttattttgtgctctttggtttcttaaaaggaaagcttgttttctttcctttatcattacagaggtatgtctttggttcttaaactatctgtctaaaataaagctgtaaaaaattaacagacaaaaaaaaa

SEQ ID NO: 354506 - DNA, 1328 bp, Homo sapiens
accctgcggacgcggggcgccagcaggtggcgctggacgcgcaacggacaaggaggcggggcctgcagctggcttggaggctccgcgctctggaggctcaggcgccgcgtggggcccgcacctctgggcagcagcggcagccgagactcacggtcaagctaaggcgaagagtgggtggctgaagccatactattttatagaattaatggaaagcagaaaagacatcacaaaccaagaagaactttggaaaatgaagcctaggagaaatttagaagaagacgattatttgcataaggacacgggagagaccagcatgctaaaaagacctgtgcttttgcatttgcaccaaacagcccatgctgatgaatttgactgcccttcagaacttcagcacacacaggaactctttccacagtggcacttgccaattaaaatagctgctattatagcatctctgacttttctttacactcttctgagggaagtaattcaccctttagcaacttcccatcaacaatatttttataaaattccaatcctggtcatcaacaaagtcttgccaatggtttccatcactctcttggcattggtttacctgccaggtgtgatagcagcaattgtccaacttcataatggaaccaagtataagaagtttccacattggttggataagtggatgttaacaagaaagcagtttgggcttctcagtttcttttttgctgtactgcatgcaatttatagtctgtcttacccaatgaggcgatcctacagatacaagttgctaaactgggcatatcaacaggtccaacaaaataaagaagatgcctggattgagcatgatgtttggagaatggagatttatgtgtctctgggaattgtgggattggcaatactggctctgttggctgtgacatctattccatctgtgagtgactctttgacatggagagaatttcactatattcagagcaagctaggaattgtttcccttctactgggcacaatacacgcattgatttttgcctggaataagtggatagatataaaacaatttgtatggtatacacctccaacttttatgatagctgttttccttccaattgttgtcctgatatttaaaagcatactattcctgccatgcttgaggaagaagatactgaagattagacatggttgggaagacgtcaccaaaattaacaaaactgagatatgttcccagttgtagaattactgtttacacacatttttgttcaatattgatatattttatcaccaacatttcaagtttgtatttgttaataaaatgattattcaaggaaattgatgtt

SEQ ID NO: 354507 - DNA, 650 bp, Homo sapiens
gcacgagaaatggtggagaaagagtagacaaagtttttgatcacctgccttcaaagaaaggctgtgaattttgttcacttagacagcttggagacaagaaattacccaaaagtaaggtgaggaggataggcaaaaagagtagaaagatgtgaatggacattgttgagaaatgtgataggaaaacaatcatagataaaggatttccaagcaacagagcatatccagatgaggtaggatgggataaactcttattgaaccaatcttcaccaattttgtttttcttttgcagagcaagctaggaattgtttcccttctactgggcacaatacacgcattgatttttgcctggaataagtggatagatataaaacaatttgtatggtatacacctccaacttttatgatagctgttttccttccaattgttgtcctgatatttaaaagcatactattcctgccatgcttgaggaagaagatactgaagattagacatggttgggaagacgtcaccaaaattaacaaaactgagatatgttcccagttgtagaattactgtttacacacatttttgttcaatattgatatattttatcaccaacatttcaagtttgtatttgttaataaaatgattattcaaggaaattgatgtt

SEQ ID NO: 354508 - DNA, 397 bp, Homo sapiens
gcggccgcgactactactactaaattcgggggtcgaagcaagctaggaattgtttcccttctactgggcacaatacacgcattgatttttgcctggaataagtggatagatataaaacaatttgtatggtatacacctccaacttttatgatagctgttttccttccaattgttgtcctgatatttaaaagcatactattcctgccatgcttgaggaagaagatactgaagattagacatggttgggaagacgtcaccaaaattaacaaaactgagatatgttcccagttgtagaattactgtttacacacatttttgttcaatattgatatattttatcaccaacatttcaagtttgtatttgttaataaaatgattattcaaggaaattgatgtt

SEQ ID NO: 354509 - DNA, 1075 bp, Homo sapiens
gcggccgcgactactactactaaattcgggggtcgacataaggacacgggagagaccagcatgctaaaaagacctgtgcttttgcatttgcaccaaacagcccatgctgatgaatttgactgcccttcagaacttcagcacacacaggaactctttccacagtggcacttgccaattaaaatagctgctattatagcatctctgacttttctttacactcttctgagggaagtaattcaccctttagcaacttcccatcaacaatatttttataaaattccaatcctggtcatcaacaaagtcttgccaatggtttccatcactctcttggcattggtttacctgccaggtgtgatagcagcaattgtccaacttcataatggaaccaagtataagaagtttccacattggttggataagtggatgttaacaagaaagcagtttgggcttctcagtttcttttttgctgtactgcatgcaatttatagtctgtcttacccaatgaggcgatcctacagatacaagttgctaaactgggcatatcaacaggtccaacaaaataaagaagatgcctggattgagcatgatgtttggagaatggagatttatgtgtctctgggaattgtgggattggcaatactggctctgttggctgtgacatctattccatctgtgagtgactctttgacatggagagaatttcactatattcagagcaagctaggaattgtttcccttctactgggcacaatacacgcattgatttttgcctggaataagtggatagatataaaacaatttgtatggtatacacctccaacttttatgatagctgttttccttccaattgttgtcctgatatttaaaagcatactattcctgccatgcttgaggaagaagatactgaagattagacatggttgggaagacgtcaccaaaattaacaaaactgagatatgttcccagttgtagaattactgtttacacacatttttgttcaatattgatatattttatcaccaacatttcaagtttgtatttgttaataaaatgattattcaaggaaattgatgtt

SEQ ID NO: 354510 - DNA, 498 bp, Homo sapiens
gcggccgcgactactactactaaattcgggggtcgactctgggaattgtgggattggcaatactggctctgttggctgtgacatctattccatctgtgagtgactctttgacatggagagaatttcactatattcagagcaagctaggaattgtttcccttctactgggcacaatacacgcattgatttttgcctggaataagtggatagatataaaacaatttgtatggtatacacctccaacttttatgatagctgttttccttccaattgttgtcctgatatttaaaagcatactattcctgccatgcttgaggaagaagatactgaagattagacatggttgggaagacgtcaccaaaattaacaaaactgagatatgttcccagttgtagaattactgtttacacacatttttgttcaatattgatatattttatcaccaacatttcaagtttgtatttgttaataaaatgattattcaaggaaattgatgtt

SEQ ID NO: 354511 - DNA, 370 bp, Homo sapiens
ctgaaacagtcccaacactcagtgagttcaggcagatgagcaaaccaaggcttagagagttcagttgtgtaagactacactgctgggcagtgaatgaacctggaatacaaagactcattcactgtccagcagtagagtttaagtagagtttaaattttattctagcaacatgagagtcacggaaccacatagagatgaggagtctctatcagacgtgtttgcagtgaggtctctctgcacaacagagaaggactcatggaagcaatgggaccaattaagagacattatgttgggaggctgaggtgggtggaacatttgaggtcaggagttcgagaccagcctggccaacatggtgaaaccccatgtctac

SEQ ID NO: 354512 - DNA, 424 bp, Homo sapiens
aaagacaggaagggggaaagactcgattgctttctgattttaatcgggtcaaacagaatgaccaccacaaacgaagagatcttacctctctggagcctcagtctttgtggggaactgtccaggactgaatcctatcagcttgcacttcattctgaatctggctatcaatgactcactcactttgtgtttataactggtcaatactgcctccatgagaagagattcttgcctagaatatatattaataattcagggccaggtccagtggctcaagcctataatcccagcacttttggaggccaaggcaggcagatcgcttgaggccaggagttctagaccagcctggccaacaggagataccctgtctcttctaaaaatacaaaaattagccgagtgtggtgatgcacacctgtagtcccagcta

SEQ ID NO: 354513 - DNA, 376 bp, Homo sapiens
cctgttcctaattaccaggggaaatttcagaagagtgtgatggcctctatgacgcttaattctaacactcaacactcaattcactaattcactggtcagtacagataaataacaaataatttttctttcaacttgatagatatcaaccgtttctattgggttgaatctaccatgatatagtgcagatttgggtctgtaaaatcttgcacgggctccattatcttcctaaactattccaggggtgctgtattccaccggctctgggttagaacgttcccaaccgcagtgatttgtgacttcaaagaacaccctcgagaaggggttccaaaggttttcaggctttaggggagcaacgcggaataaccaaattctgcat

SEQ ID NO: 354514 - DNA, 876 bp, Homo sapiens
  misc_feature (797)..(797): n is a, c, g, or t
  misc_feature (862)..(862): n is a, c, g, or t
  misc_feature (870)..(870): n is a, c, g, or t
aggcccgtttccggcggcgtcgcgcgtttgcgagcctcgggtggtcctcagggagggtctctcggccagaacacgtggatgcccacccaccactgagcctcatggaggtggtaacatttggcgatgtggctgtgcacttctctcgggaggagtggcagtgtctggaccctggccagagggccctctacagggaagtgatgctggagaaccacagcagtgtggctggactagcaggattcctggttttcaagcctgagctgatctctcggctggagcagggagaagagccatgggtcctcgacctgcagggagcagaggggacagaggcaccaaggacctccaagacagattctacgattaggactgaaaatgagcaggcctgtgaggacatggacatcctaaaatcagaatcctatgggacagtggtcagaatctccccacaggactttcctcagaatcctggctttggagacgtttctgattctgaggtctggttagacagtcatctgggcagtcccgggctgaaagtgacaggctttaccttccaaaataactgtttgaatgaggagactgtggttcccaagaccttcaccaaggacgcaccccagggatgtaaggagctgggaagcagcggcctggattgtcagcctcttgaaagtcagggagagagtgcggaagggatgtcccagagatgcgaggagtgtggcaaaggcatcagagccacttcagatatcgctctgcattgggaaattaatacacagaaaattagcagatgtcaagaatgccaaaaaaaaggntaatctggactggctttgccaggggggaaaacctttcccaaatttaaccttggcccattgggaanaagaaaanccccgt

SEQ ID NO: 354515 - DNA, 1263 bp, Homo sapiens
tgagggtctgagatttcattctttgtagaagctcacgagaaatcctgtggccattccacctaggaggggacggcaggcagaatactcactgtggttgtcagggccctatcagttccttttgcccaccattcccatgacgcagaggcccagcaggtgcaggcacagctgagaaactcggaggtgaggagtgagcctgctctgttgggagctggggggccattacctcacccctcagttttttttttgctgctgacacaaccttgagaagtggcccaggtggagcacggtggggttcttggcacatgcaggaacatggagggaggcgtggctgatggcaggtggcttgctcaaggcctgatgcttttttgctgaaattgaattttcacgtgaatctgctgctcaaccctaatctaacaggctgggaccttgtccatttgattttctcacacagcatctaattaaggctgatattcacaggcatgaggccaactgtaagacctcaaccctgtctccacagtccttgtcattcagggggaacctggaactcctgactggtgacctcccacctgcctcttcaggggctcctcccggtgtacaagggtgatggtgctctccacagccatggagtcagtgcatccactgtaactgcctcttctccagccatgccctactcacaccggaacttctgtgcacgtggagtatgtgtgcagtgtccctgccttgcgtcacgtggctgctgagaagggtcttggcaggtaatgtgcttagccaggtggtcaccttcaggtctagcacaggggttgctgttgctttttctctacttcaggctttctgggccgcccaaccatgggacaagagccaaggcacccacatgcaccgcctgcaactcctgttcctggccttccaaaacactgctcacaaagactgaccctgcctcctcctgggctctcgtcatctcctcttggccacttcctggttcatgatcaggacagaaggaggggaacgtcagccatatggatggtctgaaaattccagattctgtgctaaccataatgctgtgttcttttcactaacagcaaccagccaaaaaggggctggggtgcaagcttcattctgcttcagcacctggattctctctggattgacatggtcctaagtcaggggctggcaaaccattcgtagctttttacatttctgaatggttggggagaaaataagagacttgtgacatttgaaaactatgttaaaatcgaatttgactgt

SEQ ID NO: 354516 - DNA, 3701 bp, Homo sapiens
aggcccgtttccggcggcgtcgcgcgtttgcgagcctcgggtggtcctcagggagggtctctcggccagaacacgtggatgcccacccaccactgagcctcatggaggtggtaacatttggcgatgtggctgtgcacttctctcgggaggagtggcagtgtctggaccctggccagagggccctctacagggaagtgatgctggagaaccacagcagtgtggctggactagcaggattcctggttttcaagcctgagctgatctctcggctggagcagggagaagagccatgggtcctcgacctgcagggagcagaggggacagaggcaccaaggacctccaagacagattctacgattaggactgaaaatgagcaggcctgtgaggacatggacatcctaaaatcagaatcctatgggacagtggtcagaatctccccacaggactttcctcagaatcctggctttggagacgtttctgattctgaggtctggttagacagtcatctgggcagtcccgggctgaaagtgacaggctttaccttccaaaataactgtttgaatgaggagactgtggttcccaagaccttcaccaaggacgcaccccagggatgtaaggagctgggaagcagcggcctggattgtcagcctcttgaaagtcagggagagagtgcggaagggatgtcccagagatgcgaggagtgtggcaaaggcatcagagccacttcagatatcgctctgcattgggaaattaatacacagaaaattagcagatgtcaagaatgccaaaaaaagttatctgactgcttgcaggggaaacatacaaataactgccatggagagaagccgtacgaatgtgcagagtgtgggaaagtcttcaggctctgctcgcagcttaatcagcatcagagaatccacacgggagagaaaccctttaaatgcactgagtgtggaaaagccttccgcctgagctcaaaacttattcagcatcaaagaatccacactggggagaagccctacagatgtgaggaatgtggaaaagcttttggtcagagctcaagcctcatccaccatcagagaatccacacaggagagaggccctatggttgtcgtgagtgtgggaaagccttcagccagcagtcgcagctggttagacaccagagaactcacactggggagaggccctacccttgcaaggagtgtgggaaggccttcagccagagctccaccctagcccagcatcaaaggatgcatactggggagaaagctcaaattctaaaagcctcagacagtccaagccttgttgcacatcagagaattcacgctgtagagaaaccatttaagtgtgatgagtgtgggaaagcttttaggtggatctctcgcctgagtcagcatcagctgattcacactggagagaagccttataaatgcaacaagtgtacaaaagcctttggttgtagttcacggcttattcgccatcagagaactcacactggagaaaaaccatttaaatgtgatgagtgtggcaaaggctttgttcagggctcacaccttattcagcatcagcgaatccacactggagagaaaccctatgtgtgtaatgactgtggaaaagccttcagtcagagttccagccttatttaccatcagagaatccataaaggagagaagccctacgaatgcctccaatgcggaaaagccttcagtatgagcacacagcttacaatacatcaaagggttcacactggagagaggccctataaatgtaatgaatgtgggaaagccttcagtcaaaactcaacccttttccaacaccagataattcatgcaggggtgaagccctatgagtgcagtgagtgtggaaaagccttcagccggagctcatatcttattgaacaccagagaatacacactagggcccagtggttttacgaatatgggaatgccctggaagggtccacctttgtgagccgtaaaaaggttaatactataaagaaactgcatcagtgtgaagactgtgagaagatatttaggtggcgttcacacctaattatacaccagagaattcacaccggggagaagccttataaatgcaatgactgtggcaaagcttttaatcgtagctcaaggcttacccagcatcaaaaaattcacatgggatagaccacttacatataaatgtgtatatatgtgaataaacctacagccttaacttacttattttatatggaatcgtttatactgacaaacatgtagaatgttggtaaaggttcagaattgctctcaagaatatccaacttcaggccgagtgtggtggctcatgcctgtcatcccagcactttgggaggccaaggcgggcacatcacgaggtcaggaggttgagaccatcctgggtaacaggtgaaaccccatctctactaaaaatacaaaaatttagctgggcgtggtggcaggcgcctgtggtcccagctgctcgggaggctgaggcaggagaatggcatcagcccaggaggcggagcttgcagtgagctgagatcgcgccactgcactccagcctgggtgacagagtgagactccctctcaaaaaaaaaaaaaaaaaaaaaatccaacttcatacaaaatgtatgtttatttcctgaaatgtttgaccttaacctgttcaataaagcctgtgtccctcaaaatcagggtgcagtctgcagttttgagttgacaggtccctgtgaatgaggaagcagcacaaggagggctctacgagcgctgctagactgagtaggttaaaataatttacctaaactcttttcccttaagtatcagtggctcacactggcttcaacaatacggaaatgcattagctcatgttggaggaggtccaggagtgcctagaattccaacttcaaattaggtccttgtcttagaacttaacccagccacccaggaccagagggcccagccctatccccttcctcagagaggcaggctgggctagcaggtacacgccatcattactggtgtggttggcatttatggagcacataccagtgccaggcacagaagcaaggtgtcacagcaaggttctgaggtcacacttgtgtcccaggggcttgctgtgtgacctaggacatcattgccctccctgaaactcagagccttatttgtgtatctgaaaacatgcactgtgagagggtactgagaggaaacaatgtagagaaacatgccttactgggcctgtcagagaacgagcactcaagcaaataccaacccccccatccatgccagcatctccagcacacccgtgtgcgcacaggccctgaggctgatgactgtcttgtactggcctagttgccccacttttttttggtaggggggaacgcggtgaggaggaaataaagacagtggagaaaaagacgaaaatgggccgggcgtggtggctcacgcctgtaatcccagcactttgggaggtcgaggtgggtggatcatgaggtcaggagatgaagaccatcctggctaacacagtgaaaccccgtgtctactaaagatacaaaaaattagccgggcgtggtggcgggcacctgtagtctcagctacttgggaggctaggcaggaaaatggtgtgaacctggggggcggagcttgcagtgagccaagatcacgccactgcactccagcctgggtgacaagagtgtgactctgtatcaaaag

SEQ ID NO: 354517 - DNA, 4088 bp, Homo sapiens
aggcccgtttccggcggcgtcgcgcgtttgcgagcctcgggtggtcctcagggagggtctctcggccagaacacgtggatgcccacccaccactgagcctcatggtaggaagcttgactgcctccttcccctcgcatgtcctgtgaaggcccacctcctgctctgcccactggccctgggcccagaccctaccttggcccttgctgggcttaggaaggcccccttgcccccaaccccaaggtagtgagcaaacccctgcccaaaccagggcctaattgaggctcttgaggggggagggttgtatgaccaccatggactgggttccttcctcctccccgagactgcccctccccagaatattagaggcagaggagtcctggtgagcgtctcgcccaaccccatggggcagctgcctgagacatgtcatgaggcagcgccagaagggggctggcacccagggattcctggggtgctggtgtgtgtcctttcaggaggtggtaacatttggcgatgtggctgtgcacttctctcgggaggagtggcagtgtctggaccctggccagagggccctctacagggaagtgatgctggagaaccacagcagtgtggctggactagcaggattcctggttttcaagcctgagctgatctctcggctggagcagggagaagagccatgggtcctcgacctgcagggagcagaggggacagaggcaccaaggacctccaagacagattctacgattaggactgaaaatgagcaggcctgtgaggacatggacatcctaaaatcagaatcctatgggacagtggtcagaatctccccacaggactttcctcagaatcctggctttggagacgtttctgattctgaggtctggttagacagtcatctgggcagtcccgggctgaaagtgacaggctttaccttccaaaataactgtttgaatgaggagactgtggttcccaagaccttcaccaaggacgcaccccagggatgtaaggagctgggaagcagcggcctggattgtcagcctcttgaaagtcagggagagagtgcggaagggatgtcccagagatgcgaggagtgtggcaaaggcatcagagccacttcagatatcgctctgcattgggaaattaatacacagaaaattagcagatgtcaagaatgccaaaaaaagttatctgactgcttgcaggggaaacatacaaataactgccatggagagaagccgtacgaatgtgcagagtgtgggaaagtcttcaggctctgctcgcagcttaatcagcatcagagaatccacacgggagagaaaccctttaaatgcactgagtgtggaaaagccttccgcctgagctcaaaacttattcagcatcaaagaatccacactggggagaagccctacagatgtgaggaatgtggaaaagcttttggtcagagctcaagcctcatccaccatcagagaatccacacaggagagaggccctatggttgtcgtgagtgtgggaaagccttcagccagcagtcgcagctggttagacaccagagaactcacactggggagaggccctacccttgcaaggagtgtgggaaggccttcagccagagctccaccctagcccagcatcaaaggatgcatactggggagaaagctcaaattctaaaagcctcagacagtccaagccttgttgcacatcagagaattcacgctgtagagaaaccatttaagtgtgatgagtgtgggaaagcttttaggtggatctctcgcctgagtcagcatcagctgattcacactggagagaagccttataaatgcaacaagtgtacaaaagcctttggttgtagttcacggcttattcgccatcagagaactcacactggagaaaaaccatttaaatgtgatgagtgtggcaaaggctttgttcagggctcacaccttattcagcatcagcgaatccacactggagagaaaccctatgtgtgtaatgactgtggaaaagccttcagtcagagttccagccttatttaccatcagagaatccataaaggagagaagccctacgaatgcctccaatgcggaaaagccttcagtatgagcacacagcttacaatacatcaaagggttcacactggagagaggccctataaatgtaatgaatgtgggaaagccttcagtcaaaactcaacccttttccaacaccagataattcatgcaggggtgaagccctatgagtgcagtgagtgtggaaaagccttcagccggagctcatatcttattgaacaccagagaatacacactagggcccagtggttttacgaatatgggaatgccctggaagggtccacctttgtgagccgtaaaaaggttaatactataaagaaactgcatcagtgtgaagactgtgagaagatatttaggtggcgttcacacctaattatacaccagagaattcacaccggggagaagccttataaatgcaatgactgtggcaaagcttttaatcgtagctcaaggcttacccagcatcaaaaaattcacatgggatagaccacttacatataaatgtgtatatatgtgaataaacctacagccttaacttacttattttatatggaatcgtttatactgacaaacatgtagaatgttggtaaaggttcagaattgctctcaagaatatccaacttcaggccgagtgtggtggctcatgcctgtcatcccagcactttgggaggccaaggcgggcacatcacgaggtcaggaggttgagaccatcctgggtaacaggtgaaaccccatctctactaaaaatacaaaaatttagctgggcgtggtggcaggcgcctgtggtcccagctgctcgggaggctgaggcaggagaatggcatcagcccaggaggcggagcttgcagtgagctgagatcgcgccactgcactccagcctgggtgacagagtgagactccctctcaaaaaaaaaaaaaaaaaaaaaatccaacttcatacaaaatgtatgtttatttcctgaaatgtttgaccttaacctgttcaataaagcctgtgtccctcaaaatcagggtgcagtctgcagttttgagttgacaggtccctgtgaatgaggaagcagcacaaggagggctctacgagcgctgctagactgagtaggttaaaataatttacctaaactcttttcccttaagtatcagtggctcacactggcttcaacaatacggaaatgcattagctcatgttggaggaggtccaggagtgcctagaattccaacttcaaattaggtccttgtcttagaacttaacccagccacccaggaccagagggcccagccctatccccttcctcagagaggcaggctgggctagcaggtacacgccatcattactggtgtggttggcatttatggagcacataccagtgccaggcacagaagcaaggtgtcacagcaaggttctgaggtcacacttgtgtcccaggggcttgctgtgtgacctaggacatcattgccctccctgaaactcagagccttatttgtgtatctgaaaacatgcactgtgagagggtactgagaggaaacaatgtagagaaacatgccttactgggcctgtcagagaacgagcactcaagcaaataccaacccccccatccatgccagcatctccagcacacccgtgtgcgcacaggccctgaggctgatgactgtcttgtactggcctagttgccccacttttttttggtaggggggaacgcggtgaggaggaaataaagacagtggagaaaaagacgaaaatgggccgggcgtggtggctcacgcctgtaatcccagcactttgggaggtcgaggtgggtggatcatgaggtcaggagatgaagaccatcctggctaacacagtgaaaccccgtgtctactaaagatacaaaaaattagccgggcgtggtggcgggcacctgtagtctcagctacttgggaggctaggcaggaaaatggtgtgaacctggggggcggagcttgcagtgagccaagatcacgccactgcactccagcctgggtgacaagagtgtgactctgtatcaaaag

SEQ ID NO: 354518 - DNA, 3237 bp, Homo sapiens
aggcccgtttccggcggcgtcgcgcgtttgcgagcctcgggtggtcctcagggagggtctctcggccagaacacgtggatgcccacccaccactgagcctcatggaggtggtaacatttggcgatgtggctgtgcacttctctcgggaggagtggcagtgtctggaccctggccagagggccctctacagggaagtgatgctggagaaccacagcagtgtggctggactagcaggattcctggttttcaagcctgagctgatctctcggctggagcagggagaagagccatgggtcctcgacctgcagggagcagaggggacagaggcaccaaggacctccaagacaggggaaacatacaaataactgccatggagagaagccgtacgaatgtgcagagtgtgggaaagtcttcaggctctgctcgcagcttaatcagcatcagagaatccacacgggagagaaaccctttaaatgcactgagtgtggaaaagccttccgcctgagctcaaaacttattcagcatcaaagaatccacactggggagaagccctacagatgtgaggaatgtggaaaagcttttggtcagagctcaagcctcatccaccatcagagaatccacacaggagagaggccctatggttgtcgtgagtgtgggaaagccttcagccagcagtcgcagctggttagacaccagagaactcacactggggagaggccctacccttgcaaggagtgtgggaaggccttcagccagagctccaccctagcccagcatcaaaggatgcatactggggagaaagctcaaattctaaaagcctcagacagtccaagccttgttgcacatcagagaattcacgctgtagagaaaccatttaagtgtgatgagtgtgggaaagcttttaggtggatctctcgcctgagtcagcatcagctgattcacactggagagaagccttataaatgcaacaagtgtacaaaagcctttggttgtagttcacggcttattcgccatcagagaactcacactggagaaaaaccatttaaatgtgatgagtgtggcaaaggctttgttcagggctcacaccttattcagcatcagcgaatccacactggagagaaaccctatgtgtgtaatgactgtggaaaagccttcagtcagagttccagccttatttaccatcagagaatccataaaggagagaagccctacgaatgcctccaatgcggaaaagccttcagtatgagcacacagcttacaatacatcaaagggttcacactggagagaggccctataaatgtaatgaatgtgggaaagccttcagtcaaaactcaacccttttccaacaccagataattcatgcaggggtgaagccctatgagtgcagtgagtgtggaaaagccttcagccggagctcatatcttattgaacaccagagaatacacactagggcccagtggttttacgaatatgggaatgccctggaagggtccacctttgtgagccgtaaaaaggttaatactataaagaaactgcatcagtgtgaagactgtgagaagatatttaggtggcgttcacacctaattatacaccagagaattcacaccggggagaagccttataaatgcaatgactgtggcaaagcttttaatcgtagctcaaggcttacccagcatcaaaaaattcacatgggatagaccacttacatataaatgtgtatatatgtgaataaacctacagccttaacttacttattttatatggaatcgtttatactgacaaacatgtagaatgttggtaaaggttcagaattgctctcaagaatatccaacttcaggccgagtgtggtggctcatgcctgtcatcccagcactttgggaggccaaggcgggcacatcacgaggtcaggaggttgagaccatcctgggtaacaggtgaaaccccatctctactaaaaatacaaaaatttagctgggcgtggtggcaggcgcctgtggtcccagctgctcgggaggctgaggcaggagaatggcatcagcccaggaggcggagcttgcagtgagctgagatcgcgccactgcactccagcctgggtgacagagtgagactccctctcaaaaaaaaaaaaaaaaaaaaaatccaacttcatacaaaatgtatgtttatttcctgaaatgtttgaccttaacctgttcaataaagcctgtgtccctcaaaatcagggtgcagtctgcagttttgagttgacaggtccctgtgaatgaggaagcagcacaaggagggctctacgagcgctgctagactgagtaggttaaaataatttacctaaactcttttcccttaagtatcagtggctcacactggcttcaacaatacggaaatgcattagctcatgttggaggaggtccaggagtgcctagaattccaacttcaaattaggtccttgtcttagaacttaacccagccacccaggaccagagggcccagccctatccccttcctcagagaggcaggctgggctagcaggtacacgccatcattactggtgtggttggcatttatggagcacataccagtgccaggcacagaagcaaggtgtcacagcaaggttctgaggtcacacttgtgtcccaggggcttgctgtgtgacctaggacatcattgccctccctgaaactcagagccttatttgtgtatctgaaaacatgcactgtgagagggtactgagaggaaacaatgtagagaaacatgccttactgggcctgtcagagaacgagcactcaagcaaataccaacccccccatccatgccagcatctccagcacacccgtgtgcgcacaggccctgaggctgatgactgtcttgtactggcctagttgccccacttttttttggtaggggggaacgcggtgaggaggaaataaagacagtggagaaaaagacgaaaatgggccgggcgtggtggctcacgcctgtaatcccagcactttgggaggtcgaggtgggtggatcatgaggtcaggagatgaagaccatcctggctaacacagtgaaaccccgtgtctactaaagatacaaaaaattagccgggcgtggtggcgggcacctgtagtctcagctacttgggaggctaggcaggaaaatggtgtgaacctggggggcggagcttgcagtgagccaagatcacgccactgcactccagcctgggtgacaagagtgtgactctgtatcaaaag

SEQ ID NO: 354519 - DNA, 1172 bp, Homo sapiens
aggcccgtttccggcggcgtcgcgcgtttgcgagcctcgggtggtcctcagggagggtctctcggccagaacacgtggatgcccacccaccactgagcctcatggtaggaagcttgactgcctccttcccctcgcatgtcctgtgaaggcccacctcctgctctgcccactggccctgggcccagaccctaccttggcccttgctgggcttaggaaggcccccttgcccccaaccccaaggtagtgagcaaacccctgcccaaaccagggcctaattgaggctcttgaggggggagggttgtatgaccaccatggactgggttccttcctcctccccgagactgcccctccccagaatattagaggcagaggagtcctggtgagcgtctcgcccaaccccatggggcagctgcctgagacatgtcatgaggcagcgccagaagggggctggcacccagggattcctggggtgctggtgtgtgtcctttcaggaggtggtaacatttggcgatgtggctgtgcacttctctcgggaggagtggcagtgtctggaccctggccagagggccctctacagggaagtgatgctggagaaccacagcagtgtggctggactagcaggattcctggttttcaagcctgagctgatctctcggctggagcagggagaagagccatgggtcctcgacctgcagggagcagaggggacagaggcaccaaggacctccaagacaggctttctgggccgcccaaccatgggacaagagccaaggcacccacatgcaccgcctgcaactcctgttcctggccttccaaaacactgctcacaaagactgaccctgcctcctcctgggctctcgtcatctcctcttggccacttcctggttcatgatcaggacagaaggaggggaacgtcagccatatggatggtctgaaaattccagattctgtgctaaccataatgctgtgttcttttcactaacagcaaccagccaaaaaggggctggggtgcaagcttcattctgcttcagcacctggattctctctggattgacatggtcctaagtcaggggctggcaaaccattcgtagctttttacatttctgaatggttggggagaaaataagagacttgtgacatttgaaaactatgttaaaatcgaatttgactgt

SEQ ID NO: 354520 - DNA, 1094 bp, Homo sapiens
aggcccgtttccggcggcgtcgcgcgtttgcgagcctcgggtggtcctcagggagggtctctcggccagaacacgtggatgcccacccaccactgagcctcatggaggtggtaacatttggcgatgtggctgtgcacttctctcgggaggagtggcagtgtctggaccctggccagagggccctctacagggaagtgatgctggagaaccacagcagtgtggctggactagcaggattcctggttttcaagcctgagctgatctctcggctggagcagggagaagagccatgggtcctcgacctgcagggagcagaggggacagaggcaccaaggacctccaagacagtccttgtcattcagggggaacctggaactcctgactggtgacctcccacctgcctcttcaggggctcctcccggtgtacaagggtgatggtgctctccacagccatggagtcagtgcatccactgtaactgcctcttctccagccatgccctactcacaccggaacttctgtgcacgtggagtatgtgtgcagtgtccctgccttgcgtcacgtggctgctgagaagggtcttggcaggtaatgtgcttagccaggtggtcaccttcaggtctagcacaggggttgctgttgctttttctctacttcaggctttctgggccgcccaaccatgggacaagagccaaggcacccacatgcaccgcctgcaactcctgttcctggccttccaaaacactgctcacaaagactgaccctgcctcctcctgggctctcgtcatctcctcttggccacttcctggttcatgatcaggacagaaggaggggaacgtcagccatatggatggtctgaaaattccagattctgtgctaaccataatgctgtgttcttttcactaacagcaaccagccaaaaaggggctggggtgcaagcttcattctgcttcagcacctggattctctctggattgacatggtcctaagtcaggggctggcaaaccattcgtagctttttacatttctgaatggttggggagaaaataagagacttgtgacatttgaaaactatgttaaaatcgaatttgactgt

SEQ ID NO: 354521 - DNA, 2352 bp, Homo sapiens
gcgcggcggcggacctcgggttgccctcggtccgagtgatccctggtcgcttccttagccctcccgccttcggcattggggtccccgcgtcccccgggcctccaggcgggaaagcgcgggggctttgcggggccttgagcgcctggtgtgggaggtggtcgagcccagccaccctcccccgcggcggcgcgaggtctctcggccagaacacgtggatgcccacccaccactgagcctcatggaggtggtaacatttggcgatgtggctgtgcacttctctcgggaggagtggcagtgtctggaccctggccagagggccctctacagggaagtgatgctggagaaccacagcagtgtggctggactagcaggattcctggttttcaagcctgagctgatctctcggctggagcagggagaagagccatgggtcctcgacctgcagggagcagaggggacagaggcaccaaggacctccaagacagattctacgattaggactgaaaatgagcaggcctgtgaggacatggacatcctaaaatcagaatcctatgggacagtggtcagaatctccccacaggactttcctcagaatcctggctttggagacgtttctgattctgaggtctggttagacagtcatctgggcagtcccgggctgaaagtgacaggctttaccttccaaaataactgtttgaatgaggagactgtggttcccaagaccttcaccaaggacgcaccccagggatgtaaggagctgggaagcagcggcctggattgtcagcctcttgaaagtcagggagagagtgcggaagggatgtcccagagatgcgaggagtgtggcaaaggcatcagagccacttcagatatcgctctgcattgggaaattaatacacagaaaattagcagatgtcaagaatgccaaaaaaagttatctgactgcttgcaggggaaacatacaaataactgccatggagagaagccgtacgaatgtgcagagtgtgggaaagtcttcaggctctgctcgcagcttaatcagcatcagagaatccacacgggagagaaaccctttaaatgcactgagtgtggaaaagccttccgcctgagctcaaaacttattcagcatcaaagaatccacactggggagaagccctacagatgtgaggaatgtggaaaagcttttggtcagagctcaagcctcatccaccatcagagaatccacacaggagagaggccctatggttgtcgtgagtgtgggaaagccttcagccagcagtcgcagctggttagacaccagagaactcacactggggagaggccctacccttgcaaggagtgtgggaaggccttcagccagagctccaccctagcccagcatcaaaggatgcatactggggagaaagctcaaattctaaaagcctcagacagtccaagccttgttgcacatcagagaattcacgctgtagagaaaccatttaagtgtgatgagtgtgggaaagcttttaggtggatctctcgcctgagtcagcatcagctgattcacactggagagaagccttataaatgcaacaagtgtacaaaagcctttggttgtagttcacggcttattcgccatcagagaactcacactggagaaaaaccatttaaatgtgatgagtgtggcaaaggctttgttcagggctcacaccttattcagcatcagcgaatccacactggagagaaaccctatgtgtgtaatgactgtggaaaagccttcagtcagagttccagccttatttaccatcagagaatccataaaggagagaagccctacgaatgcctccaatgcggaaaagccttcagtatgagcacacagcttacaatacatcaaagggttcacactggagagaggccctataaatgtaatgaatgtgggaaagccttcagtcaaaactcaacccttttccaacaccagataattcatgcaggggtgaagccctatgagtgcagtgagtgtggaaaagccttcagccggagctcatatcttattgaacaccagagaatacacactagggcccagtggttttacgaatatgggaatgccctggaagggtccacctttgtgagccgtaaaaaggttaatactataaagaaactgcatcagtgtgaagactgtgagaagatatttaggtggcgttcacacctaattatacaccagagaattcacaccggggagaagccttataaatgcaatgactgtggcaaagcttttaatcgtagctcaaggcttacccagcatcaaaaaattcacatgggatagaccacttacatataaatgtgtatatatgtgaataaacctacagccttaactta

SEQ ID NO: 354522 - DNA, 1439 bp, Homo sapiens
cgagctcggtacccccctgttggcatcactgggattccgagaggaaagaggagagccccactgcttcctgtttgcctcctccaccatccctgacctccgttgagctgcctctggccctgttgctgctgccacatcctaggtctaagagttggacgcctttcctaggcccctaccaactgagcccctcacgccgggctggctgccacccaggcttccccgcctcataggtaaccctggtgagggctattttcttcacagggggtctttgggagaatggtgactcccttgaccccgcttttcatttaaggataacaccctggaaaaaaaaaaaaaaaaaaaaatccaacttcatacaaaatgtatgtttatttcctgaaatgtttgaccttaacctgttcaataaagcctgtgtccctcaaaatcagggtgcagtctgcagttttgagttgacaggtccctgtgaatgaggaagcagcacaaggagggctctacgagcgctgctagactgagtaggttaaaataatttacctaaactcttttcccttaagtatcagtggctcacactggcttcaacaatacggaaatgcattagctcatgttggaggaggtccaggagtgcctagaattccaacttcaaattaggtccttgtcttagaacttaacccagccacccaggaccagagggcccagccctatccccttcctcagagaggcaggctgggctagcaggtacacgccatcattactggtgtggttggcatttatggagcacataccagtgccaggcacagaagcaaggtgtcacagcaaggttctgaggtcacacttgtgtcccaggggcttgctgtgtgacctaggacatcattgccctccctgaaactcagagccttatttgtgtatctgaaaacatgcactgtgagagggtactgagaggaaacaatgtagagaaacatgccttactgggcctgtcagagaacgagcactcaagcaaataccaacccccccatccatgccagcatctccagcacacccgtgtgcgcacaggccctgaggctgatgactgtcttgtactggcctagttgccccacttttttttggtaggggggaacgcggtgaggaggaaataaagacagtggagaaaaagacgaaaatgggccgggcgtggtggctcacgcctgtaatcccagcactttgggaggtcgaggtgggtggatcatgaggtcaggagatgaagaccatcctggctaacacagtgaaaccccgtgtctactaaagatacaaaaaattagccgggcgtggtggcgggcacctgtagtctcagctacttgggaggctaggcaggaaaatggtgtgaacctggggggcggagcttgcagtgagccaagatcacgccactgcactccagcctgggtgacaagagtgtgactctgtatcaaaag

SEQ ID NO: 354523 - DNA, 3624 bp, Homo sapiens
aggcccgtttccggcggcgtcgcgcgtttgcgagcctcgggtggtcctcagggagggtctctcggccagaacacgtggatgcccacccaccactgagcctcatggtaggaagcttgactgcctccttcccctcgcatgtcctgtgaaggcccacctcctgctctgcccactggccctgggcccagaccctaccttggcccttgctgggcttaggaaggcccccttgcccccaaccccaaggtagtgagcaaacccctgcccaaaccagggcctaattgaggctcttgaggggggagggttgtatgaccaccatggactgggttccttcctcctccccgagactgcccctccccagaatattagaggcagaggagtcctggtgagcgtctcgcccaaccccatggggcagctgcctgagacatgtcatgaggcagcgccagaagggggctggcacccagggattcctggggtgctggtgtgtgtcctttcaggaggtggtaacatttggcgatgtggctgtgcacttctctcgggaggagtggcagtgtctggaccctggccagagggccctctacagggaagtgatgctggagaaccacagcagtgtggctggactagcaggattcctggttttcaagcctgagctgatctctcggctggagcagggagaagagccatgggtcctcgacctgcagggagcagaggggacagaggcaccaaggacctccaagacaggggaaacatacaaataactgccatggagagaagccgtacgaatgtgcagagtgtgggaaagtcttcaggctctgctcgcagcttaatcagcatcagagaatccacacgggagagaaaccctttaaatgcactgagtgtggaaaagccttccgcctgagctcaaaacttattcagcatcaaagaatccacactggggagaagccctacagatgtgaggaatgtggaaaagcttttggtcagagctcaagcctcatccaccatcagagaatccacacaggagagaggccctatggttgtcgtgagtgtgggaaagccttcagccagcagtcgcagctggttagacaccagagaactcacactggggagaggccctacccttgcaaggagtgtgggaaggccttcagccagagctccaccctagcccagcatcaaaggatgcatactggggagaaagctcaaattctaaaagcctcagacagtccaagccttgttgcacatcagagaattcacgctgtagagaaaccatttaagtgtgatgagtgtgggaaagcttttaggtggatctctcgcctgagtcagcatcagctgattcacactggagagaagccttataaatgcaacaagtgtacaaaagcctttggttgtagttcacggcttattcgccatcagagaactcacactggagaaaaaccatttaaatgtgatgagtgtggcaaaggctttgttcagggctcacaccttattcagcatcagcgaatccacactggagagaaaccctatgtgtgtaatgactgtggaaaagccttcagtcagagttccagccttatttaccatcagagaatccataaaggagagaagccctacgaatgcctccaatgcggaaaagccttcagtatgagcacacagcttacaatacatcaaagggttcacactggagagaggccctataaatgtaatgaatgtgggaaagccttcagtcaaaactcaacccttttccaacaccagataattcatgcaggggtgaagccctatgagtgcagtgagtgtggaaaagccttcagccggagctcatatcttattgaacaccagagaatacacactagggcccagtggttttacgaatatgggaatgccctggaagggtccacctttgtgagccgtaaaaaggttaatactataaagaaactgcatcagtgtgaagactgtgagaagatatttaggtggcgttcacacctaattatacaccagagaattcacaccggggagaagccttataaatgcaatgactgtggcaaagcttttaatcgtagctcaaggcttacccagcatcaaaaaattcacatgggatagaccacttacatataaatgtgtatatatgtgaataaacctacagccttaacttacttattttatatggaatcgtttatactgacaaacatgtagaatgttggtaaaggttcagaattgctctcaagaatatccaacttcaggccgagtgtggtggctcatgcctgtcatcccagcactttgggaggccaaggcgggcacatcacgaggtcaggaggttgagaccatcctgggtaacaggtgaaaccccatctctactaaaaatacaaaaatttagctgggcgtggtggcaggcgcctgtggtcccagctgctcgggaggctgaggcaggagaatggcatcagcccaggaggcggagcttgcagtgagctgagatcgcgccactgcactccagcctgggtgacagagtgagactccctctcaaaaaaaaaaaaaaaaaaaaaatccaacttcatacaaaatgtatgtttatttcctgaaatgtttgaccttaacctgttcaataaagcctgtgtccctcaaaatcagggtgcagtctgcagttttgagttgacaggtccctgtgaatgaggaagcagcacaaggagggctctacgagcgctgctagactgagtaggttaaaataatttacctaaactcttttcccttaagtatcagtggctcacactggcttcaacaatacggaaatgcattagctcatgttggaggaggtccaggagtgcctagaattccaacttcaaattaggtccttgtcttagaacttaacccagccacccaggaccagagggcccagccctatccccttcctcagagaggcaggctgggctagcaggtacacgccatcattactggtgtggttggcatttatggagcacataccagtgccaggcacagaagcaaggtgtcacagcaaggttctgaggtcacacttgtgtcccaggggcttgctgtgtgacctaggacatcattgccctccctgaaactcagagccttatttgtgtatctgaaaacatgcactgtgagagggtactgagaggaaacaatgtagagaaacatgccttactgggcctgtcagagaacgagcactcaagcaaataccaacccccccatccatgccagcatctccagcacacccgtgtgcgcacaggccctgaggctgatgactgtcttgtactggcctagttgccccacttttttttggtaggggggaacgcggtgaggaggaaataaagacagtggagaaaaagacgaaaatgggccgggcgtggtggctcacgcctgtaatcccagcactttgggaggtcgaggtgggtggatcatgaggtcaggagatgaagaccatcctggctaacacagtgaaaccccgtgtctactaaagatacaaaaaattagccgggcgtggtggcgggcacctgtagtctcagctacttgggaggctaggcaggaaaatggtgtgaacctggggggcggagcttgcagtgagccaagatcacgccactgcactccagcctgggtgacaagagtgtgactctgtatcaaaag

SEQ ID NO: 354524 - DNA, 3526 bp, Homo sapiens
aggcccgtttccggcggcgtcgcgcgtttgcgagcctcgggtggtcctcagggaggcaggattcctggttttcaagcctgagctgatctctcggctggagcagggagaagagccatgggtcctcgacctgcagggagcagaggggacagaggcaccaaggacctccaagacagattctacgattaggactgaaaatgagcaggcctgtgaggacatggacatcctaaaatcagaatcctatgggacagtggtcagaatctccccacaggactttcctcagaatcctggctttggagacgtttctgattctgaggtctggttagacagtcatctgggcagtcccgggctgaaagtgacaggctttaccttccaaaataactgtttgaatgaggagactgtggttcccaagaccttcaccaaggacgcaccccagggatgtaaggagctgggaagcagcggcctggattgtcagcctcttgaaagtcagggagagagtgcggaagggatgtcccagagatgcgaggagtgtggcaaaggcatcagagccacttcagatatcgctctgcattgggaaattaatacacagaaaattagcagatgtcaagaatgccaaaaaaagttatctgactgcttgcaggggaaacatacaaataactgccatggagagaagccgtacgaatgtgcagagtgtgggaaagtcttcaggctctgctcgcagcttaatcagcatcagagaatccacacgggagagaaaccctttaaatgcactgagtgtggaaaagccttccgcctgagctcaaaacttattcagcatcaaagaatccacactggggagaagccctacagatgtgaggaatgtggaaaagcttttggtcagagctcaagcctcatccaccatcagagaatccacacaggagagaggccctatggttgtcgtgagtgtgggaaagccttcagccagcagtcgcagctggttagacaccagagaactcacactggggagaggccctacccttgcaaggagtgtgggaaggccttcagccagagctccaccctagcccagcatcaaaggatgcatactggggagaaagctcaaattctaaaagcctcagacagtccaagccttgttgcacatcagagaattcacgctgtagagaaaccatttaagtgtgatgagtgtgggaaagcttttaggtggatctctcgcctgagtcagcatcagctgattcacactggagagaagccttataaatgcaacaagtgtacaaaagcctttggttgtagttcacggcttattcgccatcagagaactcacactggagaaaaaccatttaaatgtgatgagtgtggcaaaggctttgttcagggctcacaccttattcagcatcagcgaatccacactggagagaaaccctatgtgtgtaatgactgtggaaaagccttcagtcagagttccagccttatttaccatcagagaatccataaaggagagaagccctacgaatgcctccaatgcggaaaagccttcagtatgagcacacagcttacaatacatcaaagggttcacactggagagaggccctataaatgtaatgaatgtgggaaagccttcagtcaaaactcaacccttttccaacaccagataattcatgcaggggtgaagccctatgagtgcagtgagtgtggaaaagccttcagccggagctcatatcttattgaacaccagagaatacacactagggcccagtggttttacgaatatgggaatgccctggaagggtccacctttgtgagccgtaaaaaggttaatactataaagaaactgcatcagtgtgaagactgtgagaagatatttaggtggcgttcacacctaattatacaccagagaattcacaccggggagaagccttataaatgcaatgactgtggcaaagcttttaatcgtagctcaaggcttacccagcatcaaaaaattcacatgggatagaccacttacatataaatgtgtatatatgtgaataaacctacagccttaacttacttattttatatggaatcgtttatactgacaaacatgtagaatgttggtaaaggttcagaattgctctcaagaatatccaacttcaggccgagtgtggtggctcatgcctgtcatcccagcactttgggaggccaaggcgggcacatcacgaggtcaggaggttgagaccatcctgggtaacaggtgaaaccccatctctactaaaaatacaaaaatttagctgggcgtggtggcaggcgcctgtggtcccagctgctcgggaggctgaggcaggagaatggcatcagcccaggaggcggagcttgcagtgagctgagatcgcgccactgcactccagcctgggtgacagagtgagactccctctcaaaaaaaaaaaaaaaaaaaaaatccaacttcatacaaaatgtatgtttatttcctgaaatgtttgaccttaacctgttcaataaagcctgtgtccctcaaaatcagggtgcagtctgcagttttgagttgacaggtccctgtgaatgaggaagcagcacaaggagggctctacgagcgctgctagactgagtaggttaaaataatttacctaaactcttttcccttaagtatcagtggctcacactggcttcaacaatacggaaatgcattagctcatgttggaggaggtccaggagtgcctagaattccaacttcaaattaggtccttgtcttagaacttaacccagccacccaggaccagagggcccagccctatccccttcctcagagaggcaggctgggctagcaggtacacgccatcattactggtgtggttggcatttatggagcacataccagtgccaggcacagaagcaaggtgtcacagcaaggttctgaggtcacacttgtgtcccaggggcttgctgtgtgacctaggacatcattgccctccctgaaactcagagccttatttgtgtatctgaaaacatgcactgtgagagggtactgagaggaaacaatgtagagaaacatgccttactgggcctgtcagagaacgagcactcaagcaaataccaacccccccatccatgccagcatctccagcacacccgtgtgcgcacaggccctgaggctgatgactgtcttgtactggcctagttgccccacttttttttggtaggggggaacgcggtgaggaggaaataaagacagtggagaaaaagacgaaaatgggccgggcgtggtggctcacgcctgtaatcccagcactttgggaggtcgaggtgggtggatcatgaggtcaggagatgaagaccatcctggctaacacagtgaaaccccgtgtctactaaagatacaaaaaattagccgggcgtggtggcgggcacctgtagtctcagctacttgggaggctaggcaggaaaatggtgtgaacctggggggcggagcttgcagtgagccaagatcacgccactgcactccagcctgggtgacaagagtgtgactctgtatcaaaag

SEQ ID NO: 354525 - DNA, 1047 bp, Homo sapiens
aggcccgtttccggcggcgtcgcgcgtttgcgagcctcgggtggtcctcagggagggtctctcggccagaacacgtggatgcccacccaccactgagcctcatggtaggaagcttgactgcctccttcccctcgcatgtcctgtgaaggcccacctcctgctctgcccactggccctgggcccagaccctaccttggcccttgctgggcttaggaaggcccccttgcccccaaccccaaggtagtgagcaaacccctgcccaaaccagggcctaattgaggctcttgaggggggagggttgtatgaccaccatggactgggttccttcctcctccccgagactgcccctccccagaatattagaggcagaggagtcctggtgagcgtctcgcccaaccccatggggcagctgcctgagacatgtcatgaggcagcgccagaagggggctggcacccagggattcctggggtgctggtgtgtgtcctttcaggaggtggtaacatttggcgatgtggctgtgcacttctctcgggaggagtggcagtgtctggaccctggccagagggccctctacagggaagtgatgctggagaaccacagcagtgtggctggactagcaggattcctggttttcaagcctgagctgatctctcggctggagcagggagaagagccatgggtcctcgacctgcagggagcagaggggacagaggcaccaaggacctccaagacagattctacgattaggactgaaaatgagcaggcctgtgaggacatggacatcctaaaatcagaatcctatgggacagtggtcagaatctccccacaggactttcctcagaatcctggctttggagacgtttctgattctgaggtctggttagacagtcatctgggcagtcccgggctgaaagtgacaggctttaccttccaaaataactgtttgaatgaggagactgtggttcccaagaccttcaccaaggacgcaccccccctattaacctactgggagaactctctgtgctagtaaccccgttctcctgata

SEQ ID NO: 354526 - DNA, 1980 bp, Homo sapiens
  misc_feature (123)..(123): n is a, c, g, or t
gctactcaggaggctgaggcaggataattgcttgaacccgggaggtggaggttgcagtgagccgagatcatgccactgcactccagcctgggcaacagagtgagactttgtctcaaaaaaaanaaaaaaaaaaaaaaagatctggcggatgaaaataaccagaatgaaaatagctagaaaactcagcaagcaggaagctccctttctcacccttttgttcccttgccgatagaatcagtcactattagaaaaaatgaaagacgctctgtttaaaacaatgatgacagcagtacttaatatgtatttcgaggtgaacttatatagattgagagaggctgcatttggcagactgatgtataggaagacccatttgtttctagcttctccctgcagggaaaatgctttcgtcattatagcctctttacacagactggccattctagtgaaacaggtggtaaacctttgggctgcccagaaacattttatctgttttcacttacctaggaaggggaaagattagcgggtcatccaaaatctgtatgtaagctatcttcattttcttccccaaccttctcctcctgggaaacacaaatgctatctcatctgacaaaaggttttagaggataaagctgaaaagattggattgggatctttttgtggcttggggcggagccttttgctaaaatctcaagaatgctgctttgagtttagctagggtggctctcagaactggggtgcctggcattctcagcatttctcaggggcctcccacctctgacaactgcagtgttagctaatacataccttgagcatagaactgaatgctgtaattcagagccattttttttttcaacttgaacattgtacaattttactgcaatttcctttgaactttcttgccactgtttggaatcttaaaaattcattagccttctcctttctgacataaagctactcttcatcagagatgagttcctatgtatgtcctttgttccttcaatagctaattaatgtgcttgaggatacttcagtggaaaaaaaggtttaaatatgcaaattactaataaatgtgtaaccttatgtaacttgtgttacatcaagtaacaagctaatctagtttgtttcactggactaggcttgtgctccctacttcagtattttgatgctttccttgatctttgtttcacaaaatgttgtgaattttggtatcattcaaaacaaatgacatttattaggtttcattttgaaacgatgtacagacaagtccccaacttagaaaccggtttgttcttaaggttcttgcgtcagcccatagaagcccactgacctccaccacagcccaaatggagggctgtgatagccagatctggttggcttttgtgggctgacccagacatttaatcaccatctcttatgttgttgccgtaagaaatgcattccaggttgggacttgggatcctgagagcacattcgccccctgtggtggccgcttgccaccttgcaagatggaagcccagtctccttactaccaaactgtagttgtaagcagagggaggggtgagatgtttataggacattccctaagctggggagtgatttttatcactattcatgtcaactgtactttggtatagactccctatcaatttaataatatgaaaagcctaaaataaaactatgcatgctattctatgtgctattttatatcagtaaataagcttatgcttgccagttgtatacacagttatgaggtgtatagaactgactttgacagtattttttgcactgtttcctatctgtttttataaagtcttatttagatattggaccttgttgatgttctcactgcccttgtgcttgctataaaatgtttcatatgtgcctttacaaatgtgagatctttattctaacctttttttgtaaaagatatctattgatttccatatgcaataaacctttttttcagagaaaaaaaaaatc

SEQ ID NO: 354527 - DNA, 672 bp, Homo sapiens
tactactactaaattcgcggccgcgtcgaccccaaatggagggctgtgatagccagatctggttggcttttgtgggctgacccagacatttaatcaccatctcttatgttgttgccgtaagaaatgcattccaggttgggacttgggatcctgagagcacattcgccccctgtggtggccgcttgccaccttgcaagatggaagcccagtctccttactaccaaactgtagttgtaagcagagggaggggtgagatgtttataggacattccctaagctggggagtgatttttatcactattcatgtcaactgtactttggtatagactccctatcaatttaataatatgaaaagcctaaaataaaactatgcatgctattctatgtgctattttatatcagtaaataagcttatgcttgccagttgtatacacagttatgaggtgtatagaactgactttgacagtattttttgcactgtttcctatctgtttttataaagtcttatttagatattggaccttgttgatgttctcactgcccttgtgcttgctataaaatgtttcatatgtgcctttacaaatgtgagatctttattctaacctttttttgtaaaagatatctattgatttccatatgcaataaacctttttttcagagaaaaaaaaaatc

SEQ ID NO: 354528 - DNA, 466 bp, Homo sapiens
ggataatgaagtccctctcctctataacctatggctaactgctcaccaaaaatgtctgacattattaagcatttagctgggaaacatcagtgttaacagattgtccttgtatcttttttagtttttaaaattcattttgtccttgtatcttttttaatttttaaaattcatttattttttcttttttcagcaagtccttatatcatcaatgtccttatatcttaaaaaagtgatatggaaaaaaactggttaagtaaatatttctatatgtatatattgttttcttaaaataaataaaaaatggtccaggacattctttccatcctatcacacttttattttcattcaaacagctgaaattcatttttttcctgtttgtgctttgtgccacaataataatgttggatggaattctgtcatgtatcccgtaattcaatggataaaacatcaggaacacattaacaaa

SEQ ID NO: 354529 - DNA, 2459 bp, Homo sapiens
tttaaaataaaatacatttataactggcaatgtttaaaaagagaaacaaactgagttccactgaaattaagagattttctcggtctctgggcgggccgtgggaggcttcctgaggtgggggccgggccaggatggctgcagcgcagcgacggccggggccgggagcgggccctgggcggcccaggagaagcagttcccgccggcgctgctgagtttcttcatctacaacccgcgcttcgggccgcgcgaaggacaggaggaaaataagattttattttatcatccaaatgaggtagaaaagaatgagaagattagaaatgtcggattgtgtgaagctattgtacagtttacaaggacatttagcccatcaaaacctgcaaaatctttacatacacagaagaacagacagttcttcaatgaaccagaagaaaatttctggatggtcatggttgttcggaatcctataattgaaaaacagagtaaagatggaaaaccagttattgaatatcaagaggaggagttgttggacaaggtttatagctcggtgctgcggcagtgctacagcatgtacaagctttttaatggtacatttctgaaagccatggaagacggaggcgtcaagcttctgaaagaaagattagagaaattcttccatcggtatttgcaaacgctacatttgcagtcatgtgacctacttgacatttttggtggaatcagcttcttcccgttggataaaatgacttatttgaaaatccagtcctttattaatagaatggaggaaagcctgaatatagtcaaatacactgcttttctctataacgatcagctcatctggagtggattagaacaagatgacatgagaattttatacaaataccttaccacctccctttttccaaggcacatcgaacctgagttagcaggaagggattctccaataagagcagaaatgccaggaaatcttcaacactatggaagatttcttaccggacccttgaacctcaatgatccagatgcaaaatgcagattccccaaaatttttgtaaatacagatgacacttatgaagagctccatttaatcgtttataaggccatgagtgcggctgtgtgctttatgatcgacgcctctgtccacccaacgttggatttttgccgaagactggacagcatcgttgggccccagctcacagtgctggcctctgacatctgtgaacagtttaacatcaacaagaggatgtccgggtctgagaaagaaccccagtttaagtttatctacttcaaccacatgaatctcgccgagaagagcacagttcacatgaggaaaacgcccagcgtgtcgctcacttccgtgcacccggatttaatgaagattctcggtgacatcaacagtgactttaccagagtggatgaagatgaggagatcattgtgaaggccatgagtgattactgggttgttggaaagaagtctgatcggcgggagctctatgttattttgaatcaaaaaaatgcaaacctgattgaagtaaatgaagaggtcaagaaactttgtgcaacgcagttcaacaacatcttcttcttggattgacggatgacggctcaccgagagcatatctaaaaaacactctgcaaacatttggtcacatgcaagttagtggtcatatgacggactgcattcaggacaagggtaaagcaatacttgctttgaagaatcacatttcgactcggtctgctgatctgaggtttttagattttaaatatttatgtggaattaattaaaggtagttggctatatcgctatcatttcattcttttgacattatgtgaatattttactggaaaataagactaataaattgttaaaagtttttaaaattctggtttggtgttgagtctctctcctgctgcctatttatagattacactggccaccagctccgtgacccaggctggaatgcaatggctcactgcagcctcaacctcctgagctcaagcaatcctcccacctcagcctcccaagaagctagaaccacatgtacacaccaccacggtcggctgatgttttaattttgcagagatgggggggtctcactatgttgcccaggctggtctcgaactcccgtaatccagccatgtaggaaacctgagatgcagtgggccaaggggtatgttaaaacactgtgacgagttcagtgctaagaactgtaatgctcaggaaatcttacagcacgtgccatcctaagcctgtgtgtgtgtcctcgtgtctctctactttttcttcttcttgctggtgatggtcttgctggatggggacacggtcacatcctccttgggagggtccagtatgaggtgagaggatgacacgtctgccggctcctttagcactgtgatgtccacctcataagtcatgtctcttgggcctcttcctctctcaagatgaagatgttcagccttgcttccag

SEQ ID NO: 354530 - DNA, 501 bp, Homo sapiens
ggcagtatttgcacaatgatgagatcattcctgttcttcttcttattttaaataatagagacgtctcactgtgttgccatgctggtcttgaactcctgagctcaagtgatcctcccgcctcagcctctgaaaatactaggattacaattcctgtttttctaaaaccggtttttgttttgttttgtcattagcatgtgtgacacaagaggtcgacattgaacttagcgttttcaatagctaagatgaaatgtttctattcatgttgtgcttctgtttcctcatgtttcaggaggaaaataagattttattttatcatccaaatgaggtagaaaagaatgagaagaatcacatttcgactcggtctgctgatctgaggtttttagattttaaatatttatgtggaattaattaaaggtagttggctatatcgctatcatttcattcttttgacattatgtgaatattttactggaaaataagactaataaattgttaaaagtt

SEQ ID NO: 354531 - DNA, 1865 bp, Homo sapiens
tttaaaataaaatacatttataactggcaatgtttaaaaagagaaacaaactgagttccactgaaattaagagattttctcggtctctgggcgggccgtgggaggcttcctgaggtgggggccgggccaggatggctgcagcgcagcgacggccggggccgggagcgggccctgggcggcccaggagaagcagttcccgccggcgctgctgagtttcttcatctacaacccgcgcttcgggccgcgcgaaggacaggaggaaaataagattttattttatcatccaaatgaggtagaaaagaatgagaagattagaaatgtcggattgtgtgaagctattgtacagtttacaaggacatttagcccatcaaaacctgcaaaatctttacatacacagaagaacagacagttcttcaatgaaccagaagaaaatttctggatggtcatggttgttcggaatcctataattgaaaaacagagtaaagatggaaaaccagttattgaatatcaagaggaggagttgttggacaaggtttatagctcggtgctgcggcagtgctacagcatgtacaagctttttaatggtacatttctgaaagccatggaagacggaggcgtcaagcttctgaaagaaagattagagaaattcttccatcggtatttgcaaacgctacatttgcagtcatgtgacctacttgacatttttggtggaatcagcttcttcccgttggataaaatgacttatttgaaaatccagtcctttattaatagaatggaggaaagcctgaatatagtcaaatacactgcttttctctataacgatcagctcatctggagtggattagaacaagatgacatgagaattttatacaaataccttaccacctccctttttccaaggcacatcgaacctgagttagcaggaagggattctccaataagagcagaaatgccaggaaatcttcaacactatggaagatttcttaccggacccttgaacctcaatgatccagatgcaaaatgcagattccccaaaatttttgtaaatacagatgacacttatgaagagctccatttaatcgtttataaggccatgagtgcggctgtgtgctttatgatcgacgcctctgtccacccaacgttggatttttgccgaagactggacagcatcgttgggccccagctcacagtgctggcctctgacatctgtgaacagtttaacatcaacaagaggatgtccgggtctgagaaagaaccccagtttaagtttatctacttcaaccacatgaatctcgccgagaagagcacagttcacatgaggaaaacgcccagcgtgtcgctcacttccgtgcacccggatttaatgaagattctcggtgacatcaacagtgactttaccagagtggatgaagatgaggagatcattgtgaaggccatgagtgattactgggttgttggaaagaagtctgatcggcgggagctctatgttattttgaatcaaaaaaatgcaaacctgattgaagtaaatgaagaggtcaagaaactttgtgcaacgcagttcaacaacatcttcttcttggattgacggatgacggctcaccgagagcatatctaaaaaacactctgcaaacatttggtcacatgcaagttagtggtcatatgacggactgcattcaggacaagggtaaagcaatacttgctttgaagaatcacatttcgactcggtctgctgatctgaggtttttagattttaaatatttatgtggaattaattaaaggtagttggctatatcgctatcatttcattcttttgacattatgtgaatattttactggaaaataagactaataaattgttaaaagtt

SEQ ID NO: 354532 - DNA, 2022 bp, Homo sapiens
tttaaaataaaatacatttataactggcaatgtttaaaaagagaaacaaactgagttccactgaaattaagagattttctcggtctctgggcgggccgtgggaggcttcctgaggtgggggccgggccaggatggctgcagcgcagcgacggccggggccgggagcgggccctgggcggcccaggagaagcagttcccgccggcgctgctgagtttcttcatctacaacccgcgcttcgggccgcgcgaaggacaggaggaaaataagattttattttatcatccaaatgaggtagaaaagaatgagaagattagaaatgtcggattgtgtgaagctattgtacagtttacaaggacatttagcccatcaaaacctgcaaaatctttacatacacagaagaacagacagttcttcaatgaaccagaagaaaatttctggatggtcatggttgttcggaatcctataattgaaaaacagagtaaagatggaaaaccagttattgaatatcaagaggaggagttgttggacaaggtttatagctcggtgctgcggcagtgctacagcatgtacaagctttttaatggtacatttctgaaagccatggaagacggaggcgtcaagcttctgaaagaaagattagagaaattcttccatcggtatttgcaaacgctacatttgcagtcatgtgacctacttgacatttttggtggaatcagcttcttcccgttggataaaatgacttatttgaaaatccagtcctttattaatagaatggaggaaagcctgaatatagtcaaatacactgcttttctctataacgatcagctcatctggagtggattagaacaagatgacatgagaattttatacaaataccttaccacctccctttttccaaggcacatcgaacctgagttagcaggaagggattctccaataagagcagaaatgccaggaaatcttcaacactatggaagatttcttaccggacccttgaacctcaatgatccagatgcaaaatgcagattccccaaaatttttgtaaatacagatgacacttatgaagagctccatttaatcgtttataaggccatgagtgcggctgtgtgctttatgatcgacgcctctgtccacccaacgttggatttttgccgaagactggacagcatcgttgggccccagctcacagtgctggcctctgacatctgtgaacagtttaacatcaacaagaggatgtccgggtctgagaaagaaccccagtttaagtttatctacttcaaccacatgaatctcgccgagaagagcacagttcacatgaggaaaacgcccagcgtgtcgctcacttccgtgcacccggatttaatgaagattctcggtgacatcaacagtgactttaccagagtggatgaagatgaggagatcattgtgaaggccatgagtgattactgggttgttggaaagaagtctgatcggcgggagctctatgttattttgaatcaaaaaaatgcaaacctgattgaagtaaatgaagaggtcaagaaactttgtgcaacgcagttcaacaacatcttcttcttggattgacggatgacggctcaccgagagcatatctaaaaaacactctgcaaacatttggtcacatgcaagttagtggtcatatgacggactgcattcaggacaagggtaaagcaatacttgctttgaagaatcacatttcgactcggtctgctgatctgaggtttttagattttaaatatttatgtggaattaattaaaggtagttggctatatcgctatcatttcattcttttgacattatgtgaatattttactggaaaataagactaataaattgttaaaagttaaaaaaaagaatgccaaaaataaaaaaaaaaaataaagaataaaaacaaaaagagattaacactagacaccaaacaatatccccaaaaaagatctgcaccactgaaaataaaaccctcttgggggggccctctgcacaaaatgcctttatatggtgc

SEQ ID NO: 354533 - DNA, 2049 bp, Homo sapiens
tttaaaataaaatacatttataactggcaatgtttaaaaagagaaacaaactgagttccactgaaattaagagattttctcggtctctgggcgggccgtgggaggcttcctgaggtgggggccgggccaggatggctgcagcgcagcgacggccggggccgggagcgggccctgggcggcccaggagaagcagttcccgccggcgctgctgagtttcttcatctacaacccgcgcttcgggccgcgcgaaggacaggaggaaaataagattttattttatcatccaaatgaggtagaaaagaatgagaagattagaaatgtcggattgtgtgaagctattgtacagtttacaaggacatttagcccatcaaaacctgcaaaatctttacatacacagaagaacagacagttcttcaatgaaccagaagaaaatttctggatggtcatggttgttcggaatcctataattgaaaaacagagtaaagatggaaaaccagttattgaatatcaagaggaggagttgttggacaaggtttatagctcggtgctgcggcagtgctacagcatgtacaagctttttaatggtacatttctgaaagccatggaagacggaggcgtcaagcttctgaaagaaagattagagaaattcttccatcggtatttgcaaacgctacatttgcagtcatgtgacctacttgacatttttggtggaatcagcttcttcccgttggataaaatgacttatttgaaaatccagtcctttattaatagaatggaggaaagcctgaatatagtcaaatacactgcttttctctataacgatcagctcatctggagtggattagaacaagatgacatgagaattttatacaaataccttaccacctccctttttccaaggcacatcgaacctgagttagcaggaagggattctccaataagagcagaaatgccaggaaatcttcaacactatggaagatttcttaccggacccttgaacctcaatgatccagatgcaaaatgcagattccccaaaatttttgtaaatacagatgacacttatgaagagctccatttaatcgtttataaggccatgagtgcggctgtgtgctttatgatcgacgcctctgtccacccaacgttggatttttgccgaagactggacagcatcgttgggccccagctcacagtgctggcctctgacatctgtgaacagtttaacatcaacaagaggatgtccgggtctgagaaagaaccccagtttaagtttatctacttcaaccacatgaatctcgccgagaagagcacagttcacatgaggaaaacgcccagcgtgtcgctcacttccgtgcacccggatttaatgaagattctcggtgacatcaacagtgactttaccaggtgattccagccacttctccaatcaggcgtcccctttctaagacgagaaaagacacagaaaatcccttcaagccctttccatggggttcaagcgtgaaccaccttcatgggcgccgcttccaaacagacccgggagccctgaagtcaccggttccctcgcgcggcactccctgagccttttaaatgccacgtgcgcccgttccatttcctgttcttggtttggaacgcttattctcacagtctggccgtatgagtaacgaacgattgcattttgaccctcgtcttgcagagtggatgaagatgaggagatcattgtgaaggccatgagtgattactgggttgttggaaagaagtctgatcggcgggagctctatgttattttgaatcaaaaaaatgcaaacctgattgaagtaaatggtaagtaggatttggtatttcaggagaatttgagaagttgtcttttcattgcattaagaaacatggttaaaaaataggtaaatagaacaaatcatgactgttgagattctaagcaggtgcctctgctccacatttgatccattttctgttccttggaaaactatgacaagaccttcctgtagcacaggaaacttggcaatggccgaaagaaaattattttctacaattcta

SEQ ID NO: 354534 - DNA, 1340 bp, Homo sapiens
tttaaaataaaatacatttataactggcaatgtttaaaaagagaaacaaactgagttccactgaaattaagagattttctcggtctctgggcgggccgtgggaggcttcctgaggtgggggccgggccaggatggctgcagcgcagcgacggccggggccgggagcgggccctgggcggcccaggagaagcagttcccgccggcgctgctgagtttcttcatctacaacccgcgcttcgggccgcgcgaaggacaggaggaaaataagattttattttatcatccaaatgaggtagaaaagaatgagaagattagaaatgtcggattgtgtgaagctattgtacagtttacaaggacatttagcccatcaaaacctgcaaaatctttacatacacagaagaacagacagttcttcaatgaaccagaagaaaatttctggatggtcatggttgttcggaatcctataattgaaaaacagagtaaagatggaaaaccagttattgaatatcaagaggaggagttgttggacaaggtttatagctcggtgctgcggcagtgctacagcatgtacaagctttttaatggtacatttctgaaagccatggaagacggaggcgtcaagcttctgaaagaaagattagagaaattcttccatcggtatttgcaaacgctacatttgcagtcatgtgacctacttgacatttttggtggaatcagcttcttcccgttggataaaatgacttatttgaaaatccagtcctttattaatagaatggaggaaagcctgaatatagtcaaatacactgcttttctctataacgatcagctcatctggtaggtacaccccgaggcatggtattaaaagaagaaattaagataataaaaacagcagtgactggattgatgacaggttgtcaaacaggaacttgcagcggggaggatgggtaggaagcatcttcatagatattgtcaaaataaagcagtgattatttaaagcagaactagggtgatttgggttcaaatttccaagcagttcaacaacatcttcttcttggattgacggatgacggctcaccgagagcatatctaaaaaacactctgcaaacatttggtcacatgcaagttagtggtcatatgacggactgcattcaggacaagggtaaagcaatacttgctttgaagaatcacatttcgactcggtctgctgatctgaggtttttagattttaaatatttatgtggaattaattaaaggtagttggctatatcgctatcatttcattcttttgacattatgtgaatattttactggaaaataagactaataaattgttaaaagtt

SEQ ID NO: 354535 - DNA, 1095 bp, Homo sapiens
ggcagtatttgcacaatgatgagatcattcctgttcttcttcttattttaaataatagagacgtctcactgtgttgccatgctggtcttgaactcctgagctcaagtgatcctcccgcctcagcctctgaaaatactaggattacaattcctgtttttctaaaaccggtttttgttttgttttgtcattagcatgtgtgacacaagaggtcgacattgaacttagcgttttcaatagctaagatgaaatgtttctattcatgttgtgcttctgtttcctcatgtttcaggaggaaaataagattttattttatcatccaaatgaggtagaaaagaatgagaagaatcacatttcgactcggtctgctgatctgaggtttttagattttaaatatttatgtggaattaattaaaggtagttggctatatcgctatcatttcattcttttgacattatgtgaatattttactggaaaataagactaataaattgttaaaagtttttaaaattctggtttggtgttgagtctctctcctgctgcctatttatagattacactggccaccagctccgtgacccaggctggaatgcaatggctcactgcagcctcaacctcctgagctcaagcaatcctcccacctcagcctcccaagaagctagaaccacatgtacacaccaccacggtcggctgatgttttaattttgcagagatgggggggtctcactatgttgcccaggctggtctcgaactcccgtaatccagccatgtaggaaacctgagatgcagtgggccaaggggtatgttaaaacactgtgacgagttcagtgctaagaactgtaatgctcaggaaatcttacagcacgtgccatcctaagcctgtgtgtgtgtcctcgtgtctctctactttttcttcttcttgctggtgatggtcttgctggatggggacacggtcacatcctccttgggagggtccagtatgaggtgagaggatgacacgtctgccggctcctttagcactgtgatgtccacctcataagtcatgtctcttgggcctcttcctctctcaagatgaagatgttcagccttgcttccag

SEQ ID NO: 354536 - DNA, 2748 bp, Homo sapiens
tttaaaataaaatacatttataactggcaatgtttaaaaagagaaacaaactgagttccactgaaattaagagattttctcggtctctgggcgggccgtgggaggcttcctgaggtgggggccgggccaggatggctgcagcgcagcgacggccggggccgggagcgggccctgggcggcccaggagaagcagttcccgccggcgctgctgagtttcttcatctacaacccgcgcttcgggccgcgcgaaggacaggaggaaaataagattttattttatcatccaaatgaggtagaaaagaatgagaagattagaaatgtcggattgtgtgaagctattgtacagtttacaaggacatttagcccatcaaaacctgcaaaatctttacatacacagaagaacagacagttcttcaatgaaccagaagaaaatttctggatggtcatggttgttcggaatcctataattgaaaaacagagtaaagatggaaaaccagttattgaatatcaagaggaggagttgttggacaaggtttatagctcggtgctgcggcagtgctacagcatgtacaagctttttaatggtacatttctgaaagccatggaagacggaggcgtcaagcttctgaaagaaagattagagaaattcttccatcggtatttgcaaacgctacatttgcagtcatgtgacctacttgacatttttggtggaatcagcttcttcccgttggataaaatgacttatttgaaaatccagtcctttattaatagaatggaggaaagcctgaatatagtcaaatacactgcttttctctataacgatcagctcatctggagtggattagaacaagatgacatgagaattttatacaaataccttaccacctccctttttccaaggcacatcgaacctgagttagcaggaagggattctccaataagagcagaaatgccaggaaatcttcaacactatggaagatttcttaccggacccttgaacctcaatgatccagatgcaaaatgcagattccccaaaatttttgtaaatacagatgacacttatgaagagctccatttaatcgtttataaggccatgagtgcggctgtgtgctttatgatcgacgcctctgtccacccaacgttggatttttgccgaagactggacagcatcgttgggccccagctcacagtgctggcctctgacatctgtgaacagtttaacatcaacaagaggatgtccgggtctgagaaagaaccccagtttaagtttatctacttcaaccacatgaatctcgccgagaagagcacagttcacatgaggaaaacgcccagcgtgtcgctcacttccgtgcacccggatttaatgaagattctcggtgacatcaacagtgactttaccaggtgattccagccacttctccaatcaggcgtcccctttctaagacgagaaaagacacagaaaatcccttcaagccctttccatggggttcaagcgtgaaccaccttcatgggcgccgcttccaaacagacccgggagccctgaagtcaccggttccctcgcgcggcactccctgagccttttaaatgccacgtgcgcccgttccatttcctgttcttggtttggaacgcttattctcacagtctggccgtatgagtaacgaacgattgcattttgaccctcgtcttgcagagtggatgaagatgaggagatcattgtgaaggccatgagtgattactgggttgttggaaagaagtctgatcggcgggagctctatgttattttgaatcaaaaaaatgcaaacctgattgaagtaaatgaagaggtcaagaaactttgtgcaacgcagttcaacaacatcttcttcttggattgacggatgacggctcaccgagagcatatctaaaaaacactctgcaaacatttggtcacatgcaagttagtggtcatatgacggactgcattcaggacaagggtaaagcaatacttgctttgaagaatcacatttcgactcggtctgctgatctgaggtttttagattttaaatatttatgtggaattaattaaaggtagttggctatatcgctatcatttcattcttttgacattatgtgaatattttactggaaaataagactaataaattgttaaaagtttttaaaattctggtttggtgttgagtctctctcctgctgcctatttatagattacactggccaccagctccgtgacccaggctggaatgcaatggctcactgcagcctcaacctcctgagctcaagcaatcctcccacctcagcctcccaagaagctagaaccacatgtacacaccaccacggtcggctgatgttttaattttgcagagatgggggggtctcactatgttgcccaggctggtctcgaactcccgtaatccagccatgtaggaaacctgagatgcagtgggccaaggggtatgttaaaacactgtgacgagttcagtgctaagaactgtaatgctcaggaaatcttacagcacgtgccatcctaagcctgtgtgtgtgtcctcgtgtctctctactttttcttcttcttgctggtgatggtcttgctggatggggacacggtcacatcctccttgggagggtccagtatgaggtgagaggatgacacgtctgccggctcctttagcactgtgatgtccacctcataagtcatgtctcttgggcctcttcctctctcaagatgaagatgttcagccttgcttccag

SEQ ID NO: 354537 - DNA, 1403 bp, Homo sapiens
tttaaaataaaatacatttataactggcaatgtttaaaaagagaaacaaactgagttccactgaaattaagagattttctcggtctctgggcgggccgtgggaggcttcctgaggtgggggccgggccaggatggctgcagcgcagcgacggccggggccgggagcgggccctgggcggcccaggagaagcagttcccgccggcgctgctgagtttcttcatctacaacccgcgcttcgggccgcgcgaaggacaggaggaaaataagattttattttatcatccaaatgaggtagaaaagaatgagaagattagaaatgtcggattgtgtgaagctattgtacagtttacaaggacatttagcccatcaaaacctgcaaaatctttacatacacagaagaacagacagttcttcaatgaaccagaagaaaatttctggatggtcatggttgttcggaatcctataattgaaaaacagagtaaagatggaaaaccagttattgaatatcaagaggaggagttgttggacaaggtttatagctcggtgctgcggcagtgctacagcatgtacaagctttttaatggtacatttctgaaagccatggaagacggaggcgtcaagcttctgaaagaaagattagagaaattcttccatcggtatttgcaaacgctacatttgcagtcatgtgacctacttgacatttttggtggaatcagcttcttcccgttggataaaatgacttatttgaaaatccagtcctttattaatagaatggaggaaagcctgaatatagtcaaatacactgcttttctctataacgatcagctcatctggagtggattagaacaagatgacatgagaattttatacaaataccttaccacctccctttttccaaggcacatcgaacctgagttagcaggaagggattctccaataagagcagaaatgccaggaaatcttcaacactatggaagatttcttaccggacccttgaacctcaatgatccagatgcaaaatgcagattccccaaaatttttgtaaatacagatgacacttatgaagagctccatttaatcgtttataaggccatgagtgcggctgtgtgctttatgatcgacgcctctgtccacccaacgttggatttttgccgaagactggacagcatcgttgggccccagctcacagtgctggcctctgacatctgtgaacagtttaacatcaacaagaggatgtccgggtttgtactttgctttcggttcactttcaggcattgaacggcttttgaaatacacgtagttttcacttacaaatacgggtggtattaacagtcctgtgttctcgtggactgtagaggatggtgctacgtgccattcaggcctctgtctgaaagggtcccgg

SEQ ID NO: 354538 - DNA, 2197 bp, Homo sapiens
ggcccactccaatgggcggcgccggggcgacttgctgttcccggcggcccgtgcgtcggcggtggttgggtggtaagatggcggctgtgagtctgcggctcggcgacttggtgtgggggaaactcggccgatatcctccttggccaggaaagattgttaatccaccaaaggacttgaagaaacctcgcggaaagaaatgcttctttgtgaaattttttggaacagaagatcatgcctggatcaaagtggaacagctgaagccatatcatgctcataaagaggaaatgataaaaattaacaagggtaaacgattccagcaagcggtagatgctgtcgaagagttcctcaggagagccaaagggaaagaccagacgtcatcccacaattcttctgatgacaagaatcgacgtaattccagtgaggagagaagtaggccaaactcaggtgatgagaagcgcaaacttagcctgtctgaagggaaggtgaagaagaacatgggagaaggaaagaagagggtgtcttcaggctcttcagagagaggctccaaatcccctctgaaaagagcccaagagcaaagtccccggaagcggggtcggcccccaaaggatgagaaggatctcaccatcccggagtctagtaccgtgaaggggatgatggccggaccgatggccgcgtttaaatggcagccaaccgcaagcgagcctgttaaagatgcagatcctcatttccatcatttcctgctaagccaaacagagaagccagctgtctgttaccaggcaatcacgaagaagttgaaaatatgtgaagaggaaactggctccacctccatccaggcagctgacagcacagccgtgaatggcagcatcacacccacagacaaaaagataggatttttgggccttggtctcatgggaagtggaatcgtctccaacttgctaaaaatgggtcacacagtgactgtctggaaccgcactgcagagaaagagggggcccgtctgggaagaacccccgctgaagtcgtctcaacctgcgacatcactttcgcctgcgtgtcggatcccaaggcggccaaggacctggtgctgggccccagtggtgtgctgcaagggatccgccctgggaagtgctacgtggacatgtcaacagtggacgctgacaccgtcactgagctggcccaggtgattgtgtccaggggggggcgctttctggaagcccccgtctcagggaatcagcagctgtctaatgacgggatgttggtgatcttagcggctggagacaggggcttatatgaggactgcagcagctgcttccaggcgatggggaagacctccttcttcctaggtgaagtgggcaatgcagccaagatgatgctgatcgtgaacatggtccaagggagcttcatggccactattgccgaggggctgaccctggcccaggtgacaggccagtcccagcagacactcttggacatcctcaatcagggacagttggccagcatcttcctggaccagaagtgccaaaatatcctgcaaggaaactttaagcctgatttctacctgaaatacattcagaaggatctccgcttagccattgcgctgggtgatgcggtcaaccatccgactcccatggcagctgcagcaaatgaggtgtacaaaagagccaaggcgctggaccagtccgacaacgatatgtccgccgtgtaccgagcctacatacactaagctgtcgacaccccgccctcacccctccaatcccccctctgaccccctcttcctcacatggggtcgggggcctgggagttcattctggaccagcccacctatctccatttccttttatacagactttgagacttgccatcagcacagcacacagcagcacccttcccctgaggccggtggggaggggacaagtgtcagcaggattggcgtgtgggaaagctcttgagctgggcactggccccccggacgaggtggctgtgtgttcacacacacacacacacacacacacacacacacaggctctcgccccaggatagaagctgcccagaaactgctgcctggctttttttcttccgagcttgtcttatctcaaaccccttccagtcaaggaactagaatcagcaacgagagttggaagccttcccacagcttcccccagagcgaagaggctgtagtcatgtccccatcccccactg

SEQ ID NO: 354539 - DNA, 738 bp, Homo sapiens
cagaaagctgaggcaggagaatcgcttgaacccaggatgcagaggttgcagtgagctgagctcgcgccattgcactccagcctggaacagagcaagactgtctcaaaaaaaaaaaaaagggcagcaaggggactttgccctgggagactggccctgaaccatacacatcatacttttttctgtgacagtcaggggtttcaaaatgcctgtttacatcctgggacagctttagaccatggcataagagaagacccatgtgcatgacgcccctggctctgcaggtagattggccactgctgtttctggcagtctgaattcccctaccccaagctgtataagggagcgagccttgtgctgcatggaatcatcatcaccgtgaccctccctttccaccctgaactcatcagtctctctctgtttcaggataggatttttgggccttggtctcatgggaagtggaatcgtctccaacttgctaaaaatgggtcacacagtgactgtctggaaccgcactgcagagaaagtaagcattcaggggtggtgcctgttggatcggtggagtctggggtaaccctaagagtggacatctccccctgttgtctcagcgttctgcgtgcaatagaatagaagccaagcttttagtccaggcaggtagagatgtagatgcctaaacttaggatgttattataaaacctaaacatttgcctggcgcggtggctcactcctgtaatcccagca

SEQ ID NO: 354540 - DNA, 690 bp, Homo sapiens
ggcccactccaatgggcggcgccggggcgacttgctgttcccggcggcccgtgcgtcggcggtggttgggtggtaagatggcggctgtgagtctgcggctcggcgacttggtgtgggggaaactcggccgatatcctccttggccaggaaagattgttaatccaccaaaggacttgaagaaacctcgcggaaagaaatgcttctttgtgaaattttttggaacagaagatcatgcctggatcaaagtggaacagctgaagccatatcatgctcataaagaggaaatgataaaaattaacaagggtaaacgattccagcaagcggtagatgctgtcgaagagttcctcaggagagccaaagggaaagaccaggtgagagacacaatgttcactttctaccaatgccagactggtgatttttgcatagcaactaacagattaaatgtcacccaaacgcaaacctttgttcttctgaaatgctactggagaaagctacttcagttctaaggtgtcagcgttttgcttatcagtttgaaactccatgcagctaacctttctggagtaggttgttgcttttaggaaaattgcttggacccaggagaaatatctcagcatttgagtctagcacaggccatttcttcctttcatagcacacagattaggagcatagcctctgaaatacatatactgc

SEQ ID NO: 354541 - DNA, 2332 bp, Homo sapiens
ggcccactccaatgggcggcgccggggcgacttgctgttcccggcggcccgtgcgtcggcggtggttgggtggtaagatggcggctgtgagtctgcggctcggcgacttggtgtgggggaaactcggccgatatcctccttggccaggaaagattgttaatccaccaaaggacttgaagaaacctcgcggaaagaaatgcttctttgtgaaattttttggaacagaagatcatgcctggatcaaagtggaacagctgaagccatatcatgctcataaagaggaaatgataaaaattaacaagggtaaacgattccagcaagcggtagatgctgtcgaagagttcctcaggagagccaaagggaaagaccagacgtcatcccacaattcttctgatgacaagaatcgacgtaattccagtgaggagagaagtaggccaaactcaggtgatgagaagcgcaaacttagcctgtctgaagggaaggtgaagaagaacatgggagaaggaaagaagagggtgtcttcaggctcttcagagagaggctccaaatcccctctgaaaagagcccaagagcaaagtccccggaagcggggtcggcccccaaaggatgagaaggatctcaccatcccggagtctagtaccgtgaaggggatgatggccggaccgatggccgcgtttaaatggcagccaaccgcaagcgagcctgttaaagatgcagatcctcatttccatcatttcctgctaagccaaacagagaagccagctgtctgttaccaggcaatcacgaagaagttgaaaatatgtgaagaggaaactggctccacctccatccaggcagctgacagcacagccgtgaatggcagcatcacacccacagacaaaaagataggatttttgggccttggtctcatgggaagtggaatcgtctccaacttgctaaaaatgggtcacacagtgactgtctggaaccgcactgcagagaaatgtgatttgttcatccaggagggggcccgtctgggaagaacccccgctgaagtcgtctcaacctgcgacatcactttcgcctgcgtgtcggatcccaaggcggccaaggacctgatagaaatcaggaaatgagccaaaacagcagcaggattctgatctgaggtctgtagggctcctgagcatctgcccgggagcctgggctattgcttctcccttgtgtccccacagctggtgctgggccccagtggtgtgctgcaagggatccgccctgggaagtgctacgtggacatgtcaacagtggacgctgacaccgtcactgagctggcccaggtgattgtgtccaggggggggcgctttctggaagcccccgtctcagggaatcagcagctgtctaatgacgggatgttggtgatcttagcggctggagacaggggcttatatgaggactgcagcagctgcttccaggcgatggggaagacctccttcttcctaggtgaagtgggcaatgcagccaagatgatgctgatcgtgaacatggtccaagggagcttcatggccactattgccgaggggctgaccctggcccaggtgacaggccagtcccagcagacactcttggacatcctcaatcagggacagttggccagcatcttcctggaccagaagtgccaaaatatcctgcaaggaaactttaagcctgatttctacctgaaatacattcagaaggatctccgcttagccattgcgctgggtgatgcggtcaaccatccgactcccatggcagctgcagcaaatgaggtgtacaaaagagccaaggcgctggaccagtccgacaacgatatgtccgccgtgtaccgagcctacatacactaagctgtcgacaccccgccctcacccctccaatcccccctctgaccccctcttcctcacatggggtcgggggcctgggagttcattctggaccagcccacctatctccatttccttttatacagactttgagacttgccatcagcacagcacacagcagcacccttcccctgaggccggtggggaggggacaagtgtcagcaggattggcgtgtgggaaagctcttgagctgggcactggccccccggacgaggtggctgtgtgttcacacacacacacacacacacacacacacacacaggctctcgccccaggatagaagctgcccagaaactgctgcctggctttttttcttccgagcttgtcttatctcaaaccccttccagtcaaggaactagaatcagcaacgagagttggaagccttcccacagcttcccccagagcgaagaggctgtagtcatgtccccatcccccactg

SEQ ID NO: 354542 - DNA, 2164 bp, Homo sapiens
ggcccactccaatgggcggcgccggggcgacttgctgttcccggcggcccgtgcgtcggcggtggttgggtggtaagatggcggctgtgagtctgcggctcggcgacttggtgtgggggaaactcggccgatatcctccttggccaggaaagattgttaatccaccaaaggacttgaagaaacctcgcggaaagaaatgcttctttgtgaaattttttggaacagaagatcatgcctggatcaaagtggaacagctgaagccatatcatgctcataaagaggaaatgataaaaattaacaagggtaaacgattccagcaagcggtagatgctgtcgaagagttcctcaggagagccaaagggaaagaccagacgtcatcccacaattcttctgatgacaagaatcgacgtaattccagtgaggagagaagtaggccaaactcaggtgatgagaagcgcaaacttagcctgtctgaagggaaggtgaagaagaacatgggagaaggaaagaagagggtgtcttcaggctcttcagagagaggctccaaatcccctctgaaaagagcccaagagcaaagtccccggaagcggggtcggcccccaaaggatgagaaggatctcaccatcccggagtctagtaccgtgaaggggatgatggccggaccgatggccgcgtttaaatggcagccaaccgcaagcgagcctgttaaagatgcagatcctcatttccatcatttcctgctaagccaaacagagaaggaaactggctccacctccatccaggcagctgacagcacagccgtgaatggcagcatcacacccacagacaaaaagataggatttttgggccttggtctcatgggaagtggaatcgtctccaacttgctaaaaatgggtcacacagtgactgtctggaaccgcactgcagagaaatgtgatttgttcatccaggagggggcccgtctgggaagaacccccgctgaagtcgtctcaacctgcgacatcactttcgcctgcgtgtcggatcccaaggcggccaaggacctggtgctgggccccagtggtgtgctgcaagggatccgccctgggaagtgctacgtggacatgtcaacagtggacgctgacaccgtcactgagctggcccaggtgattgtgtccaggggggggcgctttctggaagcccccgtctcagggaatcagcagctgtctaatgacgggatgttggtgatcttagcggctggagacaggggcttatatgaggactgcagcagctgcttccaggcgatggggaagacctccttcttcctaggtgaagtgggcaatgcagccaagatgatgctgatcgtgaacatggtccaagggagcttcatggccactattgccgaggggctgaccctggcccaggtgacaggccagtcccagcagacactcttggacatcctcaatcagggacagttggccagcatcttcctggaccagaagtgccaaaatatcctgcaaggaaactttaagcctgatttctacctgaaatacattcagaaggatctccgcttagccattgcgctgggtgatgcggtcaaccatccgactcccatggcagctgcagcaaatgaggtgtacaaaagagccaaggcgctggaccagtccgacaacgatatgtccgccgtgtaccgagcctacatacactaagctgtcgacaccccgccctcacccctccaatcccccctctgaccccctcttcctcacatggggtcgggggcctgggagttcattctggaccagcccacctatctccatttccttttatacagactttgagacttgccatcagcacagcacacagcagcacccttcccctgaggccggtggggaggggacaagtgtcagcaggattggcgtgtgggaaagctcttgagctgggcactggccccccggacgaggtggctgtgtgttcacacacacacacacacacacacacacacacacaggctctcgccccaggatagaagctgcccagaaactgctgcctggctttttttcttccgagcttgtcttatctcaaaccccttccagtcaaggaactagaatcagcaacgagagttggaagccttcccacagcttcccccagagcgaagaggctgtagtcatgtccccatcccccactg

SEQ ID NO: 354543 - DNA, 2146 bp, Homo sapiens
ggcccactccaatgggcggcgccggggcgacttgctgttcccggcggcccgtgcgtcggcggtggttgggtggtaagatggcggctgtgagtctgcggctcggcgacttggtgtgggggaaactcggccgatatcctccttggccaggaaagattgttaatccaccaaaggacttgaagaaacctcgcggaaagaaatgcttctttgtgaaattttttggaacagaagatcatgcctggatcaaagtggaacagctgaagccatatcatgctcataaagaggaaatgataaaaattaacaagggtaaacgattccagcaagcggtagatgctgtcgaagagttcctcaggagagccaaagggaaagaccagacgtcatcccacaattcttctgatgacaagaatcgacgtaattccagtgaggagagaagtaggccaaactcaggtgatgagaagcgcaaacttagcctgtctgaagggaaggtgaagaagaacatgggagaaggaaagaagagggtgtcttcaggctcttcagagagaggctccaaatcccctctgaaaagagcccaagagcaaagtccccggaagcggggtcggcccccaaaggatgagaaggatctcaccatcccggagtctagtaccgtgaaggggatgatggccggaccgatggccgcgtttaaatggcagccaaccgcaagcgagcctgttaaagatgcagatcctcatttccatcatttcctgctaagccaaacagagaagccagctgtctgttaccaggcaatcacgaagaagttgaaaatatgtgaagaggaaactggctccacctccatccaggcagctgacagcacagccgtgaatggcagcatcacacccacagacaaaaagataggatttttgggccttggtctcatgggaagtggaatcgtctccaacttgctaaaaatgggtcacacagtgactgtctggaaccgcactgcagagaaagagggggcccgtctgggaagaacccccgctgaagtcgtctcaacctgcgacatcactttcgcctgcgtgtcggatcccaaggcggccaaggacctgatagaaatcaggaaatgagccaaaacagcagcaggattctgatctgaggtgattgtgtccaggggggggcgctttctggaagcccccgtctcagggaatcagcagctgtctaatgacgggatgttggtgatcttagcggctggagacaggggcttatatgaggactgcagcagctgcttccaggcgatggggaagacctccttcttcctaggtgaagtgggcaatgcagccaagatgatgctgatcgtgaacatggtccaagggagcttcatggccactattgccgaggggctgaccctggcccaggtgacaggccagtcccagcagacactcttggacatcctcaatcagggacagttggccagcatcttcctggaccagaagtgccaaaatatcctgcaaggaaactttaagcctgatttctacctgaaatacattcagaaggatctccgcttagccattgcgctgggtgatgcggtcaaccatccgactcccatggcagctgcagcaaatgaggtgtacaaaagagccaaggcgctggaccagtccgacaacgatatgtccgccgtgtaccgagcctacatacactaagctgtcgacaccccgccctcacccctccaatcccccctctgaccccctcttcctcacatggggtcgggggcctgggagttcattctggaccagcccacctatctccatttccttttatacagactttgagacttgccatcagcacagcacacagcagcacccttcccctgaggccggtggggaggggacaagtgtcagcaggattggcgtgtgggaaagctcttgagctgggcactggccccccggacgaggtggctgtgtgttcacacacacacacacacacacacacacacacacaggctctcgccccaggatagaagctgcccagaaactgctgcctggctttttttcttccgagcttgtcttatctcaaaccccttccagtcaaggaactagaatcagcaacgagagttggaagccttcccacagcttcccccagagcgaagaggctgtagtcatgtccccatcccccactg

SEQ ID NO: 354544 - DNA, 1755 bp, Homo sapiens
cagaaagctgaggcaggagaatcgcttgaacccaggatgcagaggttgcagtgagctgagctcgcgccattgcactccagcctggaacagagcaagactgtctcaaaaaaaaaaaaaagggcagcaaggggactttgccctgggagactggccctgaaccatacacatcatacttttttctgtgacagtcaggggtttcaaaatgcctgtttacatcctgggacagctttagaccatggcataagagaagacccatgtgcatgacgcccctggctctgcaggtagattggccactgctgtttctggcagtctgaattcccctaccccaagctgtataagggagcgagccttgtgctgcatggaatcatcatcaccgtgaccctccctttccaccctgaactcatcagtctctctctgtttcaggataggatttttgggccttggtctcatgggaagtggaatcgtctccaacttgctaaaaatgggtcacacagtgactgtctggaaccgcactgcagagaaatgtgatttgttcatccaggagggggcccgtctgggaagaacccccgctgaagtcgtctcaacctgcgacatcactttcgcctgcgtgtcggatcccaaggcggccaaggacctggtgctgggccccagtggtgtgctgcaagggatccgccctgggaagtgctacgtggacatgtcaacagtggacgctgacaccgtcactgagctggcccaggtgattgtgtccaggggggggcgctttctggaagcccccgtctcagggaatcagcagctgtctaatgacgggatgttggtgatcttagcggctggagacaggggcttatatgaggactgcagcagctgcttccaggcgatggggaagacctccttcttcctaggtgaagtgggcaatgcagccaagatgatgctgatcgtgaacatggtccaagggagcttcatggccactattgccgaggggctgaccctggcccaggtgacaggccagtcccagcagacactcttggacatcctcaatcagggacagttggccagcatcttcctggaccagaagtgccaaaatatcctgcaaggaaactttaagcctgatttctacctgaaatacattcagaaggatctccgcttagccattgcgctgggtgatgcggtcaaccatccgactcccatggcagctgcagcaaatgaggtgtacaaaagagccaaggcgctggaccagtccgacaacgatatgtccgccgtgtaccgagcctacatacactaagctgtcgacaccccgccctcacccctccaatcccccctctgaccccctcttcctcacatggggtcgggggcctgggagttcattctggaccagcccacctatctccatttccttttatacagactttgagacttgccatcagcacagcacacagcagcacccttcccctgaggccggtggggaggggacaagtgtcagcaggattggcgtgtgggaaagctcttgagctgggcactggccccccggacgaggtggctgtgtgttcacacacacacacacacacacacacacacacacaggctctcgccccaggatagaagctgcccagaaactgctgcctggctttttttcttccgagcttgtcttatctcaaaccccttccagtcaaggaactagaatcagcaacgagagttggaagccttcccacagcttcccccagagcgaagaggctgtagtcatgtccccatcccccactg

SEQ ID NO: 354545 - DNA, 2071 bp, Homo sapiens
ggcccactccaatgggcggcgccggggcgacttgctgttcccggcggcccgtgcgtcggcggtggttgggtggtaagatggcggctgtgagtctgcggctcggcgacttggtgtgggggaaactcggccgatatcctccttggccaggaaagattgttaatccaccaaaggacttgaagaaacctcgcggaaagaaatgcttctttgtgaaattttttggaacagaagatcatgcctggatcaaagtggaacagctgaagccatatcatgctcataaagaggaaatgataaaaattaacaagggtaaacgattccagcaagcggtagatgctgtcgaagagttcctcaggagagccaaagggaaagaccaggatctcaccatcccggagtctagtaccgtgaaggggatgatggccggaccgatggccgcgtttaaatggcagccaaccgcaagcgagcctgttaaagatgcagatcctcatttccatcatttcctgctaagccaaacagagaagccagctgtctgttaccaggcaatcacgaagaagttgaaaatatgtgaagaggaaactggctccacctccatccaggcagctgacagcacagccgtgaatggcagcatcacacccacagacaaaaagataggatttttgggccttggtctcatgggaagtggaatcgtctccaacttgctaaaaatgggtcacacagtgactgtctggaaccgcactgcagagaaagagggggcccgtctgggaagaacccccgctgaagtcgtctcaacctgcgacatcactttcgcctgcgtgtcggatcccaaggcggccaaggacctgatagaaatcaggaaatgagccaaaacagcagcaggattctgatctgaggtctgtagggctcctgagcatctgcccgggagcctgggctattgcttctcccttgtgtccccacagctggtgctgggccccagtggtgtgctgcaagggatccgccctgggaagtgctacgtggacatgtcaacagtggacgctgacaccgtcactgagctggcccaggtgattgtgtccaggggggggcgctttctggaagcccccgtctcagggaatcagcagctgtctaatgacgggatgttggtgatcttagcggctggagacaggggcttatatgaggactgcagcagctgcttccaggcgatggggaagacctccttcttcctaggtgaagtgggcaatgcagccaagatgatgctgatcgtgaacatggtccaagggagcttcatggccactattgccgaggggctgaccctggcccaggtgacaggccagtcccagcagacactcttggacatcctcaatcagggacagttggccagcatcttcctggaccagaagtgccaaaatatcctgcaaggaaactttaagcctgatttctacctgaaatacattcagaaggatctccgcttagccattgcgctgggtgatgcggtcaaccatccgactcccatggcagctgcagcaaatgaggtgtacaaaagagccaaggcgctggaccagtccgacaacgatatgtccgccgtgtaccgagcctacatacactaagctgtcgacaccccgccctcacccctccaatcccccctctgaccccctcttcctcacatggggtcgggggcctgggagttcattctggaccagcccacctatctccatttccttttatacagactttgagacttgccatcagcacagcacacagcagcacccttcccctgaggccggtggggaggggacaagtgtcagcaggattggcgtgtgggaaagctcttgagctgggcactggccccccggacgaggtggctgtgtgttcacacacacacacacacacacacacacacacacaggctctcgccccaggatagaagctgcccagaaactgctgcctggctttttttcttccgagcttgtcttatctcaaaccccttccagtcaaggaactagaatcagcaacgagagttggaagccttcccacagcttcccccagagcgaagaggctgtagtcatgtccccatcccccactg

SEQ ID NO: 354546 - DNA, 536 bp, Homo sapiens
tggtgatcttagcggctggagacaggggcttatatgaggactgcagcagctgcttccaggcgatggggaagacctccttcttcctaggtaacacgcctgcacctgtcaggcctggagcctggggccacatctcctctgtttcacactgatgacagcgtcagtcccacacggcctttctgccggggaccctggggaaggtttcctttcacctgcatagtcagtgcgtggaaggaggaagagccagtctgtcgggggcaggtgaagggggcctcccctggagagaggtgggtctgagcagaggtgagggtggacagagaagccctgtctgtggcattcttgggctgtgaccgtgagtctttaccctgggcaggtgaagtgggcaatgcagccaagatgatgctgatcgtgaacatggtccaagggagcttcatggccactattgccgaggggctgaccctggcccaggtgacaggccagtcccagcagacactcttggacatcctcaatcagggacagttggccagcatcttcctgga

SEQ ID NO: 354547 - DNA, 832 bp, Homo sapiens
ggcccactccaatgggcggcgccggggcgacttgctgttcccggcggcccgtgcgtcggcggtggttgggtggtaagatggcggctgtgagtctgcggctcggcgacttggtgtgggggaaactcggccgatatcctccttggccaggaaagattgttaatccaccaaaggacttgaagaaacctcgcggaaagaaatgcttctttgtgaaattttttggaacagaagatcatgcctggatcaaagtggaacagctgaagccatatcatgctcataaagaggaaatgataaaaattaacaagggtaaacgattccagcaagcggtagatgctgtcgaagagttcctcaggagagccaaagggaaagaccaggatctcaccatcccggagtctagtaccgtgaaggggatgatggccggaccgatggccgcgtttaaatggcagccaaccgcaagcgagcctgttaaagatgcagatcctcatttccatcatttcctgctaagccaaacagagaagcatctgggaacaaagtcagtcgccagtcagtgttgtgtggaagccagaacatcgttctcaatggcaagaccattgtgatgaatgactgtattatccgaggggatctggcaaatgtaagagttggacgtcattgtgttgtgaaaagtcgtagtgtcataaggccaccattcaagaagttcagcaaaggtgttgcattctttcctttacatattggagaccatgtctttattgaggaacgatcgtgtggctcaccgcaggcacagattggttcctatgttcatgttgggaagaactgtgtgatcgggcgcgcatgtgtg

SEQ ID NO: 354548 - DNA, 2215 bp, Homo sapiens
ggcccactccaatgggcggcgccggggcgacttgctgttcccggcggcccgtgcgtcggcggtggttgggtggtaagatggcggctgtgagtctgcggctcggcgacttggtgtgggggaaactcggccgatatcctccttggccaggaaagattgttaatccaccaaaggacttgaagaaacctcgcggaaagaaatgcttctttgtgaaattttttggaacagaagatcatgcctggatcaaagtggaacagctgaagccatatcatgctcataaagaggaaatgataaaaattaacaagggtaaacgattccagcaagcggtagatgctgtcgaagagttcctcaggagagccaaagggaaagaccagacgtcatcccacaattcttctgatgacaagaatcgacgtaattccagtgaggagagaagtaggccaaactcaggtgatgagaagcgcaaacttagcctgtctgaagggaaggtgaagaagaacatgggagaaggaaagaagagggtgtcttcaggctcttcagagagaggctccaaatcccctctgaaaagagcccaagagcaaagtccccggaagcggggtcggcccccaaaggatgagaaggatctcaccatcccggagtctagtaccgtgaaggggatgatggccggaccgatggccgcgtttaaatggcagccaaccgcaagcgagcctgttaaagatgcagatcctcatttccatcatttcctgctaagccaaacagagaagccagctgtctgttaccaggcaatcacgaagaagttgaaaatatgtgaagaggaaactggctccacctccatccaggcagctgacagcacagccgtgaatggcagcatcacacccacagacaaaaagataggatttttgggccttggtctcatgggaagtggaatcgtctccaacttgctaaaaatgggtcacacagtgactgtctggaaccgcactgcagagaaatgtgatttgttcatccaggagggggcccgtctgggaagaacccccgctgaagtcgtctcaacctgcgacatcactttcgcctgcgtgtcggatcccaaggcggccaaggacctggtgctgggccccagtggtgtgctgcaagggatccgccctgggaagtgctacgtggacatgtcaacagtggacgctgacaccgtcactgagctggcccaggtgattgtgtccaggggggggcgctttctggaagcccccgtctcagggaatcagcagctgtctaatgacgggatgttggtgatcttagcggctggagacaggggcttatatgaggactgcagcagctgcttccaggcgatggggaagacctccttcttcctaggtgaagtgggcaatgcagccaagatgatgctgatcgtgaacatggtccaagggagcttcatggccactattgccgaggggctgaccctggcccaggtgacaggccagtcccagcagacactcttggacatcctcaatcagggacagttggccagcatcttcctggaccagaagtgccaaaatatcctgcaaggaaactttaagcctgatttctacctgaaatacattcagaaggatctccgcttagccattgcgctgggtgatgcggtcaaccatccgactcccatggcagctgcagcaaatgaggtgtacaaaagagccaaggcgctggaccagtccgacaacgatatgtccgccgtgtaccgagcctacatacactaagctgtcgacaccccgccctcacccctccaatcccccctctgaccccctcttcctcacatggggtcgggggcctgggagttcattctggaccagcccacctatctccatttccttttatacagactttgagacttgccatcagcacagcacacagcagcacccttcccctgaggccggtggggaggggacaagtgtcagcaggattggcgtgtgggaaagctcttgagctgggcactggccccccggacgaggtggctgtgtgttcacacacacacacacacacacacacacacacacaggctctcgccccaggatagaagctgcccagaaactgctgcctggctttttttcttccgagcttgtcttatctcaaaccccttccagtcaaggaactagaatcagcaacgagagttggaagccttcccacagcttcccccagagcgaagaggctgtagtcatgtccccatcccccactg

SEQ ID NO: 354549 - DNA, 2164 bp, Homo sapiens
ggcccactccaatgggcggcgccggggcgacttgctgttcccggcggcccgtgcgtcggcggtggttgggtggtaagatggcggctgtgagtctgcggctcggcgacttggtgtgggggaaactcggccgatatcctccttggccaggaaagattgttaatccaccaaaggacttgaagaaacctcgcggaaagaaatgcttctttgtgaaattttttggaacagaagatcatgcctggatcaaagtggaacagctgaagccatatcatgctcataaagaggaaatgataaaaattaacaagggtaaacgattccagcaagcggtagatgctgtcgaagagttcctcaggagagccaaagggaaagaccagacgtcatcccacaattcttctgatgacaagaatcgacgtaattccagtgaggagagaagtaggccaaactcaggtgatgagaagcgcaaacttagcctgtctgaagggaaggtgaagaagaacatgggagaaggaaagaagagggtgtcttcaggctcttcagagagaggctccaaatcccctctgaaaagagcccaagagcaaagtccccggaagcggggtcggcccccaaaggatgagaaggatctcaccatcccggagtctagtaccgtgaaggggatgatggccggaccgatggccgcgtttaaatggcagccaaccgcaagcgagcctgttaaagatgcagatcctcatttccatcatttcctgctaagccaaacagagaagccagctgtctgttaccaggcaatcacgaagaagttgaaaatatgtgaagaggaaactggctccacctccatccaggcagctgacagcacagccgtgaatggcagcatcacacccacagacaaaaagataggatttttgggccttggtctcatgggaagtggaatcgtctccaacttgctaaaaatgggtcacacagtgactgtctggaaccgcactgcagagaaatgtgatttgttcatccaggagggggcccgtctgggaagaacccccgctgaagtcgtctcaacctgcgacatcactttcgcctgcgtgtcggatcccaaggcggccaaggacctgatagaaatcaggaaatgagccaaaacagcagcaggattctgatctgaggtgattgtgtccaggggggggcgctttctggaagcccccgtctcagggaatcagcagctgtctaatgacgggatgttggtgatcttagcggctggagacaggggcttatatgaggactgcagcagctgcttccaggcgatggggaagacctccttcttcctaggtgaagtgggcaatgcagccaagatgatgctgatcgtgaacatggtccaagggagcttcatggccactattgccgaggggctgaccctggcccaggtgacaggccagtcccagcagacactcttggacatcctcaatcagggacagttggccagcatcttcctggaccagaagtgccaaaatatcctgcaaggaaactttaagcctgatttctacctgaaatacattcagaaggatctccgcttagccattgcgctgggtgatgcggtcaaccatccgactcccatggcagctgcagcaaatgaggtgtacaaaagagccaaggcgctggaccagtccgacaacgatatgtccgccgtgtaccgagcctacatacactaagctgtcgacaccccgccctcacccctccaatcccccctctgaccccctcttcctcacatggggtcgggggcctgggagttcattctggaccagcccacctatctccatttccttttatacagactttgagacttgccatcagcacagcacacagcagcacccttcccctgaggccggtggggaggggacaagtgtcagcaggattggcgtgtgggaaagctcttgagctgggcactggccccccggacgaggtggctgtgtgttcacacacacacacacacacacacacacacacacaggctctcgccccaggatagaagctgcccagaaactgctgcctggctttttttcttccgagcttgtcttatctcaaaccccttccagtcaaggaactagaatcagcaacgagagttggaagccttcccacagcttcccccagagcgaagaggctgtagtcatgtccccatcccccactg

SEQ ID NO: 354550 - DNA, 2011 bp, Homo sapiens
taaatctgcttctcccaatgtctgggacgacagcagaatctatttctagggtcattgtgaggagaccacacagagtgcctgtagcagcacatggcacctgtaaatgatggtggcgatggcggcagcagctgtggtggtagttatcattattattattaaactttcagacgtcatcccacaattcttctgatgacaagaatcgacgtaattccagtgaggagagaagtaggccaaactcaggtgatgagaagcgcaaacttagcctgtctgaagggaaggtgaagaagaacatgggagaaggaaagaagagggtgtcttcaggctcttcagagagaggctccaaatcccctctgaaaagagcccaagagcaaagtccccggaagcggggtcggcccccaaaggatgagaaggatctcaccatcccggagtctagtaccgtgaaggggatgatggccggaccgatggccgcgtttaaatggcagccaaccgcaagcgagcctgttaaagatgcagatcctcatttccatcatttcctgctaagccaaacagagaagccagctgtctgttaccaggcaatcacgaagaagttgaaaatatgtgaagaggaaactggctccacctccatccaggcagctgacagcacagccgtgaatggcagcatcacacccacagacaaaaagataggatttttgggccttggtctcatgggaagtggaatcgtctccaacttgctaaaaatgggtcacacagtgactgtctggaaccgcactgcagagaaatgtgatttgttcatccaggagggggcccgtctgggaagaacccccgctgaagtcgtctcaacctgcgacatcactttcgcctgcgtgtcggatcccaaggcggccaaggacctggtgctgggccccagtggtgtgctgcaagggatccgccctgggaagtgctacgtggacatgtcaacagtggacgctgacaccgtcactgagctggcccaggtgattgtgtccaggggggggcgctttctggaagcccccgtctcagggaatcagcagctgtctaatgacgggatgttggtgatcttagcggctggagacaggggcttatatgaggactgcagcagctgcttccaggcgatggggaagacctccttcttcctaggtgaagtgggcaatgcagccaagatgatgctgatcgtgaacatggtccaagggagcttcatggccactattgccgaggggctgaccctggcccaggtgacaggccagtcccagcagacactcttggacatcctcaatcagggacagttggccagcatcttcctggaccagaagtgccaaaatatcctgcaaggaaactttaagcctgatttctacctgaaatacattcagaaggatctccgcttagccattgcgctgggtgatgcggtcaaccatccgactcccatggcagctgcagcaaatgaggtgtacaaaagagccaaggcgctggaccagtccgacaacgatatgtccgccgtgtaccgagcctacatacactaagctgtcgacaccccgccctcacccctccaatcccccctctgaccccctcttcctcacatggggtcgggggcctgggagttcattctggaccagcccacctatctccatttccttttatacagactttgagacttgccatcagcacagcacacagcagcacccttcccctgaggccggtggggaggggacaagtgtcagcaggattggcgtgtgggaaagctcttgagctgggcactggccccccggacgaggtggctgtgtgttcacacacacacacacacacacacacacacacacaggctctcgccccaggatagaagctgcccagaaactgctgcctggctttttttcttccgagcttgtcttatctcaaaccccttccagtcaaggaactagaatcagcaacgagagttggaagccttcccacagcttcccccagagcgaagaggctgtagtcatgtccccatcccccactg

SEQ ID NO: 354551 - DNA, 1737 bp, Homo sapiens
cagaaagctgaggcaggagaatcgcttgaacccaggatgcagaggttgcagtgagctgagctcgcgccattgcactccagcctggaacagagcaagactgtctcaaaaaaaaaaaaaagggcagcaaggggactttgccctgggagactggccctgaaccatacacatcatacttttttctgtgacagtcaggggtttcaaaatgcctgtttacatcctgggacagctttagaccatggcataagagaagacccatgtgcatgacgcccctggctctgcaggtagattggccactgctgtttctggcagtctgaattcccctaccccaagctgtataagggagcgagccttgtgctgcatggaatcatcatcaccgtgaccctccctttccaccctgaactcatcagtctctctctgtttcaggataggatttttgggccttggtctcatgggaagtggaatcgtctccaacttgctaaaaatgggtcacacagtgactgtctggaaccgcactgcagagaaagagggggcccgtctgggaagaacccccgctgaagtcgtctcaacctgcgacatcactttcgcctgcgtgtcggatcccaaggcggccaaggacctggtgctgggccccagtggtgtgctgcaagggatccgccctgggaagtgctacgtggacatgtcaacagtggacgctgacaccgtcactgagctggcccaggtgattgtgtccaggggggggcgctttctggaagcccccgtctcagggaatcagcagctgtctaatgacgggatgttggtgatcttagcggctggagacaggggcttatatgaggactgcagcagctgcttccaggcgatggggaagacctccttcttcctaggtgaagtgggcaatgcagccaagatgatgctgatcgtgaacatggtccaagggagcttcatggccactattgccgaggggctgaccctggcccaggtgacaggccagtcccagcagacactcttggacatcctcaatcagggacagttggccagcatcttcctggaccagaagtgccaaaatatcctgcaaggaaactttaagcctgatttctacctgaaatacattcagaaggatctccgcttagccattgcgctgggtgatgcggtcaaccatccgactcccatggcagctgcagcaaatgaggtgtacaaaagagccaaggcgctggaccagtccgacaacgatatgtccgccgtgtaccgagcctacatacactaagctgtcgacaccccgccctcacccctccaatcccccctctgaccccctcttcctcacatggggtcgggggcctgggagttcattctggaccagcccacctatctccatttccttttatacagactttgagacttgccatcagcacagcacacagcagcacccttcccctgaggccggtggggaggggacaagtgtcagcaggattggcgtgtgggaaagctcttgagctgggcactggccccccggacgaggtggctgtgtgttcacacacacacacacacacacacacacacacacaggctctcgccccaggatagaagctgcccagaaactgctgcctggctttttttcttccgagcttgtcttatctcaaaccccttccagtcaaggaactagaatcagcaacgagagttggaagccttcccacagcttcccccagagcgaagaggctgtagtcatgtccccatcccccactg

SEQ ID NO: 354552 - DNA, 1198 bp, Homo sapiens
ggcccactccaatgggcggcgccggggcgacttgctgttcccggcggcccgtgcgtcggcggtggttgggtggtaagatggcggctgtgagtctgcggctcggcgacttggtgtgggggaaactcggccgatatcctccttggccaggaaagattgttaatccaccaaaggacttgaagaaacctcgcggaaagaaatgcttctttgtgaaattttttggaacagaagatcatgcctggatcaaagtggaacagctgaagccatatcatgctcataaagaggaaatgataaaaattaacaagggtaaacgattccagcaagcggtagatgctgtcgaagagttcctcaggagagccaaagggaaagaccagacgtcatcccacaattcttctgatgacaagaatcgacgtaattccagtgaggagagaagtaggccaaactcaggtgatgagaagcgcaaacttagcctgtctgaagggaaggtgaagaagaacatgggagaaggaaagaagagggtgtcttcaggctcttcagagagaggctccaaatcccctctgaaaagagcccaagagcaaagtccccggaagcggggtcggcccccaaaggatgagaaggatctcaccatcccggagtctagtaccgtgaaggggatgatggccggaccgatggccgcgtttaaatggcagccaaccgcaagcgagcctgttaaagatgcagatcctcatttccatcatttcctgctaagccaaacagagaagccagctgtctgttaccaggcaatcacgaagaagttgaaaatatgtgaagaggaaactggctccacctccatccaggcagctgacagcacagccgtgaatggcagcatcacacccacagacaaaaagataggatttttgggccttggtctcatgggaagtggaatcgtctccaacttgctaaaaatgggtcacacagtgactgtctggaaccgcactgcagagaaagtaagcattcaggggtggtgcctgttggatcggtggagtctggggtaaccctaagagtggacatctccccctgttgtctcagcgttctgcgtgcaatagaatagaagccaagcttttagtccaggcaggtagagatgtagatgcctaaacttaggatgttattataaaacctaaacatttgcctggcgcggtggctcactcctgtaatcccagca

SEQ ID NO: 354553 - DNA, 751 bp, Homo sapiens
actcactttctgacttaggccacaggtcgttttaccatgtctggacgtggcaagcagggcggcaaggctcgcgccaaggccaaaacccgctcctctagagctgggctccaatttcctgtaggacgagtgcaccgcctgctccgcaagggcaactacgctgagcgggtcggggccggcgcgccggtttacctggcggcggtgctggagtacctaactgccgagatcctggagctggcgggcaacgcagcccgcgacaacaaaaagacccgcatcatcccgcgccacttgcagctggccatccgcaacgacgaggagctcaacaagctgcttggtaaagttaccatcgctcagggcggtgttctgcctaacatccaggccgtactgctccccaagaagactgagagccaccacaaagctaagggcaagtaagggctgaactttaaaaatgtaaacttacaagacaaaaggctcttttcagagccacccaccatttctacggaagaactgagcactctgttctccaaacctatcagaaatttgtggccgagttcaagcactgaggccattactttcctattgggtaaaataaaagtattgaatcaggcctagtaaatactatccaactgctaccttataacatgaaggaacctccttaattgtcccctccccacaaactgtcctgggtctttaaaaaacttggggccgggcgcggtggtttatgcgtccttagcattttgggaaactgaggcag

SEQ ID NO: 354554 - DNA, 1793 bp, Homo sapiens
acgccgtgcacgtgcgcacggcgacggccggatggctgcgtggggctgtgtggctgcgctcggcgcggcgcgtgggctttgctggcgggcggcgcgcgcggctgcggggctccagggccgccccgcccgcaggtgctatgctgtgggccccgctcagagcccacccacctttgggttcctgttggacatcgatggagtgcttgtgcggggccacagagtgatccctgctgctctgaaagccttccgaaggctggtgaactcccaggggcagctgcgggtgcccgtggtttttgttacaaatgctggtaacatcttacaacacagcaaagcccaggagctgtcagccctgctggggtgcgaggtggatgcagaccaagttatcctctctcacagccccatgaagctcttctccgagtaccatgagaagcggatgctggtgtctggacaggggcccgtgatggaaaatgcccagggactgggcttccgaaatgtcgtcaccgtggatgagctgcggatggcctttcctctgcttgacatggtggacctggagcggcggctaaagaccacgcccctcccgaggaatgacttcccccgcattgaaggggtgctcctcctaggggagccggtccgctgggagaccagcctgcagctgatcatggatgtcctcctcagcaatgggagccctggggctggcctggcaacacccccctacccccacctccccgtcctagccagcaacatggatctcctgtggatggctgaagccaagatgcccaggtttggacatggcacctttctgctgtgcctggaaaccatttaccagaaagtgacgggcaaggagctgagatacgagggcctgatgggcaaacccagcatcctcacttaccagtatgccgaggacctgatcaggcgacaggcggagaggcggggctgggccgcccccatccggaagctctatgctgtgggtgataaccctatgtctgacgtatacggcgccaacctgttccaccagtacctgcagaaggcaacgcatgatggggcgccagaactaggggccgggggcacacggcagcaacagccctcagcaagccagagctgcatctccatcctggtgtgtacaggcgtctacaatcccaggaacccacagtccacggagcctgtccttggaggaggggagcctccattccacgggcaccgagacttatgcttcagtccagggctcatggaggcctcccacgtggtgaatgacgtgaatgaggctgtgcagctggtcttccgcaaggagggctgggctttggagtgagggcagtgcggtggaggtgagggggtgagcctggacctgtgggcgagtcccattggctgggctctggcctgatcactgggctcaggtcagggcttggttcccttgccacccttcttgctgccccatgagtgtggcattactggtcacttggaagaagacagtgactctttttccctgctgggtagcattttgtatggaacggttggaattttctgggcccagttcccacgtgcctttcgtggcagtctaacctcaggccattctcttcccctgtgtgcctcagtgtccttctcatttcagtagggacttctgaaatgggggaggcagtgtggaatactgtggatgtctgtgcagagcctttgccggcactgaaggcatgcagcctgtcggcagagtgtcttaacaccagatgctactttttactgtattgtagtttattgcccggagatgtggggctttttttttaaataaaataatcataataaatgtt

SEQ ID NO: 354555 - DNA, 2219 bp, Homo sapiens
acgccgtgcacgtgcgcacggcgacggccggatggctgcgtggggctgtgtggctgcgctcggcgcggcgcgtgggctttgctggcgggcggcgcgcgcggctgcggggctccagggccgccccgcccgcaggtgctatgctgtgggccccgctcagagcccacccacctttgggttcctgttggacatcgatggagtgcttgtgcggggccacagagtgatccctgctgctctgaaagccttccgaaggctggtgaactcccaggggcagctgcgggtgcccgtggtttttgttacaaatgctggtaacatcttacaacacagcaaagcccaggagctgtcagccctgctggggtgcgaggtggatgcagaccaagttatcctctctcacagccccatgaagctcttctccgagtaccatgagaagcggatgctggtgtctggacaggggcccgtgatggaaaatgcccagggactgggcttccgaaatgtcgtcaccgtggatgagctgcggatggcctttcctctgcttgacatggtggacctggagcggcggctaaagaccacgcccctcccgaggaatgacttcccccgcattgaaggggtgctcctcctaggggagccggtccgctgggagaccagcctgcagctgatcatggatgtcctcctcagcaatgggagccctggggctggcctggcaacacccccctacccccacctccccgtcctagccagcaacatggatctcctgtggatggctgaagccaagatgcccaggtttggacatggcacctttctgctgtgcctggaaaccatttaccagaaagtgacgggcaaggagctgagatacgagggcctgatgggcaaacccagcatcctcacttaccagtatgccgaggacctgatcaggcgacaggcggagaggcggggctgggccgcccccatccggaagctctatgctgtgggtgataaccctatgtctgacgtatacggcgccaacctgttccaccagtacctgcagaaggcaacgcatgatggggcgccagaactaggggccgggggcacacggcagcaacagccctcagcaagccagagctgcatctccatcctggtgtgtacaggcgtctacaatcccaggaacccacagtccacggagcctgtccttggaggaggggagcctccattccacgggcaccgagacttatgcttcagtccagggctcatggaggcctcccacgtggtgaatgacgtgaatgaggctgtgcagctggtcttccgcaaggagggctgggctttggagtgagggcagtgcggtggaggtgagggggtgagcctggacctgtgggcgagtcccattggctgggctctggcctgatcactgggctcaggtcagggcttggttcccttgccacccttcttgctgccccatgagtgtggcattactggtcacttggaagaagacagtgactctttttccctgctgggtagcattttgtatggaacggttggaattttctgggcccagttcccacgtgcctttcgtggcagtctaacctcaggccattctcttcccctgtgtgcctcagtgtccttctcatttcagtagggacttctgaaatgggggaggcagtgtggaatactgtggatgtctgtgcagagcctttgccggcactgaaggcatgcagcctgtcggcagagtgtcttaacaccagatgctactttttactgtattgtagtttattgcccggagatgtggggctttttttttaaataaaataatcataataaatgttaaaaaaaaaacaaacaaagaaaacaaagaaaagaaaaaaaaaaaaaaaacaaaacaacagaaacaaaagaacaacaagacaacaaaaaagagggggcgcgcgcgccgccccaagaggctccccccgcgggggggcccccactactcaccgctaacacccccacttatgttgtgacaaaaagaagaggggcgccccccacaaagcagaagagagagatccgctacttataataaaaagaagaaaagaccgaggggcgaccccgcgtattataaaaaaaaaccgaggacgagaggcagggaagaagaaaacacgacgcacaaaagcaggagcaaaaacatattgataagagagaaaacaaccaacatcacacgcgggagggggaggacaaaacaactactgggagacaaaaaaactacaccagcagaa

SEQ ID NO: 354556 - DNA, 1812 bp, Homo sapiens
acgccgtgcacgtgcgcacggcgacggccggatggctgcgtggggctgtgtggctgcgctcggcgcggcgcgtgggctttgctggcgggcggcgcgcgcggctgcggggctccagggccgccccgcccgcaggtgctatgctgtgggccccgctcagagcccacccacctttgggttcctgttggacatcgatggagtgcttgtgcggggccacagagtgatccctgctgctctgaaagccttccgaaggctggtgaactcccaggggcagctgcgggtgcccgtggtttttgttacaaatgctggtaacatcttacaacacagcaaagcccaggagctgtcagccctgctggggtgcgaggtggatgcagaccaagttatcctctctcacagccccatgaagctcttctccgagtaccatgagaagcggatgctggtgtctggacaggggcccgtgatggaaaatgcccagggactgggcttccgaaatgtcgtcaccgtggatgagctgcggatggcctttcctctgcttgacatggtggacctggagcggcggctaaagaccacgcccctcccgaggaatgacttcccccgcattgaaggggtgctcctcctaggggagccggtccgctgggagaccagcctgcagctgatcatggatgtcctcctcagcaatgggagccctggggctggcctggcaacacccccctacccccacctccccgtcctagccagcaacatggatctcctgtggatggctgaagccaagatgcccaggtttggacatggcacctttctgctgtgcctggaaaccatttaccagaaagtgacgggcaaggagctgagatacgagggcctgatgggcaaacccagcatcctcacttaccagtatgccgaggacctgatcaggcgacaggcggagaggcggggctgggccgcccccatccggaagctctatgctgtggggtgtggctgcccctgccagtgataaccctatgtctgacgtatacggcgccaacctgttccaccagtacctgcagaaggcaacgcatgatggggcgccagaactaggggccgggggcacacggcagcaacagccctcagcaagccagagctgcatctccatcctggtgtgtacaggcgtctacaatcccaggaacccacagtccacggagcctgtccttggaggaggggagcctccattccacgggcaccgagacttatgcttcagtccagggctcatggaggcctcccacgtggtgaatgacgtgaatgaggctgtgcagctggtcttccgcaaggagggctgggctttggagtgagggcagtgcggtggaggtgagggggtgagcctggacctgtgggcgagtcccattggctgggctctggcctgatcactgggctcaggtcagggcttggttcccttgccacccttcttgctgccccatgagtgtggcattactggtcacttggaagaagacagtgactctttttccctgctgggtagcattttgtatggaacggttggaattttctgggcccagttcccacgtgcctttcgtggcagtctaacctcaggccattctcttcccctgtgtgcctcagtgtccttctcatttcagtagggacttctgaaatgggggaggcagtgtggaatactgtggatgtctgtgcagagcctttgccggcactgaaggcatgcagcctgtcggcagagtgtcttaacaccagatgctactttttactgtattgtagtttattgcccggagatgtggggctttttttttaaataaaataatcataataaatgtt

SEQ ID NO: 354557 - DNA, 1589 bp, Homo sapiens
acgccgtgcacgtgcgcacggcgacggccggatggctgcgtggggctgtgtggctgcgctcggcgcggcgcgtgggctttgctggcgggcggcgcgcgcggctgcggggctccagggccgccccgcccgcaggtgctatgctgtgggccccgctcaggtggatgcagaccaagttatcctctctcacagccccatgaagctcttctccgagtaccatgagaagcggatgctggtgtctggacaggggcccgtgatggaaaatgcccagggactgggcttccgaaatgtcgtcaccgtggatgagctgcggatggcctttcctctgcttgacatggtggacctggagcggcggctaaagaccacgcccctcccgaggaatgacttcccccgcattgaaggggtgctcctcctaggggagccggtccgctgggagaccagcctgcagctgatcatggatgtcctcctcagcaatgggagccctggggctggcctggcaacacccccctacccccacctccccgtcctagccagcaacatggatctcctgtggatggctgaagccaagatgcccaggtttggacatggcacctttctgctgtgcctggaaaccatttaccagaaagtgacgggcaaggagctgagatacgagggcctgatgggcaaacccagcatcctcacttaccagtatgccgaggacctgatcaggcgacaggcggagaggcggggctgggccgcccccatccggaagctctatgctgtgggtgataaccctatgtctgacgtatacggcgccaacctgttccaccagtacctgcagaaggcaacgcatgatggggcgccagaactaggggccgggggcacacggcagcaacagccctcagcaagccagagctgcatctccatcctggtgtgtacaggcgtctacaatcccaggaacccacagtccacggagcctgtccttggaggaggggagcctccattccacgggcaccgagacttatgcttcagtccagggctcatggaggcctcccacgtggtgaatgacgtgaatgaggctgtgcagctggtcttccgcaaggagggctgggctttggagtgagggcagtgcggtggaggtgagggggtgagcctggacctgtgggcgagtcccattggctgggctctggcctgatcactgggctcaggtcagggcttggttcccttgccacccttcttgctgccccatgagtgtggcattactggtcacttggaagaagacagtgactctttttccctgctgggtagcattttgtatggaacggttggaattttctgggcccagttcccacgtgcctttcgtggcagtctaacctcaggccattctcttcccctgtgtgcctcagtgtccttctcatttcagtagggacttctgaaatgggggaggcagtgtggaatactgtggatgtctgtgcagagcctttgccggcactgaaggcatgcagcctgtcggcagagtgtcttaacaccagatgctactttttactgtattgtagtttattgcccggagatgtggggctttttttttaaataaaataatcataataaatgtt

SEQ ID NO: 354558 - DNA, 1845 bp, Homo sapiens
acgccgtgcacgtgcgcacggcgacggccggatggctgcgtggggctgtgtggctgcgctcggcgcggcgcgtgggctttgctggcgggcggcgcgcgcggctgcggggctccagggccgccccgcccgcaggtgctatgctgtgggccccgctcagagcccacccacctttgggttcctgttggacatcgatggagtgcttgtgcggggccacagagtgatccctgctgctctgaaagccttccgaaggctggtgaactcccaggggcagctgcgggtgcccgtggtttttgttacaaatgctggtaacatcttacaacacagcaaagcccaggagctgtcagccctgctggggtgcgaggtggatgcagaccaagttatcctctctcacagccccatgaagctcttctccgagtaccatgagaagcggatgctggtgtctggacaggggcccgtgatggaaaatgcccagggaaaggcatcttccccaagaactgtccagcattacttcctgagcttgctccagactgggcttccgaaatgtcgtcaccgtggatgagctgcggatggcctttcctctgcttgacatggtggacctggagcggcggctaaagaccacgcccctcccgaggaatgacttcccccgcattgaaggggtgctcctcctaggggagccggtccgctgggagaccagcctgcagctgatcatggatgtcctcctcagcaatgggagccctggggctggcctggcaacacccccctacccccacctccccgtcctagccagcaacatggatctcctgtggatggctgaagccaagatgcccaggtttggacatggcacctttctgctgtgcctggaaaccatttaccagaaagtgacgggcaaggagctgagatacgagggcctgatgggcaaacccagcatcctcacttaccagtatgccgaggacctgatcaggcgacaggcggagaggcggggctgggccgcccccatccggaagctctatgctgtgggtgataaccctatgtctgacgtatacggcgccaacctgttccaccagtacctgcagaaggcaacgcatgatggggcgccagaactaggggccgggggcacacggcagcaacagccctcagcaagccagagctgcatctccatcctggtgtgtacaggcgtctacaatcccaggaacccacagtccacggagcctgtccttggaggaggggagcctccattccacgggcaccgagacttatgcttcagtccagggctcatggaggcctcccacgtggtgaatgacgtgaatgaggctgtgcagctggtcttccgcaaggagggctgggctttggagtgagggcagtgcggtggaggtgagggggtgagcctggacctgtgggcgagtcccattggctgggctctggcctgatcactgggctcaggtcagggcttggttcccttgccacccttcttgctgccccatgagtgtggcattactggtcacttggaagaagacagtgactctttttccctgctgggtagcattttgtatggaacggttggaattttctgggcccagttcccacgtgcctttcgtggcagtctaacctcaggccattctcttcccctgtgtgcctcagtgtccttctcatttcagtagggacttctgaaatgggggaggcagtgtggaatactgtggatgtctgtgcagagcctttgccggcactgaaggcatgcagcctgtcggcagagtgtcttaacaccagatgctactttttactgtattgtagtttattgcccggagatgtggggctttttttttaaataaaataatcataataaatgtt

SEQ ID NO: 354559 - DNA, 1468 bp, Homo sapiens
tccttgactgtagcttagtcacatggccacgcctcgctggcagggaggcaagcgaaggtctttttcacacctagtggcaatatggtcagctgaaaatggacaccagcaaagaaggggagaagcgcaaccgtagtctgcctcagctctacagcaggatttaagctctggagtcagactgagttgtaatcctagctctgccctcttgaacaagttacttaatcttgctgtgccttggtttcctcgttttacaaatagcgtcatctcatagagtttttctgagagggaaatgtgaaatgctgcctccagtgcctgcacagtgtctgctacatgtcagctcttaccctggggaaaaggctggtctgtgtgtttgctgcttagacagtggcagtcgtgttctctagaagagcctggagatcaggaagactgaactgctgcgtgctcgtttctggcaggtttggacatggcacctttctgctgtgcctggaaaccatttaccagaaagtgacgggcaaggagctgagatacgagggcctgatgggcaaacccagcatcctcacttaccagtatgccgaggacctgatcaggcgacaggcggagaggcggggctgggccgcccccatccggaagctctatgctgtgggtgataaccctatgtctgacgtatacggcgccaacctgttccaccagtacctgcagaaggcaacgcatgatggggcgccagaactaggggccgggggcacacggcagcaacagccctcagcaagccagagctgcatctccatcctggtgtgtacaggcgtctacaatcccaggaacccacagtccacggagcctgtccttggaggaggggagcctccattccacgggcaccgagacttatgcttcagtccagggctcatggaggcctcccacgtggtgaatgacgtgaatgaggctgtgcagctggtcttccgcaaggagggctgggctttggagtgagggcagtgcggtggaggtgagggggtgagcctggacctgtgggcgagtcccattggctgggctctggcctgatcactgggctcaggtcagggcttggttcccttgccacccttcttgctgccccatgagtgtggcattactggtcacttggaagaagacagtgactctttttccctgctgggtagcattttgtatggaacggttggaattttctgggcccagttcccacgtgcctttcgtggcagtctaacctcaggccattctcttcccctgtgtgcctcagtgtccttctcatttcagtagggacttctgaaatgggggaggcagtgtggaatactgtggatgtctgtgcagagcctttgccggcactgaaggcatgcagcctgtcggcagagtgtcttaacaccagatgctactttttactgtattgtagtttattgcccggagatgtggggctttttttttaaataaaataatcataataaatgtt

SEQ ID NO: 354560 - DNA, 1618 bp, Homo sapiens
acgccgtgcacgtgcgcacggcgacggccggatggctgcgtggggctgtgtggctgcgctcggcgcggcgcgtgggctttgctggcgggcggcgcgcgcggctgcggggctccagggccgccccgcccgcaggtgctatgctgtgggccccgctcagagcccacccacctttgggttcctgttggacatcgatggagtgcttgtgcggggccacagagtgatccctgctgctctgaaagccttccgaaggctggtgaactcccaggggcagctgcgggtgcccgtggtttttgttacaaatgctggtaacatcttacaacacagcaaagcccaggagctgtcagccctgctggggtgcgaggtggatgcagaccaagttatcctctctcacagccccatgaagctcttctccgagtaccatgagaagcggatgctggtgtctggacaggggcccgtgatggaaaatgcccagggactgggcttccgaaatgtcgtcaccgtggatgagctgcggatggcctttcctctgcttgacatggtggacctggagcggcggctaaagaccacgcccctcccgaggaatgacttcccccgcattgaaggtttggacatggcacctttctgctgtgcctggaaaccatttaccagaaagtgacgggcaaggagctgagatacgagggcctgatgggcaaacccagcatcctcacttaccagtatgccgaggacctgatcaggcgacaggcggagaggcggggctgggccgcccccatccggaagctctatgctgtgggtgataaccctatgtctgacgtatacggcgccaacctgttccaccagtacctgcagaaggcaacgcatgatggggcgccagaactaggggccgggggcacacggcagcaacagccctcagcaagccagagctgcatctccatcctggtgtgtacaggcgtctacaatcccaggaacccacagtccacggagcctgtccttggaggaggggagcctccattccacgggcaccgagacttatgcttcagtccagggctcatggaggcctcccacgtggtgaatgacgtgaatgaggctgtgcagctggtcttccgcaaggagggctgggctttggagtgagggcagtgcggtggaggtgagggggtgagcctggacctgtgggcgagtcccattggctgggctctggcctgatcactgggctcaggtcagggcttggttcccttgccacccttcttgctgccccatgagtgtggcattactggtcacttggaagaagacagtgactctttttccctgctgggtagcattttgtatggaacggttggaattttctgggcccagttcccacgtgcctttcgtggcagtctaacctcaggccattctcttcccctgtgtgcctcagtgtccttctcatttcagtagggacttctgaaatgggggaggcagtgtggaatactgtggatgtctgtgcagagcctttgccggcactgaaggcatgcagcctgtcggcagagtgtcttaacaccagatgctactttttactgtattgtagtttattgcccggagatgtggggctttttttttaaataaaataatcataataaatgtt

SEQ ID NO: 354561 - DNA, 825 bp, Homo sapiens
tcgacttccactaagtgaggatgcctccaggtgccaggggagtgggtcgtgtcaggttggcgagaggcttcccaatggcccaaggggccgggggcacacggcagcaacagccctcagcaagccagagctgcatctccatcctggtgtgtacaggcgtctacaatcccaggaacccacagtccacggagcctgtccttggaggaggggagcctccattccacgggcaccgagacttatgcttcagtccagggctcatggaggcctcccacgtggtgaatgacgtgaatgaggctgtgcagctggtcttccgcaaggagggctgggctttggagtgagggcagtgcggtggaggtgagggggtgagcctggacctgtgggcgagtcccattggctgggctctggcctgatcactgggctcaggtcagggcttggttcccttgccacccttcttgctgccccatgagtgtggcattactggtcacttggaagaagacagtgactctttttccctgctgggtagcattttgtatggaacggttggaattttctgggcccagttcccacgtgcctttcgtggcagtctaacctcaggccattctcttcccctgtgtgcctcagtgtccttctcatttcagtagggacttctgaaatgggggaggcagtgtggaatactgtggatgtctgtgcagagcctttgccggcactgaaggcatgcagcctgtcggcagagtgtcttaacaccagatgctactttttactgtattgtagtttattgcccggagatgtggggctttttttttaaataaaataatcataataaatgtt

SEQ ID NO: 354562 - DNA, 1143 bp, Homo sapiens
acgccgtgcacgtgcgcacggcgacggccggatggctgcgtggggctgtgtggctgcgctcggcgcggcgcgtgggctttgctggcgggcggcgcgcgcggctgcggggctccagggccgccccgcccgcaggtgctatgctgtgggccccgctcaggtgaggacgtccgggttctggccgagccactcgccactcagggccggaggcggggcggggagccgcggggaaggaggggcggccgggctggtatcccagcctcctgggaactgcctggaccgtcgtcgcgcccgagtgcatcgcgttcttgctggagggcggatgcgccctgccttcctctgactcgctggcggcctcggaaacgctactcccgcgggagagcgctcgtgggacggcctgggccaggctgcttgtcagcccctgcgcttcccggcagtttccgcgtccctgttttccctgcgcgtcttctgatttccaccatgaggacgtttgggtcgtgattttcatctgcatgtggaggaaactgggccgcgcgccgggagccgcgcctgcgggtgctccgcccccaagtgcctgtgggtttggtgcgggccttgggttcagttcagctcgctgtgacctcgactgagcgctggaggctccgcgggcgggagcaggagggctggagccggcgcctgctgtgtgcccggcgcggtagtgatgtgtgagcctccccgcaacttctgagaaggtgtgaccttgtgtggtcaggaagccgaagcttgacgagttttcaagtacgttttctcaggtcctgcagctgggagacggcacaggacactaaaccaggttggtcagatccacggctctcacgctcccttgggccgttttgccttttctggaaaaaggaatcactttgtcttctaaacgcacaagtaatattttacattaacatacggatttcacagtaatccttgcattttttttttttagacggcatctctgtcaccaggttggagtgcagtggcgcaatctctgctcactgcaacctccgcctcccgggctgaggcaggagaagcccttgaacctgggagggaggttgcggtgagcggagatcgggccattgcactccagcccgggcaacagatcctgactcttatcaaaaa

SEQ ID NO: 354563 - DNA, 447 bp, Homo sapiens
atttttatgatttttaaatatggagcagctaaggttcaaagcagctgagtgacttggccagtgtcacatagctagacgtgaccaaggtggaagtttgaaattagaatatgttgataaaaggacttacaaactgtcaggatataaatataaggaaatatcgcccttatttataactgttgtattggctctagcatctctgcagagtcccgaaatgtctccaagtgactcttccggtagagcagaaaaagaagaatgcaggatgacagagtttgagcacgagctttagaattgaatcctgtgcagtctgttagcggcttcacttaaggcaatttacatagctttccaagctcagtttccccatctatgtaatggatctattacttgtaatcccagctactcgggaggctgaggcaggagaagcccttgaacctgggagggaggttgcgg

SEQ ID NO: 354564 - DNA, 1813 bp, Homo sapiens
acgccgtgcacgtgcgcacggcgacggccggatggctgcgtggggctgtgtggctgcgctcggcgcggcgcgtgggctttgctggcgggcggcgcgcgcggctgcggggctccagggccgccccgcccgcaggtgctatgctgtgggccccgctcagagcccacccacctttgggttcctgttggacatcgatggagtgcttgtgcggggccacagagtgatccctgctgctctgaaagccttccgaaggctggtgaactcccaggggcagctgcgggtgcccgtggtttttgttacaaatgctggtaacatcttacaacacagcaaagcccaggagctgtcagccctgctggggtgcgaggtggatgcagaccaagttatcctctctcacagccccatgaagctcttctccgagtaccatgagaagcggatgctggtgtctggacaggggcccgtgatggaaaatgcccagggactgggcttccgaaatgtcgtcaccgtggatgagctgcggatggcctttcctctgcttgacatggtggacctggagcggcggctaaagaccacgcccctcccgaggaatgacttcccccgcattgaaggggtgctcctcctaggggagccggtccgctgggagaccagcctgcagctgatcatggatgtcctcctcagcaatgggagccctggggctggcctggcaacacccccctacccccacctccccgtcctagccagcaacatggatctcctgtggatggctgaagccaagatgcccaggtttggacatggcacctttctgctgtgcctggaaaccatttaccagaaagtgacgggcaaggagctgagatacgagggcctgatgggcaaacccagcatcctcacttaccagtatgccgaggacctgatcaggcgacaggcggagaggcggggctgggccgcccccatccggaagctctatgctgtgggtgataaccctatgtctgacgtatacggcgccaacctgttccaccagtacctgcagaaggcaacgcatgatggggcgccagaactaggggccgggggcacacggcagcaacagccctcagcaagccagagctgcatctccatcctggtgtgtacaggcgtctacaatcccaggaacccacagtccacggagcctgtccttggaggaggggagcctccattccacgggcaccgagacttatgcttcagtccagggctcatggaggcctcccacgtggtgaatgacgtgaatgaggctgtgcagctggtcttccgcaaggagggctgggctttggagtgagggcagtgcggtggaggtgagggggtgagcctggacctgtgggcgagtcccattggctgggctctggcctgatcactgggctcaggtcagggcttggttcccttgccacccttcttgctgccccatgagtgtggcattactggtcacttggaagaagacagtgactctttttccctgctgggtagcattttgtatggaacggttggaattttctgggcccagttcccacgtgcctttcgtggcagtctaacctcaggccattctcttcccctgtgtgcctcagtgtccttctcatttcagtagggacttctgaaatgggggaggcagtgtggaatactgtggatgtctgtgcagagcctttgccggcactgaaggcatgcagcctgtcggcagagtgtcttaacaccagatgctactttttactgtattgtagtttattgcccggagatgtggggctttttttttaaataaaataatcataataaatgttcatgatgctgactcttgtga

SEQ ID NO: 354565 - DNA, 1735 bp, Homo sapiens
ctggtggaccagctggctcctaaagaggagaggggactaaatcatgtatgcttggttctttcttcccagcttctctcagagcccacccacctttgggttcctgttggacatcgatggagtgcttgtgcggggccacagagtgatccctgctgctctgaaagccttccgaaggctggtgaactcccaggggcagctgcgggtgcccgtggtttttgttacaaatgctggtaacatcttacaacacagcaaagcccaggagctgtcagccctgctggggtgcgaggtggatgcagaccaagttatcctctctcacagccccatgaagctcttctccgagtaccatgagaagcggatgctggtgtctggacaggggcccgtgatggaaaatgcccagggactgggcttccgaaatgtcgtcaccgtggatgagctgcggatggcctttcctctgcttgacatggtggacctggagcggcggctaaagaccacgcccctcccgaggaatgacttcccccgcattgaaggggtgctcctcctaggggagccggtccgctgggagaccagcctgcagctgatcatggatgtcctcctcagcaatgggagccctggggctggcctggcaacacccccctacccccacctccccgtcctagccagcaacatggatctcctgtggatggctgaagccaagatgcccaggtttggacatggcacctttctgctgtgcctggaaaccatttaccagaaagtgacgggcaaggagctgagatacgagggcctgatgggcaaacccagcatcctcacttaccagtatgccgaggacctgatcaggcgacaggcggagaggcggggctgggccgcccccatccggaagctctatgctgtgggtgataaccctatgtctgacgtatacggcgccaacctgttccaccagtacctgcagaaggcaacgcatgatggggcgccagaactaggggccgggggcacacggcagcaacagccctcagcaagccagagctgcatctccatcctggtgtgtacaggcgtctacaatcccaggaacccacagtccacggagcctgtccttggaggaggggagcctccattccacgggcaccgagacttatgcttcagtccagggctcatggaggcctcccacgtggtgaatgacgtgaatgaggctgtgcagctggtcttccgcaaggagggctgggctttggagtgagggcagtgcggtggaggtgagggggtgagcctggacctgtgggcgagtcccattggctgggctctggcctgatcactgggctcaggtcagggcttggttcccttgccacccttcttgctgccccatgagtgtggcattactggtcacttggaagaagacagtgactctttttccctgctgggtagcattttgtatggaacggttggaattttctgggcccagttcccacgtgcctttcgtggcagtctaacctcaggccattctcttcccctgtgtgcctcagtgtccttctcatttcagtagggacttctgaaatgggggaggcagtgtggaatactgtggatgtctgtgcagagcctttgccggcactgaaggcatgcagcctgtcggcagagtgtcttaacaccagatgctactttttactgtattgtagtttattgcccggagatgtggggctttttttttaaataaaataatcataataaatgttcatgatgctgactcttgtga

SEQ ID NO: 354566 - DNA, 2462 bp, Homo sapiens
acgccgtgcacgtgcgcacggcgacggccggatggctgcgtggggctgtgtggctgcgctcggcgcggcgcgtgggctttgctggcgggcggcgcgcgcggctgcggggctccagggccgccccgcccgcaggtgctatgctgtgggccccgctcaggtgaggacgtccgggttctggccgagccactcgccactcagggccggaggcggggcggggagccgcggggaaggaggggcggccgggctggtatcccagcctcctgggaactgcctggaccgtcgtcgcgcccgagtgcatcgcgttcttgctggagggcggatgcgccctgccttcctctgactcgctggcggcctcggaaacgctactcccgcgggagagcgctcgtgggacggcctgggccaggctgcttgtcagcccctgcgcttcccggcagtttccgcgtccctgttttccctgcgcgtcttctgatttccaccatgaggacgtttgggtcgtgattttcatctgcatgtggaggaaactgggccgcgcgccgggagccgcgcctgcgggtgctccgcccccaagtgcctgtgggtttggtgcgggccttgggttcagttcagctcgctgtgacctcgactgagcgctggaggctccgcgggcgggagcaggagggctggagccggcgcctgctgtgtgcccggcgcggtagtgatgtgtgagcctccccgcaacttctgagaaggtgtgaccttgtgtggtcaggaagccgaagcttgacgagttttcaagtacgttttctcaggtcctgcagctgggagacggcacaggacactaaaccagagcccacccacctttgggttcctgttggacatcgatggagtgcttgtgcggggccacagagtgatccctgctgctctgaaagccttccgaaggctggtgaactcccaggggcagctgcgggtgcccgtggtttttgttacaaatgctggtaacatcttacaacacagcaaagcccaggagctgtcagccctgctggggtgcgaggtggatgcagaccaagttatcctctctcacagccccatgaagctcttctccgagtaccatgagaagcggatgctggtgtctggacaggggcccgtgatggaaaatgcccagggactgggcttccgaaatgtcgtcaccgtggatgagctgcggatggcctttcctctgcttgacatggtggacctggagcggcggctaaagaccacgcccctcccgaggaatgacttcccccgcattgaaggggtgctcctcctaggggagccggtccgctgggagaccagcctgcagctgatcatggatgtcctcctcagcaatgggagccctggggctggcctggcaacacccccctacccccacctccccgtcctagccagcaacatggatctcctgtggatggctgaagccaagatgcccaggtttggacatggcacctttctgctgtgcctggaaaccatttaccagaaagtgacgggcaaggagctgagatacgagggcctgatgggcaaacccagcatcctcacttaccagtatgccgaggacctgatcaggcgacaggcggagaggcggggctgggccgcccccatccggaagctctatgctgtgggtgataaccctatgtctgacgtatacggcgccaacctgttccaccagtacctgcagaaggcaacgcatgatggggcgccagaactaggggccgggggcacacggcagcaacagccctcagcaagccagagctgcatctccatcctggtgtgtacaggcgtctacaatcccaggaacccacagtccacggagcctgtccttggaggaggggagcctccattccacgggcaccgagacttatgcttcagtccagggctcatggaggcctcccacgtggtgaatgacgtgaatgaggctgtgcagctggtcttccgcaaggagggctgggctttggagtgagggcagtgcggtggaggtgagggggtgagcctggacctgtgggcgagtcccattggctgggctctggcctgatcactgggctcaggtcagggcttggttcccttgccacccttcttgctgccccatgagtgtggcattactggtcacttggaagaagacagtgactctttttccctgctgggtagcattttgtatggaacggttggaattttctgggcccagttcccacgtgcctttcgtggcagtctaacctcaggccattctcttcccctgtgtgcctcagtgtccttctcatttcagtagggacttctgaaatgggggaggcagtgtggaatactgtggatgtctgtgcagagcctttgccggcactgaaggcatgcagcctgtcggcagagtgtcttaacaccagatgctactttttactgtattgtagtttattgcccggagatgtggggctttttttttaaataaaataatcataataaatgtt

SEQ ID NO: 354567 - DNA, 2258 bp, Homo sapiens
acgccgtgcacgtgcgcacggcgacggccggatggctgcgtggggctgtgtggctgcgctcggcgcggcgcgtgggctttgctggcgggcggcgcgcgcggctgcggggctccagggccgccccgcccgcaggtgctatgctgtgggccccgctcaggtgaggacgtccgggttctggccgagccactcgccactcagggccggaggcggggcggggagccgcggggaaggaggggcggccgggctggtatcccagcctcctgggaactgcctggaccgtcgtcgcgcccgagtgcatcgcgttcttgctggagggcggatgcgccctgccttcctctgactcgctggcggcctcggaaacgctactcccgcgggagagcgctcgtgggacggcctgggccaggctgcttgtcagcccctgcgcttcccggcagtttccgcgtccctgttttccctgcgcgtcttctgatttccaccatgaggacgtttgggtcgtgattttcatctgcatgtggaggaaactgggccgcgcgccgggagccgcgcctgcgggtgctccgcccccaagtgcctgtgggtttggtgcgggccttgggttcagttcagctcgctgtgacctcgactgagcgctggaggctccgcgggcgggagcaggagggctggagccggcgcctgctgtgtgcccggcgcggtagtgatgtgtgagcctccccgcaacttctgagaaggtgtgaccttgtgtggtcaggaagccgaagcttgacgagttttcaagtacgttttctcaggtcctgcagctgggagacggcacaggacactaaaccaggtggatgcagaccaagttatcctctctcacagccccatgaagctcttctccgagtaccatgagaagcggatgctggtgtctggacaggggcccgtgatggaaaatgcccagggactgggcttccgaaatgtcgtcaccgtggatgagctgcggatggcctttcctctgcttgacatggtggacctggagcggcggctaaagaccacgcccctcccgaggaatgacttcccccgcattgaaggggtgctcctcctaggggagccggtccgctgggagaccagcctgcagctgatcatggatgtcctcctcagcaatgggagccctggggctggcctggcaacacccccctacccccacctccccgtcctagccagcaacatggatctcctgtggatggctgaagccaagatgcccaggtttggacatggcacctttctgctgtgcctggaaaccatttaccagaaagtgacgggcaaggagctgagatacgagggcctgatgggcaaacccagcatcctcacttaccagtatgccgaggacctgatcaggcgacaggcggagaggcggggctgggccgcccccatccggaagctctatgctgtgggtgataaccctatgtctgacgtatacggcgccaacctgttccaccagtacctgcagaaggcaacgcatgatggggcgccagaactaggggccgggggcacacggcagcaacagccctcagcaagccagagctgcatctccatcctggtgtgtacaggcgtctacaatcccaggaacccacagtccacggagcctgtccttggaggaggggagcctccattccacgggcaccgagacttatgcttcagtccagggctcatggaggcctcccacgtggtgaatgacgtgaatgaggctgtgcagctggtcttccgcaaggagggctgggctttggagtgagggcagtgcggtggaggtgagggggtgagcctggacctgtgggcgagtcccattggctgggctctggcctgatcactgggctcaggtcagggcttggttcccttgccacccttcttgctgccccatgagtgtggcattactggtcacttggaagaagacagtgactctttttccctgctgggtagcattttgtatggaacggttggaattttctgggcccagttcccacgtgcctttcgtggcagtctaacctcaggccattctcttcccctgtgtgcctcagtgtccttctcatttcagtagggacttctgaaatgggggaggcagtgtggaatactgtggatgtctgtgcagagcctttgccggcactgaaggcatgcagcctgtcggcagagtgtcttaacaccagatgctactttttactgtattgtagtttattgcccggagatgtggggctttttttttaaataaaataatcataataaatgtt

SEQ ID NO: 354568 - DNA, 1508 bp, Homo sapiens
ttgtgtcctctcccaccagagaaagacagctgaccacccttcctcctggtgacttcacccatggtgtcctgcctgttctgtggccccacctggccattgtcttttcgcctttcttgcatctttctcagtcctctccagctttcccttggcttgggcttgaccacgggtgtggggtctgtggagtgtgtctcccctcccctcccagcaccctggaggtggggttgtggttctcctggagtggaaggcgacttgtgttgatagcctctcctttgtctctctgcagcccctcccgaggaatgacttcccccgcattgaaggggtgctcctcctaggggagccggtccgctgggagaccagcctgcagctgatcatggatgtcctcctcagcaatgggagccctggggctggcctggcaacacccccctacccccacctccccgtcctagccagcaacatggatctcctgtggatggctgaagccaagatgcccaggtttggacatggcacctttctgctgtgcctggaaaccatttaccagaaagtgacgggcaaggagctgagatacgagggcctgatgggcaaacccagcatcctcacttaccagtatgccgaggacctgatcaggcgacaggcggagaggcggggctgggccgcccccatccggaagctctatgctgtgggtgataaccctatgtctgacgtatacggcgccaacctgttccaccagtacctgcagaaggcaacgcatgatggggcgccagaactaggggccgggggcacacggcagcaacagccctcagcaagccagagctgcatctccatcctggtgtgtacaggcgtctacaatcccaggaacccacagtccacggagcctgtccttggaggaggggagcctccattccacgggcaccgagacttatgcttcagtccagggctcatggaggcctcccacgtggtgaatgacgtgaatgaggctgtgcagctggtcttccgcaaggagggctgggctttggagtgagggcagtgcggtggaggtgagggggtgagcctggacctgtgggcgagtcccattggctgggctctggcctgatcactgggctcaggtcagggcttggttcccttgccacccttcttgctgccccatgagtgtggcattactggtcacttggaagaagacagtgactctttttccctgctgggtagcattttgtatggaacggttggaattttctgggcccagttcccacgtgcctttcgtggcagtctaacctcaggccattctcttcccctgtgtgcctcagtgtccttctcatttcagtagggacttctgaaatgggggaggcagtgtggaatactgtggatgtctgtgcagagcctttgccggcactgaaggcatgcagcctgtcggcagagtgtcttaacaccagatgctactttttactgtattgtagtttattgcccggagatgtggggctttttttttaaataaaataatcataataaatgtt

SEQ ID NO: 354569 - DNA, 1670 bp, Homo sapiens
acgccgtgcacgtgcgcacggcgacggccggatggctgcgtggggctgtgtggctgcgctcggcgcggcgcgtgggctttgctggcgggcggcgcgcgcggctgcggggctccagggccgccccgcccgcaggtgctatgctgtgggccccgctcagagcccacccacctttgggttcctgttggacatcgatggagtgcttgtgcggggccacagagtgatccctgctgctctgaaagccttccgaaggctggtgaactcccaggggcagctgcgggtgcccgtggtttttgttacaaatgctggtaacatcttacaacacagcaaagcccaggagctgtcagccctgctggggtgcgaggtggatgcagaccaagttatcctctctcacagccccatgaagctcttctccgagtaccatgagaagcggatgctggtgtctggacaggggcccgtgatggaaaatgcccagggaaaggcatcttccccaagaactgtccagcattacttcctgagcttgctccagactgggcttccgaaatgtcgtcaccgtggatgagctgcggatggcctttcctctgcttgacatggtggacctggagcggcggctaaagaccacgcccctcccgaggaatgacttcccccgcattgaaggtttggacatggcacctttctgctgtgcctggaaaccatttaccagaaagtgacgggcaaggagctgagatacgagggcctgatgggcaaacccagcatcctcacttaccagtatgccgaggacctgatcaggcgacaggcggagaggcggggctgggccgcccccatccggaagctctatgctgtgggtgataaccctatgtctgacgtatacggcgccaacctgttccaccagtacctgcagaaggcaacgcatgatggggcgccagaactaggggccgggggcacacggcagcaacagccctcagcaagccagagctgcatctccatcctggtgtgtacaggcgtctacaatcccaggaacccacagtccacggagcctgtccttggaggaggggagcctccattccacgggcaccgagacttatgcttcagtccagggctcatggaggcctcccacgtggtgaatgacgtgaatgaggctgtgcagctggtcttccgcaaggagggctgggctttggagtgagggcagtgcggtggaggtgagggggtgagcctggacctgtgggcgagtcccattggctgggctctggcctgatcactgggctcaggtcagggcttggttcccttgccacccttcttgctgccccatgagtgtggcattactggtcacttggaagaagacagtgactctttttccctgctgggtagcattttgtatggaacggttggaattttctgggcccagttcccacgtgcctttcgtggcagtctaacctcaggccattctcttcccctgtgtgcctcagtgtccttctcatttcagtagggacttctgaaatgggggaggcagtgtggaatactgtggatgtctgtgcagagcctttgccggcactgaaggcatgcagcctgtcggcagagtgtcttaacaccagatgctactttttactgtattgtagtttattgcccggagatgtggggctttttttttaaataaaataatcataataaatgtt

SEQ ID NO: 354570 - DNA, 1832 bp, Homo sapiens
acgccgtgcacgtgcgcacggcgacggccggatggctgcgtggggctgtgtggctgcgctcggcgcggcgcgtgggctttgctggcgggcggcgcgcgcggctgcggggctccagggccgccccgcccgcaggtgctatgctgtgggccccgctcaggtgaggacgtccgggttctggccgagccactcgccactcagggccggaggcggggcggggagccgcggggaaggaggggcggccgggctggtatcccagcctcctgggaactgcctggaccgtcgtcgcgcccgagtgcatcgcgttcttgctggagggcggatgcgccctgccttcctctgactcgctggcggcctcggaaacgctactcccgcgggagagcgctcgtgggacggcctgggccaggctgcttgtcagcccctgcgcttcccggcagtttccgcgtccctgttttccctgcgcgtcttctgatttccaccatgaggacgtttgggtcgtgattttcatctgcatgtggaggaaactgggccgcgcgccgggagccgcgcctgcgggtgctccgcccccaagtgcctgtgggtttggtgcgggccttgggttcagttcagctcgctgtgacctcgactgagcgctggaggctccgcgggcgggagcaggagggctggagccggcgcctgctgtgtgcccggcgcggtagtgatgtgtgagcctccccgcaacttctgagaaggtgtgaccttgtgtggtcaggaagccgaagcttgacgagttttcaagtacgttttctcaggtcctgcagctgggagacggcacaggacactaaaccagagcccacccacctttgggttcctgttggacatcgatggagtgcttgtgcggggccacagagtgatccctgctgctctgaaagccttccgaaggctggtgaactcccaggggcagctgcgggtgcccgtggtttttgttacaaatgctggtaacatcttacaacacagcaaagcccaggagctgtcagccctgctggggtgcgaggtggatgcagaccaagttatcctctctcacagccccatgaagctcttctccgagtaccatgagaagcggatgctggtgtctggacaggggcccgtgatggaaaatgcccagggactgggcttccgaaatgtcgtcaccgtggatgagctgcggatggcctttcctctgcttgacatggtggacctggagcggcggctaaagaccacgcccctcccgaggaatgacttcccccgcattgaagagacgggctctcactatgttgcccaggctggtctcaaactcctgagctcaagcaatcctaccaccttggcctcccaaagtgctggaattacagacacaagccaccgcacgcagccatgggatggtttttttaaaaattaattttagtgtgggatagtttttgattgcacaggattgtcctgagtatgtagcgtccctggccccctcccacaaccttcacttgctaggttctagtcattgtgacaactaaaattgcctctgatttgtaaagcacctcagcaggggcggtgctgccccatggagaatcactggtctggtgcagttcaccggccctgtaccttagtgtcagcagtgttctttgcctagtgcttactgtgtgtctagtcctgggctgtttaccgatgatgtagctcatttttatcctcacaatagctaagtgctgttgctgttatgtagttgcagttgaggaaactgaggcttagagaagagaagttacttggccacagtcatacaggagaatcggtggagtccaggttgggtttcaagtctctatcactccaca

SEQ ID NO: 354571 - DNA, 687 bp, Homo sapiens
ctgcagggctgctttccttatggtgagtgcacaggagtccacgggcctgggcagctcatgttcactgattattgtcctactctgggagattcagtttatttctagatttttcaatgacaaccatgccataaagaacaccccatatacacttggtcgggtcattttgtaagctggactcccaggattgaattgctgggtgagcatgttttacattttggtggatgctgccatcttgttctcccaaaggcccgtgccagagcttatgccctccccagggtggctagcaggcctgtttccattctacccagcccacacatttttttaaactttcattttgaaatgattttagactcacacagaagttgcaaacatagtacagccattggttgtacactttctggacacaaaaaagggtatacttggtgtacccttcacccagcgtcccccagagatggcttcccacctaaccacaggacaaagatcaaagccaggagattgcctttggtacaatactattaagtaagctttatttggattttgccagattttacatgcgcttttttttttcttttggtgaatagttctatgatattttatgacgtgtataaatttgccacaaagctattaaacttaccacgtattaggtttgagtataataaatatgctttttttctttctctgtgcaat

SEQ ID NO: 354572 - DNA, 2200 bp, Homo sapiens
gtgcgcgtgcgctcgagagcgtcatcgcccccgactgtggagaagtgtccggggtagccccgttacaggtatcgctggctaccctcctccttcgcccctcctttcctcctttacattcaaatcaagtcggggttgaatttcgagaggggagtccgaggacctggggcctgatttctttttctctcgccatgcttcttcgggctgtgtacatgtgtggtggtgcctgagaggcgatacagggaatggctacactcttttactcccgcccctggccttcgtagtacccttgaagtgatccactagtcgtaacccctccttccaccaatgattcaattggagaagtttagaggagtggaaagacttgtccccttcccccatcgcaagcttggtcacagagtgtattgccaacccatgtatccagacgctcagtctagggctcttggccctgggtagcgttttgaaaaggctggttatccttaagtactgaagattgataaagcccacttacttacttaaaagaatatgccctgaaatgtgttttctgtgccactgacaccagaaatgctatttagaagaagttatcagtaatcctgacaaaggatgcttcctgcagctcaaatcaggctggaggtgcctttatatttttcattgaattactgttttggtgactcgaatgaatcatcaattcatttatttgtcttcaaatgtctgacggcacttaaggtctaaaaaagaaggaatgtgtttctgatcatctgaatcttaatcatgtccaactgcctgcaaaatttcctgaaaattacaagcactcgtcttctatgttcaagattatgccaacagttaagaagtaaaaggaagtttttcggaactgtgccaatatccagattgcataggcgagttgtcattacaggcattggcttagtgactcctcttggtgttggaactcacctggtttgggatcgtcttatcggaggagagagtggaattgtttcactggttggtgaagagtataagagtatcccttgcagtgttgctgcttatgtgccaagaggtagtgatgaaggtcagttcaatgaacaaaactttgtgtccaaatcagatatcaagtccatgtcttctcccaccatcatggccattggggctgcagaattagccatgaaggattctggctggcatcctcagtcagaagctgatcaagtggctactggtgttgcaattggcatgggaatgattcctcttgaagttgtttctgaaactgctttgaattttcagacaaaaggttacaataaagttagcccattttttgtccctaagattctggtcaatatggcagcaggccaggtcagcattcgatataaactcaagggcccaaatcatgcagtatccacagcctgtaccacaggagctcatgctgtgggagactcatttagatttatagcccatggtgatgctgatgtgatggtggctggaggtacagattcttgtattagccctttatctcttgctgggttttccagagcccgggctctgagcacaaactcagatcccaagttggcatgtcgaccatttcatccaaagagagatggttttgtaatgggagaaggtgcagctgtgctggtgctggaagaatatgaacatgctgttcaaagaagagcccggatctatgcagaagttttgggctatggactctcaggtgatgctggtcacataactgcccctgatcctgaaggagaaggtgccttaaggtgtatggctgctgctttaaaagatgcaggtgtgcagcctgaggagatatcctatatcaatgcacatgctacttccacaccattgggagatgctgctgaaaacaaagctatcaaacatctcttcaaagaccatgcatatgcccttgcagtttcctcaactaagggagcaacaggacatctgctgggagctgcaggggcagtcgaggcagcttttaccacattagcttgttattatcaaaaactaccacctactttaaacctggattgttcggaaccagaatttgatctcaactatgttccactaaaggcacaggaatggaaaactgagaaaagatttattggcctcaccaattcctttggttttggtggtactaatgcaacactttgtattgctggactgtagaacatataatttgtaattaaatactgatttttaaatgttaaaaaaaaaaaat

SEQ ID NO: 354573 - DNA, 1669 bp, Homo sapiens
ttggccgggtcccgaggcccctggccggcgggctcggacgttaggagcagaaccagctccaggtcccggtctgtccgggcgtcgctgccctctgaagctcaggccggacgccccagtccctggccgaacaaggtgccgcggcccacccaccccggtacccgccgtccgaccccgttgccctgcacctgaggatgttgtcagcataggaatgtgtttctgatcatctgaatcttaatcatgtccaactgcctgcaaaatttcctgaaaattacaagcactcgtcttctatgttcaagattatgccaacagttaagaagtaaaaggaagtttttcggaactgtgccaatatccagattgcataggcgagttgtcattacaggcattggcttagtgactcctcttggtgttggaactcacctggtttgggatcgtcttatcggaggagagagtggaattgtttcactggttggtgaagagtataagagtatcccttgcagtgttgctgcttatgtgccaagaggtagtgatgaaggtcagttcaatgaacaaaactttgtgtccaaatcagatatcaagtccatgtcttctcccaccatcatggccattggggctgcagaattagccatgaaggattctggctggcatcctcagtcagaagctgatcaagtggctactggtgttgcaattggcatgggaatgattcctcttgaagttgtttctgaaactgctttgaattttcagacaaaaggttacaataaagttagcccattttttgtccctaagattctggtcaatatggcagcaggccaggtcagcattcgatataaactcaagggcccaaatcatgcagtatccacagcctgtaccacaggagctcatgctgtgggagactcatttagatttatagcccatggtgatgctgatgtgatggtggctggaggtacagattcttgtattagccctttatctcttgctgggttttccagagcccgggctctgagcacaaactcagatcccaagttggcatgtcgaccatttcatccaaagagagatggttttgtaatgggagaaggtgcagctgtgctggtgctggaagaatatgaacatgctgttcaaagaagagcccggatctatgcagaagttttgggctatggactctcaggtgatgctggtcacataactgcccctgatcctgaaggagaaggtgccttaaggtgtatggctgctgctttaaaagatgcaggtgtgcagcctgaggagatatcctatatcaatgcacatgctacttccacaccattgggagatgctgctgaaaacaaagctatcaaacatctcttcaaagaccatgcatatgcccttgcagtttcctcaactaagggagcaacaggacatctgctgggagctgcaggggcagtcgaggcagcttttaccacattagcttgttattatcaaaaactaccacctactttaaacctggattgttcggaaccagaatttgatctcaactatgttccactaaaggcacaggaatggaaaactgagaaaagatttattggcctcaccaattcctttggttttggtggtactaatgcaacactttgtattgctggactgtagaacatataatttgtaattaaatactgatttttaaatgttaaaaaaaaaaaat

SEQ ID NO: 354574 - DNA, 882 bp, Homo sapiens
gcatgagcgtacgtgcgtgtgcgcgtgcgctcgagagcgtcatcgcccccgactgtggagaagtgtccggggtagccccgttacaggtatcgctggctaccctcctccttcgcccctcctttcctcctttacattcaaatcaagtcggggttgaatttcgagaggggagtccgaggacctggggcctgatttctttttctctcgccatgcttcttcgggctgtgtacatgtgtggtggtgcctgagaggcgatacagggaatggctacactcttttactcccgcccctggccttcgtagtacccttgaagtgatccactagtcgtaacccctccttccaccaatgattcaattggagaagtttagaggagtggaaagacttgtccccttcccccatcgcaagcttggtcacagagtgtattgccaacccatgtatccagacgctcagtctagggctcttggccctgggtagcgttttgaaaaggctggttatccttaagtactgaagattgataaagcccacttacttacttaaaagaatatgccctgaaatgtgttttctgtgccactgacaccagaaatgctatttagaagaagttatcagtaatcctgacaaaggatgcttcctgcagctcaaatcaggctggaggtgcctttatatttttcattgaattactgttttggtgactcgaatgaatcatcaattcatttatttgtcttcaaatgtctgacggcacttaaggtctaaaaaagaaggtaagtttaaacagatagtttgatgttaaggtataaattgaaagtatgtaacattttccctgtgttcattagcagctcatatcaagcacccaaaggaacaccttggatgtttttccttaggccctta

SEQ ID NO: 354575 - DNA, 304 bp, Homo sapiens
cctacatttgtttcacataagccatacagataaagagacttttgttaaaattaaacttagtcctgataaatgtcttttcttgttttattaggtgtatggctgctgctttaaaagatgcaggtgtgcagcctgaggagatatcctatatcaatgcacatgctacttccacaccattgggagatgctgctgaaaacaaagctatcaaacatctcttcaaagaccatgcatatgcccttgcagtttcctcaactaagggagcaacaggacatctgctgggagctgcaggggcagtcgaggcagcttt

SEQ ID NO: 354576 - DNA, 1531 bp, Homo sapiens
gtgcgcgtgcgctcgagagcgtcatcgcccccgactgtggagaagtgtccggggtagccccgttacaggaatgtgtttctgatcatctgaatcttaatcatgtccaactgcctgcaaaatttcctgaaaattacaagcactcgtcttctatgttcaagattatgccaacagttaagaagtaaaaggaagtttttcggaactgtgccaatatccagattgcataggcgagttgtcattacaggcattggcttagtgactcctcttggtgttggaactcacctggtttgggatcgtcttatcggaggagagagtggaattgtttcactggttggtgaagagtataagagtatcccttgcagtgttgctgcttatgtgccaagaggtagtgatgaaggtcagttcaatgaacaaaactttgtgtccaaatcagatatcaagtccatgtcttctcccaccatcatggccattggggctgcagaattagccatgaaggattctggctggcatcctcagtcagaagctgatcaagtggctactggtgttgcaattggcatgggaatgattcctcttgaagttgtttctgaaactgctttgaattttcagacaaaaggttacaataaagttagcccattttttgtccctaagattctggtcaatatggcagcaggccaggtcagcattcgatataaactcaagggcccaaatcatgcagtatccacagcctgtaccacaggagctcatgctgtgggagactcatttagatttatagcccatggtgatgctgatgtgatggtggctggaggtacagattcttgtattagccctttatctcttgctgggttttccagagcccgggctctgagcacaaactcagatcccaagttggcatgtcgaccatttcatccaaagagagatggttttgtaatgggagaaggtgcagctgtgctggtgctggaagaatatgaacatgctgttcaaagaagagcccggatctatgcagaagttttgggctatggactctcaggtgatgctggtcacataactgcccctgatcctgaaggagaaggtgccttaaggtgtatggctgctgctttaaaagatgcaggtgtgcagcctgaggagatatcctatatcaatgcacatgctacttccacaccattgggagatgctgctgaaaacaaagctatcaaacatctcttcaaagaccatgcatatgcccttgcagtttcctcaactaagggagcaacaggacatctgctgggagctgcaggggcagtcgaggcagcttttaccacattagcttgttattatcaaaaactaccacctactttaaacctggattgttcggaaccagaatttgatctcaactatgttccactaaaggcacaggaatggaaaactgagaaaagatttattggcctcaccaattcctttggttttggtggtactaatgcaacactttgtattgctggactgtagaacatataatttgtaattaaatactgatttttaaatgttaaaaaaaaaaaat

SEQ ID NO: 354577 - DNA, 1077 bp, Homo sapiens
gtgcgcgtgcgctcgagagcgtcatcgcccccgactgtggagaagtgtccggggtagccccgttacaggaatgtgtttctgatcatctgaatcttaatcatgtccaactgcctgcaaaatttcctgaaaattacaagcactcgtcttctatgttcaagattatgccaacagttaagaagtaaaaggaagtttttcggaactgtgccaatatccagattgcataggcgagttgtcattacaggcattggcttagtgactcctcttggtgttggaactcacctggtttgggatcgtcttatcggaggagagagtggaattgtttcactggttggtgaagagtataagagtatcccttgcagtgttgctgcttatgtgccaagaggtagtgatgaagagcccgggctctgagcacaaactcagatcccaagttggcatgtcgaccatttcatccaaagagagatggttttgtaatgggagaaggtgcagctgtgctggtgctggaagaatatgaacatgctgttcaaagaagagcccggatctatgcagaagttttgggctatggactctcaggtgatgctggtcacataactgcccctgatcctgaaggagaaggtgccttaaggtgtatggctgctgctttaaaagatgcaggtgtgcagcctgaggagatatcctatatcaatgcacatgctacttccacaccattgggagatgctgctgaaaacaaagctatcaaacatctcttcaaagaccatgcatatgcccttgcagtttcctcaactaagggagcaacaggacatctgctgggagctgcaggggcagtcgaggcagcttttaccacattagcttgttattatcaaaaactaccacctactttaaacctggattgttcggaaccagaatttgatctcaactatgttccactaaaggcacaggaatggaaaactgagaaaagatttattggcctcaccaattcctttggttttggtggtactaatgcaacactttgtattgctggactgtagaacatataatttgtaattaaatactgatttttaaatgttaaaaaaaaaaaat

SEQ ID NO: 354578 - DNA, 403 bp, Homo sapiens
cctgaggagatatcctatatcaatgcacatgctacttccacaccattgggagatgctgctgaaaacaaagctatcaaacatctcttcaaagaccatgcatatgcccttgcagtttcctcaactaagggagcaacaggacatctgctgggagctgcaggggcagtcgaggcagcttttaccacattagcttgttattatcaaaaactaccacctactttaaacctggattgttcggaaccagaatttgatctcaactatgttccactaaaggcacaggaatggaaaactgagaaaagatttattggcctcaccaattcctttggttttggtggtactaatgcaacactttgtattgctggactgtagaacatataatttgtaattaaatactgatttttaaatg

SEQ ID NO: 354579 - DNA, 715 bp, Homo sapiens
attaaaccttcacatttgtttggtttcagatgcagattgagttcataaaacaaggaagcatgaatttcagattcatccctgtgctcttcccaaatgctaagaaggagcatgtgcccacctggcttcagaacactcatgtctacagctggcccaagaataaaaaaaacatcctgctgcggctgctgagagaggaagagtatgtggctcctccacgggggcctctgcccacccttcaggtggttcccttgtgacaccgttcatccccagatcactgaggccaggccatgtttggggccttgttctgacagcattctggctgaggctggtcggtagcactcctggctggtttttttctgttcctccccgagaggccctctggcccccaggaaacctgttgtgcagagctcttccccggagacctccacacaccctggctttgaagtggagtctgtgactgctctgcattctctgcttttaaaaaaaccattgcaggtgccagtgtcccatatgttcctcctgacagtttgatgtgtccattctgggcctctcagtgcttagcaagtagataatgtaagggatgtggcagcaaatggaaatgactacaaacactctcctatcaatcacttcaggctacttttatgagttagccagatgcttgtgtatcctcagaccaaactgattcatgtacaaataataaaatgtttactcttttgta

SEQ ID NO: 354580 - DNA, 5325 bp, Homo sapiens
  misc_feature (2863)..(2863): n is a, c, g, or t
  misc_feature (2979)..(2979): n is a, c, g, or t
gggtggaagaagctcgactccctcttcttccccattatctgcccacaatcccctcctttggagctgctaatgattactaattcttaacattcgagttcaatctcctcccggagacaccctcccaggcgagggcactgcgactacactgaggttctgcccactcctgggcagcttcttagctgggtggcgaaaacaaaaatgccgcctaattggtcactggccctttctcatgaatgaaggaggtttctgttttaagaaataaagtgactcctcagccgttgattcactgcccacagggagattttgagcagaggcttcctaggctccgtagaaatttgcatacagcttccacttcctgcttcagagcctgttcttctacttacctgggcccggagaaggtggagggagacgagaagccgccgagagccgactaccctccgggcccagtctgtctgtccgtggtggatctaagaaactagaatgaaccgaagcattcctgtggaggttgatgaatcagaaccatacccaagtcagttgctgaaaccaatcccagaatattccccggaagaggaatcagaaccacctgctccaaatataaggaacatggcacccaacagcttgtctgcacccacaatgcttcacaattcctccggagacttttctcaagctcactcaaccctgaaacttgcaaatcaccagcggcctgtatcccggcaggtcacctgcctgcgcactcaagttctggaggacagtgaagacagtttctgcaggagacacccaggcctgggcaaagctttcccttctgggtgctctgcagtcagcgagcctgcgtctgagtctgtggttggagccctccctgcagagcatcagttttcatttatggaaaaacgtaatcaatggctggtatctcagctttcagcggcttctcctgacactggccatgactcagacaaatcagaccaaagtttacctaatgcctcagcagactccttgggcggtagccaggagatggtgcaacggccccagcctcacaggaaccgagcaggcctggatctgccaaccatagacacgggatatgattcccagccccaggatgtcctgggcatcaggcagctggaaaggcccctgcccctcacctccgtgtgttacccccaggacctccccagacctctcaggtccagggagttccctcagtttgaacctcagaggtatccagcatgtgcacagatgctgcctcccaatctttccccacatgctccatggaactatcattaccattgtcctggaagtcccgatcaccaggtgccatatggccatgactaccctcgagcagcctaccagcaagtgatccagccggctctgcctgggcagcccctgcctggagccagtgtgagaggcctgcaccctgtgcagaaggttatcctgaattatcccagcccctgggaccaagaagagaggcccgcacagagagactgctcctttccggggcttccaaggcaccaggaccagccacatcaccagccacctaatagagctggtgctcctggggagtccttggagtgccctgcagagctgagaccacaggttccccagcctccgtccccagctgctgtgcctagaccccctagcaaccctccagccagaggaactctaaaaacaagcaatttgccagaagaattgcggaaagtctttatcacttattcgatggacacagctatggaggtggtgaaattcgtgaactttttgttggtaaatggcttccaaactgcaattgacatatttgaggatagaatccgaggcattgatatcattaaatggatggagcgctaccttagggataagaccgtgatgataatcgtagcaatcagccccaaatacaaacaggacgtggaaggcgctgagtcgcagctggacgaggatgagcatggcttacatactaagtacattcatcgaatgatgcagattgagttcataaaacaaggaagcatgaatttcagattcatccctgtgctcttcccaaatgctaagaaggagcatgtgcccacctggcttcagaacactcatgtctacagctggcccaagaataaaaaaaacatcctgctgcggctgctgagagaggaagagtatgtggctcctccacgggggcctctgcccacccttcaggtggttcccttgtgacaccgttcatccccagatcactgaggccaggccatgtttggggccttgttctgacagcattctggctgaggctggtcggtagcactcctggctggtttttttctgttcctccccgagaggccctctggcccccaggaaacctgttgtgcagagctcttccccggagacctccacacaccctggctttgaagtggagtctgtgactgctctgcattctctgcttttaaaaaaaccattgcaggtgccagtgtcccatatgttcctcctgacagtttgatgtgtccattctgggcctctcagtgcttagcaagtagataatgtaagggatgtggcagcaaatggaaatgactacaaacactctcctatcaatcacttcaggctacttttatgagttagccagatgcttgtgtatcctcagaccaaactgattcatgtacaaataataaaatgtttactcttttgtaagattatgttttacttatctcaaaggagatacatataatttataatgatatgggcagttgcttccagggacatcaacaaagctgcttagatataatattagataaatataacagaccactctgtattaatggattaaagccagctagttaaacaaccctttttaaccataatcatggaagctttattcttgcaataaagatttttaggctgggcgcagtgnctcacacctgtaatcccagcactttgggaagctaaggcaggcagatcatttgaggtcaggagtttgagaccagcctggccaacatggtgaaaccccatctctgctaaaattacaanaaagttagccgggcatggtggtgtgcacctgtaatcccagctactcgggaggctgaggcaggagaatcacttgaacccgggaggcagaggttgcagtgagccgagatcatgtcactgcactctagcttgggagacagagcgagactccgtctcaaaaaacaaacaaacaaataaaacacccatttttaacaaaacaactttatatagcatacagccatgattctaaatagtatgattatggttctcaggatctgactacataggtaaaaatatttgcatatgtgtatgaagtgttgggggatgtaggctagaattgtagtctgtgttctaattttggttctaccaccaattagctgtatgacctttagcaagtcctttaacttttcttagattccagggactcatttataaaatgacatggacaaaagcatctctaatcactctaaaagatttgaagtctaggacctaaattctaaatactcttttgaggagtgactgagttttcattttcataattatgtctctcagaggacaaatttacattttcttaacagagacattttcttcttctttttttttgtttgagacagagtctcgctctgtcgtccaggctggagtgcagtgctgcaatcttggctcactgcaacctgcgcctcctgggttcaagtgattcttctgcctcaacctcccaagtagctagacctataggcgcctgccaccatgcccagctaatttttgtatttttagtagagacagggtttcatattggccagactggtctcgaactcctgaccttgtgatccgcccacctcggcctcccaaagtgctgggattacaggtgtgagccaccacacccagccaacattttcctcttttaaaaaatatcttctcacgcctgtaatcccagcactttgggaggctgaggcaggcggatcatgaggtcaggagatcaagaccatcctggctaacacggtgaaactccatctctactaaaaatacaaaaaaaatagccgggcgtggtggcaggcgcctgtagtcccagctactggggaggctgaggcaggaaaatggtgtcaacccgggaggcggagcttgcagtgagccgagattgcgccactgcactccagcctgggcaatagagtgagactccgtctcaaaaaaaaaaaaaaaaaaaaaaacttcaacaataccctcaggttgataattttggatatctatctgtatctatatatcttgtttacctggtctccagaaaaagaacacatacacatatccatatataaaatatgtatacatgtatcaaatctacgtaaactataaaggtgggatggctttaattatggcccaagctactaagacaatgaagactttttggggctgcaagctactgcttcccttctttatctactagcctcttaaacaaggctcacttgtgctacaagacagtccaccgttttgttttttttttcttttttttgagacagggtctcactctttcccaggctgcagtacagtgacacagtctcagctcactgcagctttgaccttgccgggctcaggtgacccttacacttcagcctcccaagtagcagggactataggtgtgcaccaacatgcttggttaatttttgtattttttgtagagacagggttttgccatgttgtccaggctagtctcgaattcctgggctcaagtgattcacctgccttggcctcccaaagtgctaggattacagatgggagccaccacgcccagcccagtccagctcttatatgtagcacagggaaaggacaaatacttgtcaactataaataagaaacattgctaatgcattgcaaagaacactagtttcatttactttataacttagatgtctactgggtgagacgaatgtctttgttctttaaaaaataggaaaagagaagaaaaactagcataacataagtactcatttgtaagactttctgacatgtaacattagttccgtagttttgagacctggtagaactgactttcatatttggataacctggaaaacacccaaacacaaacttcaagtcttctttctcttttttcattatcttttttagtctgaggtgacaccatcattaaggattcgacacccgtttgtaaataaaatgacatcagcaattactctgaaatgtttctagtttgcaaagacttagcaatgtgatgttattaacccttcctcccttcagagacctgtcctaagctctgaaccactcattccttccactcttcttaccccaggtggttgatgagcagtggtccctggtgttccacaaagagtcattaaagtgttacagctggtagcactggtagca

SEQ ID NO: 354581 - DNA, 2753 bp, Homo sapiens
gggtggaagaagctcgactccctcttcttccccattatctgcccacaatcccctcctttggagctgctaatgattactaattcttaacattcgagttcaatctcctcccggagacaccctcccaggcgagggcactgcgactacactgaggttctgcccactcctgggcagcttcttagctgggtggcgaaaacaaaaatgccgcctaattggtcactggccctttctcatgaatgaaggaggtttctgttttaagaaataaagtgactcctcagccgttgattcactgcccacagggagattttgagcagaggcttcctaggctccgtagaaatttgcatacagcttccacttcctgcttcagagcctgttcttctacttacctgggcccggagaaggtggagggagacgagaagccgccgagagccgactaccctccgggcccagtctgtctgtccgtggtggatctaagcctcatctgtatcctcttgtgatggcgtgaaggaaagccatggcagatttccagcctggtgatgctgtacagaacacaggtggcctgcttccatgcctcctcagcttcaagaaactagaatgaaccgaagcattcctgtggaggttgatgaatcagaaccatacccaagtcagttgctgaaaccaatcccagaatattccccggaagaggaatcagaaccacctgctccaaatataaggaacatggcacccaacagcttgtctgcacccacaatgcttcacaattcctccggagacttttctcaagctcactcaaccctgaaacttgcaaatcaccagcggcctgtatcccggcaggtcacctgcctgcgcactcaagttctggaggacagtgaagacagtttctgcaggagacacccaggcctgggcaaagctttcccttctgggtgctctgcagtcagcgagcctgcgtctgagtctgtggttggagccctccctgcagagcatcagttttcatttatggaaaaacgtaatcaatggctggtatctcagctttcagcggcttctcctgacactggccatgactcagacaaatcagaccaaagtttacctaatgcctcagcagactccttgggcggtagccaggagatggtgcaacggccccagcctcacaggaaccgagcaggcctggatctgccaaccatagacacgggatatgattcccagccccaggatgtcctgggcatcaggcagctggaaaggcccctgcccctcacctccgtgtgttacccccaggacctccccagacctctcaggtccagggagttccctcagtttgaacctcagaggtatccagcatgtgcacagatgctgcctcccaatctttccccacatgctccatggaactatcattaccattgtcctggaagtcccgatcaccaggtgccatatggccatgactaccctcgagcagcctaccagcaagtgatccagccggctctgcctgggcagcccctgcctggagccagtgtgagaggcctgcaccctgtgcagaaggttatcctgaattatcccagcccctgggaccaagaagagaggcccgcacagagagactgctcctttccggggcttccaaggcaccaggaccagccacatcaccagccacctaatagagctggtgctcctggggagtccttggagtgccctgcagagctgagaccacaggttccccagcctccgtccccagctgctgtgcctagaccccctagcaaccctccagccagaggaactctaaaaacaagcaatttgccagaagaattgcggaaagtctttatcacttattcgatggacacagctatggaggtggtgaaattcgtgaactttttgttggtaaatggcttccaaactgcaattgacatatttgaggatagaatccgaggcattgatatcattaaatggatggagcgctaccttagggataagaccgtgatgataatcgtagcaatcagccccaaatacaaacaggacgtggaaggcgctgagtcgcagctggacgaggatgagcatggcttacatactaagtacattcatcgaatgatgcagattgagttcataaaacaaggaagcatgaatttcagattcatccctgtgctcttcccaaatgctaagaaggagcatgtgcccacctggcttcagaacactcatgtctacagctggcccaagaataaaaaaaacatcctgctgcggctgctgagagaggaagagtatgtggctcctccacgggggcctctgcccacccttcaggtggttcccttgtgacaccgttcatccccagatcactgaggccaggccatgtttggggccttgttctgacagcattctggctgaggctggtcggtagcactcctggctggtttttttctgttcctccccgagaggccctctggcccccaggaaacctgttgtgcagagctcttccccggagacctccacacaccctggctttgaagtggagtctgtgactgctctgcattctctgcttttaaaaaaaccattgcaggtgccagtgtcccatatgttcctcctgacagtttgatgtgtccattctgggcctctcagtgcttagcaagtagataatgtaagggatgtggcagcaaatggaaatgactacaaacactctcctatcaatcacttcaggctacttttatgagttagccagatgcttgtgtatcctcagaccaaactgattcatgtacaaataataaaatgtttactcttttgta

SEQ ID NO: 354582 - DNA, 5436 bp, Homo sapiens
  misc_feature (2974)..(2974): n is a, c, g, or t
  misc_feature (3090)..(3090): n is a, c, g, or t
gggtggaagaagctcgactccctcttcttccccattatctgcccacaatcccctcctttggagctgctaatgattactaattcttaacattcgagttcaatctcctcccggagacaccctcccaggcgagggcactgcgactacactgaggttctgcccactcctgggcagcttcttagctgggtggcgaaaacaaaaatgccgcctaattggtcactggccctttctcatgaatgaaggaggtttctgttttaagaaataaagtgactcctcagccgttgattcactgcccacagggagattttgagcagaggcttcctaggctccgtagaaatttgcatacagcttccacttcctgcttcagagcctgttcttctacttacctgggcccggagaaggtggagggagacgagaagccgccgagagccgactaccctccgggcccagtctgtctgtccgtggtggatctaagcctcatctgtatcctcttgtgatggcgtgaaggaaagccatggcagatttccagcctggtgatgctgtacagaacacaggtggcctgcttccatgcctcctcagcttcaagaaactagaatgaaccgaagcattcctgtggaggttgatgaatcagaaccatacccaagtcagttgctgaaaccaatcccagaatattccccggaagaggaatcagaaccacctgctccaaatataaggaacatggcacccaacagcttgtctgcacccacaatgcttcacaattcctccggagacttttctcaagctcactcaaccctgaaacttgcaaatcaccagcggcctgtatcccggcaggtcacctgcctgcgcactcaagttctggaggacagtgaagacagtttctgcaggagacacccaggcctgggcaaagctttcccttctgggtgctctgcagtcagcgagcctgcgtctgagtctgtggttggagccctccctgcagagcatcagttttcatttatggaaaaacgtaatcaatggctggtatctcagctttcagcggcttctcctgacactggccatgactcagacaaatcagaccaaagtttacctaatgcctcagcagactccttgggcggtagccaggagatggtgcaacggccccagcctcacaggaaccgagcaggcctggatctgccaaccatagacacgggatatgattcccagccccaggatgtcctgggcatcaggcagctggaaaggcccctgcccctcacctccgtgtgttacccccaggacctccccagacctctcaggtccagggagttccctcagtttgaacctcagaggtatccagcatgtgcacagatgctgcctcccaatctttccccacatgctccatggaactatcattaccattgtcctggaagtcccgatcaccaggtgccatatggccatgactaccctcgagcagcctaccagcaagtgatccagccggctctgcctgggcagcccctgcctggagccagtgtgagaggcctgcaccctgtgcagaaggttatcctgaattatcccagcccctgggaccaagaagagaggcccgcacagagagactgctcctttccggggcttccaaggcaccaggaccagccacatcaccagccacctaatagagctggtgctcctggggagtccttggagtgccctgcagagctgagaccacaggttccccagcctccgtccccagctgctgtgcctagaccccctagcaaccctccagccagaggaactctaaaaacaagcaatttgccagaagaattgcggaaagtctttatcacttattcgatggacacagctatggaggtggtgaaattcgtgaactttttgttggtaaatggcttccaaactgcaattgacatatttgaggatagaatccgaggcattgatatcattaaatggatggagcgctaccttagggataagaccgtgatgataatcgtagcaatcagccccaaatacaaacaggacgtggaaggcgctgagtcgcagctggacgaggatgagcatggcttacatactaagtacattcatcgaatgatgcagattgagttcataaaacaaggaagcatgaatttcagattcatccctgtgctcttcccaaatgctaagaaggagcatgtgcccacctggcttcagaacactcatgtctacagctggcccaagaataaaaaaaacatcctgctgcggctgctgagagaggaagagtatgtggctcctccacgggggcctctgcccacccttcaggtggttcccttgtgacaccgttcatccccagatcactgaggccaggccatgtttggggccttgttctgacagcattctggctgaggctggtcggtagcactcctggctggtttttttctgttcctccccgagaggccctctggcccccaggaaacctgttgtgcagagctcttccccggagacctccacacaccctggctttgaagtggagtctgtgactgctctgcattctctgcttttaaaaaaaccattgcaggtgccagtgtcccatatgttcctcctgacagtttgatgtgtccattctgggcctctcagtgcttagcaagtagataatgtaagggatgtggcagcaaatggaaatgactacaaacactctcctatcaatcacttcaggctacttttatgagttagccagatgcttgtgtatcctcagaccaaactgattcatgtacaaataataaaatgtttactcttttgtaagattatgttttacttatctcaaaggagatacatataatttataatgatatgggcagttgcttccagggacatcaacaaagctgcttagatataatattagataaatataacagaccactctgtattaatggattaaagccagctagttaaacaaccctttttaaccataatcatggaagctttattcttgcaataaagatttttaggctgggcgcagtgnctcacacctgtaatcccagcactttgggaagctaaggcaggcagatcatttgaggtcaggagtttgagaccagcctggccaacatggtgaaaccccatctctgctaaaattacaanaaagttagccgggcatggtggtgtgcacctgtaatcccagctactcgggaggctgaggcaggagaatcacttgaacccgggaggcagaggttgcagtgagccgagatcatgtcactgcactctagcttgggagacagagcgagactccgtctcaaaaaacaaacaaacaaataaaacacccatttttaacaaaacaactttatatagcatacagccatgattctaaatagtatgattatggttctcaggatctgactacataggtaaaaatatttgcatatgtgtatgaagtgttgggggatgtaggctagaattgtagtctgtgttctaattttggttctaccaccaattagctgtatgacctttagcaagtcctttaacttttcttagattccagggactcatttataaaatgacatggacaaaagcatctctaatcactctaaaagatttgaagtctaggacctaaattctaaatactcttttgaggagtgactgagttttcattttcataattatgtctctcagaggacaaatttacattttcttaacagagacattttcttcttctttttttttgtttgagacagagtctcgctctgtcgtccaggctggagtgcagtgctgcaatcttggctcactgcaacctgcgcctcctgggttcaagtgattcttctgcctcaacctcccaagtagctagacctataggcgcctgccaccatgcccagctaatttttgtatttttagtagagacagggtttcatattggccagactggtctcgaactcctgaccttgtgatccgcccacctcggcctcccaaagtgctgggattacaggtgtgagccaccacacccagccaacattttcctcttttaaaaaatatcttctcacgcctgtaatcccagcactttgggaggctgaggcaggcggatcatgaggtcaggagatcaagaccatcctggctaacacggtgaaactccatctctactaaaaatacaaaaaaaatagccgggcgtggtggcaggcgcctgtagtcccagctactggggaggctgaggcaggaaaatggtgtcaacccgggaggcggagcttgcagtgagccgagattgcgccactgcactccagcctgggcaatagagtgagactccgtctcaaaaaaaaaaaaaaaaaaaaaaacttcaacaataccctcaggttgataattttggatatctatctgtatctatatatcttgtttacctggtctccagaaaaagaacacatacacatatccatatataaaatatgtatacatgtatcaaatctacgtaaactataaaggtgggatggctttaattatggcccaagctactaagacaatgaagactttttggggctgcaagctactgcttcccttctttatctactagcctcttaaacaaggctcacttgtgctacaagacagtccaccgttttgttttttttttcttttttttgagacagggtctcactctttcccaggctgcagtacagtgacacagtctcagctcactgcagctttgaccttgccgggctcaggtgacccttacacttcagcctcccaagtagcagggactataggtgtgcaccaacatgcttggttaatttttgtattttttgtagagacagggttttgccatgttgtccaggctagtctcgaattcctgggctcaagtgattcacctgccttggcctcccaaagtgctaggattacagatgggagccaccacgcccagcccagtccagctcttatatgtagcacagggaaaggacaaatacttgtcaactataaataagaaacattgctaatgcattgcaaagaacactagtttcatttactttataacttagatgtctactgggtgagacgaatgtctttgttctttaaaaaataggaaaagagaagaaaaactagcataacataagtactcatttgtaagactttctgacatgtaacattagttccgtagttttgagacctggtagaactgactttcatatttggataacctggaaaacacccaaacacaaacttcaagtcttctttctcttttttcattatcttttttagtctgaggtgacaccatcattaaggattcgacacccgtttgtaaataaaatgacatcagcaattactctgaaatgtttctagtttgcaaagacttagcaatgtgatgttattaacccttcctcccttcagagacctgtcctaagctctgaaccactcattccttccactcttcttaccccaggtggttgatgagcagtggtccctggtgttccacaaagagtcattaaagtgttacagctggtagcactggtagca

SEQ ID NO: 354583 - DNA, 2300 bp, Homo sapiens
gtgagagaacgtggccggacgaccagaagcggctgagagtcgactacgctccgcgaggacacgctgtgtctgtgcgctggtgcatctaccaaactagaatgtcagcgaatgcattcctgatggatgtcgctcgactcacaagcaatagccgcaaggtcagatgttcgcatgagaagccgaccctcgcgcaggaagtgattgcccgcgaacaggagcgagagtcgaccagccacgctgtgtgccgatgatagtgaggacacgatggcacccaacagcttgtctgcacccacaatgcttcacaattcctccggagacttttctcaagctcactcaaccctgaaacttgcaaatcaccagcggcctgtatcccggcaggtcacctgcctgcgcactcaagttctggaggacagtgaagacagtttctgcaggagacacccaggcctgggcaaagctttcccttctgggtgctctgcagtcagcgagcctgcgtctgagtctgtggttggagccctccctgcagagcatcagttttcatttatggaaaaacgtaatcaatggctggtatctcagctttcagcggcttctcctgacactggccatgactcagacaaatcagaccaaagtttacctaatgcctcagcagactccttgggcggtagccaggagatggtgcaacggccccagcctcacaggaaccgagcaggcctggatctgccaaccatagacacgggatatgattcccagccccaggatgtcctgggcatcaggcagctggaaaggcccctgcccctcacctccgtgtgttacccccaggacctccccagacctctcaggtccagggagttccctcagtttgaacctcagaggtatccagcatgtgcacagatgctgcctcccaatctttccccacatgctccatggaactatcattaccattgtcctggaagtcccgatcaccaggtgccatatggccatgactaccctcgagcagcctaccagcaagtgatccagccggctctgcctgggcagcccctgcctggagccagtgtgagaggcctgcaccctgtgcagaaggttatcctgaattatcccagcccctgggaccaagaagagaggcccgcacagagagactgctcctttccggggcttccaaggcaccaggaccagccacatcaccagccacctaatagagctggtgctcctggggagtccttggagtgccctgcagagctgagaccacaggttccccagcctccgtccccagctgctgtgcctagaccccctagcaaccctccagccagaggaactctaaaaacaagcaatttgccagaagaattgcggaaagtctttatcacttattcgatggacacagctatggaggtggtgaaattcgtgaactttttgttggtaaatggcttccaaactgcaattgacatatttgaggatagaatccgaggcattgatatcattaaatggatggagcgctaccttagggataagaccgtgatgataatcgtagcaatcagccccaaatacaaacaggacgtggaaggcgctgagtcgcagctggacgaggatgagcatggcttacatactaagtacattcatcgaatgatgcagattgagttcataaaacaaggaagcatgaatttcagattcatccctgtgctcttcccaaatgctaagaaggagcatgtgcccacctggcttcagaacactcatgtctacagctggcccaagaataaaaaaaacatcctgctgcggctgctgagagaggaagagtatgtggctcctccacgggggcctctgcccacccttcaggtggttcccttgtgacaccgttcatccccagatcactgaggccaggccatgtttggggccttgttctgacagcattctggctgaggctggtcggtagcactcctggctggtttttttctgttcctccccgagaggccctctggcccccaggaaacctgttgtgcagagctcttccccggagacctccacacaccctggctttgaagtggagtctgtgactgctctgcattctctgcttttaaaaaaaccattgcaggtgccagtgtcccatatgttcctcctgacagtttgatgtgtccattctgggcctctcagtgcttagcaagtagataatgtaagggatgtggcagcaaatggaaatgactacaaacactctcctatcaatcacttcaggctacttttatgagttagccagatgcttgtgtatcctcagaccaaactgattcatgtacaaataataaaatgtttactcttttgta

SEQ ID NO: 354584 - DNA, 2368 bp, Homo sapiens
gggtggaagaagctcgactccctcttcttccccattatctgcccacaatcccctcctttggagctgctaatgattactaattcttaacattcgagttcaatctcctcccggagacaccctcccaggcgagggcactgcgactacactgaggttctgcccactcctgggcagcttcttagctgggtggcgaaaacaaaaatgccgcctaattggtcactggccctttctcatgaatgaaggaggtttctgttttaagaaataaagtgactcctcagccgttgattcactgcccacagggagattttgagcagaggcttcctaggctccgtagaaatttgcatacagcttccacttcctgcttcagagcctgttcttctacttacctgggcccggagaaggtggagggagacgagaagccgccgagagccgactaccctccgggcccagtctgtctgtccgtggtggatctaagaaactagaatgaaccgaagcattcctgtggaggttgatgaatcagaaccatacccaagtcagttgctgaaaccaatcccagaatattccccggaagaggaatcagaaccacctgctccaaatataaggaacatggcacccaacagcttgtctgcacccacaatgcttcacaattcctccggagacttttctcaagctcactcaaccctgaaacttgcaaatcaccagcggcctgtatcccggcaggtcacctgcctgcgcactcaagttctggaggacagtgaagacagtttctgcaggagacacccaggcctgggcaaagctttcccttctgggtgctctgcagtcagcgagcctgcgtctgagtctgtggttggagccctccctgcagagcatcagttttcatttatggaaaaacgtaatcaatggctggtatctcagctttcagcggcttctcctgacactggccatgactcagacaaatcagaccaaagtttacctaatgcctcagcagactccttgggcggtagccaggagatggtgcaacggccccagcctcacaggaaccgagcaggcctggatctgccaaccatagacacgggatatgattcccagccccaggatgtcctgggcatcaggcagctggaaaggcccctgcccctcacctccgtgtgttacccccaggacctccccagacctctcaggtccagggagttccctcagtttgaacctcagaggtatccagcatgtgcacagatgctgcctcccaatctttccccacatgctccatggaactatcattaccattgtcctggaagtcccgatcaccaggtgccatatggccatgactaccctcgagcagcctaccagcaagtgatccagccggctctgcctgggcagcccctgcctggagccagtgtgagaggcctgcaccctgtgcagaaggttatcctgaattatcccagcccctgggaccaagaagagaggcccgcacagagagactgctcctttccggggcttccaaggcaccaggaccagccacatcaccagccacctaatagagctggtgctcctggggagtccttggagtgccctgcagagctgagaccacaggttccccagcctccgtccccagctgctgtgcctagaccccctagcaaccctccagccagaggaactctaaaaacaagcaatttgccagaagaattgcggaaagtctttatcacttattcgatggacacagctatggaggtggtgaaattcgtgaactttttgttggtaaatggcttccaaactgcaattgacatatttgaggatagaatccgaggcattgatatcattaaatggatggagcgctaccttagggataagaccgtgatgataatcgtagcaatcagccccaaatacaaacaggacgtggaaggcgctgagtcgcagctggacgaggatgagcatggcttacatactaagtacattcatcgaatgatgcagattgagttcataaaacaaggaagcatgaatttcagattcatccctgtgctcttcccaaatgctaagaaggagcatgtgcccacctggcttcagaacactcatgtctacagctggcccaagaataaaaaaaacatcctgctgcggctgctgagagaggaagagtatgtggctcctccacgggggcctctgcccacccttcaggtggttcccttgtgacaccgttcatccccagatcactgaggccaggccatgtttggggccttgttctgacagcattctggctgaggctggtcggtagcactcctggctggtttttttctgttcctccccgagaggccctctggccccacagagagagcgtcagctgaggaccatcgtggggatccttagatcgacctcagcacac

SEQ ID NO: 354585 - DNA, 1166 bp, Homo sapiens
ataggaaagaaggaaatgaaggcggagagtggggagagagcagcagaattcaatttaatctgaggccaccccaagtgttttgtagaattgggctgaagaggtttcctaggcagcctcgcaggctgcacagcacaccacccccgaggtgcccacgtgcagccccgtgatttgttctccactgacagaatctataccggccactgggacacgttgtgctttaacaagatcgaaattgattgctgccagcgtgtccgtgtcggctgcttcttttggagggagccagtgggggacgggagtctcagcaggctggggtgttgcacttttccttttgtctgcagcctgatgtttgctttgtgctgaaggaagaccgtgatgataatcgtagcaatcagccccaaatacaaacaggacgtggaaggcgctgagtcgcagctggacgaggatgagcatggcttacatactaagtacattcatcgaatgatgcagattgagttcataaaacaaggaagcatgaatttcagattcatccctgtgctcttcccaaatgctaagaaggagcatgtgcccacctggcttcagaacactcatgtctacagctggcccaagaataaaaaaaacatcctgctgcggctgctgagagaggaagagtatgtggctcctccacgggggcctctgcccacccttcaggtggttcccttgtgacaccgttcatccccagatcactgaggccaggccatgtttggggccttgttctgacagcattctggctgaggctggtcggtagcactcctggctggtttttttctgttcctccccgagaggccctctggcccccaggaaacctgttgtgcagagctcttccccggagacctccacacaccctggctttgaagtggagtctgtgactgctctgcattctctgcttttaaaaaaaccattgcaggtgccagtgtcccatatgttcctcctgacagtttgatgtgtccattctgggcctctcagtgcttagcaagtagataatgtaagggatgtggcagcaaatggaaatgactacaaacactctcctatcaatcacttcaggctacttttatgagttagccagatgcttgtgtatcctcagaccaaactgattcatgtacaaataataaaatgtttactcttttgta

SEQ ID NO: 354586 - DNA, 1647 bp, Homo sapiens
gggtggaagaagctcgactccctcttcttccccattatctgcccacaatcccctcctttggagctgctaatgattactaattcttaacattcgagttcaatctcctcccggagacaccctcccaggcgagggcactgcgactacactgaggttctgcccactcctgggcagcttcttagctgggtggcgaaaacaaaaatgccgcctaattggtcactggccctttctcatgaatgaaggaggtttctgttttaagaaataaagtgactcctcagccgttgattcactgcccacagggagattttgagcagaggcttcctaggctccgtagaaatttgcatacagcttccacttcctgcttcagagcctgttcttctacttacctgggcccggagaaggtggagggagacgagaagccgccgagagccgactaccctccgggcccagtctgtctgtccgtggtggatctaagaaactagaatgaaccgaagcattcctgtggaggttgatgaatcagaaccatacccaagtcagttgctgaaaccaatcccagaatattccccggaagaggaatcagaaccacctgctccaaatataaggaacatggcacccaacagcttgtctgcacccacaatgcttcacaattcctccggagacttttctcaagctcactcaaccctgaaacttgcaaatcaccagcggcctgtatcccggcaggtcacctgcctgcgcactcaagttctggaggacagtgaagacagtttctgcaggagacacccaggcctgggcaaagctttcccttctgggtgctctgcagtcagcgagcctgcgtctgagtctgtggttggagccctccctgcagagcatcagttttcatttatggaaaaacgtaatcaatggctggtatctcagctttcagcggcttctcctgacactggccatgactcagacaaatcagaccaaagtttacctaatgcctcagcagactccttgggcggtagccaggagatggtgcaacggccccagcctcacaggaaccgagcaggcctggatctgccaaccatagacacgggatatgattcccagccccaggatgtcctgggcatcaggcagctggaaaggcccctgcccctcacctccgtgtgttacccccaggacctccccagacctctcaggtccagggagttccctcagtttgaacctcagaggtatccagcatgtgcacagatgctgcctcccaatctttccccacatgctccatggaactatcattaccattgtcctggaagtcccgatcaccaggtgccatgtaagtgatctttacctcctctgggcattctgggctgggtgactgaagaaacaagggcctcacatcaatgcttcgtgtcactaggctggcatgaacaggtcagaatgcagggagggcattctgcttctcttaggggctttccatgtgtggctggatttgcaaagggcctgcagagaatgctttttcttagcctaaagcctgtcccacttggagtctccttctctagggacctttaaggacaaaatgggttcctctgtctgggttagtttaacaaacctgcctagaagcagagagatgaccaaaatgatttctagaaaatgtattttttgttctaatct

SEQ ID NO: 354587 - DNA, 390 bp, Homo sapiens
ggaaatgaaggcggagagtggggagagagcagcagaattcaatttaatctgaggccaccccaagtgttttgtagaattgggctgaagaggtttcctaggcagcctcgcaggctgcacagcacaccacccccgaggtgcccacgtgcagccccgtgatttgttctccactgacagaatctataccggccactgggacacgttgtgctttaacaagatcgaaattgattgctgccagcgtgtccgtgtcggctgcttcttttggagggagccagtgggggacgggagtctcagcaggctggggtgttgcacttttccttttgtctgcagcctgatgtttgctttgtgctgaagggtctgttcctactgactgtgctaatgtgtacacgcaga

SEQ ID NO: 354588 - DNA, 549 bp, Homo sapiens
ttttttgaaaagttttttgagctctccagctggaataccaaactggtgatttcgcagatgtttttatttaggacaaaaaaaagtgaatttcgtgaaaacactcaagtaattaacagtagagaaatacggcaaacatcacagaggtggtaacagatatctggacccctcagctgggatcaagacacaaatgagcatggagcttatgactcctttcacacgaaggagctagagttgatgttccctgttgtctttgttgtcttcacctacagatggccatgactaccctcgagcagcctaccagcaagtgatccagccggctctgcctgggcagcccctgcctggagccagtgtgagaggcctgcaccctgtgcagaaggttatcctgaattatcccagcccctgggaccaagaagagaggcccgcacagagagactgctcctttccggggcttccaaggcaccagtaagtatgacaggcccaaccttcaggcatttttaacatggaaaggaattatgccaatgcaatgaagatgtaacagaattctctata

SEQ ID NO: 354589 - DNA, 2642 bp, Homo sapiens
gggtggaagaagctcgactccctcttcttccccattatctgcccacaatcccctcctttggagctgctaatgattactaattcttaacattcgagttcaatctcctcccggagacaccctcccaggcgagggcactgcgactacactgaggttctgcccactcctgggcagcttcttagctgggtggcgaaaacaaaaatgccgcctaattggtcactggccctttctcatgaatgaaggaggtttctgttttaagaaataaagtgactcctcagccgttgattcactgcccacagggagattttgagcagaggcttcctaggctccgtagaaatttgcatacagcttccacttcctgcttcagagcctgttcttctacttacctgggcccggagaaggtggagggagacgagaagccgccgagagccgactaccctccgggcccagtctgtctgtccgtggtggatctaagaaactagaatgaaccgaagcattcctgtggaggttgatgaatcagaaccatacccaagtcagttgctgaaaccaatcccagaatattccccggaagaggaatcagaaccacctgctccaaatataaggaacatggcacccaacagcttgtctgcacccacaatgcttcacaattcctccggagacttttctcaagctcactcaaccctgaaacttgcaaatcaccagcggcctgtatcccggcaggtcacctgcctgcgcactcaagttctggaggacagtgaagacagtttctgcaggagacacccaggcctgggcaaagctttcccttctgggtgctctgcagtcagcgagcctgcgtctgagtctgtggttggagccctccctgcagagcatcagttttcatttatggaaaaacgtaatcaatggctggtatctcagctttcagcggcttctcctgacactggccatgactcagacaaatcagaccaaagtttacctaatgcctcagcagactccttgggcggtagccaggagatggtgcaacggccccagcctcacaggaaccgagcaggcctggatctgccaaccatagacacgggatatgattcccagccccaggatgtcctgggcatcaggcagctggaaaggcccctgcccctcacctccgtgtgttacccccaggacctccccagacctctcaggtccagggagttccctcagtttgaacctcagaggtatccagcatgtgcacagatgctgcctcccaatctttccccacatgctccatggaactatcattaccattgtcctggaagtcccgatcaccaggtgccatatggccatgactaccctcgagcagcctaccagcaagtgatccagccggctctgcctgggcagcccctgcctggagccagtgtgagaggcctgcaccctgtgcagaaggttatcctgaattatcccagcccctgggaccaagaagagaggcccgcacagagagactgctcctttccggggcttccaaggcaccaggaccagccacatcaccagccacctaatagagctggtgctcctggggagtccttggagtgccctgcagagctgagaccacaggttccccagcctccgtccccagctgctgtgcctagaccccctagcaaccctccagccagaggaactctaaaaacaagcaatttgccagaagaattgcggaaagtctttatcacttattcgatggacacagctatggaggtggtgaaattcgtgaactttttgttggtaaatggcttccaaactgcaattgacatatttgaggatagaatccgaggcattgatatcattaaatggatggagcgctaccttagggataagaccgtgatgataatcgtagcaatcagccccaaatacaaacaggacgtggaaggcgctgagtcgcagctggacgaggatgagcatggcttacatactaagtacattcatcgaatgatgcagattgagttcataaaacaaggaagcatgaatttcagattcatccctgtgctcttcccaaatgctaagaaggagcatgtgcccacctggcttcagaacactcatgtctacagctggcccaagaataaaaaaaacatcctgctgcggctgctgagagaggaagagtatgtggctcctccacgggggcctctgcccacccttcaggtggttcccttgtgacaccgttcatccccagatcactgaggccaggccatgtttggggccttgttctgacagcattctggctgaggctggtcggtagcactcctggctggtttttttctgttcctccccgagaggccctctggcccccaggaaacctgttgtgcagagctcttccccggagacctccacacaccctggctttgaagtggagtctgtgactgctctgcattctctgcttttaaaaaaaccattgcaggtgccagtgtcccatatgttcctcctgacagtttgatgtgtccattctgggcctctcagtgcttagcaagtagataatgtaagggatgtggcagcaaatggaaatgactacaaacactctcctatcaatcacttcaggctacttttatgagttagccagatgcttgtgtatcctcagaccaaactgattcatgtacaaataataaaatgtttactcttttgta

SEQ ID NO: 354590 - DNA, 619 bp, Homo sapiens
atgtctgtatatcctccacacggtttatacatatacaagcagatatgcacacagaaacacacattctcctctcgttttttacacaaaatagcagcatagtatgcacactgctctgcgcctggcttttaaaaaaaaactcaatatatcttagagatcattccatatcagttactaagatttatttcttcatgtattccaagcacacacgaagcagcccacattatgataatttctctttcctcaatactgggcagttgattttcatctgtgttttccccttgctggtgaatgatttctaccacaggatggtccaatcacattctttgaattgccttccagataaaatatcttaataaacattagtgctttggcctggaggataagtaaacaattttatgtgattagggctttgcaagcacattggtgtctcactgttaatttaaaccacatcttgaatgaggtcccttaaggtcataaagtgaggactccaagaatttatctgtcttctaaggctatagcatgttttctcttgttccagaaactagaatgaaccgaagcattcctgtggaggttgatgaatcagtacgctggaatggaattgggggacctctagagtcga

SEQ ID NO: 354591 - DNA, 3391 bp, Homo sapiens
gggtggaagaagctcgactccctcttcttccccattatctgcccacaatcccctcctttggagctgctaatgattactaattcttaacattcgagttcaatctcctcccggagacaccctcccaggcgagggcactgcgactacactgaggttctgcccactcctgggcagcttcttagctgggtggcgaaaacaaaaatgccgcctaattggtcactggccctttctcatgaatgaaggaggtttctgttttaagaaataaagtgactcctcagccgttgattcactgcccacagggagattttgagcagaggcttcctaggctccgtagaaatttgcatacagcttccacttcctgcttcagagcctgttcttctacttacctgggcccggagaaggtggagggagacgagaagccgccgagagccgactaccctccgggcccagtctgtctgtccgtggtggatctaagaaactagaatgaaccgaagcattcctgtggaggttgatgaatcagaaccatacccaagtcagttgctgaaaccaatcccagaatattccccggaagaggaatcagaaccacctgctccaaatataaggaacatggcacccaacagcttgtctgcacccacaatgcttcacaattcctccggagacttttctcaagctcactcaaccctgaaacttgcaaatcaccagcggcctgtatcccggcaggtcacctgcctgcgcactcaagttctggaggacagtgaagacagtttctgcaggagacacccaggcctgggcaaagctttcccttctgggtgctctgcagtcagcgagcctgcgtctgagtctgtggttggagccctccctgcagagcatcagttttcatttatggaaaaacgtaatcaatggctggtatctcagctttcagcggcttctcctgacactggccatgactcagacaaatcagaccaaagtttacctaatgcctcagcagactccttgggcggtagccaggagatggtgcaacggccccagcctcacaggaaccgagcaggcctggatctgccaaccatagacacgggatatgattcccagccccaggatgtcctgggcatcaggcagctggaaaggcccctgcccctcacctccgtgtgttacccccaggacctccccagacctctcaggtccagggagttccctcagtttgaacctcagaggtatccagcatgtgcacagatgctgcctcccaatctttccccacatgctccatggaactatcattaccattgtcctggaagtcccgatcaccaggtgccatatggccatgactaccctcgagcagcctaccagcaagtgatccagccggctctgcctgggcagcccctgcctggagccagtgtgagaggcctgcaccctgtgcagaaggttatcctgaattatcccagcccctgggaccaagaagagaggcccgcacagagagactgctcctttccggggcttccaaggcaccaggaccagccacatcaccagccacctaatagagctggtgctcctggggagtccttggagtgccctgcagagctgagaccacaggttccccagcctccgtccccagctgctgtgcctagaccccctagcaaccctccagccagaggaactctaaaaacaagcaatttgccagaagaattgcggaaagtctttatcacttattcgatggacacagctatggaggtggtgaaattcgtgaactttttgttggtaaatggcttccaaactgcaattgacatatttgaggatagaatccgaggcattgatatcattaaatggatggagcgctaccttagggataagaccgtgatgataatcgtagcaatcagccccaaatacaaacaggacgtggaaggcgctgagtcgcagctggacgaggatgagcatggcttacatactaagtacattcatcgaatgatgcagattgagttcataaaacaaggaagcatgaatttcagattcatccctgtgctcttcccaaatgctaagaaggagcatgtgcccacctggcttcagaacactcatgtctacagctggcccaagaataaaaaaaacatcctgctgcggctgctgagagaggaagagtatgtggctcctccacgggggcctctgcccacccttcaggtggttcccttgtgacaccgttcatccccagatcactgaggccaggccatgtttggggccttgttctgacagcattctggctgaggctggtcggtagcactcctggctggtttttttctgttcctccccgagaggccctctggcccccaggaaacctgttgtgcagagctcttccccggagacctccacacaccctggctttgaagtggagtctgtgactgctctgcattctctgcttttaaaaaaaccattgcaggtgccagtgtcccatatgttcctcctgacagtttgatgtgtccattctgggcctctcagtgcttagcaagtagataatgtaagggatgtggcagcaaatggaaatgactacaaacactctcctatcaatcacttcaggctacttttatgagttagccagatgcttgtgtatcctcagaccaaactgattcatgtacaaataataaaatgtttactcttttgtaagattatgttttacttatctcaaaggagatacatataatttataatgatatgggcagttgcttccagggacatcaacaaagctgcttagatataatattagataaatataacagaccactctgtattaatggattacagatgggagccaccacgcccagcccagtccagctcttatatgtagcacagggaaaggacaaatacttgtcaactataaataagaaacattgctaatgcattgcaaagaacactagtttcatttactttataacttagatgtctactgggtgagacgaatgtctttgttctttaaaaaataggaaaagagaagaaaaactagcataacataagtactcatttgtaagactttctgacatgtaacattagttccgtagttttgagacctggtagaactgactttcatatttggataacctggaaaacacccaaacacaaacttcaagtcttctttctcttttttcattatcttttttagtctgaggtgacaccatcattaaggattcgacacccgtttgtaaataaaatgacatcagcaattactctgaaatgtttctagtttgcaaagacttagcaatgtgatgttattaacccttcctcccttcagagacctgtcctaagctctgaaccactcattccttccactcttcttaccccaggtggttgatgagcagtggtccctggtgttccacaaagagtcattaaagtgttacagctggtagcactggtagca

SEQ ID NO: 354592 - DNA, 2567 bp, Homo sapiens
gggtggaagaagctcgactccctcttcttccccattatctgcccacaatcccctcctttggagctgctaatgattactaattcttaacattcgagttcaatctcctcccggagacaccctcccaggcgagggcactgcgactacactgaggttctgcccactcctgggcagcttcttagctgggtggcgaaaacaaaaatgccgcctaattggtcactggccctttctcatgaatgaaggaggtttctgttttaagaaataaagtgactcctcagccgttgattcactgcccacagggagattttgagcagaggcttcctaggctccgtagaaatttgcatacagcttccacttcctgcttcagagcctgttcttctacttacctgggcccggagaaggtggagggagacgagaagccgccgagagccgactaccctccgggcccagtctgtctgtccgtggtggatctaagaaactagaatgaaccgaagcattcctgtggaggttgatgaatcagaaccatacccaagtcagttgctgaaaccaatcccagaatattccccggaagaggaatcagaaccacctgctccaaatataaggaacatggcacccaacagcttgtctgcacccacaatgcttcacaattcctccggagacttttctcaagctcactcaaccctgaaacttgcaaatcaccagcggcctgtatcccggcaggtcacctgcctgcgcactcaagttctggaggacagtgaagacagtttctgcaggagacacccaggcctgggcaaagctttcccttctgggtgctctgcagtcagcgagcctgcgtctgagtctgtggttggagccctccctgcagagcatcagttttcatttatggaaaaacgtaatcaatggctggtatctcagctttcagcggcttctcctgacactggccatgactcagacaaatcagaccaaagtttacctaatgcctcagcagactccttgggcggtagccaggagatggtgcaacggccccagcctcacaggaaccgagcaggcctggatctgccaaccatagacacgggatatgattcccagccccaggatgtcctgggcatcaggcagctggaaaggcccctgcccctcacctccgtgtgttacccccaggacctccccagacctctcaggtccagggagttccctcagtttgaacctcagaggtatccagcatgtgcacagatgctgcctcccaatctttccccacatgctccatggaactatcattaccattgtcctggaagtcccgatcaccaggtgccatatggccatgactaccctcgagcagcctaccagcaagtgatccagccggctctgcctgggcagcccctgcctggagccagtgtgagaggcctgcaccctgtgcagaaggttatcctgaattatcccagcccctgggaccaagaagagaggcccgcacagagagactgctcctttccggggcttccaaggcaccaggaccagccacatcaccagccacctaatagagctggtgctcctggggagtccttggagtgccctgcagagctgagaccacaggttccccagcctccgtccccagctgctgtgcctagaccccctagcaaccctccagccagaggaactctaaaaacaagcaatttgccagaagaattgcggaaagtctttatcacttattcgatggacacagctatggaggtggtgaaattcgtgaactttttgttggtaaatggcttccaaactgcaattgacatatttgaggatagaatccgaggcattgatatcattaaatggatggagcgctaccttagggataagaccgtgatgataatcgtagcaatcagccccaaatacaaacaggacgtggaaggcgctgagtcgcagctggacgaggatgagcatggcttacatactaagtacattcatcgaatggagcatgtgcccacctggcttcagaacactcatgtctacagctggcccaagaataaaaaaaacatcctgctgcggctgctgagagaggaagagtatgtggctcctccacgggggcctctgcccacccttcaggtggttcccttgtgacaccgttcatccccagatcactgaggccaggccatgtttggggccttgttctgacagcattctggctgaggctggtcggtagcactcctggctggtttttttctgttcctccccgagaggccctctggcccccaggaaacctgttgtgcagagctcttccccggagacctccacacaccctggctttgaagtggagtctgtgactgctctgcattctctgcttttaaaaaaaccattgcaggtgccagtgtcccatatgttcctcctgacagtttgatgtgtccattctgggcctctcagtgcttagcaagtagataatgtaagggatgtggcagcaaatggaaatgactacaaacactctcctatcaatcacttcaggctacttttatgagttagccagatgcttgtgtatcctcagaccaaactgattcatgtacaaataataaaatgtttactcttttgta

SEQ ID NO: 354593 - DNA, 948 bp, Homo sapiens
ataggaaagaaggaaatgaaggcggagagtggggagagagcagcagaattcaatttaatctgaggccaccccaagtgttttgtagaattgggctgaagaggtttcctaggcagcctcgcaggctgcacagcacaccacccccgagaagaccgtgatgataatcgtagcaatcagccccaaatacaaacaggacgtggaaggcgctgagtcgcagctggacgaggatgagcatggcttacatactaagtacattcatcgaatgatgcagattgagttcataaaacaaggaagcatgaatttcagattcatccctgtgctcttcccaaatgctaagaaggagcatgtgcccacctggcttcagaacactcatgtctacagctggcccaagaataaaaaaaacatcctgctgcggctgctgagagaggaagagtatgtggctcctccacgggggcctctgcccacccttcaggtggttcccttgtgacaccgttcatccccagatcactgaggccaggccatgtttggggccttgttctgacagcattctggctgaggctggtcggtagcactcctggctggtttttttctgttcctccccgagaggccctctggcccccaggaaacctgttgtgcagagctcttccccggagacctccacacaccctggctttgaagtggagtctgtgactgctctgcattctctgcttttaaaaaaaccattgcaggtgccagtgtcccatatgttcctcctgacagtttgatgtgtccattctgggcctctcagtgcttagcaagtagataatgtaagggatgtggcagcaaatggaaatgactacaaacactctcctatcaatcacttcaggctacttttatgagttagccagatgcttgtgtatcctcagaccaaactgattcatgtacaaataataaaatgtttactcttttgta

SEQ ID NO: 354594 - DNA, 1114 bp, Homo sapiens
ataggaaagaaggaaatgaaggcggagagtggggagagagcagcagaattcaatttaatctgaggccaccccaagtgttttgtagaattgggctgaagaggtttcctaggcagcctcgcaggctgcacagcacaccacccccgaggtgcccacgtgcagccccgtgatttgttctccactgacagaatctataccggccactgggacacgttgtgctttaacaagatcgaaattgattgctgccagcgtgtccgtgtcggctgcttcttttggagggagccagtgggggacgggagtctcagcaggctgggaagaccgtgatgataatcgtagcaatcagccccaaatacaaacaggacgtggaaggcgctgagtcgcagctggacgaggatgagcatggcttacatactaagtacattcatcgaatgatgcagattgagttcataaaacaaggaagcatgaatttcagattcatccctgtgctcttcccaaatgctaagaaggagcatgtgcccacctggcttcagaacactcatgtctacagctggcccaagaataaaaaaaacatcctgctgcggctgctgagagaggaagagtatgtggctcctccacgggggcctctgcccacccttcaggtggttcccttgtgacaccgttcatccccagatcactgaggccaggccatgtttggggccttgttctgacagcattctggctgaggctggtcggtagcactcctggctggtttttttctgttcctccccgagaggccctctggcccccaggaaacctgttgtgcagagctcttccccggagacctccacacaccctggctttgaagtggagtctgtgactgctctgcattctctgcttttaaaaaaaccattgcaggtgccagtgtcccatatgttcctcctgacagtttgatgtgtccattctgggcctctcagtgcttagcaagtagataatgtaagggatgtggcagcaaatggaaatgactacaaacactctcctatcaatcacttcaggctacttttatgagttagccagatgcttgtgtatcctcagaccaaactgattcatgtacaaataataaaatgtttactcttttgta

SEQ ID NO: 354595 - DNA, 379 bp, Homo sapiens
atgtgtctatgaggaggggtcaggttatagagtttatatgagggtttgaggaattcgattcgtggtcggaaccagtttctgtgagttttgccacatttggtcttgcagtatttcagcagtgcctgggaatggctaagccctcagcttgggctcaagccttcaaggcaaaacttgcagctgtccaggtcacagaactgtgaaggcaccctgtgtttctcagcacaaagaaagaaagtgggaggaactagggggcaaactcttgtttgcctttctccaataaaataaatttgagagcaagacctaatctgtcttattctgtgactatcacaggacctagcacttagttagatattcaataaatagggcgccaaatgaatgc

SEQ ID NO: 354596 - DNA, 5485 bp, Homo sapiens
ggacggccatactatttttatcttgctttttcgttctgtcgcagtactgtttaatatgagtccagcgacggctctgtgactgttttcctctggtaaaatcgctcttgcgtcctcagcgtttatctcaggtgcggaaggtctcacaggtttggaaatagcgccggaaaaatcgatccgcggagtgagacggctcgtaccacactgcagggcccggaggtcaagatggtggctgtaaaactaggatccctgacgattgcttagcattaaggcccgacatggaaccggggtgtgacgagttcctgccgccaccggagtgcccggtttttgagcctagctgggctgaattccaagacccgcttggctacattgcgaaaataaggcccatagcagagaagtctggcatctgcaaaatccgcccacccgcggattggcagcctccttttgcagtagaagttgacaatttcagatttactcctcgcgtccaaaggctaaatgaactggaggcccaaactagagtgaaattgaactatttggatcagattgcaaaattctgggaaattcaaggctcctctttaaagattcccaatgtggagcggaagatcttggacctctacagccttagtaagattgtgattgaggaaggtggctatgaagccatctgcaaggatcgtcggtgggctcgagttgcccagcgtctccactacccaccaggcaaaaacattggctccctgctacgatcacattacgaacgcattatttacccctatgaaatgtttcagtctggagccaaccatgtgcaatgtaacacacacccgtttgacaatgaggtaaaagataaggaatacaagccccacagcatcccccttagacagtctgtgcagccttcaaagttcagcagctacagtcgacgggcaaaaaggctacagcctgatccagagcctacagaggaggacattgagaagcatccagagctaaagaagttacagatatatgggccaggtcccaaaatgatgggcttgggccttatggctaaggataaggataagactgtgcataagaaagtcacatgccccccaactgttacggtgaaggatgagcaaagtggaggtgggaacgtgtcatcaacattgctcaagcagcacttgagcctagagccctgcactaagacaaccatgcaacttcgaaagaatcacagcagtgcccagtttattgactcatatatttgccaagtatgctcccgtggggatgaagatgataagcttcttttctgtgatggctgtgatgacaattaccacatcttctgcttgttaccaccccttcctgaaatccccagaggcatctggaggtgcccaaaatgtatcttggcggagtgtaaacagcctcctgaagcttttggatttgaacaggctacccaggagtacagtttgcagagttttggtgaaatggctgattccttcaagtccgactacttcaacatgcctgtacatatggtgcctacagaacttgtagagaaggaattctggaggctggtgagcagcattgaggaagacgtgacagttgaatatggagctgatattcattccaaagaatttggcagtggctttcctgtcagcaatagcaaacaaaacttatctcctgaggagaaggagtatgcgaccagtggttggaacctgaatgtgatgccagtgctagatcagtctgttctctgtcacatcaatgcagacatctcaggcatgaaggtgccctggctgtacgtgggcatggttttctcagcattttgttggcatattgaggatcactggagttactctattaactatctgcattggggtgagccgaagacctggtatggtgtaccctccctggcagcagagcatttggaggaggtgatgaagatgctgacacctgagctgtttgatagccagcctgatctcctacaccagcttgtcactctcatgaatcccaacactttgatgtcccatggtgtgccagttgtccgcacaaaccagtgtgcaggggagtttgtcatcacttttcctcgtgcttaccacagtggttttaaccaaggctacaattttgctgaagctgtcaacttttgtactgctgactggctacctgctggacgccagtgcattgaacactaccgccggctccggcgctattgtgtcttctcccacgaggagctcatctgcaagatggctgccttcccagagacgttggatctcaatctagcagtagctgtgcacaaggagatgttcattatggttcaggaggagcgacgtctacgaaaggcccttttggagaagggcgtcacggaggctgagcgagaggcttttgagctgctcccagatgatgaacgccagtgcatcaagtgcaagaccacgtgcttcttgtcagccctggcctgctacgactgcccagatggccttgtatgcctttcccacatcaatgacctctgcaagtgctctagtagccgacagtacctccggtatcggtacaccttggatgagctccccaccatgctgcataaactgaagattcgggctgagtcttttgacacctgggccaacaaagtgcgagtggccttggaggtggaggatggccgtaaacgcagctttgaagagctaagggcactggagtctgaggctcgtgagaggaggtttcctaatagtgagctgcttcagcgactgaagaactgcctgagtgaggtggaggcttgtattgctcaagtcctggggctggtcagtggtcaggtggccaggatggacactccacagctgaccttgactgaactccgggtccttcttgagcagatgggcagcctgccctgtgccatgcatcagattggggatgtcaaggatgtcctggaacaggtggaggcctatcaagctgaggctcgtgaggctctggccacactgccctctagtccagggctattgcggtccctgttggagagggggcagcagctgggtgtagaggtgcctgaagcccatcagcttcagcagcaggtggagcaggcgcaatggctagatgaagtgaagcaggccctggccccttctgctcacaggggctctctggtcatcatgcaggggcttttggttatgggtgccaagatagcctccagcccttctgtggacaaggcccgggctgagctgcaagaactactgaccattgcagagcgctgggaagaaaaggctcatttctgcctggaggccaggcagaagcatccaccagccacattggaagccataattcgtgagacagaaaacatccctgttcacctgcctaacatccaggctctcaaagaagctctgactaaggcacaagcttggattgctgatgtggatgagatccaaaatggtgaccactacccctgtctagatgacttggagggcctggtggctgtgggccgggacctgcctgtggggctggaagagctgagacagctagagctgcaggtattgacagcacattcctggagagagaaggcctccaagacctttctcaagaagaattcttgctacacactgcttgaggtgctttgcccgtgtgcagacgctggctcagacagcaccaagcgtagccggtggatggagaaggcgctggggttgtaccagtgtgacacagagctgctggggctgtctgcacaggacctcagagacccaggctctgtgattgtggccttcaaggaaggggaacagaaggagaaggagggtatcctgcagctgcgtcgcaccaactcagccaagcccagtccactggcaccatccctcatggcctcttctccgacttctatctgtgtgtgtgggcaggtgccagctggggtgggagttctgcagtgtgacctgtgtcaggactggttccatgggcagtgtgtgtcagtgccccatctcctcacctctccaaagcccagtctcacttcatctccactgctagcctggtgggaatgggacacaaaattcctgtgtccactgtgtatgcgctcacgacggccacgcctagagacaatcctagccttgctggttgccctgcagaggctgcccgtgcggctgcctgagggtgaggcccttcagtgtctcacagagagggccattggctggcaagaccgtgccagaaaggctctggcctctgaagatgtgactgctctgttgcgacagctggctgagcttcgccaacagctacaggccaaacccagaccagaggaggcctcagtctacacttcagccactgcctgtgaccctatcagagaaggcagtggcaacaatatttctaaggtccaagggctgctggagaatggagacagtgtgaccagtcctgagaacatggctccaggaaagggctctgacctggagctactgtcctcactgttgccgcagttgactggccctgtgttggagctgcctgaggcaatccgggctcccctggaggagctcatgatggaaggggacctgcttgaggtgaccctggatgagaaccacagcatctggcagctgctgcaggctggacagcctccagacctggacagaattcgcacacttctggagctggaaaaatttgaacatcaagggagtcggacaaggagccgggctctggagaggcgacggcggcggcagaaggtggatcagggtagaaacgttgagaatcttgttcaacaggagcttcagtcaaaaagggctcggagctcagggattatgtctcaggtgggccgagaagaagaacattatcaggagaaagcagaccgtgaaaatatgttcctgacaccttccacagaccacagccctttcttgaaaggaaaccaaaatagcttacaacacaaggattcaggctcttcagctgcttgtccttctttaatgcctttgctacaactctcctactctgatgagcaacagttgtgacagtggcaccaaaggtcatttgtggttgtttttgtttgtttgtttcttaaatcctactatctcctggcctggacctcagaaggagctttttgcctatctataatttttcactgccaatttttgatatcctctctcctagagttactgttaaaaggttggttcgtaaagtccacaccccgatgctcagaagtgtcttgccagcaacattcctgctagcatacaggagtgatttcctaaaccagtttcattctagtctgaatagggacaaacaaatcttgaggaagcccaagtgcgtacctttatttttgcccccaccaccctctttctgtacttcaatttttgtttgttttttgtttttttgtccctgtcataaaatattttggtgcttcaaaacttgtaccttcattgtacatccttttcttttctccccttgggtcttattataaaagaagacaatgtacgttgtaattaccaaaaagaatagggaaaaacaagaatttcatgactctacctgtggtctatctttaatttcatttcttttgttaaaaataaaacaatgagtatgtttggatactatgaatataatttga

SEQ ID NO: 354597 - DNA, 1723 bp, Homo sapiens
ggacggccatactatttttatcttgctttttcgttctgtcgcagtactgtttaatatgagtccagcgacggctctgtgactgttttcctctggtaaaatcgctcttgcgtcctcagcgtttatctcaggtgcggaaggtctcacaggtttggaaatagcgccggaaaaatcgatccgcggagtgagacggctcgtaccacactgcagggcccggaggtcaagatggtggctgtaaaactaggatccctgacgattgcttagcattaaggcccgacatggaaccggggtgtgacgagttcctgccgccaccggagtgcccggtttttgagcctagctgggctgaattccaagacccgcttggctacattgcgaaaataaggcccatagcagagaagtctggcatctgcaaaatccgcccacccgcggattggcagcctccttttgcagtagaagttgacaatttcagatttactcctcgcgtccaaaggctaaatgaactggaggcccaaactagagtgaaattgaactatttggatcagattgcaaaattctgggaaattcaaggctcctctttaaagattcccaatgtggagcggaagatcttggacctctacagccttagtaagattgtgattgaggaaggtggctatgaagccatctgcaaggatcgtcggtgggctcgagttgcccagcgtctccactacccaccaggcaaaaacattggctccctgctacgatcacattacgaacgcattatttacccctatgaaatgtttcagtctggagccaaccatgtgccagagcctacagaggaggacattgagaagcatccagagctaaagaagttacagatatatgggccaggtcccaaaatgatgggcttgggccttatggctaaggataaggataagactgtgcataagaaagtcacatgccccccaactgttacggtgaaggatgagcaaagtggaggtgggaacgtgtcatcaacattgctcaagcagcacttgagcctagagccctgcactaagacaaccatgcaacttcgaaagaatcacagcagtgcccagtttattgactcatatatttgccaagtatgctcccgtggggatgaagatgataagcttcttttctgtgatggctgtgatgacaattaccacatcttctgcttgttaccaccccttcctgaaatccccagaggcatctggaggtgcccaaaatgtatcttggcggagtgtaaacagcctcctgaagcttttggatttgaacaggctacccaggagtacagtttgcagagttttggtgaaatggctgattccttcaagtccgactacttcaacatgcctgtacatatggtgcctacagaacttgtagagaaggaattctggaggctggtgagcagcattgaggaagacgtgacagttgaatatggagctgatattcattccaaagaatttggcagtggctttcctgtcagcaatagcaaacaaaacttatctcctgaggagaaggagtatgcgaccagtggttggaacctgaatgtggaaccagatggcacaggcctcacctgcagcctggcacccaatatcatctcacagctctgaggccctgggccagattacttcctccacccctccctatctcacctgcccagccctgtgctggggccctgcaattggaatgttggccagatttttgcaataaacacttgtggtttgcggcc

SEQ ID NO: 354598 - DNA, 999 bp, Homo sapiens
ggacggccatactatttttatcttgctttttcgttctgtcgcagtactgtttaatatgagtccagcgacggctctgtgactgttttcctctggtaaaatcgctcttgcgtcctcagcgtttatctcaggtgcggaaggtctcacaggtttggaaatagcgccggaaaaatcgatccgcggagtgagacggctcgtaccacactgcagggcccggaggtcaagatggtggctgtaaaactaggatccctgacgattgcttagcattaaggcccgacatggaaccggggtgtgacgagttcctgccgccaccggagtgcccggtttttgagcctagctgggctgaattccaagacccgcttggctacattgcgaaaataaggcccatagcagagaagtctggcatctgcaaaatccgcccacccgcggattggcagcctccttttgcagtagaagttgacaatttcagatttactcctcgcgtccaaaggctaaatgaactggaggcccaaactagagtgaaattgaactatttggatcagattgcaaaattctgggaaattcaaggctcctctttaaagattcccaatgtggagcggaagatcttggacctctacagccttagtaagattgtgattgaggaaggtggctatgaagccatctgcaaggatcgtcggtgggctcgagttgcccagcgtctccactacccaccaggcaaaaacattggctccctgctacgatcacattacgaacgcattatttacccctatgaaatgtttcagtctggagccaaccatgtgcaatgtaacacacacccgtttgacaatgaggtaaaagataaggaatacaagccccacagcatcccccttagacagtctgtgcagccttcaaagttcagcagctacagtcgacgggcaaaaaggctacagcctgatgtgagtgactgttactcctgttattcttcctatagctgagaaggttcatctagaccttgatattggg

SEQ ID NO: 354599 - DNA, 369 bp, Homo sapiens
tgttccttctggctcctataggatggacactccacagctgaccttgactgaactccgggtccttcttgagcagatgggcagcctgccctgtgccatgcatcagattggggatgtcaaggttctttcctggaagtggcggagatatgtgttcccataccatctctgtgtgtacagcatgcaaggaaatatccttccagactgaaataattaaaaactctaaactgggcctacataagacactggctcttgggaatggggtggagaggactgattggttggttggttgatttccctccagacaccagagtcttagaaagcttactagatggataagattgtattaaagtgggtttggaaaaagaaatttag

SEQ ID NO: 354600 - DNA, 5119 bp, Homo sapiens
ggacggccatactatttttatcttgctttttcgttctgtcgcagtactgtttaatatgagtccagcgacggctctgtgactgttttcctctggtaaaatcgctcttgcgtcctcagcgtttatctcaggtgcggaaggtctcacaggtttggaaatagcgccggaaaaatcgatccgcggagtgagacggctcgtaccacactgcagggcccggaggtcaagatggtggctgtaaaactaggatccctgacgattgcttagcattaaggcccgacatggaaccggggtgtgacgagttcctgccgccaccggagtgcccggtttttgagcctagctgggctgaattccaagacccgcttggctacattgcgaaaataaggcccatagcagagaagtctggcatctgcaaaatccgcccacccgcggattggcagcctccttttgcagtagaagttgacaatttcagatttactcctcgcgtccaaaggctaaatgaactggaggcccaaactagagtgaaattgaactatttggatcagattgcaaaattctgggaaattcaaggctcctctttaaagattcccaatgtggagcggaagatcttggacctctacagccttagtaagattgtgattgaggaaggtggctatgaagccatctgcaaggatcgtcggtgggctcgagttgcccagcgtctccactacccaccaggcaaaaacattggctccctgctacgatcacattacgaacgcattatttacccctatgaaatgtttcagtctggagccaaccatgtgccagagcctacagaggaggacattgagaagcatccagagctaaagaagttacagatatatgggccaggtcccaaaatgatgggcttgggccttatggctaaggataaggataagactgtgcataagaaagtcacatgccccccaactgttacggtgaaggatgagcaaagtggaggtgggaacgtgtcatcaacattgctcaagcagcacttgagcctagagccctgcactaagacaaccatgcaacttcgaaagaatcacagcagtgcccagtttattgactcatatatttgccaagtatgctcccgtggggatgaagatgataagcttcttttctgtgatggctgtgatgacaattaccacatcttctgcttgttaccaccccttcctgaaatccccagaggcatctggaggtgcccaaaatgtatcttggcggagtgtaaacagcctcctgaagcttttggatttgaacaggctacccaggagtacagtttgcagagttttggtgaaatggctgattccttcaagtccgactacttcaacatgcctgtacatatggtgcctacagaacttgtagagaaggaattctggaggctggtgagcagcattgaggaagacgtgacagttgaatatggagctgatattcattccaaagaatttggcagtggctttcctgtcagcaatagcaaacaaaacttatctcctgaggagaaggagtatgcgaccagtggttggaacctgaatgtgatgccagtgctagatcagtctgttctctgtcacatcaatgcagacatctcaggcatgaaggtgccctggctgtacgtgggcatggttttctcagcattttgttggcatattgaggatcactggagttactctattaactatctgcattggggtgagccgaagacctggtatggtgtaccctccctggcagcagagcatttggaggaggtgatgaagatgctgacacctgagctgtttgatagccagcctgatctcctacaccagcttgtcactctcatgaatcccaacactttgatgtcccatggtgtgccagttgtccgcacaaaccagtgtgcaggggagtttgtcatcacttttcctcgtgcttaccacagtggttttaaccaaggctacaattttgctgaagctgtcaacttttgtactgctgactggctacctgctggacgccagtgcattgaacactaccgccggctccggcgctattgtgtcttctcccacgaggagctcatctgcaagatggctgccttcccagagacgttggatctcaatctagcagtagctgtgcacaaggagatgttcattatggttcaggaggagcgacgtctacgaaaggcccttttggagaagggcgtcacggaggctgagcgagaggcttttgagctgctcccagatgatgaacgccagtgcatcaagtgcaagaccacgtgcttcttgtcagccctggcctgctacgactgcccagatggccttgtatgcctttcccacatcaatgacctctgcaagtgctctagtagccgacagtacctccggtatcggtacaccttggatgagctccccaccatgctgcataaactgaagattcgggctgagtcttttgacacctgggccaacaaagtgcgagtggccttggaggtggaggatggccgtaaacgcagctttgaagagctaagggcactggagtctgaggctcgtgagaggaggtttcctaatagtgagctgcttcagcgactgaagaactgcctgagtgaggtggaggcttgtattgctcaagtcctggggctggtcagtggtcaggtggccaggatggacactccacagctgaccttgactgaactccgggtccttcttgagcagatgggcagcctgccctgtgccatgcatcagattggggatgtcaaggggcttttggttatgggtgccaagatagcctccagcccttctgtggacaaggcccgggctgagctgcaagaactactgaccattgcagagcgctgggaagaaaaggctcatttctgcctggaggccaggcagaagcatccaccagccacattggaagccataattcgtgagacagaaaacatccctgttcacctgcctaacatccaggctctcaaagaagctctgactaaggcacaagcttggattgctgatgtggatgagatccaaaatggtgaccactacccctgtctagatgacttggagggcctggtggctgtgggccgggacctgcctgtggggctggaagagctgagacagctagagctgcaggtattgacagcacattcctggagagagaaggcctccaagacctttctcaagaagaattcttgctacacactgcttgaggtgctttgcccgtgtgcagacgctggctcagacagcaccaagcgtagccggtggatggagaaggcgctggggttgtaccagtgtgacacagagctgctggggctgtctgcacaggacctcagagacccaggctctgtgattgtggccttcaaggaaggggaacagaaggagaaggagggtatcctgcagctgcgtcgcaccaactcagccaagcccagtccactggcaccatccctcatggcctcttctccgacttctatctgtgtgtgtgggcaggtgccagctggggtgggagttctgcagtgtgacctgtgtcaggactggttccatgggcagtgtgtgtcagtgccccatctcctcacctctccaaagcccagtctcacttcatctccactgctagcctggtgggaatgggacacaaaattcctgtgtccactgtgtatgcgctcacgacggccacgcctagagacaatcctagccttgctggttgccctgcagaggctgcccgtgcggctgcctgagggtgaggcccttcagtgtctcacagagagggccattggctggcaagaccgtgccagaaaggctctggcctctgaagatgtgactgctctgttgcgacagctggctgagcttcgccaacagctacaggccaaacccagaccagaggaggcctcagtctacacttcagccactgcctgtgaccctatcagagaaggcagtggcaacaatatttctaaggtccaagggctgctggagaatggagacagtgtgaccagtcctgagaacatggctccaggaaagggctctgacctggagctactgtcctcactgttgccgcagttgactggccctgtgttggagctgcctgaggcaatccgggctcccctggaggagctcatgatggaaggggacctgcttgaggtgaccctggatgagaaccacagcatctggcagctgctgcaggctggacagcctccagacctggacagaattcgcacacttctggagctggaaaaatttgaacatcaagggagtcggacaaggagccgggctctggagaggcgacggcggcggcagaaggtggatcagggtagaaacgttgagaatcttgttcaacaggagcttcagtcaaaaagggctcggagctcagggattatgtctcaggtgggccgagaagaagaacattatcaggagaaagcagaccgtgaaaatatgttcctgacaccttccacagaccacagccctttcttgaaaggaaaccaaaatagcttacaacacaaggattcaggctcttcagctgcttgtccttctttaatgcctttgctacaactctcctactctgatgagcaacagttgtgacagtggcaccaaaggtcatttgtggttgtttttgtttgtttgtttcttaaatcctactatctcctggcctggacctcagaaggagctttttgcctatctataatttttcactgccaatttttgatatcctctctcctagagttactgttaaaaggttggttcgtaaagtccacaccccgatgctcagaagtgtcttgccagcaacattcctgctagcatacaggagtgatttcctaaaccagtttcattctagtctgaatagggacaaacaaatcttgaggaagcccaagtgcgtacctttatttttgcccccaccaccctctttctgtacttcaatttttgtttgttttttgtttttttgtccctgtcataaaatattttggtgcttcaaaacttgtaccttcattgtacatccttttcttttctccccttgggtcttattataaaagaagacaatgtacgttgtaattaccaaaaagaatagggaaaaacaagaatttcatgactctacctgtggtctatctttaatttcatttcttttgttaaaaataaaacaatgagtatgtttggatactatgaatataatttga

SEQ ID NO: 354601 - DNA, 3027 bp, Homo sapiens
ggacggccatactatttttatcttgctttttcgttctgtcgcagtactgtttaatatgagtccagcgacggctctgtgactgttttcctctggtaaaatcgctcttgcgtcctcagcgtttatctcaggtgcggaaggtctcacaggtttggaaatagcgccggaaaaatcgatccgcggagtgagacggctcgtaccacactgcagggcccggaggtcaagatggtggctgtaaaactaggatccctgacgattgcttagcattaaggcccgacatggaaccggggtgtgacgagttcctgccgccaccggagtgcccggtttttgagcctagctgggctgaattccaagacccgcttggctacattgcgaaaataaggcccatagcagagaagtctggcatctgcaaaatccgcccacccgcggattggcagcctccttttgcagtagaagttgacaatttcagatttactcctcgcgtccaaaggctaaatgaactggaggcccaaactagagtgaaattgaactatttggatcagattgcaaaattctgggaaattcaaggctcctctttaaagattcccaatgtggagcggaagatcttggacctctacagccttagtaagattgtgattgaggaaggtggctatgaagccatctgcaaggatcgtcggtgggctcgagttgcccagcgtctccactacccaccaggcaaaaacattggctccctgctacgatcacattacgaacgcattatttacccctatgaaatgtttcagtctggagccaaccatgtgcaatgtaacacacacccgtttgacaatgaggtaaaagataaggaatacaagccccacagcatcccccttagacagtctgtgcagccttcaaagttcagcagctacagtcgacgggcaaaaaggctacagcctgatccagagcctacagaggaggacattgagaagcatccagagctaaagaagttacagatatatgggccaggtcccaaaatgatgggcttgggccttatggctaaggataaggataagactgtgcataagaaagtcacatgccccccaactgttacggtgaaggatgagcaaagtggaggtgggaacgtgtcatcaacattgctcaagcagcacttgagcctagagccctgcactaagacaaccatgcaacttcgaaagaatcacagcagtgcccagtttattgactcatatatttgccaagtatgctcccgtggggatgaagatgataagcttcttttctgtgatggctgtgatgacaattaccacatcttctgcttgttaccaccccttcctgaaatccccagaggcatctggaggtgcccaaaatgtatcttggcggagtgtaaacagcctcctgaagcttttggatttgaacaggctacccaggagtacagtttgcagagttttggtgaaatggctgattccttcaagtccgactacttcaacatgcctgtacatatggtgcctacagaacttgtagagaaggaattctggaggctggtgagcagcattgaggaagacgtgacagttgaatatggagctgatattcattccaaagaatttggcagtggctttcctgtcagcaatagcaaacaaaacttatctcctgaggagaaggagtatgcgaccagtggttggaacctgaatgtgatgccagtgctagatcagtctgttctctgtcacatcaatgcagacatctcaggcatgaaggtgccctggctgtacgtgggcatggttttctcagcattttgttggcatattgaggatcactggagttactctattaactatctgcattggggtgagccgaagacctggtatggtgtaccctccctggcagcagagcatttggaggaggtgatgaagatgctgacacctgagctgtttgatagccagcctgatctcctacaccagcttgtcactctcatgaatcccaacactttgatgtcccatggtgtgccagttgtccgcacaaaccagtgtgcaggggagtttgtcatcacttttcctcgtgcttaccacagtggttttaaccaaggctacaattttgctgaagctgtcaacttttgtactgctgactggctacctgctggacgccagtgcattgaacactaccgccggctccggcgctattgtgtcttctcccacgaggagctcatctgcaagatggctgccttcccagagacgttggatctcaatctagcagtagctgtgcacaaggagatgttcattatggttcaggaggagcgacgtctacgaaaggcccttttggagaagggcgtcacggaggctgagcgagaggcttttgagctgctcccagatgatgaacgccagtgcatcaagtgcaagaccacgtgcttcttgtcagccctggcctgctacgactgcccagatggccttgtatgcctttcccacatcaatgacctctgcaagtgctctagtagccgacagtacctccggtatcggtacaccttggatgagctccccaccatgctgcataaactgaagattcgggctgagtcttttgacacctgggccaacaaagtgcgagtggccttggaggtggaggatggccgtaaacgcagggtattctcaaccttccttttctgctaacactgcctacctgttgcaacttacactctccaggctttgaagagctaagggcactggagtctgaggctcgtgagaggaggtttcctaatagtgagctgcttcagcgactgaagaactgcctgagtgaggtggaggcttgtattgctcaagtcctggggctggtcagtggtcaggtggccaggtacgtgagaggagaaggcaaagaagggtgtcagtgtgtgaaaatgaataacaaaaatggatagactataaacacacaatcctgtttgaggctgaggcaggagaattgtttgaacccaggagacagaggttgcagtgagccgagatggcatcattgcactccagcctgggcagcaagagcaaaactccatctcaaaacaacagc

SEQ ID NO: 354602 - DNA, 639 bp, Homo sapiens
cccccaactgttacggtgaaggatgagcaaagtggaggtgggaacgtgtcatcaacattgctcaagcagcacttgagcctagagccctgcactaagacaaccatgcaacttcgaaagaatcacagcagtgcccagtttgtaaggactcatgattttgtaatattctactttgaaccgtcaagattatattgaacctaaaatgaattcatcatacttttctttttttcttccttctttcttcttatttatgagcccttttatctgaagagacgggtggctagaaatgggaggaaatgttttcaagatagctaaagtcaaaagcaaaatttttatgtctttttagatagaacttttcaccaaactatactctgtttttcaactctattagcattttctgaacttttacagcttaatataggagataatgtgatccaatataaattatgttaaagagctgtttatttgtttttggcaaattcctccagactctcaaatcatcacatttcatatagtagtgacagttttctattatcttcttttacttttgtcccttgtatgtttacatcttcttttattctttctacatctcacttggaagatttttataatgtcttacatatttaagtctgcactacaaga

SEQ ID NO: 354603 - DNA, 5314 bp, Homo sapiens
ggacggccatactatttttatcttgctttttcgttctgtcgcagtactgtttaatatgagtccagcgacggctctgtgactgttttcctctggtaaaatcgctcttgcgtcctcagcgtttatctcaggtgcggaaggtctcacaggtttggaaatagcgccggaaaaatcgatccgcggagtgagacggctcgtaccacactgcagggcccggaggtcaagatggtggctgtaaaactaggatccctgacgattgcttagcattaaggcccgacatggaaccggggtgtgacgagttcctgccgccaccggagtgcccggtttttgagcctagctgggctgaattccaagacccgcttggctacattgcgaaaataaggcccatagcagagaagtctggcatctgcaaaatccgcccacccgcggattggcagcctccttttgcagtagaagttgacaatttcagatttactcctcgcgtccaaaggctaaatgaactggaggcccaaactagagtgaaattgaactatttggatcagattgcaaaattctgggaaattcaaggctcctctttaaagattcccaatgtggagcggaagatcttggacctctacagccttagtaagcaatgtaacacacacccgtttgacaatgaggtaaaagataaggaatacaagccccacagcatcccccttagacagtctgtgcagccttcaaagttcagcagctacagtcgacgggcaaaaaggctacagcctgatccagagcctacagaggaggacattgagaagcatccagagctaaagaagttacagatatatgggccaggtcccaaaatgatgggcttgggccttatggctaaggataaggataagactgtgcataagaaagtcacatgccccccaactgttacggtgaaggatgagcaaagtggaggtgggaacgtgtcatcaacattgctcaagcagcacttgagcctagagccctgcactaagacaaccatgcaacttcgaaagaatcacagcagtgcccagtttattgactcatatatttgccaagtatgctcccgtggggatgaagatgataagcttcttttctgtgatggctgtgatgacaattaccacatcttctgcttgttaccaccccttcctgaaatccccagaggcatctggaggtgcccaaaatgtatcttggcggagtgtaaacagcctcctgaagcttttggatttgaacaggctacccaggagtacagtttgcagagttttggtgaaatggctgattccttcaagtccgactacttcaacatgcctgtacatatggtgcctacagaacttgtagagaaggaattctggaggctggtgagcagcattgaggaagacgtgacagttgaatatggagctgatattcattccaaagaatttggcagtggctttcctgtcagcaatagcaaacaaaacttatctcctgaggagaaggagtatgcgaccagtggttggaacctgaatgtgatgccagtgctagatcagtctgttctctgtcacatcaatgcagacatctcaggcatgaaggtgccctggctgtacgtgggcatggttttctcagcattttgttggcatattgaggatcactggagttactctattaactatctgcattggggtgagccgaagacctggtatggtgtaccctccctggcagcagagcatttggaggaggtgatgaagatgctgacacctgagctgtttgatagccagcctgatctcctacaccagcttgtcactctcatgaatcccaacactttgatgtcccatggtgtgccagttgtccgcacaaaccagtgtgcaggggagtttgtcatcacttttcctcgtgcttaccacagtggttttaaccaaggctacaattttgctgaagctgtcaacttttgtactgctgactggctacctgctggacgccagtgcattgaacactaccgccggctccggcgctattgtgtcttctcccacgaggagctcatctgcaagatggctgccttcccagagacgttggatctcaatctagcagtagctgtgcacaaggagatgttcattatggttcaggaggagcgacgtctacgaaaggcccttttggagaagggcgtcacggaggctgagcgagaggcttttgagctgctcccagatgatgaacgccagtgcatcaagtgcaagaccacgtgcttcttgtcagccctggcctgctacgactgcccagatggccttgtatgcctttcccacatcaatgacctctgcaagtgctctagtagccgacagtacctccggtatcggtacaccttggatgagctccccaccatgctgcataaactgaagattcgggctgagtcttttgacacctgggccaacaaagtgcgagtggccttggaggtggaggatggccgtaaacgcagctttgaagagctaagggcactggagtctgaggctcgtgagaggaggtttcctaatagtgagctgcttcagcgactgaagaactgcctgagtgaggtggaggcttgtattgctcaagtcctggggctggtcagtggtcaggtggccaggatggacactccacagctgaccttgactgaactccgggtccttcttgagcagatgggcagcctgccctgtgccatgcatcagattggggatgtcaaggatgtcctggaacaggtggaggcctatcaagctgaggctcgtgaggctctggccacactgccctctagtccagggctattgcggtccctgttggagagggggcagcagctgggtgtagaggtgcctgaagcccatcagcttcagcagcaggtggagcaggcgcaatggctagatgaagtgaagcaggccctggccccttctgctcacaggggctctctggtcatcatgcaggggcttttggttatgggtgccaagatagcctccagcccttctgtggacaaggcccgggctgagctgcaagaactactgaccattgcagagcgctgggaagaaaaggctcatttctgcctggaggccaggcagaagcatccaccagccacattggaagccataattcgtgagacagaaaacatccctgttcacctgcctaacatccaggctctcaaagaagctctgactaaggcacaagcttggattgctgatgtggatgagatccaaaatggtgaccactacccctgtctagatgacttggagggcctggtggctgtgggccgggacctgcctgtggggctggaagagctgagacagctagagctgcaggtattgacagcacattcctggagagagaaggcctccaagacctttctcaagaagaattcttgctacacactgcttgaggtgctttgcccgtgtgcagacgctggctcagacagcaccaagcgtagccggtggatggagaaggcgctggggttgtaccagtgtgacacagagctgctggggctgtctgcacaggacctcagagacccaggctctgtgattgtggccttcaaggaaggggaacagaaggagaaggagggtatcctgcagctgcgtcgcaccaactcagccaagcccagtccactggcaccatccctcatggcctcttctccgacttctatctgtgtgtgtgggcaggtgccagctggggtgggagttctgcagtgtgacctgtgtcaggactggttccatgggcagtgtgtgtcagtgccccatctcctcacctctccaaagcccagtctcacttcatctccactgctagcctggtgggaatgggacacaaaattcctgtgtccactgtgtatgcgctcacgacggccacgcctagagacaatcctagccttgctggttgccctgcagaggctgcccgtgcggctgcctgagggtgaggcccttcagtgtctcacagagagggccattggctggcaagaccgtgccagaaaggctctggcctctgaagatgtgactgctctgttgcgacagctggctgagcttcgccaacagctacaggccaaacccagaccagaggaggcctcagtctacacttcagccactgcctgtgaccctatcagagaaggcagtggcaacaatatttctaaggtccaagggctgctggagaatggagacagtgtgaccagtcctgagaacatggctccaggaaagggctctgacctggagctactgtcctcactgttgccgcagttgactggccctgtgttggagctgcctgaggcaatccgggctcccctggaggagctcatgatggaaggggacctgcttgaggtgaccctggatgagaaccacagcatctggcagctgctgcaggctggacagcctccagacctggacagaattcgcacacttctggagctggaaaaatttgaacatcaagggagtcggacaaggagccgggctctggagaggcgacggcggcggcagaaggtggatcagggtagaaacgttgagaatcttgttcaacaggagcttcagtcaaaaagggctcggagctcagggattatgtctcaggtgggccgagaagaagaacattatcaggagaaagcagaccgtgaaaatatgttcctgacaccttccacagaccacagccctttcttgaaaggaaaccaaaatagcttacaacacaaggattcaggctcttcagctgcttgtccttctttaatgcctttgctacaactctcctactctgatgagcaacagttgtgacagtggcaccaaaggtcatttgtggttgtttttgtttgtttgtttcttaaatcctactatctcctggcctggacctcagaaggagctttttgcctatctataatttttcactgccaatttttgatatcctctctcctagagttactgttaaaaggttggttcgtaaagtccacaccccgatgctcagaagtgtcttgccagcaacattcctgctagcatacaggagtgatttcctaaaccagtttcattctagtctgaatagggacaaacaaatcttgaggaagcccaagtgcgtacctttatttttgcccccaccaccctctttctgtacttcaatttttgtttgttttttgtttttttgtccctgtcataaaatattttggtgcttcaaaacttgtaccttcattgtacatccttttcttttctccccttgggtcttattataaaagaagacaatgtacgttgtaattaccaaaaagaatagggaaaaacaagaatttcatgactctacctgtggtctatctttaatttcatttcttttgttaaaaataaaacaatgagtatgtttggatactatgaatataatttga

SEQ ID NO: 354604 - DNA, 5254 bp, Homo sapiens
ggacggccatactatttttatcttgctttttcgttctgtcgcagtactgtttaatatgagtccagcgacggctctgtgactgttttcctctggtaaaatcgctcttgcgtcctcagcgtttatctcaggtgcggaaggtctcacaggtttggaaatagcgccggaaaaatcgatccgcggagtgagacggctcgtaccacactgcagggcccggaggtcaagatggtggctgtaaaactaggatccctgacgattgcttagcattaaggcccgacatggaaccggggtgtgacgagttcctgccgccaccggagtgcccggtttttgagcctagctgggctgaattccaagacccgcttggctacattgcgaaaataaggcccatagcagagaagtctggcatctgcaaaatccgcccacccgcggattggcagcctccttttgcagtagaagttgacaatttcagatttactcctcgcgtccaaaggctaaatgaactggaggcccaaactagagtgaaattgaactatttggatcagattgcaaaattctgggaaattcaaggctcctctttaaagattcccaatgtggagcggaagatcttggacctctacagccttagtaagattgtgattgaggaaggtggctatgaagccatctgcaaggatcgtcggtgggctcgagttgcccagcgtctccactacccaccaggcaaaaacattggctccctgctacgatcacattacgaacgcattatttacccctatgaaatgtttcagtctggagccaaccatgtgcaatgtaacacacacccgtttgacaatgaggtaaaagataaggaatacaagccccacagcatcccccttagacagtctgtgcagccttcaaagttcagcagctacagtcgacgggcaaaaaggctacagcctgatccagagcctacagaggaggacattgagaagcatccagagctaaagaagttacagatatatgggccaggtcccaaaatgatgggcttgggccttatggctaaggataaggataagactgtgcataagaaagtcacatgccccccaactgttacggtgaaggatgagcaaagtggaggtgggaacgtgtcatcaacattgctcaagcagcacttgagcctagagccctgcactaagacaaccatgcaacttcgaaagaatcacagcagtgcccagtttattgactcatatatttgccaagtatgctcccgtggggatgaagatgataagcttcttttctgtgatggctgtgatgacaattaccacatcttctgcttgttaccaccccttcctgaaatccccagaggcatctggaggtgcccaaaatgtatcttggcggagtgtaaacagcctcctgaagcttttggatttgaacaggctacccaggagtacagtttgcagagttttggtgaaatggctgattccttcaagtccgactacttcaacatgcctgtacatatggtgcctacagaacttgtagagaaggaattctggaggctggtgagcagcattgaggaagacgtgacagttgaatatggagctgatattcattccaaagaatttggcagtggctttcctgtcagcaatagcaaacaaaacttatctcctgaggagaaggagtatgcgaccagtggttggaacctgaatgtgatgccagtgctagatcagtctgttctctgtcacatcaatgcagacatctcaggcatgaaggtgccctggctgtacgtgggcatggttttctcagcattttgttggcatattgaggatcactggagttactctattaactatctgcattggggtgagccgaagacctggtatggtgtaccctccctggcagcagagcatttggaggaggtgatgaagatgctgacacctgagctgtttgatagccagcctgatctcctacaccagcttgtcactctcatgaatcccaacactttgatgtcccatggtgtgccagttgtccgcacaaaccagtgtgcaggggagtttgtcatcacttttcctcgtgcttaccacagtggttttaaccaaggctacaattttgctgaagctgtcaacttttgtactgctgactggctacctgctggacgccagtgcattgaacactaccgccggctccggcgctattgtgtcttctcccacgaggagctcatctgcaagatggctgccttcccagagacgttggatctcaatctagcagtagctgtgcacaaggagatgttcattatggttcaggaggagcgacgtctacgaaaggcccttttggagaagggcgtcacggaggctgagcgagaggcttttgagctgctcccagatgatgaacgccagtgcatcaagtgcaagaccacgtgcttcttgtcagccctggcctgctacgactgcccagatggccttgtatgcctttcccacatcaatgacctctgcaagtgctctagtagccgacagtacctccggtatcggtacaccttggatgagctccccaccatgctgcataaactgaagattcgggctgagtcttttgacacctgggccaacaaagtgcgagtggccttggaggtggaggatggccgtaaacgcagctttgaagagctaagggcactggagtctgaggctcgtgagaggaggtttcctaatagtgagctgcttcagcgactgaagaactgcctgagtgaggtggaggcttgtattgctcaagtcctggggctggtcagtggtcaggtggccaggatggacactccacagctgaccttgactgaactccgggtccttcttgagcagatgggcagcctgccctgtgccatgcatcagattggggatgtcaaggggcttttggttatgggtgccaagatagcctccagcccttctgtggacaaggcccgggctgagctgcaagaactactgaccattgcagagcgctgggaagaaaaggctcatttctgcctggaggccaggcagaagcatccaccagccacattggaagccataattcgtgagacagaaaacatccctgttcacctgcctaacatccaggctctcaaagaagctctgactaaggcacaagcttggattgctgatgtggatgagatccaaaatggtgaccactacccctgtctagatgacttggagggcctggtggctgtgggccgggacctgcctgtggggctggaagagctgagacagctagagctgcaggtattgacagcacattcctggagagagaaggcctccaagacctttctcaagaagaattcttgctacacactgcttgaggtgctttgcccgtgtgcagacgctggctcagacagcaccaagcgtagccggtggatggagaaggcgctggggttgtaccagtgtgacacagagctgctggggctgtctgcacaggacctcagagacccaggctctgtgattgtggccttcaaggaaggggaacagaaggagaaggagggtatcctgcagctgcgtcgcaccaactcagccaagcccagtccactggcaccatccctcatggcctcttctccgacttctatctgtgtgtgtgggcaggtgccagctggggtgggagttctgcagtgtgacctgtgtcaggactggttccatgggcagtgtgtgtcagtgccccatctcctcacctctccaaagcccagtctcacttcatctccactgctagcctggtgggaatgggacacaaaattcctgtgtccactgtgtatgcgctcacgacggccacgcctagagacaatcctagccttgctggttgccctgcagaggctgcccgtgcggctgcctgagggtgaggcccttcagtgtctcacagagagggccattggctggcaagaccgtgccagaaaggctctggcctctgaagatgtgactgctctgttgcgacagctggctgagcttcgccaacagctacaggccaaacccagaccagaggaggcctcagtctacacttcagccactgcctgtgaccctatcagagaaggcagtggcaacaatatttctaaggtccaagggctgctggagaatggagacagtgtgaccagtcctgagaacatggctccaggaaagggctctgacctggagctactgtcctcactgttgccgcagttgactggccctgtgttggagctgcctgaggcaatccgggctcccctggaggagctcatgatggaaggggacctgcttgaggtgaccctggatgagaaccacagcatctggcagctgctgcaggctggacagcctccagacctggacagaattcgcacacttctggagctggaaaaatttgaacatcaagggagtcggacaaggagccgggctctggagaggcgacggcggcggcagaaggtggatcagggtagaaacgttgagaatcttgttcaacaggagcttcagtcaaaaagggctcggagctcagggattatgtctcaggtgggccgagaagaagaacattatcaggagaaagcagaccgtgaaaatatgttcctgacaccttccacagaccacagccctttcttgaaaggaaaccaaaatagcttacaacacaaggattcaggctcttcagctgcttgtccttctttaatgcctttgctacaactctcctactctgatgagcaacagttgtgacagtggcaccaaaggtcatttgtggttgtttttgtttgtttgtttcttaaatcctactatctcctggcctggacctcagaaggagctttttgcctatctataatttttcactgccaatttttgatatcctctctcctagagttactgttaaaaggttggttcgtaaagtccacaccccgatgctcagaagtgtcttgccagcaacattcctgctagcatacaggagtgatttcctaaaccagtttcattctagtctgaatagggacaaacaaatcttgaggaagcccaagtgcgtacctttatttttgcccccaccaccctctttctgtacttcaatttttgtttgttttttgtttttttgtccctgtcataaaatattttggtgcttcaaaacttgtaccttcattgtacatccttttcttttctccccttgggtcttattataaaagaagacaatgtacgttgtaattaccaaaaagaatagggaaaaacaagaatttcatgactctacctgtggtctatctttaatttcatttcttttgttaaaaataaaacaatgagtatgtttggatactatgaatataatttga

SEQ ID NO: 354605 - DNA, 3080 bp, Homo sapiens
ggacggccatactatttttatcttgctttttcgttctgtcgcagtactgtttaatatgagtccagcgacggctctgtgactgttttcctctggtaaaatcgctcttgcgtcctcagcgtttatctcaggtgcggaaggtctcacaggtttggaaatagcgccggaaaaatcgatccgcggagtgagacggctcgtaccacactgcagggcccggaggtcaagatggtggctgtaaaactaggatccctgacgattgcttagcattaaggcccgacatggaaccggggtgtgacgagttcctgccgccaccggagtgcccggtttttgagcctagctgggctgaattccaagacccgcttggctacattgcgaaaataaggcccatagcagagaagtctggcatctgcaaaatccgcccacccgcggattggcagcctccttttgcagtagaagttgacaatttcagatttactcctcgcgtccaaaggctaaatgaactggaggcccaaactagagtgaaattgaactatttggatcagattgcaaaattctgggaaattcaaggctcctctttaaagattcccaatgtggagcggaagatcttggacctctacagccttagtaagattgtgattgaggaaggtggctatgaagccatctgcaaggatcgtcggtgggctcgagttgcccagcgtctccactacccaccaggcaaaaacattggctccctgctacgatcacattacgaacgcattatttacccctatgaaatgtttcagtctggagccaaccatgtgcaatgtaacacacacccgtttgacaatgaggtaaaagataaggaatacaagccccacagcatcccccttagacagtctgtgcagccttcaaagttcagcagctacagtcgacgggcaaaaaggctacagcctgatccagagcctacagaggaggacattgagaagcatccagagctaaagaagttacagatatatgggccaggtcccaaaatgatgggcttgggccttatggctaaggataaggataagactgtgcataagaaagtcacatgccccccaactgttacggtgaaggatgagcaaagtggaggtgggaacgtgtcatcaacattgctcaagcagcacttgagcctagagccctgcactaagacaaccatgcaacttcgaaagaatcacagcagtgcccagtttattgactcatatatttgccaagtatgctcccgtggggatgaagatgataagcttcttttctgtgatggctgtgatgacaattaccacatcttctgcttgttaccaccccttcctgaaatccccagaggcatctggaggtgcccaaaatgtatcttggcggagtgtaaacagcctcctgaagcttttggatttgaacaggctacccaggagtacagtttgcagagttttggtgaaatggctgattccttcaagtccgactacttcaacatgcctgtacatatggtgcctacagaacttgtagagaaggaattctggaggctggtgagcagcattgaggaagacgtgacagttgaatatggagctgatattcattccaaagaatttggcagtggctttcctgtcagcaatagcaaacaaaacttatctcctgaggagaaggagtatgcgaccagtggttggaacctgaatgtgatgccagtgctagatcagtctgttctctgtcacatcaatgcagacatctcaggcatgaaggtgccctggctgtacgtgggcatggttttctcagcattttgttggcatattgaggatcactggagttactctattaactatctgcattggggtgagccgaagacctggtatggtgtaccctccctggcagcagagcatttggaggaggtgatgaagatgctgacacctgagctgtttgatagccagcctgatctcctacaccagcttgtcactctcatgaatcccaacactttgatgtcccatggtgtgccagttgtccgcacaaaccagtgtgcaggggagtttgtcatcacttttcctcgtgcttaccacagtggttttaaccaaggctacaattttgctgaagctgtcaacttttgtactgctgactggctacctgctggacgccagtgcattgaacactaccgccggctccggcgctattgtgtcttctcccacgaggagctcatctgcaagatggctgccttcccagagacgttggatctcaatctagcagtagctgtgcacaaggagatgttcattatggttcaggaggagcgacgtctacgaaaggcccttttggagaagggcgtcacggaggctgagcgagaggcttttgagctgctcccagatgatgaacgccagtgcatcaagtgcaagaccacgtgcttcttgtcagccctggcctgctacgactgcccagatggccttgtatgcctttcccacatcaatgacctctgcaagtgctctagtagccgacagtacctccggtatcggtacaccttggatgagctccccaccatgctgcataaactgaagattcgggctgagtcttttgacacctgggccaacaaagtgcgagtggccttggaggtggaggatggccgtaaacgcagtgagtgacaggaaatggaaggaacccttgtgtaagccttatttctttcttttgggtattctcaaccttccttttctgctaacactgcctacctgttgcaacttacactctccaggctttgaagagctaagggcactggagtctgaggctcgtgagaggaggtttcctaatagtgagctgcttcagcgactgaagaactgcctgagtgaggtggaggcttgtattgctcaagtcctggggctggtcagtggtcaggtggccaggtacgtgagaggagaaggcaaagaagggtgtcagtgtgtgaaaatgaataacaaaaatggatagactataaacacacaatcctgtttgaggctgaggcaggagaattgtttgaacccaggagacagaggttgcagtgagccgagatggcatcattgcactccagcctgggcagcaagagcaaaactccatctcaaaacaacagc

SEQ ID NO: 354606 - DNA, 1746 bp, Homo sapiens
gcggccgccctggccacgtcaccgcccggccaagagtgcgtgggcggcggcgcgcgggtgcgatcgcggagctgtgaggcgcaggcagggctctggggcacctagagaccggggccggagacgtggcagccgccctgcccgccagaaagtttcctagaagtttgctgggcgcgggcgcacgactgactggctggaccatgaacgtgttccgaatcctcggcgacctgagccacctcctggccatgatcttgctgctggggaagatctggaggtccaagtgctgcaagggcatctctgggaagagccagatcctgtttgctctcgtcttcaccaccaggtacctggacctgttcaccaacttcatctccatctacaacacagtaatgaaggtggtttttctcctctgtgcctatgttacagtgtacatgatatatgggaaattccgtaaaacttttgacagtgagaatgacacattccgcctggagtttcttctggtcccagtcattggcctttccttccttgaaaactacagtttcactctgctggagatcctctggactttctctatctatctggaatcagtggctatcctgccccagctcttcatgatcagcaagactggagaggctgagaccataactactcactacctgttctttctgggtctgtaccgggcactctacctggctaactggatcaggcggtaccagactgagaatttctatgaccaaattgcagtcgtgtctggagtagtacaaaccatcttctactgtgacttcttctacttgtatgtgaccaaagtccttaagggaaagaagttaagtcttccaatgccaatctgaggaccttcagagacagtctacgccttaacaagcacatgaaggaaactattttgaatgttctctttggcaacttatccataatttgggatcaaatgttaaaaccagaaaagtgtttagtgtggatttcagcaaaacctgatcatcccacccagaagaccttctcatcaatagatcgcccttaaagacccattgtaaggtcataaaaaacctcggccaactgcacaaagatggtgcctcactgcaacaagaaaccttaaggtgtcttaccgacgaaataaaaaacataaatgattgttctccaaggcctgagggcaagactcatgatgagcaagtcaaccccaatctggaacaatgtccctcctcttagaatgtcccaactaaagaccagttaaaatattagggtacgttcttgtgaatttccactttccaggtagatgaccaaatttaggtggtcaagatataaaggtgtcagctagttttaagtgtgaaacttatttcactttcacactgccttcaggccagaagcaaaccaaatttaccaggtttggctggaggagttttgtgactcatcttttactggtttgaattttttcaaaccagtggctgatacctgccttgtacttagtaccttaataccaataacctaatggtacttaggcgagtaccatttgcacaatcactgttttacttatgagcagatacagatatatccaaacccttacctactaggtatcctgctagggttttcaattccaattcttgtattaagttttttcctttcagttttaggtgcgaaagtaatcagtcaatccaatatcccccatctttgtcttgaaacaaaaactgttttaagacgtctacgttgaattattcagagaattaagcaataaaagctcacacctta

SEQ ID NO: 354607 - DNA, 525 bp, Homo sapiens
gcggccgccctggccacgtcaccgcccggccaagagtgcgtgggcggcggcgcgcgggtgcgatcgcggagctgtgaggcgcaggcagggctctggggcacctagagaccggggccggagacgtggcagccgccctgcccgccagaaagtttcctagaagtttgctgggcgcgggcgcacgactgactggctggaccatgaacgtgttccgaatcctcggcgacctgagccacctcctggccatgatcttgctgctggggaagatctggaggtccaagtgctgcaagggtgaggggcgcctggcagggaggtgcgggaccccctctctggccagcctcatgcccctgcgtgcagggcagggcgctccaggtgtctgctcagggtggggactccggcgtgggggtccttgaaactttgcggagctccacttccaaaaacaatgtaaagttgtataaaatcagaggaggaggacccctcgagatgatgggaggcgggtgggtttgttcctgcacagacgccccctca

SEQ ID NO: 354608 - DNA, 295 bp, Homo sapiens
cattaggttattggtattaaggtactaagtacaaggcaggtatcagccactggtttgaaaaaattcaaaccagtaaaagatgagtctcaaaactcctccagccaaacccttacctactaggtatcctgctagggttttcaattccaattcttgtattaagttttttcctttcagttttaggtgcgaaagtaatcagtcaatccaatatcccccatctttgtcttgaaacaaaaactgttttaagacgtctacgttgaattattcagagaattaagcaataaaagctcacacctta

SEQ ID NO: 354609 - DNA, 1693 bp, Homo sapiens
gcggccgccctggccacgtcaccgcccggccaagagtgcgtgggcggcggcgcgcgggtgcgatcgcggagctgtgaggcgcaggcagggctctggggcacctagagaccggggccggagacgtggcagccgccctgcccgccagaaagtttcctagaagtttgctgggcgcgggcgcacgactgactggctggaccatgaacgtgttccgaatcctcggcgacctgagccacctcctggccatgatcttgctgctggggaagatctggaggtccaagtgctgcaagggcatctctgggaagagccagatcctgtttgctctcgtcttcaccaccaggtacctggacctgttcaccaacttcatctccatctacaacacagtaatgaaggtggtttttctcctctgtgcctatgttacagtgtacatgatatatgggaaattccgtaaaacttttgacagtgagaatgacacattccgcctggagtttcttctggtcccagtcattggcctttccttccttggaatcagtggctatcctgccccagctcttcatgatcagcaagactggagaggctgagaccataactactcactacctgttctttctgggtctgtaccgggcactctacctggctaactggatcaggcggtaccagactgagaatttctatgaccaaattgcagtcgtgtctggagtagtacaaaccatcttctactgtgacttcttctacttgtatgtgaccaaagtccttaagggaaagaagttaagtcttccaatgccaatctgaggaccttcagagacagtctacgccttaacaagcacatgaaggaaactattttgaatgttctctttggcaacttatccataatttgggatcaaatgttaaaaccagaaaagtgtttagtgtggatttcagcaaaacctgatcatcccacccagaagaccttctcatcaatagatcgcccttaaagacccattgtaaggtcataaaaaacctcggccaactgcacaaagatggtgcctcactgcaacaagaaaccttaaggtgtcttaccgacgaaataaaaaacataaatgattgttctccaaggcctgagggcaagactcatgatgagcaagtcaaccccaatctggaacaatgtccctcctcttagaatgtcccaactaaagaccagttaaaatattagggtacgttcttgtgaatttccactttccaggtagatgaccaaatttaggtggtcaagatataaaggtgtcagctagttttaagtgtgaaacttatttcactttcacactgccttcaggccagaagcaaaccaaatttaccaggtttggctggaggagttttgtgactcatcttttactggtttgaattttttcaaaccagtggctgatacctgccttgtacttagtaccttaataccaataacctaatggtacttaggcgagtaccatttgcacaatcactgttttacttatgagcagatacagatatatccaaacccttacctactaggtatcctgctagggttttcaattccaattcttgtattaagttttttcctttcagttttaggtgcgaaagtaatcagtcaatccaatatcccccatctttgtcttgaaacaaaaactgttttaagacgtctacgttgaattattcagagaattaagcaataaaagctcacacctta

SEQ ID NO: 354610 - DNA, 1285 bp, Homo sapiens
atggggcagttgcagttgatcaggaaaaaggctctaggtagaaagacatgtggacacaagttctaggacttgagaaggactgctgatttgattgtatgagatgtacaatagacaatttgaggccaatcgctaagtttacagctggggggaagggtgccagtaaccaagtcggggatcagtaggtccatagtcaaccggagatggactccccctttgctttaacaatcgaacatatactgtgagccggccattaagagatgataccaagattatgcatcaagttataaagcagtcctttcatcagatggtaaattcttatttcatctccattttcttccagtccttaagggaaagaagttaagtcttccaatgccaatctgaggaccttcagagacagtctacgccttaacaagcacatgaaggaaactattttgaatgttctctttggcaacttatccataatttgggatcaaatgttaaaaccagaaaagtgtttagtgtggatttcagcaaaacctgatcatcccacccagaagaccttctcatcaatagatcgcccttaaagacccattgtaaggtcataaaaaacctcggccaactgcacaaagatggtgcctcactgcaacaagaaaccttaaggtgtcttaccgacgaaataaaaaacataaatgattgttctccaaggcctgagggcaagactcatgatgagcaagtcaaccccaatctggaacaatgtccctcctcttagaatgtcccaactaaagaccagttaaaatattagggtacgttcttgtgaatttccactttccaggtagatgaccaaatttaggtggtcaagatataaaggtgtcagctagttttaagtgtgaaacttatttcactttcacactgccttcaggccagaagcaaaccaaatttaccaggtttggctggaggagttttgtgactcatcttttactggtttgaattttttcaaaccagtggctgatacctgccttgtacttagtaccttaataccaataacctaatggtacttaggcgagtaccatttgcacaatcactgttttacttatgagcagatacagatatatccaaacccttacctactaggtatcctgctagggttttcaattccaattcttgtattaagttttttcctttcagttttaggtgcgaaagtaatcagtcaatccaatatcccccatctttgtcttgaaacaaaaactgttttaagacgtctacgttgaattattcagagaattaagcaataaaagctcacacctta

SEQ ID NO: 354611 - DNA, 1628 bp, Homo sapiens
gcggccgccctggccacgtcaccgcccggccaagagtgcgtgggcggcggcgcgcgggtgcgatcgcggagctgtgaggcgcaggcagggctctggggcacctagagaccggggccggagacgtggcagccgccctgcccgccagaaagtttcctagaagtttgctgggcgcgggcgcacgactgactggctggaccatgaacgtgttccgaatcctcggcgacctgagccacctcctggccatgatcttgctgctggggaagatctggaggtccaagtgctgcaagggcatctctgggaagagccagatcctgtttgctctcgtcttcaccaccaggtacctggacctgttcaccaacttcatctccatctacaacacagtaatgaaggtggtttttctcctctgtgcctatgttacagtgtacatgatatatgggaaattccgtaaaacttttgacagtgagaatgacacattccgcctggagtttcttctggtcccagtcattggcctttccttccttgaaaactacagtttcactctgctggagatcctctggactttctctatctatctggaatcagtggctatcctgccccagctcttcatgatcagcaagactggagaggctgagaccataactactcactacctgttctttctgggtctgtaccgggcactctacctggctaactggatcaggcggtaccagactgagaatttctatgaccaaattgcagtcgtgtctggagtagtacaaaccatcttctactgtgacttcttctacttgtatgtgaccaaagtccttaagggaaagaagttaagtcttccaatgccaatctgaggaccttcagagacagtctacgccttaacaagcacatgaaggaaactattttgaatgttctctttggcaacttatccataatttgggatcaaatgttaaaaccagaaaagtgtttagtgtggatttcagcaaaacctgatcatcccacccagaagaccttctcatcaatagatcgcccttaaagacccattgtaaggtcataaaaaacctcggccaactgcacaaagatggtgcctcactgcaacaagaaaccttaaggtgtcttaccgacgaaataaaaaacataaatgattgttctccaaggcctgagggcaagactcatgatgagcaagtcaaccccaatctggaacaatgtccctcctcttagaatgtcccaactaaagaccagttaaaatattagggtacgttcttgtgaatttccactttccaggtagatgaccaaatttaggtggtcaagatataaaggtgtcagctagttttaagtgtgaaacttatttcactttcacactgccttcaggccagaagcaaaccaaatttaccaggtttggctggaggagttttgtgactcatcttttactggtttgaattttttcaaaccagtggctgatacctgccttgtacttagtaccttaataccaataacctaatggtacttaggcgagtaccatttgcacaatcactgttttacttatgagcagatacagatatatccaaacccttacctactaggtagcagtaccactaggtagcagtaccactaggtagcagtaccactaggtagcagta

SEQ ID NO: 354612 - DNA, 540 bp, Homo sapiens
aactgattaaaatattataatttttattgagaactttttccctccttactgtaccttctccagcaagctattgttttagtaattatgttcttttaagatgggcctcttcttggtcttgctcagtctctggttgctttctctttggctcagatcctctggactttctctatctatctggaatcagtggctatcctgccccagctcttcatgatcagcaagactggagaggctgagaccataactactcactacctgttctttctgggtctgtaccgggcactctacctggctaactggatcaggcggtaccagactgagaatttctatgaccaaattgcagtcgtgtctggagtagtacaaaccatcttctactgtgacttcttctacttgtatgtgaccaaaggtaggtcctgggatgacagcaatgctgacactggcctaaggagttactcatccatttaataagtattccagcagatacagatgtgaacagtcaagtctctgccatccacaatgcttgtgttctaatgcaagaagaca

SEQ ID NO: 354613 - DNA, 974 bp, Homo sapiens
gcggccgccctggccacgtcaccgcccggccaagagtgcgtgggcggcggcgcgcgggtgcgatcgcggagctgtgaggcgcaggcagggctctggggcacctagagaccggggccggagacgtggcagccgccctgcccgccagaaagtttcctagaagtttgctgggcgcgggcgcacgactgactggctggaccatgaacgtgttccgaatcctcggcgacctgagccacctcctggccatgatcttgctgctggggaagatctggaggtccaagtgctgcaagggcatctctgggaagagccagatcctgtttgctctcgtcttcaccaccaggtacctggacctgttcaccaacttcatctccatctacaacacagtaatgaaggtggtttttctcctctgtgcctatgttacagtgtacatgatatatgggaaattccgtaaaacttttgacagtgagaatgacacattccgcctggagtttcttctggtcccagtcattggcctttccttccttgaaaactacagtttcactctgctggagatcctctggactttctctatctatctggaatcagtggctatcctgccccagctcttcatgatcagcaagactggagaggctgagaccataactactcactacctgttctttctgggtctgtaccgggcactctacctggctaactggatcaggcggtaccagactgagaatttctatgaccaaattgcagtcgtgtctggagtagtacaaaccatcttctactgtgacttcttctacttgtatgtgaccaaaggtaggtcctgggatgacagcaatgctgacactggcctaaggagttactcatccatttaataagtattccagcagatacagatgtgaacagtcaagtctctgccatccacaatgcttgtgttctaatgcaagaagacaaatattttcaataaagaaacaaatgccataaaaaaa

SEQ ID NO: 354614 - DNA, 1991 bp, Homo sapiens
gcggccgccctggccacgtcaccgcccggccaagagtgcgtgggcggcggcgcgcgggtgcgatcgcggagctgtgaggcgcaggcagggctctggggcacctagagaccggggccggagacgtggcagccgccctgcccgccagaaagtttcctagaagtttgctgggcgcgggcgcacgactgactggctggaccatgaacgtgttccgaatcctcggcgacctgagccacctcctggccatgatcttgctgctggggaagatctggaggtccaagtgctgcaagggcatctctgggaagagccagatcctgtttgctctcgtcttcaccaccaggtacctggacctgttcaccaacttcatctccatctacaacacagtaatgaaggtggtttttctcctctgtgcctatgttacagtgtacatgatatatgggaaattccgtaaaacttttgacagtgagaatgacacattccgcctggagtttcttctggtcccagtcattggcctttccttccttgaaaactacagtttcactctgctggagatcctctggactttctctatctatctggaatcagtggctatcctgccccagctcttcatgatcagcaagactggagaggctgagaccataactactcactacctgttctttctgggtctgtaccgggcactctacctggctaactggatcaggcggtaccagactgagaatttctatgaccaaattgcagtcgtgtctggagtagtacaaaccatcttctactgtgacttcttctacttgtatgtgaccaaagtccttaagggaaagaagttaagtcttccaatgccaatctgaggaccttcagagacagtctacgccttaacaagcacatgaaggaaactattttgaatgttctctttggcaacttatccataatttgggatcaaatgttaaaaccagaaaagtgtttagtgtggatttcagcaaaacctgatcatcccacccagaagaccttctcatcaatagatcgcccttaaagacccattgtaaggtcataaaaaacctcggccaactgcacaaagatggtgcctcactgcaacaagaaaccttaaggtgtcttaccgacgaaataaaaaacataaatgattgttctccaaggcctgagggcaagactcatgatgagcaagtcaaccccaatctggaacaatgtccctcctcttagaatgtcccaactaaagaccagttaaaatattagggtacgttcttgtgaatttccactttccaggtagatgaccaaatttaggtggtcaagatataaaggtgtcagctagttttaagtgtgaaacttatttcactttcacactgccttcaggccagaagcaaaccaaatttaccaggtttggctggaggagttttgtgactcatcttttactggtttgaattttttcaaaccagtggctgatacctgccttgtacttagtaccttaataccaataacctaatggtacttaggcgagtaccatttgcacaatcactgttttacttatgagcagatacagatatatccaaacccttacctactaggtatcctgctagggttttcaattccaattcttgtattaagttttttcctttcagttttaggtgcgaaagtaatcagtcaatccaatatcccccatctttgtcttgaaacaaaaactgttttaagacgtctacgttgaattattcagagaattaagcaataaaagctcacaccttaaaaaaaaagaaagcacgaaacacaccagacgcaagaaacacgagatgaccaaccagaacacaggacaggaacaaaacagtgaagggcgccgggccgagaaaaataaacggaggggggcgcagaaaaagcgagcgaagaaccaagagaggggacacaagcgggggcgcaaacatggcggaggacaacagagcaacgggaacaaagaccgaacgacgagacgcaacgcaggacagtcacatgtgcat

SEQ ID NO: 354615 - DNA, 2748 bp, Homo sapiens
agcgggctggagcgtgcgcacaggcggcagcagtggccgtcactgggcggcatggcggtgtgtgctcgcctttgcggcgtgggcccgtcgcgcggatgtcggcgccgccagcagcgccggggcccggccgagacggcggcggccgacagcgagccggacacagaccccgaggaggagcgcatcgaggctagcgccggggtcgggggcggcttgtgcgcgggcccctcgccgccgcccccgcgctgctcgctgctggagctgccgcccgagctgctggtggagatcttcgcgtcgctgccgggcacggacctacccagcttggcccaggtctgcacgaagcgggcgagggtcgtggccggcagggcccccgggagtcccagccaagccctgcccagcccagggcagaggcgcccagcaagggcccagatgggacacctggtgaggatggtggcgagcctggggatgccgtagctgcggccgagcagcctgcccagtgtgggcaggggcagccgttcgtgctgcccgtgggcgtgagctccaggaatgaggactacccccgaacctgcaggatgtgtttttatggcacaggcctcatcgcgggccacggcttcaccagccctgaacgcacccccggggtcttcatcctcttcgatgaggaccgcttcgggttcgtctggctggagctgaaatccttcagcctgtacagccgggtccaggccaccttccggaacgcagatgcgccgtccccacaggccttcgatgagatgctcaagaacattcagtccctcacctcctgaccggccacatccttgccgccacatcccgggtggctctggggctctgaactctgacctgtgaatagaagcagcatgcactttggaaatccggccttttgaccagaacgcacacctcgtcggggggcccagtccagccaccccccagcactttatgtagagagtgtgacatagacctgcatatttgtcagtgccatgatggaagaagctgagcatgtcttaccaaaaacagagagaacgagcctgaatacagcagatgtaggggacagccgtgggaccgcgtgagaattgaagcggtggggttcccgcaccctgggctggctggtggttttctcgggaagcaggaccctcctgactggtgctcttcctgtgagcggatagagtgatagactgggtcgtgtgtgagacgcatgtgctccaccccactccttttgggggaagccaggcaacagtggcctctgggagggggtcaggaagaggcgaacagctcaggcagcgcaggtgtgatgggcacagtacgcagagcaagctcgggaagttggtaggatctcaggcttggggccgggactctggagtgaatccccatttctctaccggcttgcttggagtttggacagaagcatttcacctctgatctcagcttccccacctgtggagtgggtttagtgacctgagtcactagggaatgtcacctgaatgcacagcccagcccatgcacctgccccagcccctccagctttggagccaaggccatcgttccagccacttgactgtcctcgacggcctgttccagacagggcgtttgttttgtccatgccttcctccctgcacgcacacggcgtcaaaaccaagctgccggccactgtctccagaacgcaaggctccaggcccgtgtgtctgaagcagtgagtggtccacacaggtgccaggagtgcccatatgagatgacgaggaaacccctttgcaggtgaggggacagctttctagaaaagccacacctgcatctggggacacactttggaaagtgggaccctccagcctggagaccccatggactgatgcctccactgctgtgtgccccatgttgtgttaacacctgcgtgtggggaccccatctgaggtcttggctgaggttggcatctcctgaagaacagagagcacggtgtccagagctggcccttcccccagcccacagccagctccgtgcccgagtgggcgtccccagcgagccttccctctctgccgcttgtccttgtgtctgggctgctccaagtccttgtgctgggcaccctggacacgtcctgctggtgagggacctcgggaaggtgacagtctgtgtgccttggtgtggagaccaacctgaggatgtcctgggaaatgttttcctgatgaatttctccttgactggcctttaaagaacataagaattcccattgcccagcctcagtgcatttggcaaatgcttactttgcttcccagagtcagagaattggcaaaggttcctaaatggtaatctggccggcctgggagaaagactcacgagaaaagccagtggagaaagcgcccttccagggcggcagcagcgggagccacgcagaccccgaggcgcacctgctggctcttgtgtgtggccccagtttctagcggcttttgcagcattagcctacaagctttgtcactccctgccctctgtggtggtcactgtttttctctcttgccaaatgaggcagtctctgagtgacggtgactgtggccttgaagcctggaggactgttgggcatgtagactggcaccttgaagattcaccattgtttaaataaaatcaagcaaatgcttttttaccaagagcccgagcctcgctctaagggacgcagtcctagaggcgtgccctttggggcttgaagagcacactgtgggacgcacgtgcttctgattaaaggaatctcagatctca

SEQ ID NO: 354616 - DNA, 1847 bp, Homo sapiens
gggccccagaaaaatatgtactaggtacgagcctggcttgtttattttcgagtcaccgggctttctgtcgctgtctcactctggggcaggatcaagtctgctctctggagtggggctgcctgcagtgcagctctgcacacctgaacgtgttctttgtcacttgtttggaaatgatgtgattgaagatttcagagaggtcattggaggcttttctgtgccggcactgaatgttcatttgcatgaggaagttgcaaacgacttctgcaggctgagattcaaggcaggtggtattggggtccctcagcccacctgggccgtgacctcaagtgtccactgctgagtgtgagtggctttgcaggcctggtggtgggagagcctcaggctccctccttcttcgttcctgaccatgccctgggccccttcagtctgcctgcggctctgtggcatccctgccctgacactgggcacctgtgcccctagcaagcccacctggcacacgaggagggaggggtgggtggccatgtccttcctctagccacatgccctgctggccgctccattctgagctttgtgcagaaccgggtctgagctggagatttttctctgagaacctgcagttgtgcttgcagccgcacgcaagggcccttcagccgctggctctggcttccctgactcctcagggcgtgttcacccccaggctttctcacctgcacacggttaggccattttcagtgctcgtgggcagtcacggacagcagcagaaactcctcagcccctttgttacttcagaacgcctgcccacatgcatcttctgagctcgtgttgtcctcatggccgtggggtcttgggtgcgaacaggagatgctgagctgtggtccaccgtccaaggtgctgcagaaagcagctaggctcttttaggatgtttctattctggttgctgccttcgtggtgtaacttttaagaacacttacgggaatgtgctcatagaaccatcacctgtcctgagaataaaactcctggaatcatgatcaagtccagtgttaacgtggcccaacctgtctgtacttctggggagagaccaggaacatcactggactcctcatccccgtaattatttagagaagatgcaagcagcagatagtctccatgcggctggtactttttttgttgttttttgagacagggtcttgctctgtcacctgggctggagtgcagagcggcgatcatggctccctgaggcctcaacctactaggctcaagctgtctgcccgccttagcctcccaagtagctgggaccacaggcacccaccaccaccatgcttggctaacttgtttttgtagagatggagttttgccatgttgctcaggttggtctcgaactcccgatctcaggtgatccacccgcctcggcctcccaaagtgctgggattacaggcgtgagcccctgcgccccagccttggggcctgtctttgaatgggaatgagactgtgcaaaccgtggactaccctgtgtcacccacagctcagtggcctgcctgccggccctcaggggctgctgaccgggagaccagccagagcacgagggggtcagggctgtgtgggttttggcctgattctgcatttggttgtttctgggggccatgtagcctgcctgcattaggaaagcgctgtgccatctgatcatgagcccctctgcaccccctggtaaggtgaccttgcagcaggagctgtgccctgcctgggtaggcacccactaggtaggaccggagcaatcctggcagccgccacctgcacccgtgcacttgtttctcctcacagtttcaagtaaatccgtttttgaaggctag

SEQ ID NO: 354617 - DNA, 426 bp, Homo sapiens
cgcatgctcccggtcgtgccccagccccgcccagcaccgctgggcgcctgaggcccctgagattccgaaatttttaacctctgaagctgtgccttcacatgatctaggacagcgttcagaagatggctacagtctgttggtttgtattctgtgaaaatagaaaaaaaaatccggaaatgaccataaccgtggggaaatgatgtaactgctaagaattgaatgtgatggcccagcttgagtgatcttctgctcagaccacaccctggactgaaccagcctcctgtttccctcaggcctcctgaggtccctgatctccggcaagtgatgctccttctcaccatcgtctgtgccattgccttgaaaactcccttcctggcctcgcctactacatgagccagggacaaccagctgtccttttattctttt

SEQ ID NO: 354618 - DNA, 5975 bp, Homo sapiens
agcgggctggagcgtgcgcacaggcggcagcagtggccgtcactgggcggcatggcggtgtgtgctcgcctttgcggcgtgggcccgtcgcgcggatgtcggcgccgccagcagcgccggggcccggccgagacggcggcggccgacagcgagccggacacagaccccgaggaggagcgcatcgaggctagcgccggggtcgggggcggcttgtgcgcgggcccctcgccgccgcccccgcgctgctcgctgctggagctgccgcccgagctgctggtggagatcttcgcgtcgctgccgggcacggacctacccagcttggcccaggtctgcacgaagttccggcgcatcctccacaccgacaccatctggaggaggcgttgccgtgaggagtatggtgtttgcgaaaacttgcggaagctggagatcacaggcgtgtcttgtcgggacgtctatgcgaagctgcttcaccgatatagacacattttgggattgtggcagccagatatcgggccatacggaggactgctgaacgtggtggtggacggcctgttcatcatcgggtggatgtacctgcctccccatgacccccacgtcgatgaccctatgagattcaagcctctgttcaggatccacctgatggagaggaaggctgccacagtggagtgcatgtacggccacaaagggccccaccacggccacatccagattgtgaagaaggatgagttctccaccaagtgcaaccagacggaccaccacaggatgtccggcgggaggcaggaggagtttcggacgtggctgagggaggaatgggggcgcacgctggaggacatcttccacgagcacatgcaggagctcatcctgatgaagttcatctacaccagtcagtacgacaactgcctgacctaccgccgcatctacctgccgcccagccgccccgacgacctcatcaagcctggcctcttcaaaggtacctatggcagccacggcctggagattgtgatgctcagcttccacggccggcgtgccaggggcaccaagatcacgggcgaccccaacatccccgctgggcagcagacagtggagatcgacctgaggcatcggatccagctgcccgacctcgagaaccagcgcaacttcaatgagctctcccgcatcgtcctggaggtgcgcgagagggtgcgccaggagcagcaggaaggcgggcacgaggcgggcgagggtcgtggccggcagggcccccgggagtcccagccaagccctgcccagcccagggcagaggcgcccagcaagggcccagatgggacacctggtgaggatggtggcgagcctggggatgccgtagctgcggccgagcagcctgcccagtgtgggcaggggcagccgttcgtgctgcccgtgggcgtgagctccaggaatgaggactacccccgaacctgcaggatgtgtttttatggcacaggcctcatcgcgggccacggcttcaccagccctgaacgcacccccggggtcttcatcctcttcgatgaggaccgcttcgggttcgtctggctggagctgaaatccttcagcctgtacagccgggtccaggccaccttccggaacgcagatgcgccgtccccacaggccttcgatgagatgctcaagaacattcagtccctcacctcctgaccggccacatccttgccgccacatcccgggtggctctggggctctgaactctgacctgtgaatagaagcagcatgcactttggaaatccggccttttgaccagaacgcacacctcgtcggggggcccagtccagccaccccccagcactttatgtagagagtgtgacatagacctgcatatttgtcagtgccatgatggaagaagctgagcatgtcttaccaaaaacagagagaacgagcctgaatacagcagatgtaggggacagccgtgggaccgcgtgagaattgaagcggtggggttcccgcaccctgggctggctggtggttttctcgggaagcaggaccctcctgactggtgctcttcctgtgagcggatagagtgatagactgggtcgtgtgtgagacgcatgtgctccaccccactccttttgggggaagccaggcaacagtggcctctgggagggggtcaggaagaggcgaacagctcaggcagcgcaggtgtgatgggcacagtacgcagagcaagctcgggaagttggtaggatctcaggcttggggccgggactctggagtgaatccccatttctctaccggcttgcttggagtttggacagaagcatttcacctctgatctcagcttccccacctgtggagtgggtttagtgacctgagtcactagggaatgtcacctgaatgcacagcccagcccatgcacctgccccagcccctccagctttggagccaaggccatcgttccagccacttgactgtcctcgacggcctgttccagacagggcgtttgttttgtccatgccttcctccctgcacgcacacggcgtcaaaaccaagctgccggccactgtctccagaacgcaaggctccaggcccgtgtgtctgaagcagtgagtggtccacacaggtgccaggagtgcccatatgagatgacgaggaaacccctttgcaggtgaggggacagctttctagaaaagccacacctgcatctggggacacactttggaaagtgggaccctccagcctggagaccccatggactgatgcctccactgctgtgtgccccatgttgtgttaacacctgcgtgtggggaccccatctgaggtcttggctgaggttggcatctcctgaagaacagagagcacggtgtccagagctggcccttcccccagcccacagccagctccgtgcccgagtgggcgtccccagcgagccttccctctctgccgcttgtccttgtgtctgggctgctccaagtccttgtgctgggcaccctggacacgtcctgctggtgagggacctcgggaaggtgacagtctgtgtgccttggtgtggagaccaacctgaggatgtcctgggaaatgttttcctgatgaatttctccttgactggcctttaaagaacataagaattcccattgcccagcctcagtgcatttggcaaatgcttactttgcttcccagagtcagagaattggcaaaggttcctaaatggtaatctggccggcctgggagaaagactcacgagaaaagccagtggagaaagcgcccttccagggcggcagcagcgggagccacgcagaccccgaggcgcacctgctggctcttgtgtgtggccccagtttctagcggcttttgcagcattagcctacaagctttgtcactccctgccctctgtggtggtcactgtttttctctcttgccaaatgaggcagtctctgagtgacggtgactgtggccttgaagcctggaggactgttgggcatgtagactggcaccttgaagattcaccattgtttaaataaaatcaagcaaatgcttttttaccaagagcccgagcctcgctctaagggacgcagtcctagaggcgtgccctttggggcttgaagagcacactgtgggacgcacgtgcttctgattaaaggaatctcagatctcaattacgcttccagtgtttgggtatagaaatagcttccacccatcatgtctcagccatgggctgttggtcagttcatgtggctcctggttctggtgtgtatgttgggggcgggggtctctccatggtggtgacctgcagtgatgccaggcagggccagagccacacagccaggaaagggaggcctttttggccgcacagccagtcccttcagtcgtgactacaggtcttgttttttccgctccgatgtgtccttagccagttcttggctccggttctgtagggacaggcactgaatctgcgcgcctcaaaacagcagcttcccttccgggggagggcatccaccctctcaggggatcctgcaggtggcccatttcctgcaggtgagaactcggaagggctgatgtcgtcatcagaggcctaagggcagctgagagttggataaaaccgtttccaaggaggaggctgagtaacccagttcaggacagccaagcgcattaggcttgattggggaaggtggcaggtggagttgggaggttgggactctccatcttttgcaccacggatgcctttctgtcgctgtctcactctggggcaggatcaagtctgctctctggagtggggctgcctgcagtgcagctctgcacacctgaacgtgttctttgtcacttgtttggaaatgatgtgattgaagatttcagagaggtcattggaggcttttctgtgccggcactgaatgttcatttgcatgaggaagttgcaaacgacttctgcaggctgagattcaaggcaggtggtattggggtccctcagcccacctgggccgtgacctcaagtgtccactgctgagtgtgagtggctttgcaggcctggtggtgggagagcctcaggctccctccttcttcgttcctgaccatgccctgggccccttcagtctgcctgcggctctgtggcatccctgccctgacactgggcacctgtgcccctagcaagcccacctggcacacgaggagggaggggtgggtggccatgtccttcctctagccacatgccctgctggccgctccattctgagctttgtgcagaaccgggtctgagctggagatttttctctgagaacctgcagttgtgcttgcagccgcacgcaagggcccttcagccgctggctctggcttccctgactcctcagggcgtgttcacccccaggctttctcacctgcacacggttaggccattttcagtgctcgtgggcagtcacggacagcagcagaaactcctcagcccctttgttacttcagaacgcctgcccacatgcatcttctgagctcgtgttgtcctcatggccgtggggtcttgggtgcgaacaggagatgctgagctgtggtccaccgtccaaggtgctgcagaaagcagctaggctcttttaggatgtttctattctggttgctgccttcgtggtgtaacttttaagaacacttacgggaatgtgctcatagaaccatcacctgtcctgagaataaaactcctggaatcatgatcaagtccagtgttaacgtggcccaacctgtctgtacttctggggagagaccaggaacatcactggactcctcatccccgtaattatttagagaagatgcaagcagcagatagtctccatgcggctggtactttttttgttgttttttgagacagggtcttgctctgtcacctgggctggagtgcagagcggcgatcatggctccctgaggcctcaacctactaggctcaagctgtctgcccgccttagcctcccaagtagctgggaccacaggcacccaccaccaccatgcttggctaacttgtttttgtagagatggagttttgccatgttgctcaggttggtctcgaactcccgatctcaggtgatccacccgcctcggcctcccaaagtgctgggattacaggcgtgagcccctgcgccccagccttggggcctgtctttgaatgggaatgagactgtgcaaaccgtggactaccctgtgtcacccacagctcagtggcctgcctgccggccctcaggggctgctgaccgggagaccagccagagcacgagggggtcagggctgtgtgggttttggcctgattctgcatttggttgtttctgggggccatgtagcctgcctgcattaggaaagcgctgtgccatctgatcatgagcccctctgcaccccctggtaaggtgaccttgcagcaggagctgtgccctgcctgggtaggcacccactaggtaggaccggagcaatcctggcagccgccacctgcacccgtgcacttgtttctcctcacagtttcaagtaaatccgtttttgaaggctag

SEQ ID NO: 354619 - DNA, 5509 bp, Homo sapiens
acattgctatgtcaggccgtggtaatcggaccgagggagcagatattgggcatacggaggactgtgaacgtgtggtggacggcctgttcatcatcgggtggatgtacctgcctccccatgacccccacgtcgatgaccctatgagattcaagcctctgttcaggatccacctgatggagaggaaggctgccacagtggagtgcatgtacggccacaaagggccccaccacggccacatccagattgtgaagaaggatgagttctccaccaagtgcaaccagacggaccaccacaggatgtccggcgggaggcaggaggagtttcggacgtggctgagggaggaatgggggcgcacgctggaggacatcttccacgagcacatgcaggagctcatcctgatgaagttcatctacaccagtcagtacgacaactgcctgacctaccgccgcatctacctgccgcccagccgccccgacgacctcatcaagcctggcctcttcaaaggtacctatggcagccacggcctggagattgtgatgctcagcttccacggccggcgtgccaggggcaccaagatcacgggcgaccccaacatccccgctgggcagcagacagtggagatcgacctgaggcatcggatccagctgcccgacctcgagaaccagcgcaacttcaatgagctctcccgcatcgtcctggaggtgcgcgagagggtgcgccaggagcagcaggaaggcgggcacgaggcgggcgagggtcgtggccggcagggcccccgggagtcccagccaagccctgcccagcccagggcagaggcgcccagcaagggcccagatgggacacctggtgaggatggtggcgagcctggggatgccgtagctgcggccgagcagcctgcccagtgtgggcaggggcagccgttcgtgctgcccgtgggcgtgagctccaggaatgaggactacccccgaacctgcaggatgtgtttttatggcacaggcctcatcgcgggccacggcttcaccagccctgaacgcacccccggggtcttcatcctcttcgatgaggaccgcttcgggttcgtctggctggagctgaaatccttcagcctgtacagccgggtccaggccaccttccggaacgcagatgcgccgtccccacaggccttcgatgagatgctcaagaacattcagtccctcacctcctgaccggccacatccttgccgccacatcccgggtggctctggggctctgaactctgacctgtgaatagaagcagcatgcactttggaaatccggccttttgaccagaacgcacacctcgtcggggggcccagtccagccaccccccagcactttatgtagagagtgtgacatagacctgcatatttgtcagtgccatgatggaagaagctgagcatgtcttaccaaaaacagagagaacgagcctgaatacagcagatgtaggggacagccgtgggaccgcgtgagaattgaagcggtggggttcccgcaccctgggctggctggtggttttctcgggaagcaggaccctcctgactggtgctcttcctgtgagcggatagagtgatagactgggtcgtgtgtgagacgcatgtgctccaccccactccttttgggggaagccaggcaacagtggcctctgggagggggtcaggaagaggcgaacagctcaggcagcgcaggtgtgatgggcacagtacgcagagcaagctcgggaagttggtaggatctcaggcttggggccgggactctggagtgaatccccatttctctaccggcttgcttggagtttggacagaagcatttcacctctgatctcagcttccccacctgtggagtgggtttagtgacctgagtcactagggaatgtcacctgaatgcacagcccagcccatgcacctgccccagcccctccagctttggagccaaggccatcgttccagccacttgactgtcctcgacggcctgttccagacagggcgtttgttttgtccatgccttcctccctgcacgcacacggcgtcaaaaccaagctgccggccactgtctccagaacgcaaggctccaggcccgtgtgtctgaagcagtgagtggtccacacaggtgccaggagtgcccatatgagatgacgaggaaacccctttgcaggtgaggggacagctttctagaaaagccacacctgcatctggggacacactttggaaagtgggaccctccagcctggagaccccatggactgatgcctccactgctgtgtgccccatgttgtgttaacacctgcgtgtggggaccccatctgaggtcttggctgaggttggcatctcctgaagaacagagagcacggtgtccagagctggcccttcccccagcccacagccagctccgtgcccgagtgggcgtccccagcgagccttccctctctgccgcttgtccttgtgtctgggctgctccaagtccttgtgctgggcaccctggacacgtcctgctggtgagggacctcgggaaggtgacagtctgtgtgccttggtgtggagaccaacctgaggatgtcctgggaaatgttttcctgatgaatttctccttgactggcctttaaagaacataagaattcccattgcccagcctcagtgcatttggcaaatgcttactttgcttcccagagtcagagaattggcaaaggttcctaaatggtaatctggccggcctgggagaaagactcacgagaaaagccagtggagaaagcgcccttccagggcggcagcagcgggagccacgcagaccccgaggcgcacctgctggctcttgtgtgtggccccagtttctagcggcttttgcagcattagcctacaagctttgtcactccctgccctctgtggtggtcactgtttttctctcttgccaaatgaggcagtctctgagtgacggtgactgtggccttgaagcctggaggactgttgggcatgtagactggcaccttgaagattcaccattgtttaaataaaatcaagcaaatgcttttttaccaagagcccgagcctcgctctaagggacgcagtcctagaggcgtgccctttggggcttgaagagcacactgtgggacgcacgtgcttctgattaaaggaatctcagatctcaattacgcttccagtgtttgggtatagaaatagcttccacccatcatgtctcagccatgggctgttggtcagttcatgtggctcctggttctggtgtgtatgttgggggcgggggtctctccatggtggtgacctgcagtgatgccaggcagggccagagccacacagccaggaaagggaggcctttttggccgcacagccagtcccttcagtcgtgactacaggtcttgttttttccgctccgatgtgtccttagccagttcttggctccggttctgtagggacaggcactgaatctgcgcgcctcaaaacagcagcttcccttccgggggagggcatccaccctctcaggggatcctgcaggtggcccatttcctgcaggtgagaactcggaagggctgatgtcgtcatcagaggcctaagggcagctgagagttggataaaaccgtttccaaggaggaggctgagtaacccagttcaggacagccaagcgcattaggcttgattggggaaggtggcaggtggagttgggaggttgggactctccatcttttgcaccacggatgcctttctgtcgctgtctcactctggggcaggatcaagtctgctctctggagtggggctgcctgcagtgcagctctgcacacctgaacgtgttctttgtcacttgtttggaaatgatgtgattgaagatttcagagaggtcattggaggcttttctgtgccggcactgaatgttcatttgcatgaggaagttgcaaacgacttctgcaggctgagattcaaggcaggtggtattggggtccctcagcccacctgggccgtgacctcaagtgtccactgctgagtgtgagtggctttgcaggcctggtggtgggagagcctcaggctccctccttcttcgttcctgaccatgccctgggccccttcagtctgcctgcggctctgtggcatccctgccctgacactgggcacctgtgcccctagcaagcccacctggcacacgaggagggaggggtgggtggccatgtccttcctctagccacatgccctgctggccgctccattctgagctttgtgcagaaccgggtctgagctggagatttttctctgagaacctgcagttgtgcttgcagccgcacgcaagggcccttcagccgctggctctggcttccctgactcctcagggcgtgttcacccccaggctttctcacctgcacacggttaggccattttcagtgctcgtgggcagtcacggacagcagcagaaactcctcagcccctttgttacttcagaacgcctgcccacatgcatcttctgagctcgtgttgtcctcatggccgtggggtcttgggtgcgaacaggagatgctgagctgtggtccaccgtccaaggtgctgcagaaagcagctaggctcttttaggatgtttctattctggttgctgccttcgtggtgtaacttttaagaacacttacgggaatgtgctcatagaaccatcacctgtcctgagaataaaactcctggaatcatgatcaagtccagtgttaacgtggcccaacctgtctgtacttctggggagagaccaggaacatcactggactcctcatccccgtaattatttagagaagatgcaagcagcagatagtctccatgcggctggtactttttttgttgttttttgagacagggtcttgctctgtcacctgggctggagtgcagagcggcgatcatggctccctgaggcctcaacctactaggctcaagctgtctgcccgccttagcctcccaagtagctgggaccacaggcacccaccaccaccatgcttggctaacttgtttttgtagagatggagttttgccatgttgctcaggttggtctcgaactcccgatctcaggtgatccacccgcctcggcctcccaaagtgctgggattacaggcgtgagcccctgcgccccagccttggggcctgtctttgaatgggaatgagactgtgcaaaccgtggactaccctgtgtcacccacagctcagtggcctgcctgccggccctcaggggctgctgaccgggagaccagccagagcacgagggggtcagggctgtgtgggttttggcctgattctgcatttggttgtttctgggggccatgtagcctgcctgcattaggaaagcgctgtgccatctgatcatgagcccctctgcaccccctggtaaggtgaccttgcagcaggagctgtgccctgcctgggtaggcacccactaggtaggaccggagcaatcctggcagccgccacctgcacccgtgcacttgtttctcctcacagtttcaagtaaatccgtttttgaaggctag

SEQ ID NO: 354620 - DNA, 2747 bp, Homo sapiens
agcgggctggagcgtgcgcacaggcggcagcagtggccgtcactgggcggcatggcggtgtgtgctcgcctttgcggcgtgggcccgtcgcgcggatgtcggcgccgccagcagcgccggggcccggccgagacggcggcggccgacagcgagccggacacagaccccgaggaggagcgcatcgaggctagcgccggggtcgggggcggcttgtgcgcgggcccctcgccgccgcccccgcgctgctcgctgctggagctgccgcccgagctgctggtggagatcttcgcgtcgctgccgggcacggacctacccagcttggcccaggtctgcacgaagttccggcgcatcctccacaccgacaccatctggaggaggcgttgccgtgaggagtatggtgtttgcgaaaacttgcggaagctggagatcacaggcgtgtcttgtcgggacgtctatgcgaagctgcttcaccgatatagacacattttgggattgtggcagccagatatcgggccatacggaggactgctgaacgtggtggtggacggcctgttcatcatcgggtggatgtacctgcctccccatgacccccacgtcgatgaccctatgagattcaagcctctgttcaggatccacctgatggagaggaaggctgccacagtggagtgcatgtacggccacaaagggccccaccacggccacatccagattgtgaagaaggatgagttctccaccaagtgcaaccagacggaccaccacaggatgtccggcgggaggcaggaggagtttcggacgtggctgagggaggaatgggggcgcacgctggaggacatcttccacgagcacatgcaggagctcatcctgatgaagttcatctacaccagtcagtacgacaactgcctgacctaccgccgcatctacctgccgcccagccgccccgacgacctcatcaagcctggcctcttcaaaggtacctatggcagccacggcctggagattgtgatgctcagcttccacggccggcgtgccaggggcaccaagatcacgggcgaccccaacatccccgctgggcagcagacagtggagatcgacctgaggcatcggatccagctgcccgacctcgagaaccagcgcaacttcaatgagctctcccgcatcgtcctggaggtgcgcgagagggtgcgccaggagcagcaggaaggcgggcacgaggcgggcgagggtcgtggccggcagggcccccgggagtcccagccaagccctgcccagcccagggcagaggcgcccagcaagggcccagatgggacacctggtgaggatggtggcgagcctggggatgccgtagctgcggccgagcagcctgcccagtgtgggcaggggcagccgttcgtgctgcccgtgggcgtgagctccaggaatgaggactacccccgaacctgcaggatgtgtttttatggcacaggcctcatcgcgggccacggcttcaccagccctgaacgcacccccggggtcttcatcctcttcgatgaggaccgcttcgggttcgtctggctggagctgaaatccttcagcctgtacagccgggtccaggccaccttccggaacgcagatgcgccgtccccacaggccttcgatgagatgctcaagaacattcagtccctcacctcctgaccggccacatccttgccgccacatcccgggtggctctggggctctgaactctgacctgtgaatagaagcagcatgcactttggaaatccggccttttgaccagaacgcacacctcgtcggggggcccagtccagccaccccccagcactttatgtagagagtgtgacatagacctgcatatttgtcagtgccatgatggaagaagctgagcatgtcttaccaaaaacagagagaacgagcctgaatacagcagatgtaggggacagccgtgggaccgcgtgagaattgaagcggtggggttcccgcaccctgggctggctggtggttttctcgggaagcaggaccctcctgactggtgctcttcctgtgagcggatagagtgatagactgggtcgtgtgtgagacgcatgtgctccaccccactccttttgggggaagccaggcaacagtggcctctgggagggggtcaggaagaggcgaacagctcaggcagcgcaggtgtgatgggcacagtacgcagagcaagctcgggaagttggtaggatctcaggcttggggccgggactctggagtgaatccccatttctctaccggcttgcttggagtttggacagaagcatttcacctctgatctcagcttccccacctgtggagtgggtttagtgacctgagtcactagggaatgtcacctgaatgcacagcccagcccatgcacctgccccagcccctccagctttggagccaaggccatcgttccagccacttgactgtcctcgacggcctgttccagacagggcgtttgttttgtccatgccttcctccctgcacgcacacggcgtcaaaaccaagctgccggccactgtctccagaacgcaaggctccaggcccgtgtgtctgaagcagtgagtggtccaccttgaagattcaccattgtttaaataaaatcaagcaaatgcttttttaccaagagcccgagcctcgctctaagggacgcagtcctagaggcgtgccctttggggcttgaagagcacactgtgggacgcacgtgcttctgattaaaggaatctcagatctca

SEQ ID NO: 354621 - DNA, 1637 bp, Homo sapiens
agcgggctggagcgtgcgcacaggcggcagcagtggccgtcactgggcggcatggcggtgtgtgctcgcctttgcggcgtgggcccgtcgcgcggatgtcggcgccgccagcagcgccggggcccggccgagacggcggcggccgacagcgagccggacacagaccccgaggaggagcgcatcgaggctagcgccggggtcgggggcggcttgtgcgcgggcccctcgccgccgcccccgcgctgctcgctgctggagctgccgcccgagctgctggtggagatcttcgcgtcgctgccgggcacggacctacccagcttggcccaggtctgcacgaagttccggcgcatcctccacaccgacaccatctggaggaggcgttgccgtgaggagtatggtgtttgcgaaaacttgcggaagctggagatcacaggcgtgtcttgtcgggacgtctatgcgaagctgcttcaccgatatagacacattttgggattgtggcagccagatatcgggccatacggaggactgctgaacgtggtggtggacggcctgttcatcatcgggtggatgtacctgcctccccatgacccccacgtcgatgaccctatgagattcaagcctctgttcaggatccacctgatggagaggaaggctgccacagtggagtgcatgtacggccacaaagggccccaccacggccacatccagattgtgaagaaggatgagttctccaccaagtgcaaccagacggaccaccacaggatgtccggcgggaggcaggaggagtttcggacgtggctgagggaggaatgggggcgcacgctggaggacatcttccacgagcacatgcaggagctcatcctgatgaagttcatctacaccagtcagtacgacaactgcctgacctaccgccgcatctacctgccgcccagccgccccgacgacctcatcaagcctggcctcttcaaaggtacctatggcagccacggcctggagattgtgatgctcagcttccacggccggcgtgccaggggcaccaagatcacgggcgaccccaacatccccgctgggcagcagacagtggagatcgacctgaggcatcggatccagctgcccgacctcgagaaccagcgcaacttcaatgagctctcccgcatcgtcctggaggtgcgcgagagggtgcgccaggagcagcaggaaggcgggcacgaggcgggcgagggtcgtggccggcagggcccccgggagtcccagccaagccctgcccagcccagggcagaggcgcccagcaagggcccagatgggacacctggtgaggatggtggcgagcctggggatgccgtagctgcggccgagcagcctgcccagtgtgggcaggggcagccgttcgtgctgcccgtgggcgtgagctccaggaatgaggactacccccgaacctgcaggatgtggtaaggatgcggcgggtactggggcctgaaggtgggacagcatgggcttcagcgagggccccagccccacacctagcacaggcggagagggcctgtgacctcacagagggcggcagccggtgctttgggacaggagtgcggcctctgaccccttgggccatgttccccagcacctgagcaagcggccgc

SEQ ID NO: 354622 - DNA, 3622 bp, Homo sapiens
agcgggctggagcgtgcgcacaggcggcagcagtggccgtcactgggcggcatggcggtgtgtgctcgcctttgcggcgtgggcccgtcgcgcggatgtcggcgccgccagcagcgccggggcccggccgagacggcggcggccgacagcgagccggacacagaccccgaggaggagcgcatcgaggctagcgccggggtcgggggcggcttgtgcgcgggcccctcgccgccgcccccgcgctgctcgctgctggagctgccgcccgagctgctggtggagatcttcgcgtcgctgccgggcacggacctacccagcttggcccaggtctgcacgaagttccggcgcatcctccacaccgacaccatctggaggaggcgttgccgtgaggagtatggtgtttgcgaaaacttgcggaagctggagatcacaggcgtgtcttgtcgggacgtctatgcgaagctgcttcaccgatatagacacattttgggattgtggcagccagatatcgggccatacggaggactgctgaacgtggtggtggacggcctgttcatcatcgggtggatgtacctgcctccccatgacccccacgtcgatgaccctatgagattcaagcctctgttcaggatccacctgatggagaggaaggctgccacagtggagtgcatgtacggccacaaagggccccaccacggccacatccagattgtgaagaaggatgagttctccaccaagtgcaaccagacggaccaccacaggatgtccggcgggaggcaggaggagtttcggacgtggctgagggaggaatgggggcgcacgctggaggacatcttccacgagcacatgcaggagctcatcctgatgaagttcatctacaccagtcagtacgacaactgcctgacctaccgccgcatctacctgccgcccagccgccccgacgacctcatcaagcctggcctcttcaaaggtacctatggcagccacggcctggagattgtgatgctcagcttccacggccggcgtgccaggggcaccaagatcacgggcgaccccaacatccccgctgggcagcagacagtggagatcgacctgaggcatcggatccagctgcccgacctcgagaaccagcgcaacttcaatgagctctcccgcatcgtcctggaggtgcgcgagagggtgcgccaggagcagcaggaaggcgggcacgaggcgggcgagggtcgtggccggcagggcccccgggagtcccagccaagccctgcccagcccagggcagaggcgcccagcaagggcccagatgggacacctggtgaggatggtggcgagcctggggatgccgtagctgcggccgagcagcctgcccagtgtgggcaggggcagccgttcgtgctgcccgtgggcgtgagctccaggaatgaggactacccccgaacctgcaggatgtgtttttatggcacaggcctcatcgcgggccacggcttcaccagccctgaacgcacccccggggtcttcatcctcttcgatgaggaccgcttcgggttcgtctggctggagctgaaatccttcagcctgtacagccgggtccaggccaccttccggaacgcagatgcgccgtccccacaggccttcgatgagatgctcaagaacattcagtccctcacctcctgaccggccacatccttgccgccacatcccgggtggctctggggctctgaactctgacctgtgaatagaagcagcatgcactttggaaatccggccttttgaccagaacgcacacctcgtcggggggcccagtccagccaccccccagcactttatgtagagagtgtgacatagacctgcatatttgtcagtgccatgatggaagaagctgagcatgtcttaccaaaaacagagagaacgagcctgaatacagcagatgtaggggacagccgtgggaccgcgtgagaattgaagcggtggggttcccgcaccctgggctggctggtggttttctcgggaagcaggaccctcctgactggtgctcttcctgtgagcggatagagtgatagactgggtcgtgtgtgagacgcatgtgctccaccccactccttttgggggaagccaggcaacagtggcctctgggagggggtcaggaagaggcgaacagctcaggcagcgcaggtgtgatgggcacagtacgcagagcaagctcgggaagttggtaggatctcaggcttggggccgggactctggagtgaatccccatttctctaccggcttgcttggagtttggacagaagcatttcacctctgatctcagcttccccacctgtggagtgggtttagtgacctgagtcactagggaatgtcacctgaatgcacagcccagcccatgcacctgccccagcccctccagctttggagccaaggccatcgttccagccacttgactgtcctcgacggcctgttccagacagggcgtttgttttgtccatgccttcctccctgcacgcacacggcgtcaaaaccaagctgccggccactgtctccagaacgcaaggctccaggcccgtgtgtctgaagcagtgagtggtccacacaggtgccaggagtgcccatatgagatgacgaggaaacccctttgcaggtgaggggacagctttctagaaaagccacacctgcatctggggacacactttggaaagtgggaccctccagcctggagaccccatggactgatgcctccactgctgtgtgccccatgttgtgttaacacctgcgtgtggggaccccatctgaggtcttggctgaggttggcatctcctgaagaacagagagcacggtgtccagagctggcccttcccccagcccacagccagctccgtgcccgagtgggcgtccccagcgagccttccctctctgccgcttgtccttgtgtctgggctgctccaagtccttgtgctgggcaccctggacacgtcctgctggtgagggacctcgggaaggtgacagtctgtgtgccttggtgtggagaccaacctgaggatgtcctgggaaatgttttcctgatgaatttctccttgactggcctttaaagaacataagaattcccattgcccagcctcagtgcatttggcaaatgcttactttgcttcccagagtcagagaattggcaaaggttcctaaatggtaatctggccggcctgggagaaagactcacgagaaaagccagtggagaaagcgcccttccagggcggcagcagcgggagccacgcagaccccgaggcgcacctgctggctcttgtgtgtggccccagtttctagcggcttttgcagcattagcctacaagctttgtcactccctgccctctgtggtggtcactgtttttctctcttgccaaatgaggcagtctctgagtgacggtgactgtggccttgaagcctggaggactgttgggcatgtagactggcaccttgaagattcaccattgtttaaataaaatcaagcaaatgcttttttaccaagagcccgagcctcgctctaagggacgcagtcctagaggcgtgccctttggggcttgaagagcacactgtgggacgcacgtgcttctgattaaaggaatctcagatctca

SEQ ID NO: 354623 - DNA, 1822 bp, Homo sapiens
gaagatttagaggcggcctggtttgtaattcatgacgtgccgggttatgttcatactgggccgggtcgacattgtacaactggagtggggctgcctgcagtgcagctctgcacacctgaacgtgttctttgtcacttgtttggaaatgatgtgattgaagatttcagagaggtcattggaggcttttctgtgccggcactgaatgttcatttgcatgaggaagttgcaaacgacttctgcaggctgagattcaaggcaggtggtattggggtccctcagcccacctgggccgtgacctcaagtgtccactgctgagtgtgagtggctttgcaggcctggtggtgggagagcctcaggctccctccttcttcgttcctgaccatgccctgggccccttcagtctgcctgcggctctgtggcatccctgccctgacactgggcacctgtgcccctagcaagcccacctggcacacgaggagggaggggtgggtggccatgtccttcctctagccacatgccctgctggccgctccattctgagctttgtgcagaaccgggtctgagctggagatttttctctgagaacctgcagttgtgcttgcagccgcacgcaagggcccttcagccgctggctctggcttccctgactcctcagggcgtgttcacccccaggctttctcacctgcacacggttaggccattttcagtgctcgtgggcagtcacggacagcagcagaaactcctcagcccctttgttacttcagaacgcctgcccacatgcatcttctgagctcgtgttgtcctcatggccgtggggtcttgggtgcgaacaggagatgctgagctgtggtccaccgtccaaggtgctgcagaaagcagctaggctcttttaggatgtttctattctggttgctgccttcgtggtgtaacttttaagaacacttacgggaatgtgctcatagaaccatcacctgtcctgagaataaaactcctggaatcatgatcaagtccagtgttaacgtggcccaacctgtctgtacttctggggagagaccaggaacatcactggactcctcatccccgtaattatttagagaagatgcaagcagcagatagtctccatgcggctggtactttttttgttgttttttgagacagggtcttgctctgtcacctgggctggagtgcagagcggcgatcatggctccctgaggcctcaacctactaggctcaagctgtctgcccgccttagcctcccaagtagctgggaccacaggcacccaccaccaccatgcttggctaacttgtttttgtagagatggagttttgccatgttgctcaggttggtctcgaactcccgatctcaggtgatccacccgcctcggcctcccaaagtgctgggattacaggcgtgagcccctgcgccccagccttggggcctgtctttgaatgggaatgagactgtgcaaaccgtggactaccctgtgtcacccacagctcagtggcctgcctgccggccctcaggggctgctgaccgggagaccagccagagcacgagggggtcagggctgtgtgggttttggcctgattctgcatttggttgtttctgggggccatgtagcctgcctgcattaggaaagcgctgtgccatctgatcatgagcccctctgcaccccctggtaaggtgaccttgcagcaggagctgtgccctgcctgggtaggcacccactaggtaggaccggagcaatcctggcagccgccacctgcacccgtgcacttgtttctcctcacagtttcaagtaaatccgtttttgaaggctag

SEQ ID NO: 354624 - DNA, 3404 bp, Homo sapiens
cgcatgctcccggtcgtgccccagccccgcccagcaccgctgggcgcctgaggcccctgagattccgaaatttttaacctctgaagctgtgccttcacatgatctaggacagcgttcagaagatggctacagtctgttggtttgtattctgtgaaaatagaaaaaaaaatccgagtatggtgtttgcgaaaacttgcggaagctggagatcacaggcgtgtcttgtcgggacgtctatgcgaagctgcttcaccgatatagacacattttgggattgtggcagccagatatcgggccatacggaggactgctgaacgtggtggtggacggcctgttcatcatcgggtggatgtacctgcctccccatgacccccacgtcgatgaccctatgagattcaagcctctgttcaggatccacctgatggagaggaaggctgccacagtggagtgcatgtacggccacaaagggccccaccacggccacatccagattgtgaagaaggatgagttctccaccaagtgcaaccagacggaccaccacaggatgtccggcgggaggcaggaggagtttcggacgtggctgagggaggaatgggggcgcacgctggaggacatcttccacgagcacatgcaggagctcatcctgatgaagttcatctacaccagtcagtacgacaactgcctgacctaccgccgcatctacctgccgcccagccgccccgacgacctcatcaagcctggcctcttcaaaggtacctatggcagccacggcctggagattgtgatgctcagcttccacggccggcgtgccaggggcaccaagatcacgggcgaccccaacatccccgctgggcagcagacagtggagatcgacctgaggcatcggatccagctgcccgacctcgagaaccagcgcaacttcaatgagctctcccgcatcgtcctggaggtgcgcgagagggtgcgccaggagcagcaggaaggcgggcacgaggcgggcgagggtcgtggccggcagggcccccgggagtcccagccaagccctgcccagcccagggcagaggcgcccagcaagggcccagatgggacacctggtgaggatggtggcgagcctggggatgccgtagctgcggccgagcagcctgcccagtgtgggcaggggcagccgttcgtgctgcccgtgggcgtgagctccaggaatgaggactacccccgaacctgcaggatgtgtttttatggcacaggcctcatcgcgggccacggcttcaccagccctgaacgcacccccggggtcttcatcctcttcgatgaggaccgcttcgggttcgtctggctggagctgaaatccttcagcctgtacagccgggtccaggccaccttccggaacgcagatgcgccgtccccacaggccttcgatgagatgctcaagaacattcagtccctcacctcctgaccggccacatccttgccgccacatcccgggtggctctggggctctgaactctgacctgtgaatagaagcagcatgcactttggaaatccggccttttgaccagaacgcacacctcgtcggggggcccagtccagccaccccccagcactttatgtagagagtgtgacatagacctgcatatttgtcagtgccatgatggaagaagctgagcatgtcttaccaaaaacagagagaacgagcctgaatacagcagatgtaggggacagccgtgggaccgcgtgagaattgaagcggtggggttcccgcaccctgggctggctggtggttttctcgggaagcaggaccctcctgactggtgctcttcctgtgagcggatagagtgatagactgggtcgtgtgtgagacgcatgtgctccaccccactccttttgggggaagccaggcaacagtggcctctgggagggggtcaggaagaggcgaacagctcaggcagcgcaggtgtgatgggcacagtacgcagagcaagctcgggaagttggtaggatctcaggcttggggccgggactctggagtgaatccccatttctctaccggcttgcttggagtttggacagaagcatttcacctctgatctcagcttccccacctgtggagtgggtttagtgacctgagtcactagggaatgtcacctgaatgcacagcccagcccatgcacctgccccagcccctccagctttggagccaaggccatcgttccagccacttgactgtcctcgacggcctgttccagacagggcgtttgttttgtccatgccttcctccctgcacgcacacggcgtcaaaaccaagctgccggccactgtctccagaacgcaaggctccaggcccgtgtgtctgaagcagtgagtggtccacacaggtgccaggagtgcccatatgagatgacgaggaaacccctttgcaggtgaggggacagctttctagaaaagccacacctgcatctggggacacactttggaaagtgggaccctccagcctggagaccccatggactgatgcctccactgctgtgtgccccatgttgtgttaacacctgcgtgtggggaccccatctgaggtcttggctgaggttggcatctcctgaagaacagagagcacggtgtccagagctggcccttcccccagcccacagccagctccgtgcccgagtgggcgtccccagcgagccttccctctctgccgcttgtccttgtgtctgggctgctccaagtccttgtgctgggcaccctggacacgtcctgctggtgagggacctcgggaaggtgacagtctgtgtgccttggtgtggagaccaacctgaggatgtcctgggaaatgttttcctgatgaatttctccttgactggcctttaaagaacataagaattcccattgcccagcctcagtgcatttggcaaatgcttactttgcttcccagagtcagagaattggcaaaggttcctaaatggtaatctggccggcctgggagaaagactcacgagaaaagccagtggagaaagcgcccttccagggcggcagcagcgggagccacgcagaccccgaggcgcacctgctggctcttgtgtgtggccccagtttctagcggcttttgcagcattagcctacaagctttgtcactccctgccctctgtggtggtcactgtttttctctcttgccaaatgaggcagtctctgagtgacggtgactgtggccttgaagcctggaggactgttgggcatgtagactggcaccttgaagattcaccattgtttaaataaaatcaagcaaatgcttttttaccaagagcccgagcctcgctctaagggacgcagtcctagaggcgtgccctttggggcttgaagagcacactgtgggacgcacgtgcttctgattaaaggaatctcagatctca

SEQ ID NO: 354625 - DNA, 5100 bp, Homo sapiens
agcgggctggagcgtgcgcacaggcggcagcagtggccgtcactgggcggcatggcggtgtgtgctcgcctttgcggcgtgggcccgtcgcgcggatgtcggcgccgccagcagcgccggggcccggccgagacggcggcggccgacagcgagccggacacagaccccgaggaggagcgcatcgaggctagcgccggggtcgggggcggcttgtgcgcgggcccctcgccgccgcccccgcgctgctcgctgctggagctgccgcccgagctgctggtggagatcttcgcgtcgctgccgggcacggacctacccagcttggcccaggtctgcacgaagttccggcgcatcctccacaccgacaccatctggaggaggcgttgccgtgaggagtatggtgtttgcgaaaacttgcggaagctggagatcacaggcgtgtcttgtcgggacgtctatgcgaagctgcttcaccgatatagacacattttgggattgtggcagccagatatcgggccatacggaggactgctgaacgtggtggtggacggcctgttcatcatcgggtggatgtacctgcctccccatgacccccacgtcgatgaccctatgagattcaagcctctgttcaggatccacctgatggagaggaaggctgccacagtggagtgcatgtacggccacaaagggccccaccacggccacatccagattgtgaagaaggatgagttctccaccaagtgcaaccagacggaccaccacaggatgtccggcgggaggcaggaggagtttcggacgtggctgagggaggaatgggggcgcacgctggaggacatcttccacgagcacatgcaggagctcatcctgatgaagttcatctacaccagtcagtacgacaactgcctgacctaccgccgcatctacctgccgcccagccgccccgacgacctcatcaagcctggcctcttcaaaggtacctatggcagccacggcctggagattgtgatgctcagcttccacggccggcgtgccaggggcaccaagatcacgggcgaccccaacatccccgctgggcagcagacagtggagatcgacctgaggcatcggatccagctgcccgacctcgagaaccagcgcaacttcaatgagctctcccgcatcgtcctggaggtgcgcgagagggtgcgccaggagcagcaggaaggcgggcacgaggcgggcgagggtcgtggccggcagggcccccgggagtcccagccaagccctgcccagcccagggcagaggcgcccagcaagggcccagatgggacacctggtgaggatggtggcgagcctggggatgccgtagctgcggccgagcagcctgcccagtgtgggcaggggcagccgttcgtgctgcccgtgggcgtgagctccaggaatgaggactacccccgaacctgcaggatgtgtttttatggcacaggcctcatcgcgggccacggcttcaccagccctgaacgcacccccggggtcttcatcctcttcgatgaggaccgcttcgggttcgtctggctggagctgaaatccttcagcctgtacagccgggtccaggccaccttccggaacgcagatgcgccgtccccacaggccttcgatgagatgctcaagaacattcagtccctcacctcctgaccggccacatccttgccgccacatcccgggtggctctggggctctgaactctgacctgtgaatagaagcagcatgcactttggaaatccggccttttgaccagaacgcacacctcgtcggggggcccagtccagccaccccccagcactttatgtagagagtgtgacatagacctgcatatttgtcagtgccatgatggaagaagctgagcatgtcttaccaaaaacagagagaacgagcctgaatacagcagatgtaggggacagccgtgggaccgcgtgagaattgaagcggtggggttcccgcaccctgggctggctggtggttttctcgggaagcaggaccctcctgactggtgctcttcctgtgagcggatagagtgatagactgggtcgtgtgtgagacgcatgtgctccaccccactccttttgggggaagccaggcaacagtggcctctgggagggggtcaggaagaggcgaacagctcaggcagcgcaggtgtgatgggcacagtacgcagagcaagctcgggaagttggtaggatctcaggcttggggccgggactctggagtgaatccccatttctctaccggcttgcttggagtttggacagaagcatttcacctctgatctcagcttccccacctgtggagtgggtttagtgacctgagtcactagggaatgtcacctgaatgcacagcccagcccatgcacctgccccagcccctccagctttggagccaaggccatcgttccagccacttgactgtcctcgacggcctgttccagacagggcgtttgttttgtccatgccttcctccctgcacgcacacggcgtcaaaaccaagctgccggccactgtctccagaacgcaaggctccaggcccgtgtgtctgaagcagtgagtggtccaccttgaagattcaccattgtttaaataaaatcaagcaaatgcttttttaccaagagcccgagcctcgctctaagggacgcagtcctagaggcgtgccctttggggcttgaagagcacactgtgggacgcacgtgcttctgattaaaggaatctcagatctcaattacgcttccagtgtttgggtatagaaatagcttccacccatcatgtctcagccatgggctgttggtcagttcatgtggctcctggttctggtgtgtatgttgggggcgggggtctctccatggtggtgacctgcagtgatgccaggcagggccagagccacacagccaggaaagggaggcctttttggccgcacagccagtcccttcagtcgtgactacaggtcttgttttttccgctccgatgtgtccttagccagttcttggctccggttctgtagggacaggcactgaatctgcgcgcctcaaaacagcagcttcccttccgggggagggcatccaccctctcaggggatcctgcaggtggcccatttcctgcaggtgagaactcggaagggctgatgtcgtcatcagaggcctaagggcagctgagagttggataaaaccgtttccaaggaggaggctgagtaacccagttcaggacagccaagcgcattaggcttgattggggaaggtggcaggtggagttgggaggttgggactctccatcttttgcaccacggatgcctttctgtcgctgtctcactctggggcaggatcaagtctgctctctggagtggggctgcctgcagtgcagctctgcacacctgaacgtgttctttgtcacttgtttggaaatgatgtgattgaagatttcagagaggtcattggaggcttttctgtgccggcactgaatgttcatttgcatgaggaagttgcaaacgacttctgcaggctgagattcaaggcaggtggtattggggtccctcagcccacctgggccgtgacctcaagtgtccactgctgagtgtgagtggctttgcaggcctggtggtgggagagcctcaggctccctccttcttcgttcctgaccatgccctgggccccttcagtctgcctgcggctctgtggcatccctgccctgacactgggcacctgtgcccctagcaagcccacctggcacacgaggagggaggggtgggtggccatgtccttcctctagccacatgccctgctggccgctccattctgagctttgtgcagaaccgggtctgagctggagatttttctctgagaacctgcagttgtgcttgcagccgcacgcaagggcccttcagccgctggctctggcttccctgactcctcagggcgtgttcacccccaggctttctcacctgcacacggttaggccattttcagtgctcgtgggcagtcacggacagcagcagaaactcctcagcccctttgttacttcagaacgcctgcccacatgcatcttctgagctcgtgttgtcctcatggccgtggggtcttgggtgcgaacaggagatgctgagctgtggtccaccgtccaaggtgctgcagaaagcagctaggctcttttaggatgtttctattctggttgctgccttcgtggtgtaacttttaagaacacttacgggaatgtgctcatagaaccatcacctgtcctgagaataaaactcctggaatcatgatcaagtccagtgttaacgtggcccaacctgtctgtacttctggggagagaccaggaacatcactggactcctcatccccgtaattatttagagaagatgcaagcagcagatagtctccatgcggctggtactttttttgttgttttttgagacagggtcttgctctgtcacctgggctggagtgcagagcggcgatcatggctccctgaggcctcaacctactaggctcaagctgtctgcccgccttagcctcccaagtagctgggaccacaggcacccaccaccaccatgcttggctaacttgtttttgtagagatggagttttgccatgttgctcaggttggtctcgaactcccgatctcaggtgatccacccgcctcggcctcccaaagtgctgggattacaggcgtgagcccctgcgccccagccttggggcctgtctttgaatgggaatgagactgtgcaaaccgtggactaccctgtgtcacccacagctcagtggcctgcctgccggccctcaggggctgctgaccgggagaccagccagagcacgagggggtcagggctgtgtgggttttggcctgattctgcatttggttgtttctgggggccatgtagcctgcctgcattaggaaagcgctgtgccatctgatcatgagcccctctgcaccccctggtaaggtgaccttgcagcaggagctgtgccctgcctgggtaggcacccactaggtaggaccggagcaatcctggcagccgccacctgcacccgtgcacttgtttctcctcacagtttcaagtaaatccgtttttgaaggctag

SEQ ID NO: 354626 - DNA, 583 bp, Homo sapiens
agagacggacagcggcggagaggcagacagcggcagcgcggcggagaggcggccagcggcggagaggcggacagcggcggagaggcggacagcggcggcgcggcggagagacggacagcggcggagaggcagacagcggcggcgaggcgcgcagcggcggcgcaggcgcggagaggcgctggcgccggctctggcgcggagaggcgcaggcccaggctccactccccagctgtgaaagggttttctgcctcctgctaagccaatttatacattccaagaaaatcttccatttcatccaggtgaaacagaacctactggaatgaagctggcctcccatggaatgaagctggcctcccgtctccttgatttgaagcagcttctgcacgttggttattatgccatttttctaaatctaacattttaaaatttgtgccttttctttctcttttgcttgacttctcagaggtttttttaacggtcttttcaaagaagtggttttgggttttatttatcaagtctacttttattatggctgttttaaaattaaatacatttatttcttgtttcccttaaaaaaaaaaat

SEQ ID NO: 354627 - DNA, 376 bp, Homo sapiens
ctgcatggattttggcatatccaggatggctagatgggatacttggtatgattctgacagcaactaattttgcttaacaatgttcatgatattcttaaaacaaaaatatgctgcatcaaatatctacattttaattattctggatctacttaattcatgctagtagaatgtgtatagagcagttattttcgttgatagaaaatgtttcaccacattaaggggtaaaaggagtagaatttgaacctaattacttacgtttagttgactgactaaatgtttatttcttgtcagtgcagtttccaacaacctcatttgatggtggggggtgacctgggcacactgtggaaggctggcagctgatcgccaggctggggtg

SEQ ID NO: 354628 - DNA, 379 bp, Homo sapiens
  misc_feature (10)..(10): n is a, c, g, or t
  misc_feature (14)..(14): n is a, c, g, or t
ggcacgaccncgtncgaattcggcacgagatccactccacctgttatactagtgttcttgtgggaattttatcagttatatttggggaaagcacatccagttttccgtttggacattgttaataaatctgaggtgggtttttcccatactcctcatgctaactttgtggtatacttttggttttaaaaaatgtatcttagtgttttttttgttaaaatagctttcttttattagggaacttttgagaagttaaaaattctgcttctgaattgtatttgaatagtatgggcttacaacaaaaaccagataattcttgcttctattctttttgaatatttttcccctctaataaagtacttgattcgaatacacttccttt

SEQ ID NO: 354629 - DNA, 1052 bp, Homo sapiens
tgtggccgccgaggagtcccttgctgaaggcggaccgcggagcggcgggcggcgggcggcgcgcgcgcgcgcgcgagaggcggctgttggagaagtggagcggcggtcgcggggggaggaggaggagggactgagcggcggcggcccccgcgtcccgtgcctctatgggggaagcagacaatggattatgatttcaaggcgaagctggcggcggagcgggagcgggtggaggatttgtttgagtacgaagggtgcaaagtgggacgcggcacctacggtcacgtctacaaggcgaggcggaaagatggattccaggagggcttcgtgtatggacctcaagcgttggaggtagcagacttttcagcagaaggtaaagatgcaaattgggtgcttcacagagacttgaaaccagcaaatatcctagtaatgggagaaggtcctgagagggggagagtcaaaataggtaggtaattattcctaaaataatttatttaaaaactgaagttaactgcaaagatggtttccctttttaatgcccttatttaggtagttaattttaaaattactttctcattatttttagaaaagatattggaaaatgtagatagatagtctacaaaactcctaggttttttcccaaaataagattctttagttctaagttgaggcatcactggaaattgacaagctagttcacaaaagcattcattcccatacagtaacccaagcatgtgtttatgtcaccaccactgtcctgcacagccaccttaaatataatcctctaaatctcacttctgtttcaggtttaccaactattctcttcctgaatattttcctccccaccctgagcgaatatatttaaaccttcacaggttctccctacttcaccacacctggcctgcatgtcttgcaccaagtactaacataccttttccaaatagatatatatgtttacagactctcttagctgcctctcttagattgaggcactggcaggattcttatttgtatattaagatttcctttataatcctgaatgttctaaaaaaaaa

SEQ ID NO: 354630 - DNA, 6074 bp, Homo sapiens
agcgggaggggcggccctggtacgcaggcgcgcatgctttgtgggggcgaggctgtggtggcccgagattccaggagggcttcgtgtatggacctcaagcgttggaggtagcagacttttcagcagaaggtaaagaaaagatgaaaaggaatatgcattgaagcaaattgaaggcacaggaatatccatgtcggcttgtagagagattgcacttttgcgagaattgaagcaccctaatgtgattgcattgcagaaggtgttcctttctcacagtgacaggaaggtatggctgctgtttgattatgcagagcatgacttgtggcatattattaagtttcaccgtgcatcaaaagcaaataaaaagcccatgcagttgccaagatctatggttaaatccttactttaccagattcttgatggtatccattacctccatgcaaattgggtgcttcacagagacttgaaaccagcaaatatcctagtaatgggagaaggtcctgagagggggagagtcaaaatagctgacatgggttttgccagattattcaattctcctctaaagccactagcagatttggatccagtagttgtgacattttggtatcgggctccagaacttttgcttggtgcaaggcattatacaaaggccattgatatatgggcaataggttgtatatttgctgaattgttgacttcggaacctatttttcactgtcgtcaggaagatataaaaacaagcaatccctttcatcatgatcaactggatcggatatttagtgtcatggggtttcctgcagataaagactgggaagatattagaaagatgccagaatatcccacacttcaaaaagactttagaagaacaacgtatgccaacagtagcctcataaagtacatggagaaacacaaggtcaagcctgacagcaaagtgttcctcttgcttcagaaactcctgaccatggatccaaccaagagaattacctcggagcaagctctgcaggatccctattttcaggaggaccctttgccaacattagatgtatttgccggctgccagattccataccccaaacgagaattccttaatgaagatgatcctgaagaaaaaggtgacaagaatcagcaacagcagcagaaccagcatcagcagcccacagcccctccacagcaggcagcagcccctccacaggcgcccccaccacagcagaacagcacccagaccaacgggaccgcaggtggggctggggccggggtcgggggcaccggagcagggttgcagcacagccaggactccagcctgaaccaggtgcctccaaacaagaagccacggctagggccttcaggcgcaaactcaggtggacctgtgatgccctcggattatcagcactccagttctcgcctgaattaccaaagcagcgttcagggatcctctcagtcccagagcacacttggctactcttcctcgtctcagcagagctcacagtaccacccatctcaccaggcccaccggtactgaccagctcccgttgggccaggccagcccagcccagagcacaggctccagcaatatgtctgcattgaaaagaaccaaaaaaatgcaaactatgatgccatttaaaactcatacacatgggaggaaaaccttatatactgagcattgtgcaggactgatagctcttctttattgacttaaagaagattcttgtgaagtttccccagcaccccttccctgcatgtgttccattgtgacttctctgataaagcgtctgatctaatcccagcacttctgtaaccttcagcatttctttgaaggatttcctggtgcacctttctcatgctgtagcaatcactatggtttatcttttcaaagctcttttaataggattttaatgttttagaaacaggattccagtggtgtatagttttatacttcatgaactgatttagcaacacaggtaaaaatgcaccttttaaagcactacgttttcacagacaataactgttctgctcatggaagtcttaaacagaaactgttactgtcccaaagtactttactattacgttcgtatttatctagtttcagggaaggtctaataaaaagacaagcggtgggacagagggaacctacaaccaaaaactgcctagatctttgcagttatgtgctttatgccacgaagaactgaagtatgtggtaatttttatagaatcattcatatggaactgagttcccagcatcatcttattctgaatagcattcagtaattaagaattacaattttaaccttcatgtagctaagtctaccttaaaaagggtttcaagagctttgtacagtctcgatggcccacaccaaaacgctgaagagagtaacaactgcactaggatttctgtaaggagtaattttgatcaaaagacgtgttacttccctttgaaggaaaagtttttagtgtgtattgtacataaagtcggcttctctaaagaaccattggtttcttcacatctgggtctgcgtgagtaactttcttgcataatcaaggttactcaagtagaagcctgaaaattaatctgcttttaaaataaagagcagtgttctccattcgtatttgtattagatatagagtgactatttttaaagcatgttaaaaatttaggttttattcatgtttaaagtatgtattatgtatgcataattttgctgttgttactgaaacttaattctatcaagaatctttttcattgcactgaatgatttcttttgcccctaggagaaaacttaataattgtgcctaaaaactatgggcggatagtataagactatactagacaaagtgaatatttgcatttccattatctatgaattagtggctgagttctttcttagctgctttaaggagcccctcactccccagagtcaaaaggaaatgtaaaaacttagagctcccattgtaatgtaaggggcaagaaatttgtgttcttctgaatgctactagcagcaccagccttgttttaaatgttttcttgagctagaagaaatagctgattattgtatatgcaaattacatgcatttttaaaaactattctttctgaacttatctacctggttatgatactgtgggtccatacacaagtaaaataagattagacagaagccagtatacattttgcactattgatgtgatactgtagccagccaggaccttactgatctcagcataataatgctcactaataatgaagtctgcatagtgacactcatcaagactgaagatgaagcaggttacgtgctccattggaaggagtttctgatagtctcctgctgttttaccccttccattttttaaaataagaaattagcagccctctgcataatgtagctgcctatatgcagttttatcctgtgccctaaagcctcactgtccagagctgttggtcatcagatgcttattgcaccctcaccatgtgcctggtgccctgctgggtagagaacacagaggacagggcatacttcttgtccttaaggagcttgtgatctgtgacagtaagccctcctgggatgtctgtgccatgtgattgacttacaagtgaaactgtcttataatatgaaggtctttttgtttacttctaaacccacttgggtagttactatccccaaatctgttctgtaaataatattatggaagggtttctatgtcagtctaccttagagaaagccagtgattcaatatcacaaaaggcattgacgtatctttgaaatgttcacagcagccttttaacaacaactgggtggtccttgtaggcagaacatactctcctaagtggttgtaggaaattgcaaggaaaatagaaggtctgttcttgctctcaaggaggttacctttaataaaagaagacaaacccagatagatatgtaaaccaaaatactatgccccttaatactttataagcagcattgttaaatagttcttacgcttatacattcacagaactaccctgttttccttgtatataatgacttttgctggcagaactgaaatataaactgtaaggggatttcgtcagttgctcccagtatacaatatcctccaggacatagccagaaatctccattccacacatgactgagttcctatccctgcactggtactggctcttttctcctctttccttgcctcagggttcgtgctacccactgattccctttacccttagtaataattttggatcattttctttcctttaaaggggaacaaagccttttttttttttgagacggagtgttgctctgtcacccaagctggagtgcagtggcacgaatcttggctcactccaacctccaccttccaggttcaagtgattctcctgcctcagcctcccgagtagctgggactacgggcacgcaccaccacgtctggctaatttttgtatttttagtagagatggggtttcaccctattggtcaggctggtcttgaattcctcacctcaggtcatccgcctgtctcggcctcccgaagtgctgggattataggtgtgagccaccgcacccagttgggaacaaagcctttttaacacacgtaagggccctcaaaccgtgggacctctaaggagacctttgaagctttttgagggcaaactttacctttgtggtccccaaatgatggcatttctctttgaaatttattagatactgttatgtcccccaagggtacaggaggggcatccctcagcctatgggaacacccaaactaggaggggttattgacaggaaggaatgaatccaagtgaaggctttctgctcttcgtgttacaaaccagtttcagagttagctttctggggaggtgtgtgtttgtgaaaggaattcaagtgttgcaggacagatgagctcaaggtaaggtagctttggcagcagggctgatactatgaggctgaaacaatccttgtgatgaagtagatcatgcagtgacatacaaagaccaaggattatgtatatttttatatctctgtggttttgaaactttagtacttagaattttggccttctgcactactcttttgctcttacgaacataatggactcttaagaatggaaagggatgacatttacctatgtgtgctgcctcattcctggtgaagcaactgctacttgttctctatgcctctaaaatgatgctgttttctctgctaaaggtaaaagaaaagaaaaaaatagttggaaaataagacatgcaacttgatgtgcttttgagtaaatttatgcagcagaaactatacaatgaaggaagaattctatggaaattacaaatccaaaactctatgatgatgtcttcctagggagtagagaaaggcagtgaaatggcagttagaccaacagaggcttgaaggattcaagtacaagtaatattttgtataaaacatagcagtttaggtccccataatcctcaaaaatagtcacaaatataacaaagttcattgttttagggtttttaaaaaacgtgttgtacctaaggccatacttactcttctatgctatcactgcaaaggggtgatatgtatgtattatataaaaaaaaaaacccttaatgcactgttatctcctaaatatttagtaaattaatactatttaatttttttaaagatttgtctgtgtagacactaaaagtattacacaaaatctggactgaaggtgtcctttttaacaacaatttaaagtactttttatatatgttatgtagtatatcctttctaaactgcctagtttgtatattcctataattcctatttgtgaagtgtacctgttcttgtctcttttttcagtcattttctgcacgcatccccctttatatggttatagagatgactgtagcttttcgtgctccactgcgaggtttgtgctcagagccgctgcaccccagcgaggcctgctccatggagtgcaggacgagctactgctttggagcgagggtttcctgcttttgagttgacctgacttccttcttgaaatgactgttaaaactaaaataaattacattgcatttattttatattcttggttgaaataaaatttaattgactttg

SEQ ID NO: 354631 - DNA, 5368 bp, Homo sapiens
tgtggccgccgaggagtcccttgctgaaggcggaccgcggagcggcgggcggcgggcggcgcgcgcgcgcgcgcgagaggcggctgttggagaagtggagcggcggtcgcggggggaggaggaggagggactgagcggcggcggcccccgcgtcccgtgcctctatgggggaagcagacaatggattatgatttcaaggcgaagctggcggcggagcgggagcgggtggaggatttgtttgagtacgaagggtgcaaagtgggacgcggcacctacggtcacgtctacaaggcgaggcggaaagatggaaaagatgaaaaggaatatgcattgaagcaaattgaaggcacaggaatatccatgtcggcttgtagagagattgcacttttgcgagaattgaagcaccctaatgtgattgcattgcagaaggtgttcctttctcacagtgacaggaaggtatggctgctgtttgattatgcagagcatgacttgtggcatattattaagtttcaccgtgcatcaaaagcaaataaaaagcccatgcagttgccaagatctatggttaaatccttactttaccagattcttgatggtatccattacctccatgcaaattgggtgcttcacagagacttgaaaccagcaaatatcctagtaatgggagaaggtcctgagagggggagagtcaaaatagctgacatgggttttgccagattattcaattctcctctaaagccactagcagatttggatccagtagttgtgacattttggtatcgggctccagaacttttgcttggtgcaaggcattatacaaaggccattgatatatgggcaataggttgtatatttgctgaattgttgacttcggaacctatttttcactgtcgtcaggaagatataaaaacaagcaatccctttcatcatgatcaactggatcggatatttagtgtcatggggtttcctgcagataaagactgggaagatattagaaagatgccagaatatcccacacttcaaaaagactttagaagaacaacgtatgccaacagtagcctcataaagtacatggagaaacacaaggtcaagcctgacagcaaagtgttcctcttgcttcagaaactcctgaccatggatccaaccaagagaattacctcggagcaagctctgcaggatccctattttcaggaggaccctttgccaacattagatgtatttgccggctgccagattccataccccaaacgagaattccttaatgaagatgatcctgaagaaaaaggtgacaagaatcagcaacagcagcagaaccagcatcagcagcccacagcccctccacagcaggcagcagcccctccacaggcgcccccaccacagcagaacagcacccagaccaacgggaccgcaggtggggctggggccggggtcgggggcaccggagcagggttgcagcacagccaggactccagcctgaaccaggtgcctccaaacaagaagccacggctagggccttcaggcgcaaactcaggtggacctgtgatgccctcggattatcagcactccagttctcgcctgaattaccaaagcagcgttcagggatcctctcagtcccagagcacacttggctactcttcctcgtctcagcagagctcacagtaccacccatctcaccaggcccaccggtactgaccagctcccgttgggccaggccagcccagcccagagcacaggctccagcaatatgtctgcattgaaaagaaccaaaaaaatgcaaactatgatgccatttaaaactcatacacatgggaggaaaaccttatatactgagcattgtgcaggactgatagctcttctttattgacttaaagaagattcttgtgaagtttccccagcaccccttccctgcatgtgttccattgtgacttctctgataaagcgtctgatctaatcccagcacttctgtaaccttcagcatttctttgaaggatttcctggtgcacctttctcatgctgtagcaatcactatggtttatcttttcaaagctcttttaataggattttaatgttttagaaacaggattccagtggtgtatagttttatacttcatgaactgatttagcaacacaggtaaaaatgcaccttttaaagcactacgttttcacagacaataactgttctgctcatggaagtcttaaacagaaactgttactgtcccaaagtactttactattacgttcgtatttatctagtttcagggaaggtctaataaaaagacaagcggtgggacagagggaacctacaaccaaaaactgcctagatctttgcagttatgtgctttatgccacgaagaactgaagtatgtggtaatttttatagaatcattcatatggaactgagttcccagcatcatcttattctgaatagcattcagtaattaagaattacaattttaaccttcatgtagctaagtctaccttaaaaagggtttcaagagctttgtacagtctcgatggcccacaccaaaacgctgaagagagtaacaactgcactaggatttctgtaaggagtaattttgatcaaaagacgtgttacttccctttgaaggaaaagtttttagtgtgtattgtacataaagtcggcttctctaaagaaccattggtttcttcacatctgggtctgcgtgagtaactttcttgcataatcaaggttactcaagtagaagcctgaaaattaatctgcttttaaaataaagagcagtgttctccattcgtatttgtattagatatagagtgactatttttaaagcatgttaaaaatttaggttttattcatgtttaaagtatgtattatgtatgcataattttgctgttgttactgaaacttaattctatcaagaatctttttcattgcactgaatgatttcttttgcccctaggagaaaacttaataattgtgcctaaaaactatgggcggatagtataagactatactagacaaagtgaatatttgcatttccattatctatgaattagtggctgagttctttcttagctgctttaaggagcccctcactccccagagtcaaaaggaaatgtaaaaacttagagctcccattgtaatgtaaggggcaagaaatttgtgttcttctgaatgctactagcagcaccagccttgttttaaatgttttcttgagctagaagaaatagctgattattgtatatgcaaattacatgcatttttaaaaactattctttctgaacttatctacctggttatgatactgtgggtccatacacaagtaaaataagattagacagaagccagtatacattttgcactattgatgtgatactgtagccagccaggaccttactgatctcagcataataatgctcactaataatgaagtctgcatagtgacactcatcaagactgaagatgaagcaggttacgtgctccattggaaggagtttctgatagtctcctgctgttttaccccttccattttttaaaataagaaattagcagccctctgcataatgtagctgcctatatgcagttttatcctgtgccctaaagcctcactgtccagagctgttggtcatcagatgcttattgcaccctcaccatgtgcctggtgccctgctgggtagagaacacagaggacagggcatacttcttgtccttaaggagcttgtgatctgtgacagtaagccctcctgggatgtctgtgccatgtgattgacttacaagtgaaactgtcttataatatgaaggtctttttgtttacttctaaacccacttgggtagttactatccccaaatctgttctgtaaataatattatggaagggtttctatgtcagtctaccttagagaaagccagtgattcaatatcacaaaaggcattgacgtatctttgaaatgttcacagcagccttttaacaacaactgggtggtccttgtaggcagaacatactctcctaagtggttgtaggaaattgcaaggaaaatagaaggtctgttcttgctctcaaggaggttacctttaataaaagaagacaaacccagatagatatgtaaaccaaaatactatgccccttaatactttataagcagcattgttaaatagttcttacgcttatacattcacagaactaccctgttttccttgtatataatgacttttgctggcagaactgaaatataaactgtaaggggatttcgtcagttgctcccagtatacaatatcctccaggacatagccagaaatctccattccacacatgactgagttcctatccctgcactggtactggctcttttctcctctttccttgcctcagggttcgtgctacccactgattccctttacccttagtaataattttggatcattttctttcctttaaaggggaacaaagccttttttttttttgagacggagtgttgctctgtcacccaagctggagtgcagtggcacgaatcttggctcactccaacctccaccttccaggttcaagtgattctcctgcctcagcctcccgagtagctgggactacgggcacgcaccaccacgtctggctaatttttgtatttttagtagagatggggtttcaccctattggtcaggctggtcttgaattcctcacctcaggtcatccgcctgtctcggcctcccgaagtgctgggattataggtgtgagccaccgcacccagttgggaacaaagcctttttaacacacgtaagggccctcaaaccgtgggacctctaaggagacctttgaagctttttgagggcaaactttacctttgtggtccccaaatgatggcatttctctttgaaatttattagatactgttatgtcccccaagggtacaggaggggcatccctcagcctatgggaacacccaaactaggaggggttattgacaggaaggaatgaatccaagtgaaggctttctgctcttcgtgttacaaaccagtttcagagttagctttctggggaggtgtgtgtttgtgaaaggaattcaagtgttgcaggacagatgagctcaaggtaaggtagctttggcagcagggctgatactatgaggctgaaacaatccttgtgatgaagtagatcatgcagtgacatacaaagaccaaggattatgtatatttttatatctctgtggttttgaaactttagtacttagaattttggccttctgcactactcttttgctcctaactccattcagccctccctcttttggcccagttcctcccaccccctcagtcccatttcctagcagaatcagaagattgtgaagaggccggcttcatcaaaatgggataaaaaaataattttttaggacttaaaaa

SEQ ID NO: 354632 - DNA, 2869 bp, Homo sapiens
tgtggccgccgaggagtcccttgctgaaggcggaccgcggagcggcgggcggcgggcggcgcgcgcgcgcgcgcgagaggcggctgttggagaagtggagcggcggtcgcggggggaggaggaggagggactgagcggcggcggcccccgcgtcccgtgcctctatgggggaagcagacaatggattatgatttcaaggcgaagctggcggcggagcgggagcgggtggaggatttgtttgagtacgaagggtgcaaagtgggacgcggcacctacggtcacgtctacaaggcgaggcggaaagatggaaaagatgaaaaggaatatgcattgaagcaaattgaaggcacaggaatatccatgtcggcttgtagagagattgcacttttgcgagaattgaagcaccctaatgtgattgcattgcagaaggtgttcctttctcacagtgacaggaaggtatggctgctgtttgattatgcagagcatgacttgtggcatattattaagtttcaccgtgcatcaaaagcaaataaaaagcccatgcagttgccaagatctatggttaaatccttactttaccagattcttgatggtatccattacctccatgcaaattgggtgcttcacagagacttgaaaccagcaaatatcctagtaatgggagaaggtcctgagagggggagagtcaaaatagctgacatgggttttgccagattattcaattctcctctaaagccactagcagatttggatccagtagttgtgacattttggtatcgggctccagaacttttgcttggtgcaaggcattatacaaaggccattgatatatgggcaataggttgtatatttgctgaattgttgacttcggaacctatttttcactgtcgtcaggaagatataaaaacaagcaatccctttcatcatgatcaactggatcggatatttagtgtcatggggtttcctgcagataaagactgggaagatattagaaagatgccagaatatcccacacttcaaaaagactttagaagaacaacgtatgccaacagtagcctcataaagtacatggagaaacacaaggtcaagcctgacagcaaagtgttcctcttgcttcagaaactcctgaccatggatccaaccaagagaattacctcggagcaagctctgcaggatccctattttcaggaggaccctttgccaacattagatgtatttgccggctgccagattccataccccaaacgagaattccttaatgaagatgatcctgaagaaaaaggtgacaagaatcagcaacagcagcagaaccagcatcagcagcccacagcccctccacagcaggcagcagcccctccacaggcgcccccaccacagcagaacagcacccagaccaacgggaccgcaggtggggctggggccggggtcgggggcaccggagcagggttgcagcacagccaggactccagcctgaaccaggtgcctccaaacaagaagccacggctagggccttcaggcgcaaactcaggtggacctgtgatgccctcggattatcagcactccagttctcgcctgaattaccaaagcagcgttcagggatcctctcagtcccagagcacacttggctactcttcctcgtctcagcagagctcacagtaccacccatctcaccaggcccaccggtactgaccagctcccgttgggccaggccagcccagcccagagcacaggctccagcaatatgtctgcattgaaaagaaccaaaaaaatgcaaactatgatgccatttaaaactcatacacatgggaggaaaaccttatatactgagcattgtgcaggactgatagctcttctttattgacttaaagaagattcttgtgaagtttccccagcaccccttccctgcatgtgttccattgtgacttctctgataaagcgtctgatctaatcccagcacttctgtaaccttcagcatttctttgaaggatttcctggtgcacctttctcatgctgtagcaatcactatggtttatcttttcaaagctcttttaataggattttaatgttttagaaacaggattccagtggtgtatagttttatacttcatgaactgatttagcaacacaggtaaaaatgcaccttttaaagcactacgttttcacagacaataactgttctgctcatggaagtcttaaacagaaactgttactgtcccaaagtactttactattacgttcgtatttatctagtttcagggaaggtctaataaaaagacaagcggtgggacagagggaacctacaaccaaaaactgcctagatctttgcagttatgtgctttatgccacgaagaactgaagtatgtggtaatttttatagaatcattcatatggaactgagttcccagcatcatcttattctgaatagcattcagtaattaagaattacaattttaaccttcatgtagctaagtctaccttaaaaagggtttcaagagctttgtacagtctcgatggcccacaccaaaacgctgaagagagtaacaactgcactaggatttctgtaaggagtaattttgatcaaaagacgtgttacttccctttgaaggaaaagtttttagtgtgtattgtacataaagtcggcttctctaaagaaccattggtttcttcacatctgggtctgcgtgagtaactttcttgcataatcaaggttactcaagtagaagcctgaaaattaatctgcttttaaaataaagagcagtgttctccattcgtatttgtattagatatagagtgacgacttggtttagcacattcaaagatctttgtttttactcagtggcctatgtaacacatgtatgcatgcactgcc

SEQ ID NO: 354633 - DNA, 1125 bp, Homo sapiens
aggacgtcattctccagcccccgccaatgagcagcgggacggggggcggggcaataggcggacccactgccctagaaaagaaacaagctgcggtacaactgtcctcaccagccctcgcctcccgagtcactgcagccaacccttcagcaaggagttgagggagaactgtaggaacaccttgggaagcctttactggttgtcctcttaagaagagctggataatgtactgagaatacctgtcctttcttggtcctggagggcagacagcagctacagcaggactggtggaaccagcttcctggcaggaattaccctcccccaaagctagggacccaggaagatgccctgtccagcatagactttaaagagagtcaaactctacggaagaggattgtaacggaccatttctgaataaagtgatgatcagccacaatgacattagtaaaatttgaagtgccgcttatctttgtgcgtgctgttataatttgatgtggttggtatatgaactctaggactaaagtacgttgtgtgcgtatgcactaacttcataaaacaactctattataaagtgttttgtcataaggtatcgtgaaaattgcaaagtgctatccaagtgtaaaggattattattattgcagaattttttttttcttttgtaactgaacaggccttaaggtactcagttgtttctcataattcctttaattaccaggtgtccttgaatgcttatcatggaatgtgagatactataattaacatattttggttttggaatatccactccacctgttatactagtgttcttgtgggaattttatcagttatatttggggaaagcacatccagttttccgtttggacattgttaataaatctgaggtgggtttttcccatactcctcatgctaactttgtggtatacttttggttttaaaaaatgtatcttagtgttttttttgttaaaatagctttcttttattagggaacttttgagaagttaaaaattctgcttctgaattgtatttgaatagtatgggcttacaacaaaaaccagataattcttgcttctattctttttgaatatttttcccctctaataaagtacttgattcgaatacacttccttt

SEQ ID NO: 354634 - DNA, 242 bp, Homo sapiens
cattataacccctcattaacatggtcacagtcaccctcaaaatagattgttttggttgaacttattactcaaattatttttctttgtgtcattattggcctttaataagtaattttaaaatatagagcatttgttacagcattgattgtgttttattggcatagatattagcaaagactatattattatgtttttttttaatttttagcatattattaagtttcaccgtgcatcaaaagcaa

SEQ ID NO: 354635 - DNA, 1282 bp, Homo sapiens
tgtggccgccgaggagtcccttgctgaaggcggaccgcggagcggcgggcggcgggcggcgcgcgcgcgcgcgcgagaggcggctgttggagaagtggagcggcggtcgcggggggaggaggaggagggactgagcggcggcggcccccgcgtcccgtgcctctatgggggaagcagacaatggattatgatttcaaggcgaagctggcggcggagcgggagcgggtggaggatttgtttgagtacgaagggtgcaaagtgggacgcggcacctacggtcacgtctacaaggcgaggcggaaagatgggagttgagggagaactgtaggaacaccttgggaagcctttactggttgtcctcttaagaagagctggataatgtactgagaatacctgtcctttcttggtcctggagggcagacagcagctacagcaggactggtggaaccagcttcctggcaggaattaccctcccccaaagctagggacccaggaagatgccctgtccagcatagactttaaagagagtcaaactctacggaagaggattgtaacggaccatttctgaataaagtgatgatcagccacaatgacattagtaaaatttgaagtgccgcttatctttgtgcgtgctgttataatttgatgtggttggtatatgaactctaggactaaagtacgttgtgtgcgtatgcactaacttcataaaacaactctattataaagtgttttgtcataaggtatcgtgaaaattgcaaagtgctatccaagtgtaaaggattattattattgcagaattttttttttcttttgtaactgaacaggccttaaggtactcagttgtttctcataattcctttaattaccaggtgtccttgaatgcttatcatggaatgtgagatactataattaacatattttggttttggaatatccactccacctgttatactagtgttcttgtgggaattttatcagttatatttggggaaagcacatccagttttccgtttggacattgttaataaatctgaggtgggtttttcccatactcctcatgctaactttgtggtatacttttggttttaaaaaatgtatcttagtgttttttttgttaaaatagctttcttttattagggaacttttgagaagttaaaaattctgcttctgaattgtatttgaatagtatgggcttacaacaaaaaccagataattcttgcttctattctttttgaatatttttcccctctaataaagtacttgattcgaatacacttccttt

SEQ ID NO: 354636 - DNA, 6247 bp, Homo sapiens
tgtggccgccgaggagtcccttgctgaaggcggaccgcggagcggcgggcggcgggcggcgcgcgcgcgcgcgcgagaggcggctgttggagaagtggagcggcggtcgcggggggaggaggaggagggactgagcggcggcggcccccgcgtcccgtgcctctatgggggaagcagacaatggattatgatttcaaggcgaagctggcggcggagcgggagcgggtggaggatttgtttgagtacgaagggtgcaaagtgggacgcggcacctacggtcacgtctacaaggcgaggcggaaagatggaaaagatgaaaaggaatatgcattgaagcaaattgaaggcacaggaatatccatgtcggcttgtagagagattgcacttttgcgagaattgaagcaccctaatgtgattgcattgcagaaggtgttcctttctcacagtgacaggaaggtatggctgctgtttgattatgcagagcatgacttgtggcatattattaagtttcaccgtgcatcaaaagcaaataaaaagcccatgcagttgccaagatctatggttaaatccttactttaccagattcttgatggtatccattacctccatgcaaattgggtgcttcacagagacttgaaaccagcaaatatcctagtaatgggagaaggtcctgagagggggagagtcaaaatagctgacatgggttttgccagattattcaattctcctctaaagccactagcagatttggatccagtagttgtgacattttggtatcgggctccagaacttttgcttggtgcaaggcattatacaaaggccattgatatatgggcaataggttgtatatttgctgaattgttgacttcggaacctatttttcactgtcgtcaggaagatataaaaacaagcaatccctttcatcatgatcaactggatcggatatttagtgtcatggggtttcctgcagataaagactgggaagatattagaaagatgccagaatatcccacacttcaaaaagactttagaagaacaacgtatgccaacagtagcctcataaagtacatggagaaacacaaggtcaagcctgacagcaaagtgttcctcttgcttcagaaactcctgaccatggatccaaccaagagaattacctcggagcaagctctgcaggatccctattttcaggaggaccctttgccaacattagatgtatttgccggctgccagattccataccccaaacgagaattccttaatgaagatgatcctgaagaaaaaggtgacaagaatcagcaacagcagcagaaccagcatcagcagcccacagcccctccacagcaggcagcagcccctccacaggcgcccccaccacagcagaacagcacccagaccaacgggaccgcaggtggggctggggccggggtcgggggcaccggagcagggttgcagcacagccaggactccagcctgaaccaggtgcctccaaacaagaagccacggctagggccttcaggcgcaaactcaggtggacctgtgatgccctcggattatcagcactccagttctcgcctgaattaccaaagcagcgttcagggatcctctcagtcccagagcacacttggctactcttcctcgtctcagcagagctcacagtaccacccatctcaccaggcccaccggtactgaccagctcccgttgggccaggccagcccagcccagagcacaggctccagcaatatgtctgcattgaaaagaaccaaaaaaatgcaaactatgatgccatttaaaactcatacacatgggaggaaaaccttatatactgagcattgtgcaggactgatagctcttctttattgacttaaagaagattcttgtgaagtttccccagcaccccttccctgcatgtgttccattgtgacttctctgataaagcgtctgatctaatcccagcacttctgtaaccttcagcatttctttgaaggatttcctggtgcacctttctcatgctgtagcaatcactatggtttatcttttcaaagctcttttaataggattttaatgttttagaaacaggattccagtggtgtatagttttatacttcatgaactgatttagcaacacaggtaaaaatgcaccttttaaagcactacgttttcacagacaataactgttctgctcatggaagtcttaaacagaaactgttactgtcccaaagtactttactattacgttcgtatttatctagtttcagggaaggtctaataaaaagacaagcggtgggacagagggaacctacaaccaaaaactgcctagatctttgcagttatgtgctttatgccacgaagaactgaagtatgtggtaatttttatagaatcattcatatggaactgagttcccagcatcatcttattctgaatagcattcagtaattaagaattacaattttaaccttcatgtagctaagtctaccttaaaaagggtttcaagagctttgtacagtctcgatggcccacaccaaaacgctgaagagagtaacaactgcactaggatttctgtaaggagtaattttgatcaaaagacgtgttacttccctttgaaggaaaagtttttagtgtgtattgtacataaagtcggcttctctaaagaaccattggtttcttcacatctgggtctgcgtgagtaactttcttgcataatcaaggttactcaagtagaagcctgaaaattaatctgcttttaaaataaagagcagtgttctccattcgtatttgtattagatatagagtgactatttttaaagcatgttaaaaatttaggttttattcatgtttaaagtatgtattatgtatgcataattttgctgttgttactgaaacttaattctatcaagaatctttttcattgcactgaatgatttcttttgcccctaggagaaaacttaataattgtgcctaaaaactatgggcggatagtataagactatactagacaaagtgaatatttgcatttccattatctatgaattagtggctgagttctttcttagctgctttaaggagcccctcactccccagagtcaaaaggaaatgtaaaaacttagagctcccattgtaatgtaaggggcaagaaatttgtgttcttctgaatgctactagcagcaccagccttgttttaaatgttttcttgagctagaagaaatagctgattattgtatatgcaaattacatgcatttttaaaaactattctttctgaacttatctacctggttatgatactgtgggtccatacacaagtaaaataagattagacagaagccagtatacattttgcactattgatgtgatactgtagccagccaggaccttactgatctcagcataataatgctcactaataatgaagtctgcatagtgacactcatcaagactgaagatgaagcaggttacgtgctccattggaaggagtttctgatagtctcctgctgttttaccccttccattttttaaaataagaaattagcagccctctgcataatgtagctgcctatatgcagttttatcctgtgccctaaagcctcactgtccagagctgttggtcatcagatgcttattgcaccctcaccatgtgcctggtgccctgctgggtagagaacacagaggacagggcatacttcttgtccttaaggagcttgtgatctgtgacagtaagccctcctgggatgtctgtgccatgtgattgacttacaagtgaaactgtcttataatatgaaggtctttttgtttacttctaaacccacttgggtagttactatccccaaatctgttctgtaaataatattatggaagggtttctatgtcagtctaccttagagaaagccagtgattcaatatcacaaaaggcattgacgtatctttgaaatgttcacagcagccttttaacaacaactgggtggtccttgtaggcagaacatactctcctaagtggttgtaggaaattgcaaggaaaatagaaggtctgttcttgctctcaaggaggttacctttaataaaagaagacaaacccagatagatatgtaaaccaaaatactatgccccttaatactttataagcagcattgttaaatagttcttacgcttatacattcacagaactaccctgttttccttgtatataatgacttttgctggcagaactgaaatataaactgtaaggggatttcgtcagttgctcccagtatacaatatcctccaggacatagccagaaatctccattccacacatgactgagttcctatccctgcactggtactggctcttttctcctctttccttgcctcagggttcgtgctacccactgattccctttacccttagtaataattttggatcattttctttcctttaaaggggaacaaagccttttttttttttgagacggagtgttgctctgtcacccaagctggagtgcagtggcacgaatcttggctcactccaacctccaccttccaggttcaagtgattctcctgcctcagcctcccgagtagctgggactacgggcacgcaccaccacgtctggctaatttttgtatttttagtagagatggggtttcaccctattggtcaggctggtcttgaattcctcacctcaggtcatccgcctgtctcggcctcccgaagtgctgggattataggtgtgagccaccgcacccagttgggaacaaagcctttttaacacacgtaagggccctcaaaccgtgggacctctaaggagacctttgaagctttttgagggcaaactttacctttgtggtccccaaatgatggcatttctctttgaaatttattagatactgttatgtcccccaagggtacaggaggggcatccctcagcctatgggaacacccaaactaggaggggttattgacaggaaggaatgaatccaagtgaaggctttctgctcttcgtgttacaaaccagtttcagagttagctttctggggaggtgtgtgtttgtgaaaggaattcaagtgttgcaggacagatgagctcaaggtaaggtagctttggcagcagggctgatactatgaggctgaaacaatccttgtgatgaagtagatcatgcagtgacatacaaagaccaaggattatgtatatttttatatctctgtggttttgaaactttagtacttagaattttggccttctgcactactcttttgctcttacgaacataatggactcttaagaatggaaagggatgacatttacctatgtgtgctgcctcattcctggtgaagcaactgctacttgttctctatgcctctaaaatgatgctgttttctctgctaaaggtaaaagaaaagaaaaaaatagttggaaaataagacatgcaacttgatgtgcttttgagtaaatttatgcagcagaaactatacaatgaaggaagaattctatggaaattacaaatccaaaactctatgatgatgtcttcctagggagtagagaaaggcagtgaaatggcagttagaccaacagaggcttgaaggattcaagtacaagtaatattttgtataaaacatagcagtttaggtccccataatcctcaaaaatagtcacaaatataacaaagttcattgttttagggtttttaaaaaacgtgttgtacctaaggccatacttactcttctatgctatcactgcaaaggggtgatatgtatgtattatataaaaaaaaaaacccttaatgcactgttatctcctaaatatttagtaaattaatactatttaatttttttaaagatttgtctgtgtagacactaaaagtattacacaaaatctggactgaaggtgtcctttttaacaacaatttaaagtactttttatatatgttatgtagtatatcctttctaaactgcctagtttgtatattcctataattcctatttgtgaagtgtacctgttcttgtctcttttttcagtcattttctgcacgcatccccctttatatggttatagagatgactgtagcttttcgtgctccactgcgaggtttgtgctcagagccgctgcaccccagcgaggcctgctccatggagtgcaggacgagctactgctttggagcgagggtttcctgcttttgagttgacctgacttccttcttgaaatgactgttaaaactaaaataaattacattgcatttattttatattcttggttgaaataaaatttaattgactttg

SEQ ID NO: 354637 - DNA, 4972 bp, Homo sapiens
tgtggccgccgaggagtcccttgctgaaggcggaccgcggagcggcgggcggcgggcggcgcgcgcgcgcgcgcgagaggcggctgttggagaagtggagcggcggtcgcggggggaggaggaggagggactgagcggcggcggcccccgcgtcccgtgcctctatgggggaagcagacaatggattatgatttcaaggcgaagctggcggcggagcgggagcgggtggaggatttgtttgagtacgaagggtgcaaagtgggacgcggcacctacggtcacgtctacaaggcgaggcggaaagatggaaaagatgaaaaggaatatgcattgaagcaaattgaaggcacaggaatatccatgtcggcttgtagagagattgcacttttgcgagaattgaagcaccctaatgtgattgcattgcagaaggtgttcctttctcacagtgacaggaaggtatggctgctgtttgattatgcagagcatgacttgtggcatattattaagtttcaccgtgcatcaaaagcaaataaaaagcccatgcagttgccaagatctatggttaaatccttactttaccagattcttgatggtatccattacctccatgcaaattgggtgcttcacagagacttgaaaccagcaaatatcctagtaatgggagaaggtcctgagagggggagagtcaaaatagctgacatgggttttgccagattattcaattctcctctaaagccactagcagatttggatccagtagttgtgacattttggtatcgggctccagaacttttgcttggtgcaaggcattatacaaaggccattgatatatgggcaataggttgtatatttgctgaattgttgacttcggaacctatttttcactgtcgtcaggaagatataaaaacaagcaatccctttcatcatgatcaactggatcggatatttagtgtcatggggtttcctgcagataaagactgggaagatattagaaagatgccagaatatcccacacttcaaaaagactttagaagaacaacgtatgccaacagtagcctcataaagtacatggagaaacacaaggtcaagcctgacagcaaagtgttcctcttgcttcagaaactcctgaccatggatccaaccaagagaattacctcggagcaagctctgcaggatccctattttcaggaggaccctttgccaacattagatgtatttgccggctgccagattccataccccaaacgagaattccttaatgaagatgatcctgaagaaaaaggtgacaagaatcagcaacagcagcagaaccagcatcagcagcccacagcccctccacagcaggcagcagcccctccacaggcgcccccaccacagcagaacagcacccagaccaacgggaccgcaggtggggctggggccggggtcgggggcaccggagcagggttgcagcacagccaggactccagcctgaaccaggtgcctccaaacaagaagccacggctagggccttcaggcgcaaactcaggtggacctgtgatgccctcggattatcagcactccagttctcgcctgaattaccaaagcagcgttcagggatcctctcagtcccagagcacacttggctactcttcctcgtctcagcagagctcacagtaccacccatctcaccaggcccaccggtactgaccagctcccgttgggccaggccagcccagcccagagcacaggctccagcaatatgtctgcattgaaaagaaccaaaaaaatgcaaactatgatgccatttaaaactcatacacatgggaggaaaaccttatatactgagcattgtgcaggactgatagctcttctttattgacttaaagaagattcttgtgaagtttccccagcaccccttccctgcatgtgttccattgtgacttctctgataaagcgtctgatctaatcccagcacttctgtaaccttcagcatttctttgaaggatttcctggtgcacctttctcatgctgtagcaatcactatggtttatcttttcaaagctcttttaataggattttaatgttttagaaacaggattccagtggtgtatagttttatacttcatgaactgatttagcaacacaggtaaaaatgcaccttttaaagcactacgttttcacagacaataactgttctgctcatggaagtcttaaacagaaactgttactgtcccaaagtactttactattacgttcgtatttatctagtttcagggaaggtctaataaaaagacaagcggtgggacagagggaacctacaaccaaaaactgcctagatctttgcagttatgtgctttatgccacgaagaactgaagtatgtggtaatttttatagaatcattcatatggaactgagttcccagcatcatcttattctgaatagcattcagtaattaagaattacaattttaaccttcatgtagctaagtctaccttaaaaagggtttcaagagctttgtacagtctcgatggcccacaccaaaacgctgaagagagtaacaactgcactaggatttctgtaaggagtaattttgatcaaaagacgtgttacttccctttgaaggaaaagtttttagtgtgtattgtacataaagtcggcttctctaaagaaccattggtttcttcacatctgggtctgcgtgagtaactttcttgcataatcaaggttactcaagtagaagcctgaaaattaatctgcttttaaaataaagagcagtgttctccattcgtatttgtattagatatagagtgactatttttaaagcatgttaaaaatttaggttttattcatgtttaaagtatgtattatgtatgcataattttgctgttgttactgaaacttaattctatcaagaatctttttcattgcactgaatgatttcttttgcccctaggagaaaacttaataattgtgcctaaaaactatgggcggatagtataagactatactagacaaagtgaatatttgcatttccattatctatgaattagtggctgagttctttcttagctgctttaaggagcccctcactccccagagtcaaaaggaaatgtaaaaacttagagctcccattgtaatgtaaggggcaagaaatttgtgttcttctgaatgctactagcagcaccagccttgttttaaatgttttcttgagctagaagaaatagctgattattgtatatgcaaattacatgcatttttaaaaactattctttctgaacttatctacctggttatgatactgtgggtccatacacaagtaaaataagattagacagaagccagtatacattttgcactattgatgtgatactgtagccagccaggaccttactgatctcagcataataatgctcactaataatgaagtctgcatagtgacactcatcaagactgaagatgaagcaggttacgtgctccattggaaggagtttctgatagtctcctgctgttttaccccttccattttttaaaataagaaattagcagccctctgcataatgtagctgcctatatgcagttttatcctgtgccctaaagcctcactgtccagagctgttggtcatcagatgcttattgcaccctcaccatgtgcctggtgccctgctgggtagagaacacagaggacagggcatacttcttgtccttaaggagcttgtgatctgtgacagtaagccctcctgggatgtctgtgccatgtgattgacttacaagtgaaactgtcttataatatgaaggtctttttgtttacttctaaacccacttgggtagttactatccccaaatctgttctgtaaataatattatggaagggtttctatgtcagtctaccttagagaaagccagtgattcaatatcacaaaaggcattgacgtatctttgaaatgttcacagcagccttttaacaacaactgggtggtccttgtaggcagaacatactctcctaagtggttgtaggaaattgcaaggaaaatagaaggtctgttcttgctctcaaggaggttacctttaataaaagaagacaaacccagatagatatgtaaaccaaaatactatgccccttaatactttataagcagcattgttaaatagttcttacgcttatacattcacagaactaccctgttttccttgtatataatgacttttgctggcagaactgaaatataaactgtaaggggatttcgtcagttgctcccagtatacaatatcctccaggacatagccagaaatctccattccacacatgactgagttcctatccctgcactggtactggctcttttctcctctttccttgcctcagggttcgtgctacccactgattccctttacccttagtaataattttggatcattttctttcctttaaaggggaacaaagccttttttttttttgagacggagtgttgctctgtcacccaagctggagtgcagtggcacgaatcttggctcactccaacctccaccttccaggttcaagtgattctcctgcctcagcctcccgagtagctgggactacgggcacgcaccaccacgtctggctaatttttgtatttttagtagagatggggtttcaccctattggtcaggctggtcttgaattcctcacctcaggtcatccgcctgtctcggcctcccgaagtgctgggattataggtgtgagccaccgcacccagttgggaacaaagcctttttaacacacgtaagggccctcaaaccgtgggacctctaaggagacctttgaagctttttgagggcaaactttacctttgtggtccccaaatgatggcatttctctttgaaaggatcacccaggccagtctgaggataacaagaatataagagtctgagaagaagggaggttaattaggggttgattgtactagtctagcaagagatgtgcatagctttagactagagtgagaagta

SEQ ID NO: 354638 - DNA, 1843 bp, Homo sapiens
ggaggagtaggctcgctcgggtcctcgccctgcccgcgacctggcgggatgggtgggtcggatcccagtcgggccgtgcccgaggggcgaggcggagggggtcgcggggttgcgtccggacaccgactccgaggggcgcccgttccgcccgcctcccccgcgcggccccgtcgcgtacctcgaactcccgcggcgcagcccggtccgaggcgtcggtcccgtcccagaggggcgccctccgagtgctcggagacggcggggggactcgagttgggaccgcggtggaggaggagtttgtggggtctagtctcttgggggaacgcagcgggcaggcagagctccgctgcggagttgccgctccggccctgggtagtgacggtcgttgtggaacttccaatcggctgagcgcctcgcgggggcggcggtttgaaacctcgccggggagcctgtcgggcgaacgcggcctggggtcctcgccagccccacggctctgacccgctgggcaccgccgcccccagcagcgatctccgcccttcgggctggccggcccgttggcttctctatgcagtcctcccatccctgttgtatgcccggcgtcccgggtttctcattctcacattctgaattgcgtaccttcccccttcgaaggagacctgatgggctagctgcgtttcgcaagcggcaacttaagagttggctgaattctctgctacccaccctttaccttgcagccccttgggtatcttgggtattatgtcctccactccatcctctgccagatgactgtgggctggggcttatggagtacctatattatcaagaacggaatacgaagtgacagagctgggcctgaacctttgttttcctaggagttgagggagaactgtaggaacaccttgggaagcctttactggttgtcctcttaagaagagctggataatgtactgagaatacctgtcctttcttggtcctggagggcagacagcagctacagcaggactggtggaaccagcttcctggcaggaattaccctcccccaaagctagggacccaggaagatgccctgtccagcatagactttaaagagagtcaaactctacggaagaggattgtaacggaccatttctgaataaagtgatgatcagccacaatgacattagtaaaatttgaagtgccgcttatctttgtgcgtgctgttataatttgatgtggttggtatatgaactctaggactaaagtacgttgtgtgcgtatgcactaacttcataaaacaactctattataaagtgttttgtcataaggtatcgtgaaaattgcaaagtgctatccaagtgtaaaggattattattattgcagaattttttttttcttttgtaactgaacaggccttaaggtactcagttgtttctcataattcctttaattaccaggtgtccttgaatgcttatcatggaatgtgagatactataattaacatattttggttttggaatatccactccacctgttatactagtgttcttgtgggaattttatcagttatatttggggaaagcacatccagttttccgtttggacattgttaataaatctgaggtgggtttttcccatactcctcatgctaactttgtggtatacttttggttttaaaaaatgtatcttagtgttttttttgttaaaatagctttcttttattagggaacttttgagaagttaaaaattctgcttctgaattgtatttgaatagtatgggcttacaacaaaaaccagataattcttgcttctattctttttgaatatttttcccctctaataaagtacttgattcgaatacacttccttt

SEQ ID NO: 354639 - DNA, 682 bp, Homo sapiens
ctgccacgagtgagacaggtgcttctgtttccactcggggcagccacttcgtgggcagcgctgcccacgaagtggctgtgggcaagtccttcaccattgagtgcagggtgcccaccgtggagcccctggacagcctcaccctcttcctgttccgtggcaatgagactctgcactatgagaccttcgggaaggcagcccctgctccgcaggaggccacagccacattcaacagcacggctgacagagaggatggccaccgcaacttctcctgcctggctgtgctggacttgatgtctcgcggtggcaacatctttcacaaacactcagccccgaagatgttggagatctatgagcctgtgtcggacagccagatggtcatcatagtcacggtggtgtcggtgttgctgtccctgttcgtgacatctgtcctgctctgcttcatcttcggccagcacttgcgccagcagcggatgggcacctacggggtgcgagcggcttggaggaggctgccccaggccttccggccatagcaaccatgagtggcatggccaccaccacggtggtcactggaactcagtgtgactcctcagggttgaggtccagccctggctgaaggactgtgacaggcagcagagacttgggacattgccttttctagcccgaatacaaacacctggactta

SEQ ID NO: 354640 - DNA, 1215 bp, Homo sapiens
gaagactgaataagccgtgaactgggcagctgtgacacgcgcaccttgtcaccttgtcaccaatttcctgcccgggatcccagagctacccttcttggagcccacaggggaataaagtgaaacacctcaggctccaaccctcccaacccaaggctccctcctggagggagagagaggatggaggacatcaggcagcccttggctggtccctgcgagcccgtggagactgccagagatgtcctctttcggttacaggaccctgactgtggccctcttcaccctgatctgctgtccaggatcggatgagaaggtattcgaggtacacgtgaggccaaagaagctggcggttgagcccaaagggtccctcgaggtcaactgcagcaccacctgtaaccagcctgaagtgggtggtctggagacctctctagataagattctgctggacgaacaggctcagtggaaacattacttggtctcaaacatctcccatgacacggtcctccaatgccacttcacctgctccgggaagcaggagtcaatgaattccaacgtcagcgtgtaccagcctccaaggcaggtcatcctgacactgcaacccactttggtggctgtgggcaagtccttcaccattgagtgcagggtgcccaccgtggagcccctggacagcctcaccctcttcctgttccgtggcaatgagactctgcactatgagaccttcgggaaggcagcccctgctccgcaggaggccacagccacattcaacagcacggctgacagagaggatggccaccgcaacttctcctgcctggctgtgctggacttgatgtctcgcggtggcaacatctttcacaaacactcagccccgaagatgttggagatctatgagcctgtgtcggacagccagatggtcatcatagtcacggtggtgtcggtgttgctgtccctgttcgtgacatctgtcctgctctgcttcatcttcggccagcacttgcgccagcagcggatgggcacctacggggtgcgagcggcttggaggaggctgccccaggccttccggccatagcaaccatgagtggcatggccaccaccacggtggtcactggaactcagtgtgactcctcagggttgaggtccagccctggctgaaggactgtgacaggcagcagagacttgggacattgccttttctagcccgaatacaaacacctggactta

SEQ ID NO: 354641 - DNA, 1133 bp, Homo sapiens
gaagactgaataagccgtgaactgggcagctgtgacacgcgcaccttgtcaccttgtcaccaatttcctgcccgggatcccagagctacccttcttggagcccacaggggcagcccttggctggtccctgcgagcccgtggagactgccagagatgtcctctttcggttacaggaccctgactgtggccctcttcaccctgatctgctgtccaggatcggatgagaaggtattcgaggtacacgtgaggccaaagaagctggcggttgagcccaaagggtccctcgaggtcaactgcagcaccacctgtaaccagcctgaagtgggtggtctggagacctctctagataagattctgctggacgaacaggctcagtggaaacattacttggtctcaaacatctcccatgacacggtcctccaatgccacttcacctgctccgggaagcaggagtcaatgaattccaacgtcagcgtgtaccagcctccaaggcaggtcatcctgacactgcaacccactttggtggctgtgggcaagtccttcaccattgagtgcagggtgcccaccgtggagcccctggacagcctcaccctcttcctgttccgtggcaatgagactctgcactatgagaccttcgggaaggcagcccctgctccgcaggaggccacagccacattcaacagcacggctgacagagaggatggccaccgcaacttctcctgcctggctgtgctggacttgatgtctcgcggtggcaacatctttcacaaacactcagccccgaagatgttggagatctatgagcctgtgtcggacagccagatggtcatcatagtcacggtggtgtcggtgttgctgtccctgttcgtgacatctgtcctgctctgcttcatcttcggccagcacttgcgccagcagcggatgggcacctacggggtgcgagcggcttggaggaggctgccccaggccttccggccatagcaaccatgagtggcatggccaccaccacggtggtcactggaactcagtgtgactcctcagggttgaggtccagccctggctgaaggactgtgacaggcagcagagacttgggacattgccttttctagcccgaatacaaacacctggactta

SEQ ID NO: 354642 - DNA, 1223 bp, Homo sapiens
gactgggttatgccctgcttatcagcagcttcccagcttcctctgcctggattcttagaggcctggggtcctagaacgagctggtgcacgtggcttcccaaagatctctcagataatgagaggaaatgcagtcatcagtttgcagaaggctagggattctgggccatagctcagacctgcgcccaccatctccctccaggcagcccttggctggtccctgcgagcccgtggagactgccagagatgtcctctttcggttacaggaccctgactgtggccctcttcaccctgatctgctgtccaggatcggatgagaaggtattcgaggtacacgtgaggccaaagaagctggcggttgagcccaaagggtccctcgaggtcaactgcagcaccacctgtaaccagcctgaagtgggtggtctggagacctctctagataagattctgctggacgaacaggctcagtggaaacattacttggtctcaaacatctcccatgacacggtcctccaatgccacttcacctgctccgggaagcaggagtcaatgaattccaacgtcagcgtgtaccagcctccaaggcaggtcatcctgacactgcaacccactttggtggctgtgggcaagtccttcaccattgagtgcagggtgcccaccgtggagcccctggacagcctcaccctcttcctgttccgtggcaatgagactctgcactatgagaccttcgggaaggcagcccctgctccgcaggaggccacagccacattcaacagcacggctgacagagaggatggccaccgcaacttctcctgcctggctgtgctggacttgatgtctcgcggtggcaacatctttcacaaacactcagccccgaagatgttggagatctatgagcctgtgtcggacagccagatggtcatcatagtcacggtggtgtcggtgttgctgtccctgttcgtgacatctgtcctgctctgcttcatcttcggccagcacttgcgccagcagcggatgggcacctacggggtgcgagcggcttggaggaggctgccccaggccttccggccatagcaaccatgagtggcatggccaccaccacggtggtcactggaactcagtgtgactcctcagggttgaggtccagccctggctgaaggactgtgacaggcagcagagacttgggacattgccttttctagcccgaatacaaacacctggactta
